(19) United States
(12) Patent Application Publication
(10) Pub. No.: US 2023/0348939 A1
(43) Pub. Date: Nov. 2, 2023

(54) METHODS AND COMPOSITIONS FOR MODULATING A GENOME

(71) Applicant: FLAGSHIP PIONEERING INNOVATIONS VI, LLC, Cambridge, MA (US)

(72) Inventors: Anne Helen BOTHMER, Cambridge, MA (US); Cecilia Giovanna Silvia COTTA-RAMUSINO, Cambridge, MA (US); William Edward SALOMON, West Roxbury, MA (US); Jacob Rosenblum RUBENS, Cambridge, MA (US); Robert James CITORIK, Somerville, MA (US); Zi Jun WANG, Arlington, MA (US); Kyusik KIM, Worcester, MA (US); Randi Michelle KOTLAR, Arlington, MA (US); Ananya RAY, Melrose, MA (US); Robert Charles ALTSHULER, Newton, MA (US); Sandeep KUMAR, Newton, MA (US); Nathaniel ROQUET, Philadelphia, PA (US); Barrett Ethan STEINBERG, Somerville, MA (US)

(21) Appl. No.: 17/992,519

(22) Filed: Nov. 22, 2022

Related U.S. Application Data
(63) Continuation-in-part of application No. 17/929,116, filed on Sep. 1, 2022.
Application No. 17/929,116 is a continuation of application No. PCT/US2021/020948, filed on Mar. 4, 2021.
(60) Provisional application No. 63/067,828, filed on Aug. 19, 2020.
(60) Provisional application No. 63/035,627, filed on Jun. 5, 2020.
(60) Provisional application No. 62/985,285, filed on Mar. 4, 2020.

(51) Int. Cl. C12N 15/90; C12N 9/12; C12N 9/22

(52) U.S. Cl. CPC C12N 15/907; C12N 9/1276; C12N 9/22; C12N 2310/20

(57) ABSTRACT

Methods and compositions for modulating a target genome are disclosed.

### RELATED APPLICATIONS

[0001] This application is a continuation in part of U.S. application Ser. No. 17/929,116, filed Sep. 1, 2022, which is a continuation of PCT Application No. PCT/US2021/020948, filed Mar. 4, 2021, which claims priority to U.S. Ser. No. 62/985,285, filed Mar. 4, 2020, U.S. Ser. No. 63/035,627, filed Jun. 5, 2020, and U.S. Ser. No. 63/067,828, filed Aug. 19, 2020, the entire contents of each of which is incorporated herein by reference.

### SEQUENCE LISTING

[0002] The instant application contains a Sequence Listing which has been submitted electronically in XML file format and is hereby incorporated by reference in its entirety. Said XML copy, created on Jan. 25, 2023, is named V2065-700630_SL.xml and is 4,783,929 bytes in size.

### BACKGROUND

[0003] Integration of a nucleic acid of interest into a genome occurs at low frequency and with little site specificity, in the absence of a specialized protein to promote the insertion event. Some existing approaches, like CRISPR/Cas9, are more suited for small edits that rely on host repair pathways, and are less effective at integrating longer sequences. Other existing approaches, like Cre/loxP, require a first step of inserting a loxP site into the genome and then a second step of inserting a sequence of interest into the loxP site. There is a need in the art for improved compositions (e.g., proteins and nucleic acids) and methods for inserting, altering, or deleting sequences of interest in a genome.

### SUMMARY OF THE INVENTION

[0004] This disclosure relates to novel compositions, systems and methods for altering a genome at one or more locations in a host cell, tissue or subject, in vivo or in vitro. In particular, the invention features compositions, systems and methods for inserting, altering, or deleting sequences of interest in a host genome.

[0005] Features of the compositions or methods can include one or more of the following enumerated embodiments.

### ENUMERATED EMBODIMENTS

[0006] 1. A system for modifying DNA comprising:
   [0007] (a) a polypeptide or a nucleic acid encoding the polypeptide, wherein the polypeptide comprises (i) a reverse transcriptase (RT) domain, (ii) a DNA-binding domain (DBD); and (iii) an endonuclease domain, e.g., a nickase domain; and
   [0008] (b) a template RNA (or DNA encoding the template RNA) comprising (e.g., from 5′ to 3′) (i) optionally a sequence (e.g., a CRISPR spacer) that binds a target site (e.g., a second strand of a site in a target genome), (ii) optionally a sequence that binds the polypeptide, (iii) a heterologous object sequence, and (iv) a 3′ target homology domain.
[0009] 2. A system for modifying DNA comprising:
   [0010] (a) a polypeptide or a nucleic acid encoding the polypeptide, wherein the polypeptide comprises (i) a reverse transcriptase (RT) domain, (ii) a DNA-binding domain (DBD); and (iii) an endonuclease domain, e.g., a nickase domain; and
   [0011] (b) a template RNA (or DNA encoding the template RNA) comprising (e.g., from 5′ to 3′) (i) optionally a sequence that binds a target site (e.g., a second strand of a site in a target genome), (ii) optionally a sequence that binds the polypeptide, (iii) a heterologous object sequence, and (iv) a 3′ target homology domain;
   [0012] wherein:
   [0013] (i) the polypeptide comprises a heterologous targeting domain (e.g., in the DBD or the endonuclease domain) that binds specifically to a sequence comprised in the target site; and/or
   [0014] (ii) the template RNA comprises a heterologous homology sequence having at least 85%, 90%, 95%, 96%, 97%, 98%, 99%, or 100% homology to a sequence comprised in a target site.
[0015] 3. A system for modifying DNA comprising:
   [0016] (a) a polypeptide or a nucleic acid encoding the polypeptide, wherein the polypeptide comprises (i) a reverse transcriptase (RT) domain, (ii) a DNA-binding domain (DBD); and (iii) an endonuclease domain, e.g., a nickase domain; and
   [0017] (b) a template RNA (or DNA encoding the template RNA) comprising (e.g., from 5′ to 3′) (i) optionally a sequence that binds a target site (e.g., a second strand of a site in a target genome), (ii) optionally a sequence that binds the polypeptide, (iii) a heterologous object sequence, and (iv) a 3′ target homology domain,
   [0018] wherein the RT domain comprises a sequence of Table 1 or 3 or a sequence of a reverse transcriptase domain of Table 2 or a sequence having at least 70%, 75%, 80%, 85%, 90%, 95%, 96%, 97%, 98%, or 99% identity thereto.
[0019] 4. A system for modifying DNA comprising:
   [0020] (a) a polypeptide or a nucleic acid encoding the polypeptide, wherein the polypeptide comprises (i) a reverse transcriptase (RT) domain, (ii) a DNA-binding domain (DBD); and (iii) an endonuclease domain, e.g., a nickase domain; and
   [0021] (b) a template RNA (or DNA encoding the template RNA) comprising (e.g., from 5′ to 3′) (i) optionally a sequence that binds a target site (e.g., a second strand of a site in a target genome), (ii) optionally a sequence that binds the polypeptide, (iii) a heterologous object sequence, and (iv) a 3′ target homology domain,
   [0022] wherein the RT domain comprises a sequence of Table 1 or 3, or a sequence of a reverse transcriptase domain of Table 2,
   [0023] wherein the RT domain further comprises a number of substitutions relative to the natural sequence, e.g., at least 1, 2, 3, 4, 5, 10, 20, 30, 40, 50, 60, 70, 80, 90, or 100 substitutions.
[0024] 5. A system for modifying DNA comprising:
   [0025] (a) a polypeptide or a nucleic acid encoding the polypeptide, wherein the polypeptide comprises (i) a reverse transcriptase (RT) domain, (ii) a DNA-binding domain (DBD); and (iii) an endonuclease domain, e.g., a nickase domain; and
   [0026] (b) a template RNA (or DNA encoding the template RNA) comprising (e.g., from 5′ to 3′) (i) optionally a sequence that binds a target site (e.g., a second strand of a site in a target genome), (ii) optionally a sequence that binds the polypeptide, (iii) a heterologous object sequence, and (iv) a 3′ target homology domain,
   [0027] wherein the system is capable of producing an insertion into the target site of at least 45, 50, 55, 60, 65, 70, 75, 80, 85, 90, 95, or 100 nucleotides.
[0028] 6. A system for modifying DNA comprising:
   [0029] (a) a polypeptide or a nucleic acid encoding the polypeptide, wherein the polypeptide comprises (i) a reverse transcriptase (RT) domain, (ii) a DNA-binding domain (DBD); and (iii) an endonuclease domain, e.g., a nickase domain; and
   [0030] (b) a template RNA (or DNA encoding the template RNA) comprising (e.g., from 5′ to 3′) (i) optionally a sequence that binds a target site (e.g., a second strand of a site in a target genome), (ii) optionally a sequence that binds the polypeptide, (iii) a heterologous object sequence, and (iv) a 3′ target homology domain,
   [0031] wherein the system is capable of producing an insertion into the target site of at least 1, 2, 3, 4, 5, 10, 20, 30, 40, or 44 nucleotides.
[0032] 7. A system for modifying DNA comprising:
   [0033] (a) a polypeptide or a nucleic acid encoding the polypeptide, wherein the polypeptide comprises (i) a reverse transcriptase (RT) domain, (ii) a DNA-binding domain (DBD); and (iii) an endonuclease domain, e.g., a nickase domain; and
   [0034] (b) a template RNA (or DNA encoding the template RNA) comprising (e.g., from 5′ to 3′) (i) optionally a sequence that binds a target site (e.g., a second strand of a site in a target genome), (ii) optionally a sequence that binds the polypeptide, (iii) a heterologous object sequence, and (iv) a 3′ target homology domain,
   [0035] wherein the heterologous object sequence is at least 74, 75, 76, 77, 78, 79, 80, 81, 82, 83, 84, 85, 86, 87, 88, 89, 90, 91, 92, 93, 94, 95, 96, 97, 98, 99, 100, 120, 140, 160, 180, 200, 500, or 1,000 nts in length.
[0036] 8. A system for modifying DNA comprising:
   [0037] (a) a polypeptide or a nucleic acid encoding the polypeptide, wherein the polypeptide comprises (i) a reverse transcriptase (RT) domain, (ii) a DNA-binding domain (DBD); and (iii) an endonuclease domain, e.g., a nickase domain; and
   [0038] (b) a template RNA (or DNA encoding the template RNA) comprising (e.g., from 5′ to 3′) (i) optionally a sequence that binds a target site (e.g., a second strand of a site in a target genome), (ii) optionally a sequence that binds the polypeptide, (iii) a heterologous object sequence, and (iv) a 3′ target homology domain,
   [0039] wherein the heterologous object sequence is at least 1, 2, 3, 4, 5, 10, 20, 30, 40, 50, 60, 70, or 73 nucleotides in length.
[0040] 9. The system of any of the preceding embodiments, wherein one or more of: the RT domain is heterologous to the DBD; the DBD is heterologous to the endonuclease domain; or the RT domain is heterologous to the endonuclease domain.
[0041] 10. A system for modifying DNA comprising:
   [0042] (a) a polypeptide or a nucleic acid encoding the polypeptide, wherein the polypeptide comprises (i) a reverse transcriptase (RT) domain, (ii) a DNA-binding domain (DBD); and (iii) an endonuclease domain, e.g., a nickase domain; and
   [0043] (b) a template RNA (or DNA encoding the template RNA) comprising (e.g., from 5′ to 3′) (i) optionally a sequence that binds a target site (e.g., a second strand of a site in a target genome), (ii) optionally a sequence that binds the polypeptide, (iii) a heterologous object sequence, and (iv) a 3′ target homology domain,
   [0044] wherein the system is capable of producing a deletion into the target site of at least 81, 85, 90, 95, 100, 110, 120, 130, 140, 150, 160, 170, 180, 190, or 200 nucleotides.
[0045] 11. A system for modifying DNA comprising:
   [0046] (a) a polypeptide or a nucleic acid encoding the polypeptide, wherein the polypeptide comprises (i) a reverse transcriptase (RT) domain, (ii) a DNA-binding domain (DBD); and (iii) an endonuclease domain, e.g., a nickase domain; and
   [0047] (b) a template RNA (or DNA encoding the template RNA) comprising (e.g., from 5′ to 3′) (i) optionally a sequence that binds a target site (e.g., a second strand of a site in a target genome), (ii) optionally a sequence that binds the polypeptide, (iii) a heterologous object sequence, and (iv) a 3′ target homology domain,
   [0048] wherein the system is capable of producing a deletion into the target site of at least 1, 2, 3, 4, 5, 10, 20, 30, 40, 50, 60, 70, or 80 nucleotides.
[0049] 12. A system for modifying DNA comprising:
   [0050] (a) a polypeptide or a nucleic acid encoding the polypeptide, wherein the polypeptide comprises (i) a reverse transcriptase (RT) domain, (ii) a DNA-binding domain (DBD); and (iii) an endonuclease domain, e.g., a nickase domain; and
   [0051] (b) a template RNA (or DNA encoding the template RNA) comprising (e.g., from 5′ to 3′) (i) optionally a sequence that binds a target site (e.g., a second strand of a site in a target genome), (ii) optionally a sequence that binds the polypeptide, (iii) a heterologous object sequence, and (iv) a 3′ target homology domain,
   [0052] wherein the system is capable of producing nucleotide substitutions, e.g., transitions and/or transversions, into the target site of at least 1, 2, 3, 4, 5, 6, 7, 8, 9, or 10 nucleotides.
[0053] 13. A system for modifying DNA comprising:
   [0054] (a) a polypeptide or a nucleic acid encoding the polypeptide, wherein the polypeptide comprises (i) a reverse transcriptase (RT) domain, (ii) a DNA-binding domain (DBD); and (iii) an endonuclease domain, e.g., a nickase domain; and
   [0055] (b) a template (or DNA encoding the template RNA) comprising (e.g., from 5′ to 3′) (i) optionally a sequence that binds a target site (e.g., a second strand of a site in a target genome), (ii) optionally a sequence that binds the polypeptide, (iii) a heterologous object sequence, and (iv) a 3′ target homology domain,
   [0056] wherein (a)(ii) and/or (a)(iii) comprises a TAL domain; a zinc finger domain; or a CRISPR/Cas domain chosen from Table 4 or a functional variant (e.g., mutant) thereof.
[0057] 14. A system for modifying DNA comprising:
   [0058] (a) a polypeptide or a nucleic acid encoding the polypeptide, wherein the polypeptide comprises (i) a reverse transcriptase (RT) domain, (ii) a DNA-binding domain (DBD); and (iii) an endonuclease domain, e.g., a nickase domain; and
   [0059] (b) a template RNA (or DNA encoding the template RNA) comprising (e.g., from 5′ to 3′) (i) optionally a sequence (e.g., a CRISPR spacer) that binds a target site (e.g., a second strand of a site in a target genome), (ii) optionally a sequence that binds the polypeptide, (iii) a heterologous object sequence, and (iv) a 3′ target homology domain,
   [0060] wherein the endonuclease domain, e.g., nickase domain, cuts both the first strand and the second strand of the target site DNA, and wherein the cuts are separated from one another by at least 2, 3, 4, 5, 6, 7, 8, 9, 10, 15, 20, or 30 nucleotides.
[0061] 15. A system for modifying DNA comprising:
   [0062] (a) a polypeptide or a nucleic acid encoding the polypeptide, wherein the polypeptide comprises (i) a reverse transcriptase (RT) domain, (ii) a DNA-binding domain (DBD); and (iii) an endonuclease domain, e.g., a nickase domain; and
   [0063] (b) a template RNA (or DNA encoding the template RNA) comprising (e.g., from 5′ to 3′) (i) optionally a sequence that binds a target site (e.g., a second strand of a site in a target genome), (ii) a sequence that specifically binds the RT domain, (iii) a heterologous object sequence, and (iv) a 3′ target homology domain.
[0064] 16. The system of any of the preceding embodiments, wherein the template RNA further comprises a sequence that binds (a)(ii) and/or (a)(iii).
[0065] 17. A system for modifying DNA comprising:
   [0066] (a) a first polypeptide or a nucleic acid encoding the first polypeptide, wherein the first polypeptide comprises (i) a reverse transcriptase (RT) domain and (ii) optionally a DNA-binding domain,
   [0067] (b) a second polypeptide or a nucleic acid encoding the second polypeptide, wherein the second polypeptide comprises (i) a DNA-binding domain (DBD); (ii) an endonuclease domain, e.g., a nickase domain; and
   [0068] (c) a template RNA (or DNA encoding the template RNA) comprising (e.g., from 5′ to 3′) (i) optionally a sequence that binds the second polypeptide (e.g., that binds (b)(i) and/or (b)(ii)), (ii) optionally a sequence that binds the first polypeptide (e.g., that specifically binds the RT domain), (iii) a heterologous object sequence, and (iv) a 3′ target homology domain.
[0069] 18. A system for modifying DNA comprising:
   [0070] (a) a polypeptide or a nucleic acid encoding the polypeptide, wherein the polypeptide comprises (i) a reverse transcriptase (RT) domain, and (ii) a DNA-binding domain (DBD); and (iii) an endonuclease domain, e.g., a nickase domain;
   [0071] (b) a first template RNA (or DNA encoding the RNA) comprising (e.g., from 5′ to 3′) (i) a sequence that binds the polypeptide (e.g., that binds (a)(ii) and/or (a)(iii)) and (ii) a sequence that binds a target site (e.g., a second strand of a site in a target genome), (e.g., wherein the first RNA comprises a gRNA);
   [0072] (c) a second template RNA (or DNA encoding the RNA) comprising (e.g., from 5′ to 3′) (i) optionally a sequence that binds the polypeptide (e.g., that specifically binds the RT domain), (ii) a heterologous object sequence, and (iii) a 3′ target homology domain.
[0073] 19. The system of any of the preceding embodiments, wherein the second template RNA comprises (i).
[0074] 20. The system of any of the preceding embodiments, wherein the first template RNA comprises a first conjugating domain and the second template RNA comprises a second conjugating domain.
[0075] 21. The system of any of the preceding embodiments, wherein the first and second conjugating domains are capable of hybridizing to one another, e.g., under stringent conditions, e.g., wherein the stringent conditions for hybridization includes hybridization in 4× sodium chloride/sodium citrate (SSC), at about 65° C., followed by a wash in 1×SSC, at about 65° C.
[0076] 22. The system of any of the preceding embodiments, wherein the first and second conjugating domains may be joined covalently, e.g., by splint ligation, e.g., by the method described by Moore, M. J., & Query, C. C. Methods in Enzymology, 317, 109-123, 2000.
[0077] 23. The system of any of the preceding embodiments, wherein association of the first conjugating domain and the second conjugating domain colocalizes the first template RNA and the second template RNA.
[0078] 24. The system of any of the preceding embodiments, wherein the reverse transcriptase (RT) domain is from a retrotransposon, or a sequence having at least 85%, 90%, 95%, 96%, 97%, 98%, or 99% identity thereto.
[0079] 25. A system for modifying DNA comprising:
   [0080] (a) a polypeptide or a nucleic acid encoding the polypeptide, wherein the polypeptide comprises (i) a reverse transcriptase (RT) domain from a retrotransposon, or a sequence having at least 85%, 90%, 95%, 96%, 97%, 98%, or 99% identity thereto, (ii) a DNA-binding domain (DBD); and (iii) an endonuclease domain, e.g., a nickase domain; and
   [0081] (b) a template RNA (or DNA encoding the template RNA) comprising (e.g., from 5′ to 3′) (i) optionally a sequence (e.g., a CRISPR spacer) that binds a target site (e.g., a second strand of a site in a target genome), (ii) optionally a sequence that binds the polypeptide, (iii) a heterologous object sequence, and (iv) a 3′ target homology domain.
[0082] 26. The system of any of the preceding embodiments, wherein the template RNA comprises (i).
[0083] 27. The system of any of the preceding embodiments, wherein the template RNA comprises (ii).
[0084] 28. The system of any of the preceding embodiments, wherein the template RNA comprises (i) and (ii).
[0085] 29. The system of any of the preceding embodiments, wherein the reverse transcriptase domain comprises an amino acid sequence according to a reverse transcriptase domain of any of Table 30, Table 31, Table 41, Table 44, or Table 50, or a sequence having at least 70%, 75%, 80%, 85%, 90%, 95%, 96%, 97%, 98%, or 99% identity thereto, or a functional fragment thereof.
[0086] 30. A template RNA (or DNA encoding the template RNA) comprising a targeting domain (e.g., a heterologous targeting domain) that binds specifically to a sequence comprised in the target DNA molecule (e.g., a genomic DNA), a sequence that specifically binds an RT domain of a polypeptide, and a heterologous object sequence.
[0087] 31. A template RNA (or DNA encoding the template RNA) comprising (e.g., from 5′ to 3′) (i) optionally a sequence that binds a target site (e.g., a second strand of a site in a target genome), (ii) optionally a sequence that binds an endonuclease and/or a DNA-binding domain of a polypeptide, (iii) a heterologous object sequence, and (iv) a 3′ target homology domain.
[0088] 32. The template RNA of any of the preceding embodiments, wherein the template RNA comprises (i).
[0089] 33. The template RNA of any of the preceding embodiments, wherein the template RNA comprises (ii).
[0090] 34. A template RNA (or DNA encoding the template RNA) comprising (e.g., from 5′ to 3′) (i) a sequence that binds a target site (e.g., a second strand of a site in a target genome), (ii) a sequence that binds an endonuclease and/or a DNA-binding domain of a polypeptide, (iii) a heterologous object sequence, and (iv) a 3′ target homology domain,
   [0091] wherein (i) comprises a nucleic acid sequence with complementarity to a sequence of a gene of any of Tables 9-12 or with no more than 1, 2, 3, 4, or 5 differences from said sequence having said complementarity.
[0092] 35. A template RNA (or DNA encoding the template RNA) comprising (e.g., from 5′ to 3′) (i) a sequence that binds a target site (e.g., a second strand of a site in a target genome), (ii) a sequence that specifically binds an RT domain of a polypeptide, (iii) a heterologous object sequence, and (iv) a 3′ target homology domain.
[0093] 36. The template RNA of any of the preceding embodiments, further comprising (v) a sequence that binds an endonuclease and/or a DNA-binding domain of a polypeptide (e.g., the same polypeptide comprising the RT domain).
[0094] 37. The template RNA of any of the preceding embodiments, wherein the RT domain comprises a sequence selected of Table 1 or 3 or a sequence of a reverse transcriptase domain of Table 2 or a sequence that has at least 70%, 75%, 80%, 85%, 90%, 95%, 96%, 97%, 98%, or 99% identity thereto.
[0095] 38. The template RNA of any of the preceding embodiments, wherein the RT domain comprises a sequence selected of Table 1 or 3 or a sequence of a reverse transcriptase domain of Table 2, wherein the RT domain further comprises a number of substitutions relative to the natural sequence, e.g., at least 1, 2, 3, 4, 5, 10, 20, 30, 40, 50, 60, 70, 80, 90, or 100 substitutions.
[0096] 39. The template RNA of any of the preceding embodiments, wherein the sequence of (ii) specifically binds the RT domain.
[0097] 40. The template RNA of any of the preceding embodiments, wherein the sequence that specifically binds the RT domain is a sequence, e.g., a UTR sequence, of Table 1 or from a domain of Table 2, or a sequence having at least 70, 75, 80, 85, 90, 95, or 99% identity thereto.
[0098] 41. A template RNA (or DNA encoding the template RNA) comprising from 5′ to 3′: (ii) a sequence that binds an endonuclease and/or a DNA-binding domain of a polypeptide, (i) a sequence that binds a target site (e.g., a second strand of a site in a target genome), (iii) a heterologous object sequence, and (iv) a 3′ target homology domain.
[0099] 42. A template RNA (or DNA encoding the template RNA) comprising from 5′ to 3′: (iii) a heterologous object sequence, (iv) a 3′ target homology domain, (i) a sequence that binds a target site (e.g., a second strand of a site in a target genome), and (ii) a sequence that binds an endonuclease and/or a DNA-binding domain of a polypeptide.
[0100] 43. The system or template RNA of any of the preceding embodiments, wherein the template RNA, first template RNA, or second template RNA comprises a sequence that specifically binds the RT domain.
[0101] 44. The system or template RNA of any of the preceding embodiments, wherein the sequence that specifically binds the RT domain is disposed between (i) and (ii).
[0102] 45. The system or template RNA of any of the preceding embodiments, wherein the sequence that specifically binds the RT domain is disposed between (ii) and (iii).
[0103] 46. The system or template RNA of any of the preceding embodiments, wherein the sequence that specifically binds the RT domain is disposed between (iii) and (iv).
[0104] 47. The system or template RNA of any of the preceding embodiments, wherein the sequence that specifically binds the RT domain is disposed between (iv) and (i).
[0105] 48. The system or template RNA of any of the preceding embodiments, wherein the sequence that specifically binds the RT domain is disposed between (i) and (iii).
[0106] 49. A system for modifying DNA, comprising:
   [0107] (a) a first template RNA (or DNA encoding the first template RNA) comprising (i) sequence that binds an endonuclease domain, e.g., a nickase domain, and/or a DNA-binding domain (DBD) of a polypeptide, and (ii) a sequence that binds a target site (e.g., a second strand of a site in a target genome), (e.g., wherein the first RNA comprises a gRNA);
   [0108] (b) a second template RNA (or DNA encoding the second template RNA) comprising (i) a sequence that specifically binds a reverse transcriptase (RT) domain of a polypeptide (e.g., the polypeptide of (a)), (ii) a heterologous object sequence, and (iii) 3′ target homology domain.
[0109] 50. The system of any of the preceding embodiments, wherein the nucleic acid encoding the first template RNA and the nucleic acid encoding the second template RNA are two separate nucleic acids.
[0110] 51. The system of any of the preceding embodiments, wherein the nucleic acid encoding the first template RNA and the nucleic acid encoding the second template RNA are part of the same nucleic acid molecule, e.g., are present on the same vector.
[0111] 52. The system of any of the preceding embodiments, wherein the system is capable of producing an insertion into the target site of at least 45, 50, 55, 60, 65, 70, 75, 80, 85, 90, 95, or 100 nucleotides.
[0112] 53. The system of any of the preceding embodiments, wherein the heterologous object sequence is at least 74, 75, 76, 77, 78, 79, 80, 81, 82, 83, 84, 85, 86, 87, 88, 89, 90, 91, 92, 93, 94, 95, 96, 97, 98, 99, 100, 120, 140, 160, 180, 200, 500, or 1,000 nts in length.
[0113] 54. The system of any of the preceding embodiments, wherein the system is capable of producing a deletion into the target site of at least 81, 85, 90, 95, 100, 110, 120, 130, 140, 150, 160, 170, 180, 190, or 200 nucleotides.
[0114] 55. The system of any of the preceding embodiments, wherein one or both of the template RNA and the RNA encoding the polypeptide of (a) comprises chemically modified mRNA, e.g., mRNA comprising a chemically modified base, e.g., mRNA comprising 5-methoxyuridine.
[0115] 56. The system of any of the preceding embodiments, wherein one or both of the template RNA and the RNA encoding the polypeptide of (a) comprises chemically modified RNA, e.g., RNA comprising a chemically modified base, e.g., RNA comprising 2′-o-methyl phosphorothioate.
[0116] 57. The system of any of the preceding embodiments, wherein one or both of the template RNA and the RNA encoding the polypeptide of (a) comprises chemically modified RNA, e.g., RNA comprising a chemically modified base, e.g., 2′-o-methyl phosphorothioate, at one or both of the 3, 4, or 5 bases at the 5′ or 3′ end of the RNA.
[0117] 58. A polypeptide or a nucleic acid encoding the polypeptide, wherein the polypeptide comprises (i) a reverse transcriptase (RT) domain, (ii) a DNA-binding domain (DBD); and (iii) an endonuclease domain; wherein the DBD and/or the endonuclease domain comprise a heterologous targeting domain that binds specifically to a sequence comprised in a target DNA molecule (e.g., a genomic DNA).
[0118] 59. A polypeptide or a nucleic acid encoding the polypeptide, wherein the polypeptide comprises (i) a reverse transcriptase (RT) domain, (ii) a DNA-binding domain (DBD); and (iii) an endonuclease domain, e.g., a nickase domain, wherein the RT domain has a sequence of Table 1 or 3 or a sequence of a reverse transcriptase domain of Table 2, or a sequence having at least 70%, 75%, 80%, 85%, 90%, 95%, 96%, 97%, 98%, or 99% identity thereto.
[0119] 60. A polypeptide or a nucleic acid encoding the polypeptide, wherein the polypeptide comprises (i) a reverse transcriptase (RT) domain, (ii) a DNA-binding domain (DBD); and (iii) an endonuclease domain, e.g., a nickase domain, wherein the RT domain has a sequence of Table 1 or 3 or a sequence of a reverse transcriptase domain of Table 2, wherein the RT domain further comprises a number of substitutions relative to the natural sequence, e.g., at least 1, 2, 3, 4, 5, 10, 20, 30, 40, 50, 60, 70, 80, 90, or 100 substitutions.
[0120] 61. The polypeptide of any of the preceding embodiments, wherein the polypeptide is encoded by an mRNA, e.g., a chemically modified mRNA, e.g., an mRNA comprising a chemically modified base, e.g., an mRNA comprising 5-methoxyuridine.
[0121] 62. The polypeptide of any of the preceding embodiments, wherein the polypeptide is encoded by an mRNA, e.g., a chemically modified mRNA, e.g., an mRNA comprising a chemically modified base, e.g., an mRNA comprising N1-Methyl-Psuedouridine.
[0122] 63. A system for modifying DNA, comprising:
   [0123] (a) a first polypeptide or a nucleic acid encoding the polypeptide, wherein the polypeptide comprises a reverse transcriptase (RT) domain, wherein the RT domain has a sequence of Table 1 or 3 or a sequence of a reverse transcriptase domain of Table 2, or a sequence having at least 70%, 75%, 80%, 85%, 90%, 95%, 96%, 97%, 98%, or 99% identity thereto; and optionally a DNA-binding domain (DBD) (e.g., a first DBD); and
   [0124] (b) a second polypeptide or a nucleic acid encoding the polypeptide, wherein the polypeptide comprises (i) a DBD (e.g., a second DBD); and (ii) an endonuclease domain, e.g., a nickase domain.
[0125] 64. A system for modifying DNA, comprising:
   [0126] (a) a first polypeptide or a nucleic acid encoding the polypeptide, wherein the polypeptide comprises a reverse transcriptase (RT) domain, wherein the RT domain has a sequence of Table 1 or 3 or a sequence of a reverse transcriptase domain of Table 2, wherein the RT domain further comprises a number of substitutions relative to the natural sequence, e.g., at least 1, 2, 3, 4, 5, 10, 20, 30, 40, 50, 60, 70, 80, 90, or 100 substitutions; and optionally a DNA-binding domain (DBD) (e.g., a first DBD); and
   [0127] (b) a second polypeptide or a nucleic acid encoding the polypeptide, wherein the polypeptide comprises (i) a DBD (e.g., a second DBD); and (ii) an endonuclease domain, e.g., a nickase domain.
[0128] 65. The system of any of the preceding embodiments, wherein the nucleic acid encoding the first polypeptide and the nucleic acid encoding the second polypeptide are two separate nucleic acids.
[0129] 66. The system of any of the preceding embodiments, wherein the nucleic acid encoding the first polypeptide and the nucleic acid encoding the second polypeptide are part of the same nucleic acid molecule, e.g., are present on the same vector.
[0130] 67. A reaction mixture comprising:
   [0131] a cell and any system, polypeptide, template RNA, or DNA encoding the same of any preceding embodiment.
[0132] 68. A reaction mixture comprising:
   [0133] a DNA comprising a target site and any system, polypeptide, template RNA, or DNA encoding the same of any preceding embodiment.
[0134] 69. A kit comprising:
   [0135] the system, polypeptide, template RNA, or DNA encoding the same of any preceding embodiment;
   [0136] instructions for using the system, polypeptide, template RNA, or DNA encoding the same; and
   [0137] one or both of a cell or a DNA comprising a target site.
[0138] 70. The system, kit, polypeptide, or reaction mixture of any of the preceding embodiments, wherein the DBD comprises a TAL domain.
[0139] 71. The system, kit, polypeptide, or reaction mixture of any of the preceding embodiments, wherein the DBD comprises a zinc finger domain.
[0140] 72. The system, kit, polypeptide, or reaction mixture of any of the preceding embodiments, wherein the DBD comprises a CRISPR/Cas domain.
[0141] 73. The system, kit, polypeptide, or reaction mixture of any of the preceding embodiments, wherein the endonuclease domain is a nickase domain.
[0142] 74. The system, kit, polypeptide, or reaction mixture of any of the preceding embodiments, wherein the endonuclease domain comprises a CRISPR/Cas domain.
[0143] 75. The system, kit, polypeptide, or reaction mixture of any of the preceding embodiments, wherein the CRISPR/Cas domain comprises a domain or polypeptide from Table 4, or a functional variant (e.g., mutant) thereof.
[0144] 76. The system, kit, polypeptide, or reaction mixture of any of the preceding embodiments, wherein the CRISPR/Cas domain comprises a domain or polypeptide from genus/species from Table 4.
[0145] 77. The system, kit, polypeptide, or reaction mixture of any of the preceding embodiments, wherein the endonuclease domain comprises a type IIs nuclease (e.g., FokI), a Holliday Junction resolvase, or a double-stranded DNA nuclease comprising an alteration that abrogates its ability to cut one strand (e.g., transforming the double-stranded DNA nuclease into a nickase).
[0146] 78. The system, kit, polypeptide, or reaction mixture of any of the preceding embodiments, wherein the RT domain comprises a reverse transcriptase or functional fragment or variant thereof chosen from Table 1 or 3 or a sequence of a reverse transcriptase domain of Table 2.
[0147] 79. The system, kit, polypeptide, or reaction mixture of any of the preceding embodiments, wherein the RT domain comprises one or more mutations (e.g., an insertion, deletion, or substitution) relative to a naturally occurring RT domain or an RT domain or functional fragment chosen from Table 1 or 3 or a sequence of a reverse transcriptase domain of Table 2, or sequence listing SEQ ID NO: 1-67 from WO2018089860A1, incorporated herein by reference.
[0148] 80. The system, kit, polypeptide, or reaction mixture of any of the preceding embodiments, wherein the one or more mutations are chosen from D200N, L603W, T330P, D524G, E562Q, D583N, P51L, S67R, E67K, T197A, H204R, E302K, F309N, W313F, L435G, N454K, H594Q, L671P, E69K or D653N in the RT domain of murine leukemia virus reverse transcriptase or a corresponding mutation at a corresponding position of another RT domain.
[0149] 81. The system, kit, polypeptide, or reaction mixture of any of the preceding embodiments, wherein the one or more mutations are chosen from WO2018089860A1, incorporated herein by reference (e.g., a C952S, and/or C956S, and/or C952S, C956S (double mutant), and/or C969S, and/or H970Y, and/or R979Q, and/or R976Q, and/or R1071S, and/or R328A, and/or R329A, and/or Q336A, and/or R328A, R329A, Q336A (triple mutant), and/or G426A, and/or D428A, and/or G426A, D428A (double mutant) mutation, and/or any combination thereof; positions relative to WO2018089860A1 SEQ ID NO: 52), in the RT domain of R2Bm retrotransposase or a corresponding mutation at a corresponding position of another RT domain.
[0150] 82. The system, kit, polypeptide, or reaction mixture of any of the preceding embodiments, wherein the DBD and/or the endonuclease domain (e.g., a CRISPR/Cas domain) comprises a domain or polypeptide from Table 4, or a functional variant (e.g., mutant) thereof.
[0151] 83. The system, kit, polypeptide, or reaction mixture of any of the preceding embodiments, wherein the DBD and/or the endonuclease domain (e.g., CRISPR/Cas domain) comprises a domain or polypeptide from Table 4.
[0152] 84. The system, kit, polypeptide, or reaction mixture of any of the preceding embodiments, wherein the RT domain and the DBD and/or the endonuclease domain (e.g., CRISPR/Cas domain) are fused via a peptide linker, e.g., a linker of Table 42.
[0153] 85. The system, kit, polypeptide, or reaction mixture of any of the preceding embodiments, wherein the linker is about 6-18, 8-16, 10-14, or 12 amino acids in length.
[0154] 86. The system, kit, polypeptide, or reaction mixture of any of the preceding embodiments, wherein the linker is comprises glycine and serine, e.g., wherein the linker comprises solely glycine and serine residues, e.g., wherein the linker comprises a sequence of GSSGSS (SEQ ID NO: 1736).
[0155] 87. The system, kit, polypeptide, or reaction mixture of any of the preceding embodiments, wherein the linker comprises a sequence according Table 42, e.g, linked 10 as disclosed in Table 42 to or a sequence having no more then 1, 2, or 3 substitutions relative thereto.
[0156] 88. The system, kit, polypeptide, or reaction mixture of any of the preceding embodiments, wherein the CRISPR/Cas domain comprises Cas9, e.g., wild-type Cas9 or nickase Cas9.
[0157] 89. The system, kit, polypeptide, or reaction mixture of any of the preceding embodiments, wherein the RT domain is positioned C-terminal of the DBD in the polypeptide.
[0158] 90. The system, kit, polypeptide, or reaction mixture of any of the preceding embodiments, wherein the RT domain is positioned C-terminal of the nickase domain in the polypeptide.
[0159] 91. The system, kit, polypeptide, or reaction mixture of any of the preceding embodiments, wherein the RT domain is positioned N-terminal of the DBD in the polypeptide.
[0160] 92. The system, kit, polypeptide, or reaction mixture of any of the preceding embodiments, wherein the RT domain is positioned N-terminal of the nickase domain in the polypeptide.
[0161] 93. The system, kit, polypeptide, or reaction mixture of any of the preceding embodiments, wherein the polypeptide comprises a linker, e.g., positioned between the RT domain and the DBD or the RT domain and the nickase domain.
[0162] 94. The system, kit, polypeptide, or reaction mixture of any of the preceding embodiments, wherein the linker is between 2-50, e.g., 2-30, amino acids in length.
[0163] 95. The system, kit, polypeptide, or reaction mixture of any of the preceding embodiments, wherein the linker is a flexible linker, e.g., comprising Gly and/or Ser residues.
[0164] 96. The system, kit, template RNA, or reaction mixture of any of the preceding embodiments, wherein the 3′ target homology domain is complementary to a sequence adjacent to a site to be modified by the system, or comprises no more than 1, 2, 3, 4, or 5 mismatches to a sequence complementary to the sequence adjacent to a site to be modified by the system.
[0165] 97. The system, kit, template RNA, or reaction mixture of any of the preceding embodiments, wherein the 3′ target homology domain is more than 4, 5, 6, 7, 8, 9, 10, 11, 12, 13, 14, 15, 16, 17, 18, 19, 20, 21, 22, 23, 24, 25, 26, 27, 28, 29, 30, 35, 40, 45, 50, 55, 60, 65, 70, 75, 80, 85, 90, 95, 100, 110, 120, 130, 140, 150, 160, 170, 180, 190, or 200 nucleotides long, (e.g., 4, 5, 6, 7, 8, 9, 10, 11, 12, 13, 14, 15, 16, 17, 18, 19, 20, 21, 22, 23, 24, 25, 26, 27, 28, 29, or 30 nucleotides long).
[0166] 98. The system, kit, template RNA, or reaction mixture of any of the preceding embodiments, wherein the 3′ target homology domain is no more than 4, 5, 6, 7, 8, 9, 10, 11, 12, 13, 14, 15, 16, 17, 18, 19, 20, 21, 22, 23, 24, 25, 26, 27, 28, 29, 30, 35, 40, 45, 50, 55, 60, 65, 70, 75, 80, 85, 90, 95, 100, 110, 120, 130, 140, 150, 160, 170, 180, 190, or 200 nucleotides long.
[0167] 99. The system, kit, template RNA, or reaction mixture of any of the preceding embodiments, wherein the heterologous object sequence is complementary to a site to be modified by the system except at the position or positions to be modified.
[0168] 100. The system, kit, template RNA, or reaction mixture of any of the preceding embodiments, wherein the heterologous object sequence is complementary to a site to be modified by the system except at positions encoding a sequence to be inserted to the site.
[0169] 101. The system, kit, template RNA, or reaction mixture of any of the preceding embodiments, wherein the heterologous object sequence is complementary to a site to be modified by the system except the heterologous object sequence does not comprise nucleotides encoding a sequence to be deleted at the site.
[0170] 102. The system, kit, template RNA, or reaction mixture of any of the preceding embodiments, wherein the heterologous object sequence is more than 3, 4, 5, 6, 7, 8, 9, 10, 11, 12, 13, 14, 15, 16, 17, 18, 19, 20, 21, 22, 23, 24, 25, 26, 27, 28, 29, or 30 nucleotides long, (e.g., 3, 4, 5, 6, 7, 8, 9, 10, 11, 12, 13, 14, 15, 16, 17, 18, 19, 20, 21, 22, 23, 24, 25, 26, 27, 28, 29, or 30 nucleotides long).
[0171] 103. The system, kit, template RNA, or reaction mixture of any of the preceding embodiments, wherein the heterologous object sequence is no more than 3, 4, 5, 6, 7, 8, 9, 10, 11, 12, 13, 14, 15, 16, 17, 18, 19, 20, 21, 22, 23, 24, 25, 26, 27, 28, 29, or 30 nucleotides long.
[0172] 104. The system, kit, template RNA, or reaction mixture of any of the preceding embodiments, wherein the heterologous object sequence substitutes at least 1, 2, 3, 4, 5, 6, 7, 8, 9, or 10 nucleotides for non-target site nucleotides.
[0173] 105. The system, kit, template RNA, or reaction mixture of any of the preceding embodiments, wherein the heterologous object sequence inserts at least 1, 2, 3, 4, 5, 6, 7, 8, 9, 10, 15, 20, 25, 30, 35, 40, 45, 50, 55, 60, 65, 70, 75, 80, 85, 90, 95, or 100 nucleotides, or at least 0.2, 0.3, 0.4, 0.5, 0.6, 0.7, 0.8, 0.9, 1, 1.5, 2, 2.5, 3, 3.5, 4, 4.5, 5, 5.5, 6, 6.5, 7, 7.5, 8, 8.5, 9, 9.5 or 10 kilobases into the target site.
[0174] 106. The system, kit, template RNA, or reaction mixture of any of the preceding embodiments, wherein the heterologous object sequence deletes at least 1, 2, 3, 4, 5, 6, 7, 8, 9, 10, 15, 20, 25, 30, 35, 40, 45, 50, 55, 60, 65, 70, 75, 80, 81, 85, 90, 95, 100, 110, 120, 130, 140, 150, 160, 170, 180, 190, or 200 nucleotides.
[0175] 107. The system, kit, template RNA, or reaction mixture of any of the preceding embodiments, wherein the heterologous object sequence is separated from the sequence that binds the polypeptide (e.g., that binds the endonuclease domain and/or DBD domain) by at least 1, 2, 3, 4, 5, 6, 7, 8, 9, 10, 15, 20, 25, or 30 nucleotides.
[0176] 108. The system, kit, template RNA, or reaction mixture of any of the preceding embodiments, wherein the sequence that binds the polypeptide (e.g., that binds the endonuclease domain and/or DBD domain) is at least 45, 50, 55, 60, 65, 70, 75, 80, 85, 90, 95, 100, 110, 120, or 130 nucleotides long (and optionally no more than 150, 140, 130, 120, 110, 100, 90, 85, or 80 nucleotides long).
[0177] 109. The system, kit, template RNA, or reaction mixture of any of the preceding embodiments, wherein the sequence that binds the polypeptide binds the endonuclease domain and/or DBD domain.
[0178] 110. The system, kit, template RNA, or reaction mixture of any of the preceding embodiments, wherein the sequence that binds the polypeptide comprises a sequence according to one or both of a predicted 5′ UTR and a predicted 3′ UTR of Table 3 or Table 41, or a sequence having at least 70%, 75%, 80%, 85%, 90%, 95%, 96%, 97%, 98%, or 99% identity thereto, or functional fragment thereof.
[0179] 111. The system, kit, template RNA, or reaction mixture of any of the preceding embodiments, wherein the sequence that binds the polypeptide (e.g., that binds the endonuclease domain and/or DBD domain) comprises a gRNA.
[0180] 112. The system, kit, template RNA, or reaction mixture of any of the preceding embodiments, wherein the sequence that binds a target site (e.g., a second strand of a site in a target genome) is at least 15, 16, 17, 18, 19, 20, 21, 22, 23, 24, 25, 30, 35, 40, 45, 50, 55, 60, 65, 70, 75, 80, 85, 90, 95, 100, 110, 120, or 130 nucleotides long (and optionally no more than 150, 140, 130, 120, 110, 100, 90, 80, 70, 60, 50, 40, 30, 29, 28, 27, 26, 25, 24, 23, 22, 21, or 20 nucleotides long), e.g., is 17, 18, 19, 20, 21, 22, 23, or 24 nucleotides long.
[0181] 113. The system, kit, template RNA, or reaction mixture of any of the preceding embodiments, wherein the sequence that binds a target site is complementary to the second strand of the target site, or comprises no more than 1, 2, 3, 4, or 5 mismatches to a sequence complementary to the second strand of the target site.
[0182] 114. The system, kit, template RNA, or reaction mixture of any of the preceding embodiments, wherein the sequence that binds a target site (e.g., a second strand of a site in a target genome) is separated from the sequence that binds the polypeptide (e.g., that binds the endonuclease domain and/or DBD domain) by at least 1, 2, 3, 4, 5, 6, 7, 8, 9, 10, 15, 20, 25, or 30 nucleotides.
[0183] 115. The system, kit, template RNA, or reaction mixture of any of the preceding embodiments, further comprising a second strand-targeting gRNA that directs the endonuclease domain (e.g., nickase) domain to nick the second strand (e.g., in the target genome).
[0184] 116. The system, kit, template RNA, or reaction mixture of any of the preceding embodiments, wherein the template RNA further comprises the second strand-targeting gRNA.
[0185] 117. The system, kit, template RNA, or reaction mixture of any of the preceding embodiments, wherein the second strand-targeting gRNA is disposed on a separate nucleic acid from the template RNA.
[0186] 118. The system, kit, template RNA, or reaction mixture of any of the preceding embodiments, wherein the gRNA directs the endonuclease domain (e.g., nickase) domain to nick the second strand (e.g., in the target genome) at a site that is at least 10, 15, 20, 25, 30, 35, 40, 45, 50, 55, 60, 65, 70, 75, 80, 85, 90, 95, 100, 105, 110, 115, 120, 125, 130, 135, 140, 145, or 150 nucleotides 5′ or 3′ of the target site modification (e.g., the nick on the first strand).
[0187] 119. The system, kit, template RNA, or reaction mixture of any of the preceding embodiments, wherein the gRNA specifically binds the edited strand.
[0188] 120. The system, method, kit, template RNA, or reaction mixture of any of the preceding embodiments, wherein the polypeptide comprises a heterologous targeting domain that binds specifically to a sequence comprised in the target DNA molecule (e.g., a genomic DNA).
[0189] 121. The system, method, kit, template RNA, or reaction mixture of any of the preceding embodiments, wherein the heterologous targeting domain binds to a different nucleic acid sequence than the unmodified polypeptide.
[0190] 122. The system, method, kit, template RNA, or reaction mixture of any of the preceding embodiments, wherein the polypeptide does not comprise a functional endogenous targeting domain (e.g., wherein the polypeptide does not comprise an endogenous targeting domain).
[0191] 123. The system, method, kit, template RNA, or reaction mixture of any of the preceding embodiments, wherein the heterologous targeting domain comprises a zinc finger (e.g., a zinc finger that binds specifically to the sequence comprised in the target DNA molecule).
[0192] 124. The system, method, kit, template RNA, or reaction mixture of any of the preceding embodiments, wherein the heterologous targeting domain comprises a Cas domain (e.g., a Cas9 domain, or a mutant or variant thereof, e.g., a Cas9 domain that binds specifically to the sequence comprised in the target DNA molecule).
[0193] 125. The system, method, kit, template RNA, or reaction mixture of any of the preceding embodiments, wherein the Cas domain is associated with a guide RNA (gRNA).
[0194] 126. The system, method, kit, template RNA, or reaction mixture of any of the preceding embodiments, wherein the heterologous targeting domain comprises an endonuclease domain (e.g., a heterologous endonuclease domain).
[0195] 127. The system, method, kit, template RNA, or reaction mixture of any of the preceding embodiments, wherein the endonuclease domain comprises a Cas domain (e.g., a Cas9 or a mutant or variant thereof).
[0196] 128. The system, method, kit, template RNA, or reaction mixture of any of the preceding embodiments, wherein the Cas domain is associated with a guide RNA (gRNA).
[0197] 129. The system, method, kit, template RNA, or reaction mixture of any of the preceding embodiments, wherein the endonuclease domain comprises a Fok1 domain.
[0198] 130. The system, method, kit, template RNA, or reaction mixture of any of the preceding embodiments, wherein the template nucleic acid molecule comprises at least one (e.g., one or two) heterologous homology sequence having at least 85%, 90%, 95%, 96%, 97%, 98%, 99%, or 100% homology to a sequence comprised in a target DNA molecule (e.g., a genomic DNA).
[0199] 131. The system, method, kit, template RNA, or reaction mixture of any of the preceding embodiments, wherein one of the at least one heterologous homology sequences is positioned at or within about 1, 2, 3, 4, 5, 6, 7, 8, 9, 10, 15, 20, 25, 30, 35, 40, 45, 50, 60, 70, 80, 90, or 100 nucleotides of the 5′ end of the template nucleic acid molecule.
[0200] 132. The system, method, kit, template RNA, or reaction mixture of any of the preceding embodiments, wherein one of the at least one heterologous homology sequences is positioned at or within about 1, 2, 3, 4, 5, 6, 7, 8, 9, 10, 15, 20, 25, 30, 35, 40, 45, 50, 60, 70, 80, 90, or 100 nucleotides of the 3′ end of the template nucleic acid molecule.
[0201] 133. The system, method, kit, template RNA, or reaction mixture of any of the preceding embodiments, wherein the heterologous homology sequence binds within 1, 2, 3, 4, 5, 6, 7, 8, 9, or 10 nucleotides of a nick site (e.g., produced by a nickase, e.g., an endonuclease domain, e.g., as described herein) in the target DNA molecule.
[0202] 134. The system, method, kit, template RNA, or reaction mixture of any of the preceding embodiments, wherein the heterologous homology sequence has less than 50%, 40%, 30%, 20%, 10%, 5%, 4%, 3%, 2%, or 1% sequence identity with a nucleic acid sequence complementary to an endogenous homology sequence of an unmodified form of the template RNA.
[0203] 135. The system, method, kit, template RNA, or reaction mixture of any of the preceding embodiments, wherein the heterologous homology sequence has having at least 85%, 90%, 95%, 96%, 97%, 98%, 99%, or 100% homology to a sequence of the target DNA molecule that is different the sequence bound by an endogenous homology sequence (e.g., replaced by the heterologous homology sequence).
[0204] 136. The system, method, kit, template RNA, or reaction mixture of any of the preceding embodiments, wherein the heterologous homology sequence comprises a sequence (e.g., at its 3′ end) having at least 85%, 90%, 95%, 96%, 97%, 98%, 99%, or 100% homology to a sequence positioned 5′ to a nick site of the target DNA molecule (e.g., a site nicked by a nickase, e.g., an endonuclease domain as described herein).
[0205] 137. The system, method, kit, template RNA, or reaction mixture of any of the preceding embodiments, wherein the heterologous homology sequence comprises a sequence (e.g., at its 5′ end) suitable for priming target-primed reverse transcription (TPRT) initiation.
[0206] 138. The system, method, kit, template RNA, or reaction mixture of any of any of the preceding embodiments, wherein the heterologous homology sequence has at least 85%, 90%, 95%, 96%, 97%, 98%, 99%, or 100% homology to a sequence positioned within about 1, 2, 3, 4, 5, 6, 7, 8, 9, 10, 15, 20, 25, 30, 35, 40, 45, 50, 60, 70, 80, 90, or 100 nucleotides of (e.g., 3′ relative to) a target insertion site, e.g., for a heterologous object sequence (e.g., as described herein), in the target DNA molecule.
[0207] 139. The system, method, kit, template RNA, or reaction mixture of any of the preceding embodiments, wherein the template nucleic acid molecule comprises a guide RNA (gRNA), e.g., as described herein.
[0208] 140. The system, method, kit, template RNA, or reaction mixture of any of the preceding embodiments, wherein the template nucleic acid molecule comprises a gRNA spacer sequence (e.g., at or within 1, 2, 3, 4, 5, 10, 15, 20, 25, 30, 40, 50, 60, 70, 80, 90, or 100 nucleotides of its 5′ end).
[0209] 141. The system, method, kit, template RNA, or reaction mixture of any of the preceding embodiments, wherein an RNA of the system (e.g., template RNA, the RNA encoding the polypeptide of (a), or an RNA expressed from a heterologous object sequence integrated into a target DNA) comprises a microRNA binding site, e.g., in a 3′ UTR.
[0210] 142. The system, method, kit, template RNA, or reaction mixture of any of the preceding embodiments wherein the microRNA binding site is recognized by a miRNA that is present in a non-target cell type, but that is not present (or is present at a reduced level relative to the non-target cell) in a target cell type.
[0211] 143. The system, method, kit, template RNA, or reaction mixture of any of the preceding embodiments, wherein the miRNA is miR-142, and/or wherein the non-target cell is a Kupffer cell or a blood cell, e.g., an immune cell.
[0212] 144. The system, method, kit, template RNA, or reaction mixture of any of the preceding embodiments, wherein the miRNA is miR-182 or miR-183, and/or wherein the non-target cell is a dorsal root ganglion neuron.
[0213] 145. The system, method, kit, template RNA, or reaction mixture of any of the preceding embodiments, wherein the system comprises a first miRNA binding site that is recognized by a first miRNA (e.g., miR-142) and the system further comprises a second miRNA binding site that is recognized by a second miRNA (e.g., miR-182 or miR-183), wherein the first miRNA binding site and the second miRNA binding site are situated on the same RNA or on different RNAs of the system.
[0214] 146. The system, method, kit, template RNA, or reaction mixture of any of the preceding embodiments, wherein the template RNA comprises at least 2, 3, or 4 miRNA binding sites, e.g., wherein the miRNA binding sites are recognized by the same or different miRNAs.
[0215] 147. The system, method, kit, template RNA, or reaction mixture of any of the preceding embodiments, wherein the RNA encoding the polypeptide of (a) comprises at least 2, 3, or 4 miRNA binding sites, e.g., wherein the miRNA binding sites are recognized by the same or different miRNAs.
[0216] 148. The system, method, kit, template RNA, or reaction mixture of any of the preceding embodiments, wherein the RNA expressed from a heterologous object sequence integrated into a target DNA comprises at least 2, 3, or 4 miRNA binding sites, e.g., wherein the miRNA binding sites are recognized by the same or different miRNAs.
[0217] 149. A system comprising:
   [0218] an mRNA encoding the polypeptide or system of any of the preceding embodiments, and
   [0219] a template RNA of any preceding embodiment.
[0220] 150. The system of any of the preceding embodiments, wherein the mRNA encoding the polypeptide or system of any preceding embodiment and the template RNA of any preceding embodiment are disposed on different nucleic acid molecules.
[0221] 151. A system comprising an RNA molecule comprising:
   [0222] a template RNA (or RNA encoding the template RNA) of any preceding embodiment, and
   [0223] a sequence encoding the system or polypeptide of any preceding embodiment.
[0224] 152. The system of any of the preceding embodiments, wherein the RNA molecule comprises an internal ribosome entry site, e.g., operably linked to the sequence encoding the system or polypeptide.
[0225] 153. The system of any of the preceding embodiments, wherein the RNA molecule comprises a cleavage site, e.g., situated between the template RNA (or RNA encoding the template RNA) and the sequence encoding the system or polypeptide.
[0226] 154. The system or polypeptide of any of the preceding embodiments, wherein the polypeptide comprises a split intein, e.g., two or more (e.g., all) of the RT domain, DBD, endonuclease (e.g., nickase) domain, or combinations thereof are translated as separate proteins which combine into a single polypeptide by protein splicing.
[0227] 155. The system, kit, polypeptide, or reaction mixture of any of the preceding embodiments, wherein the system comprises one or more circular RNA molecules (circRNAs).
[0228] 156. The system, kit, polypeptide, or reaction mixture of any of the preceding embodiments, wherein the circRNA encodes the Gene Writer polypeptide.
[0229] 157. The system of any of the preceding embodiments, wherein the circRNA comprises a template RNA.
[0230] 158. The system, kit, polypeptide, or reaction mixture of any of the preceding embodiments, wherein circRNA is delivered to a host cell.
[0231] 159. The system, kit, polypeptide, or reaction mixture of any of the preceding embodiments, wherein the circRNA is capable of being linearized, e.g., in a host cell, e.g., in the nucleus of the host cell.
[0232] 160. The system, kit, polypeptide, or reaction mixture of any of the preceding embodiments, wherein the circRNA comprises a cleavage site.
[0233] 161. The system, kit, polypeptide, or reaction mixture of any of the preceding embodiments, wherein the circRNA further comprises a second cleavage site.
[0234] 162. The system, kit, polypeptide, or reaction mixture of any of the preceding embodiments, wherein the cleavage site can be cleaved by a ribozyme, e.g., a ribozyme comprised in the circRNA (e.g., by autocleavage).
[0235] 163. The system, kit, polypeptide, or reaction mixture of any of the preceding embodiments, wherein the circRNA comprises a ribozyme sequence.
[0236] 164. The system, kit, polypeptide, or reaction mixture of any of the preceding embodiments, wherein the ribozyme sequence is capable of autocleavage, e.g., in a host cell, e.g., in the nucleus of the host cell.
[0237] 165. The system, kit, polypeptide, or reaction mixture of any of the preceding embodiments, wherein the ribozyme is an inducible ribozyme.
[0238] 166. The system, kit, polypeptide, or reaction mixture of any of the preceding embodiments, wherein the ribozyme is a protein-responsive ribozyme, e.g., a ribozyme responsive to a nuclear protein, e.g., a genome-interacting protein, e.g., an epigenetic modifier, e.g., EZH2.
[0239] 167. The system, kit, polypeptide, or reaction mixture of any of the preceding embodiments, wherein the ribozyme is a nucleic acid-responsive ribozyme.
[0240] 168. The system, kit, polypeptide, or reaction mixture of any of the preceding embodiments, wherein the catalytic activity (e.g., autocatalytic activity) of the ribozyme is activated in the presence of a target nucleic acid molecule (e.g., an RNA molecule, e.g., an mRNA, miRNA, ncRNA, lncRNA, tRNA, snRNA, or mtRNA).
[0241] 169. The system, kit, polypeptide, or reaction mixture of any of the preceding embodiments, wherein the ribozyme is responsive to a target protein (e.g., an MS2 coat protein).
[0242] 170. The system, kit, polypeptide, or reaction mixture of any of the preceding embodiments, wherein the target protein localized to the cytoplasm or localized to the nucleus (e.g., an epigenetic modifier or a transcription factor).
[0243] 171. The system, kit, polypeptide, or reaction mixture of any of the preceding embodiments, wherein the ribozyme comprises the ribozyme sequence of a B2 or ALU retrotransposon, or a nucleic acid sequence having at least 85%, 90%, 95%, 96%, 97%, 98%, or 99% sequence identity thereto.
[0244] 172. The system, kit, polypeptide, or reaction mixture of any of the preceding embodiments, wherein the ribozyme comprises the sequence of a tobacco ringspot virus hammerhead ribozyme, or a nucleic acid sequence having at least 85%, 90%, 95%, 96%, 97%, 98%, or 99% sequence identity thereto.
[0245] 173. The system, kit, polypeptide, or reaction mixture of any of the preceding embodiments, wherein the ribozyme comprises the sequence of a hepatitis delta virus (HDV) ribozyme, or a nucleic acid sequence having at least 85%, 90%, 95%, 96%, 97%, 98%, or 99% sequence identity thereto.
[0246] 174. The system, kit, polypeptide, or reaction mixture of any of the preceding embodiments, wherein the ribozyme is activated by a moiety expressed in a target cell or target tissue.
[0247] 175. The system, kit, polypeptide, or reaction mixture of any of the preceding embodiments, wherein the ribozyme is activated by a moiety expressed in a target subcellular compartment (e.g., a nucleus, nucleolus, cytoplasm, or mitochondria).
[0248] 176. The system, kit, polypeptide, or reaction mixture of any of the preceding embodiments, wherein the ribozyme is comprised in a circular RNA or a linear RNA.
[0249] 177. A system comprising a first circular RNA encoding the polypeptide of a Gene Writing system; and
   [0250] a second circular RNA comprising the template RNA of a Gene Writing system.
[0251] 178. The system of any of the preceding embodiments, wherein the nucleic encoding the polypeptide of (a) comprises a coding sequence that is codon-optimized for expression in human cells.
[0252] 179. The system of any of the preceding embodiments, wherein the template RNA comprises a coding sequence that is codon-optimized for expression in human cells.
[0253] 180. A lipid nanoparticle (LNP) comprising the system, template RNA, polypeptide (or RNA encoding the same), or DNA encoding the system, template RNA, or polypeptide, of any preceding embodiment.
[0254] 181. A system comprising a first lipid nanoparticle comprising the polypeptide (or DNA or RNA encoding the same) of a Gene Writing system (e.g., as described herein); and
   [0255] a second lipid nanoparticle comprising a nucleic acid molecule of a Gene Writing System (e.g., as described herein).
[0256] 182. The system, kit, polypeptide, or reaction mixture of any preceding embodiments, wherein the system, nucleic acid molecule, polypeptide, and/or DNA encoding the same, is formulated as a lipid nanoparticle (LNP).
[0257] 183. The LNP of any of the preceding embodiments, comprising a cationic lipid.
[0258] 184. The LNP of any of the preceding embodiments, wherein the cationic lipid having a following structure:

[chemical structure]

[0259] 185. The LNP of any of the preceding embodiments, further comprising one or more neutral lipid, e.g., DSPC, DPPC, DMPC, DOPC, POPC, DOPE, SM, a steroid, e.g., cholesterol, and/or one or more polymer conjugated lipid, e.g., a pegylated lipid, e.g., PEG-DAG, PEG-PE, PEG-S-DAG, PEG-cer or a PEG dialkyoxypropylcarbamate.
[0260] 186. The system, kit, polypeptide, or reaction mixture of any of the preceding embodiments, wherein the system, polypeptide, and/or DNA encoding the same, is formulated as a lipid nanoparticle (LNP).
[0261] 187. The system, kit, polypeptide, or reaction mixture of any of the preceding embodiments, wherein the lipid nanoparticle (or a formulation comprising a plurality of the lipid nanoparticles) lacks reactive impurities (e.g., aldehydes), or comprises less than a preselected level of reactive impurities (e.g., aldehydes).
[0262] 188. The system, kit, polypeptide, or reaction mixture of any of the preceding embodiments, wherein the lipid nanoparticle (or a formulation comprising a plurality of the lipid nanoparticles) lacks aldehydes, or comprises less than a preselected level of aldehydes.
[0263] 189. The system, kit, polypeptide, or reaction mixture of any of the preceding embodiments, wherein the lipid nanoparticle is comprised in a formulation comprising a plurality of the lipid nanoparticles.
[0264] 190. The system, kit, polypeptide, or reaction mixture of any of the preceding embodiments, wherein the lipid nanoparticle formulation is produced using one or more lipid reagents comprising less than 5%, 4%, 3%, 2%, 1%, 0.9%, 0.8%, 0.7%, 0.6%, 0.5%, 0.4%, 0.3%, 0.2%, or 0.1% total reactive impurity (e.g., aldehyde) content.
[0265] 191. The system, kit, polypeptide, or reaction mixture of any of the preceding embodiments, wherein the lipid nanoparticle formulation is produced using one or more lipid reagents comprising less than 3% total reactive impurity (e.g., aldehyde) content.
[0266] 192. The system, kit, polypeptide, or reaction mixture of any of the preceding embodiments, wherein the lipid nanoparticle formulation is produced using one or more lipid reagents comprising less than 5%, 4%, 3%, 2%, 1%, 0.9%, 0.8%, 0.7%, 0.6%, 0.5%, 0.4%, 0.3%, 0.2%, or 0.1% of any single reactive impurity (e.g., aldehyde) species.
[0267] 193. The system, kit, polypeptide, or reaction mixture of any of the preceding embodiments, wherein the lipid nanoparticle formulation is produced using one or more lipid reagent comprising less than 0.3% of any single reactive impurity (e.g., aldehyde) species.
[0268] 194. The system, kit, polypeptide, or reaction mixture of any of the preceding embodiments, wherein the lipid nanoparticle formulation is produced using one or more lipid reagents comprising less than 0.1% of any single reactive impurity (e.g., aldehyde) species.
[0269] 195. The system, kit, polypeptide, or reaction mixture of any of the preceding embodiments, wherein the lipid nanoparticle formulation comprises less than 5%, 4%, 3%, 2%, 1%, 0.9%, 0.8%, 0.7%, 0.6%, 0.5%, 0.4%, 0.3%, 0.2%, or 0.1% total reactive impurity (e.g., aldehyde) content.
[0270] 196. The system, kit, polypeptide, or reaction mixture of any of the preceding embodiments, wherein the lipid nanoparticle formulation comprises less than 3% total reactive impurity (e.g., aldehyde) content.
[0271] 197. The system, kit, polypeptide, or reaction mixture of an any of the preceding embodiments, wherein the lipid nanoparticle formulation comprises less than 5%, 4%, 3%, 2%, 1%, 0.9%, 0.8%, 0.7%, 0.6%, 0.5%, 0.4%, 0.3%, 0.2%, or 0.1% of any single reactive impurity (e.g., aldehyde) species.
[0272] 198. The system, kit, polypeptide, or reaction mixture of any of the preceding embodiments, wherein the lipid nanoparticle formulation comprises less than 0.3% of any single reactive impurity (e.g., aldehyde) species.
[0273] 199. The system, kit, polypeptide, or reaction mixture of any of the preceding embodiments, wherein the lipid nanoparticle formulation comprises less than 0.1% of any single reactive impurity (e.g., aldehyde) species.
[0274] 200. The system, kit, polypeptide, or reaction mixture of any of the preceding embodiments, wherein one or more, or optionally all, of the lipid reagents used for a lipid nanoparticle as described herein or a formulation thereof comprise less than 5%, 4%, 3%, 2%, 1%, 0.9%, 0.8%, 0.7%, 0.6%, 0.5%, 0.4%, 0.3%, 0.2%, or 0.1% total reactive impurity (e.g., aldehyde) content.
[0275] 201. The system, kit, polypeptide, or reaction mixture of any of the preceding embodiments, wherein one or more, or optionally all, of the lipid reagents used for a lipid nanoparticle as described herein or a formulation thereof comprise less than 3% total reactive impurity (e.g., aldehyde) content.
[0276] 202. The system, kit, polypeptide, or reaction mixture of any of the preceding embodiments, wherein one or more, or optionally all, of the lipid reagents used for a lipid nanoparticle as described herein or a formulation thereof comprise less than 5%, 4%, 3%, 2%, 1%, 0.9%, 0.8%, 0.7%, 0.6%, 0.5%, 0.4%, 0.3%, 0.2%, or 0.1% of any single reactive impurity (e.g., aldehyde) species.
[0277] 203. The system, kit, polypeptide, or reaction mixture of any of the preceding embodiments, wherein one or more, or optionally all, of the lipid reagents used for a lipid nanoparticle as described herein or a formulation thereof comprise less than 0.3% of any single reactive impurity (e.g., aldehyde) species.
[0278] 204. The system, kit, polypeptide, or reaction mixture of any of the preceding embodiments, wherein one or more, or optionally all, of the lipid reagents used for a lipid nanoparticle as described herein or a formulation thereof comprise less than 0.10% of any single reactive impurity (e.g., aldehyde) species.
[0279] 205. The system, kit, polypeptide, or reaction mixture of any of the preceding embodiments, wherein the total aldehyde content and/or quantity of any single reactive impurity (e.g., aldehyde) species is determined by liquid chromatography (LC), e.g., coupled with tandem mass spectrometry (MS/MS), e.g., according to the method described in Example 26.
[0280] 206. The system, kit, polypeptide, or reaction mixture of any of the preceding embodiments, wherein the total aldehyde content and/or quantity of reactive impurity (e.g., aldehyde) species is determined by detecting one or more chemical modifications of a nucleic acid molecule (e.g., as described herein) associated with the presence of reactive impurities (e.g., aldehydes), e.g., in the lipid reagents.
[0281] 207. The system, kit, polypeptide, or reaction mixture of any of the preceding embodiments, wherein the total aldehyde content and/or quantity of aldehyde species is determined by detecting one or more chemical modifications of a nucleotide or nucleoside (e.g., a ribonucleotide or ribonucleoside, e.g., comprised in or isolated from a nucleic acid molecule, e.g., as described herein) associated with the presence of reactive impurities (e.g., aldehydes), e.g., in the lipid reagents, e.g., as described in Example 41.
[0282] 208. The system, kit, polypeptide, or reaction mixture of any of the preceding embodiments, wherein the chemical modifications of a nucleic acid molecule, nucleotide, or nucleoside are detected by determining the presence of one or more modified nucleotides or nucleosides, e.g., using LC-MS/MS analysis, e.g., as described in Example 41.
[0283] 209. A lipid nanoparticle (LNP) comprising the system, polypeptide (or RNA encoding the same), nucleic acid molecule, or DNA encoding the system or polypeptide, of any preceding embodiment.
[0284] 210. A system comprising a first lipid nanoparticle comprising the polypeptide (or DNA or RNA encoding the same) of a Gene Writing system (e.g., as described herein); and
   [0285] a second lipid nanoparticle comprising a nucleic acid molecule of a Gene Writing System (e.g., as described herein).
[0286] 211. The system, kit, polypeptide, or reaction mixture of any preceding embodiment, wherein the system, nucleic acid molecule, polypeptide, and/or DNA encoding the same, is formulated as a lipid nanoparticle (LNP).
[0287] 212. A system comprising:
   [0288] a first lipid nanoparticle comprising the polypeptide (or DNA or RNA encoding the same) of a system or polypeptide of any preceding embodiment; and
   [0289] a second lipid nanoparticle comprising the template RNA (or DNA encoding the same) of a system or template RNA of any preceding embodiment.
[0290] 213. A virus, viral-like particle, fusosome, or virosome comprising the system, template RNA, polypeptide (or RNA encoding the same), or DNA encoding the system, template RNA, or polypeptide, of any preceding embodiment.
[0291] 214. A system comprising:
   [0292] a first virus, viral-like particle, fusosome, or virosome comprising the polypeptide (or DNA or RNA encoding the same) of a system or polypeptide of any preceding embodiment; and
   [0293] a second virus, viral-like particle, or virosome comprising the template RNA (or DNA encoding the same) of a system or template RNA of any preceding embodiment.
[0294] 215. The system, kit, template RNA, or reaction mixture of any of the preceding embodiments, wherein at least 80, 85, 90, 95, 96, 97, 98, or 99% of the template RNA present is greater than 100, 125, 150, 175, or 200 nucleotides long, or at least 0.3, 0.4, 0.5, 0.6, 0.7, 0.8, 0.9, 1, 1.5, 2, 2.5, 3, 3.5, 4, 4.5, 5, 5.5, 6, 6.5, 7, 7.5, 8, 8.5, 9, 9.5 or 10 kilobases long (and optionally less than 15, 10, 5, or 20 kilobases long, or less than 500, 400, 300, or 200 nucleotides long).
[0295] 216. The system, kit, template RNA, or reaction mixture of any of the preceding embodiments, wherein at least 80, 85, 90, 95, 96, 97, 98, or 99% of the template RNA present contains a polyA tail (e.g., a polyA tail that is at least 5, 10, 20, 30, 40, 50, 60, 70, 80, 90, or 100 nucleotides in length (SEQ ID NO: 3663)).
[0296] 217. The system, kit, template RNA, or reaction mixture of any of the preceding embodiments, wherein at least 80, 85, 90, 95, 96, 97, 98, or 99% of the template RNA present contains:
   [0297] a 5′ cap, e.g.: a 7-methylguanosine cap (e.g., a O-Me-m7G cap); a hypermethylated cap analog; an NAD+-derived cap analog (e.g., as described in Kiledjian, Trends in Cell Biology 28, 454-464 (2018)); or a modified, e.g., biotinylated, cap analog (e.g., as described in Bednarek et al., Phil Trans R Soc B 373, 20180167 (2018)), and/or
   [0298] a 3′ feature selected from one or more of: a polyA tail; a 16-nucleotide long stem-loop structure flanked by unpaired 5 nucleotides (e.g., as described by Mannironi et al., Nucleic Acid Research 17, 9113-9126 (1989)); a triple-helical structure (e.g., as described by Brown et al., PNAS 109, 19202-19207 (2012)); a tRNA, Y RNA, or vault RNA structure (e.g., as described by Labno et al., Biochemica et Biophysica Acta 1863, 3125-3147 (2016)); incorporation of one or more deoxyribonucleotide triphosphates (dNTPs), 2′O-Methylated NTPs, or phosphorothioate-NTPs; a single nucleotide chemical modification (e.g., oxidation of the 3′ terminal ribose to a reactive aldehyde followed by conjugation of the aldehyde-reactive modified nucleotide); or chemical ligation to another nucleic acid molecule.
[0299] 218. The system, kit, template RNA, or reaction mixture of any of the preceding embodiments, wherein the template RNA comprises one or more modified nucleotides, e.g., selected from dihydrouridine, inosine, 7-methylguanosine, 5-methylcytidine (5mC), 5′ Phosphate ribothymidine, 2′-O-methyl ribothymidine, 2′-O-ethyl ribothymidine, 2′-fluoro ribothymidine, C-5 propynyl-deoxycytidine (pdC), C-5 propynyl-deoxyuridine (pdU), C-5 propynyl-cytidine (pC), C-5 propynyl-uridine (pU), 5-methyl cytidine, 5-methyl uridine, 5-methyl deoxycytidine, 5-methyl deoxyuridine methoxy, 2,6-diaminopurine, 5′-Dimethoxytrityl-N4-ethyl-2′-deoxycytidine, C-5 propynyl-f-cytidine (pfC), C-5 propynyl-f-uridine (pfU), 5-methyl f-cytidine, 5-methyl f-uridine, C-5 propynyl-m-cytidine (pmC), C-5 propynyl-f-uridine (pmU), 5-methyl m-cytidine, 5-methyl m-uridine, LNA (locked nucleic acid), MGB (minor groove binder) pseudouridine (Ψ), 1-N-methylpseudouridine (1-Me-Ψ), or 5-methoxyuridine (5-MO-U).
[0300] 219. The system, kit, template RNA, or reaction mixture of any of the preceding embodiments, wherein at least 80, 85, 90, 95, 96, 97, 98, or 99% of the template RNA present contains one or more modified nucleotides.
[0301] 220. The system, kit, template RNA, or reaction mixture of any of the preceding embodiments, wherein at least 80, 85, 90, 95, 96, 97, 98, or 99% of the template RNA remains intact (e.g., greater than 100, 125, 150, 175, or 200 nucleotides long, or at least 0.3, 0.4, 0.5, 0.6, 0.7, 0.8, 0.9, 1, 1.5, 2, 2.5, 3, 3.5, 4, 4.5, 5, 5.5, 6, 6.5, 7, 7.5, 8, 8.5, 9, 9.5 or 10 kilobases long) after a stability test.
[0302] 221. The system, kit, or reaction mixture of any of the preceding embodiments, wherein at least 1% of target sites are modified after the system is assayed for potency.
[0303] 222. The system, kit, template RNA, polypeptide, or reaction mixture of any of the preceding embodiments, wherein the system, polypeptide, template RNA, and/or DNA encoding the same, is formulated as a lipid nanoparticle (LNP).
[0304] 223. The system, kit, template RNA, polypeptide, or reaction mixture of any of the preceding embodiments, wherein the DNA encoding the system, polypeptide, and/or template RNA are packaged into a virus, viral-like particle, virosome, liposome, vesicle, exosome, or LNP.
[0305] 224. The system, kit, template RNA, polypeptide, or reaction mixture of any of the preceding embodiments, wherein the DNA encoding the system, template RNA, or polypeptide is packaged into an adeno-associated virus (AAV).
[0306] 225. The system, kit, template RNA, polypeptide, or reaction mixture of any of the preceding embodiments, wherein the system, template RNA, polypeptide, lipid nanoparticle (LNP), virus, viral-like particle, or virosome is free or substantially free of pyrogen, virus, fungus, bacterial pathogen, and/or host cell protein contamination.
[0307] 226. A virus, viral-like particle, or virosome comprising:
   [0308] the system, template RNA, or polypeptide of any of the preceding embodiments, or DNA encoding any of the same, and
   [0309] an adeno-associated virus (AAV) capsid protein.
[0310] 227. The system, kit, template RNA, polypeptide, virus, viral-like particle, or virosome of any of the preceding embodiments, wherein the system, template RNA, and/or polypeptide is active in a target tissue and less active (e.g., not active) in a non-target tissue.
[0311] 228. The system, kit, template RNA, polypeptide, virus, viral-like particle, or virosome of any of the preceding embodiments, further comprising one or more first tissue-specific expression-control sequences specific to the target tissue, wherein the one or more first tissue-specific expression-control sequences specific to the target tissue are in operative association with the template RNA, the polypeptide or nucleic acid encoding the same, or both.
[0312] 229. The system, kit, template RNA, or reaction mixture of any of the preceding embodiments, wherein the endonuclease domain, e.g., nickase domain, nicks the first strand of the target site DNA and nicks the second strand at a site a distance from the first nick.
[0313] 230. The system, kit, template RNA, or reaction mixture of any of the preceding embodiments, wherein the nicks are made in an outward orientation.
[0314] 231. The system, kit, template RNA, or reaction mixture of any of the preceding embodiments, wherein the nicks are made in an outward orientation.
[0315] 232. The system, kit, template RNA, or reaction mixture of any of embany of the preceding embodiments,
   [0316] wherein the sequence that binds a target site specifies the location of the nick to the first strand,
   [0317] wherein the system further comprises an additional nucleic acid comprising a sequence that binds a site a distance from the target site, and wherein the sequence that binds a site a distance from the target site specifies the location of the nick to the second strand.
[0318] 233. The system, kit, template RNA, or reaction mixture of any of the preceding embodiments, wherein the additional nucleic acid further comprises a sequence that binds the polypeptide (e.g., that binds the endonuclease domain and/or DBD), e.g., wherein the additional nucleic acid comprises a gRNA.
[0319] 234. The system, kit, template RNA, or reaction mixture of any of the preceding embodiments, wherein the sequence that binds a site a distance from the target site (e.g., binds to the first strand of a site in a target genome) is at least 15, 16, 17, 18, 19, 20, 21, 22, 23, 24, 25, 30, 35, 40, 45, 50, 55, 60, 65, 70, 75, 80, 85, 90, 95, 100, 110, 120, or 130 nucleotides long (and optionally no more than 150, 140, 130, 120, 110, 100, 90, 80, 70, 60, 50, 40, 30, 29, 28, 27, 26, 25, 24, 23, 22, 21, or 20 nucleotides long), e.g., is 17, 18, 19, 20, 21, 22, 23, or 24 nucleotides long.
[0320] 235. The system, kit, template RNA, or reaction mixture of any of the preceding embodiments, wherein the sequence that binds a site a distance from the target site is complementary to the first strand of the target site, or comprises no more than 1, 2, 3, 4, or 5 mismatches to the first strand of the target site.
[0321] 236. The system, kit, template RNA, or reaction mixture of any of the preceding embodiments, wherein the DBD and/or endonuclease domain comprise a CRISPR/Cas domain.
[0322] 237. The system, kit, template RNA, or reaction mixture of any of the preceding embodiments, wherein the CRISPR/Cas domain and the template RNA bind to the target site, and wherein the first strand of the target site comprises a first PAM site.
[0323] 238. The system, kit, template RNA, or reaction mixture of any of the preceding embodiments, wherein the CRISPR/Cas domain and the additional nucleic acid bind to the site a distance from the target site, and wherein the second strand of the site a distance from the target site comprises a second PAM site.
[0324] 239. The system, kit, template RNA, or reaction mixture of any of the preceding embodiments, wherein the first PAM site and second PAM site are positioned between the location of the nick to the first strand and the location of the nick to the second strand.
[0325] 240. The system, kit, template RNA, or reaction mixture of any of the preceding embodiments, wherein the location of the nick to the first strand and the location of the nick to the second strand are positioned between the first PAM site and second PAM site.
[0326] 241. The system, kit, template RNA, or reaction mixture of an any of the preceding embodiments, further comprising an additional polypeptide comprising an additional DNA-binding domain (DBD) and an additional endonuclease domain, e.g., an additional nickase domain.
[0327] 242. The system, kit, template RNA, or reaction mixture of any of the preceding embodiments, wherein the additional endonuclease domain, e.g., the additional nickase domain, comprises an endonuclease or nickase domain described herein, e.g., a CRISPR/Cas domain, a type IIs nuclease (e.g., FokI), a Holliday Junction resolvase, a meganuclease, or a double-stranded DNA nuclease comprising an alteration that abrogates its ability to nick one strand (e.g., transforming the double-stranded DNA nuclease into a nickase).
[0328] 243. The system, kit, template RNA, or reaction mixture of any of the preceding embodiments, wherein the additional DBD binds a site a distance from the target site.
[0329] 244. The system, kit, template RNA, or reaction mixture of any of the preceding embodiments, wherein the endonuclease domain of (a) or (b) nicks the first strand and the additional endonuclease domain (e.g., additional nickase domain) nicks the second strand.
[0330] 245. The system, kit, template RNA, or reaction mixture of any of the preceding embodiments, wherein the nicks are made in an outward orientation.
[0331] 246. The system, kit, template RNA, or reaction mixture of any of the preceding embodiments, wherein the nicks are made in an inward orientation.
[0332] 247. The system, kit, template RNA, or reaction mixture of any of the preceding embodiments, wherein the DBD and optionally the template RNA (e.g., the sequence that binds the polypeptide) specifies the location of the nick to the first strand, and the additional DBD specifies the location of the nick to the second strand.
[0333] 248. The system, kit, template RNA, or reaction mixture of any of the preceding embodiments, wherein the polypeptide (e.g., the DBD) comprises a TAL effector molecule.
[0334] 249. The system, kit, template RNA, or reaction mixture of any of the preceding embodiments, wherein the polypeptide (e.g., the DBD) comprises a zinc finger molecule.
[0335] 250. The system, kit, template RNA, or reaction mixture of any of the preceding embodiments, wherein the polypeptide (e.g., the DBD) comprises a CRISPR/Cas domain.
[0336] 251. The system, kit, template RNA, or reaction mixture of any of the preceding embodiments, wherein the additional polypeptide (e.g., the additional DBD) comprises a TAL effector molecule.
[0337] 252. The system, kit, template RNA, or reaction mixture of an any of the preceding embodiments, wherein the additional polypeptide (e.g., the additional DBD) comprises a zinc finger molecule.
[0338] 253. The system, kit, template RNA, or reaction mixture of any of the preceding embodiments, wherein the additional polypeptide (e.g., the additional DBD) comprises a CRISPR/Cas domain.
[0339] 254. The system, kit, template RNA, or reaction mixture of any of the preceding embodiments, wherein the polypeptide and the additional polypeptide bind to sites on the target DNA between the location of the nick to the first strand and the location of the nick to the second.
[0340] 255. The system, kit, template RNA, or reaction mixture of any of the preceding embodiments, wherein the location of the nick to the first strand and the location of the nick to the second strand are between the sites where the polypeptide and the additional polypeptide bind to the target DNA.
[0341] 256. The system, kit, template RNA, or reaction mixture of any of the preceding embodiments, wherein, on the target DNA, the location of the nick to the second strand is positioned on the opposite side of the binding sites of the polypeptide and additional polypeptide relative to the location of the nick to the first strand.
[0342] 257. The system, kit, template RNA, or reaction mixture of any of the preceding embodiments, wherein, on the target DNA, the location of the nick to the second strand is positioned on the same side of the binding sites of the polypeptide and additional polypeptide relative to the location of the nick to the first strand.
[0343] 258. The system, kit, template RNA, or reaction mixture of any of the preceding embodiments, wherein the CRISPR/Cas domain of the polypeptide and the template RNA bind to the target site, and wherein the first strand of the target site comprises a PAM site.
[0344] 259. The system, kit, template RNA, or reaction mixture of any of the preceding embodiments, wherein the PAM site and the site at a distance from the target site are positioned between the location of the nick to the first strand and the location of the nick to the second strand.
[0345] 260. The system, kit, template RNA, or reaction mixture of any of the preceding embodiments, wherein the location of the nick to the first strand and the location of the nick to the second strand are positioned between the PAM site and the site at a distance from the target site.
[0346] 261. The system, kit, template RNA, or reaction mixture of any of the preceding embodiments, further comprising an additional nucleic acid (e.g., a gRNA) comprising a sequence that binds a site a distance from the target site, and wherein the sequence that binds a site a distance from the target site specifies the location of the nick to the second strand.
[0347] 262. The system, kit, template RNA, or reaction mixture of any of the preceding embodiments, wherein the additional nucleic acid further comprises a sequence that binds the additional polypeptide (e.g., the CRISPR/Cas domain), e.g., wherein the additional nucleic acid comprises a gRNA.
[0348] 263. The system, kit, template RNA, or reaction mixture of any of the preceding embodiments, wherein the sequence that binds a site a distance from the target site (e.g., to the first strand of a site in a target genome) is at least 15, 16, 17, 18, 19, 20, 21, 22, 23, 24, 25, 30, 35, 40, 45, 50, 55, 60, 65, 70, 75, 80, 85, 90, 95, 100, 110, 120, or 130 nucleotides long (and optionally no more than 150, 140, 130, 120, 110, 100, 90, 80, 70, 60, 50, 40, 30, 29, 28, 27, 26, 25, 24, 23, 22, 21, or 20 nucleotides long), e.g., is 17, 18, 19, 20, 21, 22, 23, or 24 nucleotides long.
[0349] 264. The system, kit, template RNA, or reaction mixture of an any of the preceding embodiments, wherein the sequence that binds a site a distance from the target site is complementary to the first strand of the target site, or comprises no more than 1, 2, 3, 4, or 5 mismatches to the first strand of the target site.
[0350] 265. The system, kit, template RNA, or reaction mixture of any of the preceding embodiments, wherein the site a distance from the target site comprises a PAM site.
[0351] 266. The system, kit, template RNA, or reaction mixture of any of the preceding embodiments, wherein the PAM site and the target site are positioned between the location of the nick to the first strand and the location of the nick to the second strand.
[0352] 267. The system, kit, template RNA, or reaction mixture of any of the preceding embodiments, wherein the location of the nick to the second strand (e.g., relative to the nick to the first strand) is such that DNA polymerization by the RT domain proceeds toward the location of the nick to the second strand.
[0353] 268. The system, kit, template RNA, or reaction mixture of any of the preceding embodiments, wherein the location of the nick to the second strand (e.g., relative to the nick to the first strand) is such that DNA polymerization by the RT domain proceeds away from the location of the nick to the second strand.
[0354] 269. The system, kit, template RNA, or reaction mixture of any of the preceding embodiments, wherein the first nick and the second nick are at least 20, 25, 30, 35, 40, 45, 50, 55, 60, 65, 70, 75, 80, 85, 90, 95, 100, 110, 120, 130, 140, 150, 160, 170, 180, 190, or 200 nucleotides apart.
[0355] 270. The system, kit, template RNA, or reaction mixture of any of the preceding embodiments, wherein the first nick and the second nick are no more than 25, 30, 35, 40, 45, 50, 55, 60, 65, 70, 75, 80, 85, 90, 95, 100, 110, 120, 130, 140, 150, 160, 170, 180, 190, 200, or 250 nucleotides apart.
[0356] 271. The system, kit, template RNA, or reaction mixture of any of the preceding embodiments, wherein the first nick and the second nick are 20-200, 30-200, 40-200, 50-200, 60-200, 70-200, 80-200, 90-200, 100-200, 110-200, 120-200, 130-200, 140-200, 150-200, 160-200, 170-200, 180-200, 190-200, 20-190, 30-190, 40-190, 50-190, 60-190, 70-190, 80-190, 90-190, 100-190, 110-190, 120-190, 130-190, 140-190, 150-190, 160-190, 170-190, 180-190, 20-180, 30-180, 40-180, 50-180, 60-180, 70-180, 80-180, 90-180, 100-180, 110-180, 120-180, 130-180, 140-180, 150-180, 160-180, 170-180, 20-170, 30-170, 40-170, 50-170, 60-170, 70-170, 80-170, 90-170, 100-170, 110-170, 120-170, 130-170, 140-170, 150-170, 160-170, 20-160, 30-160, 40-160, 50-160, 60-160, 70-160, 80-160, 90-160, 100-160, 110-160, 120-160, 130-160, 140-160, 150-160, 20-150, 30-150, 40-150, 50-150, 60-150, 70-150, 80-150, 90-150, 100-150, 110-150, 120-150, 130-150, 140-150, 20-140, 30-140, 40-140, 50-140, 60-140, 70-140, 80-140, 90-140, 100-140, 110-140, 120-140, 130-140, 20-130, 30-130, 40-130, 50-130, 60-130, 70-130, 80-130, 90-130, 100-130, 110-130, 120-130, 20-120, 30-120, 40-120, 50-120, 60-120, 70-120, 80-120, 90-120, 100-120, 110-120, 20-110, 30-110, 40-110, 50-110, 60-110, 70-110, 80-110, 90-110, 100-110, 20-100, 30-100, 40-100, 50-100, 60-100, 70-100, 80-100, 90-100, 20-90, 30-90, 40-90, 50-90, 60-90, 70-90, 80-90, 20-80, 30-80, 40-80, 50-80, 60-80, 70-80, 20-70, 30-70, 40-70, 50-70, 60-70, 20-60, 30-60, 40-60, 50-60, 20-50, 30-50, 40-50, 20-40, 30-40, or 20-30 nucleotides apart.
[0357] 272. The system, kit, template RNA, or reaction mixture of any of the preceding embodiments, wherein the system produces fewer double-stranded breaks (e.g., at least 100, 90, 80, 70, 60, 50, 40, 30, 20, 10, 9, 8, 7, 6, 5, 4, 3, 2, or 1% fewer) when modifying DNA than an otherwise similar system wherein one or more of a PAM site, target site, or site a distance from the target site is not situated between the location of the first strand nick and the location of the second strand nick.
[0358] 273. The system, kit, template RNA, or reaction mixture of any of the preceding embodiments, wherein the system produces fewer double-stranded breaks (e.g., at least 100, 90, 80, 70, 60, 50, 40, 30, 20, 10, 9, 8, 7, 6, 5, 4, 3, 2, or 1% fewer) when modifying DNA than an otherwise similar system wherein the polypeptide and the additional polypeptide bind to sites on the target DNA not between the location of the nick to the first strand and the location of the nick to the second.
[0359] 274. The system, kit, template RNA, or reaction mixture of any of the preceding embodiments, wherein the system produces fewer double-stranded breaks (e.g., at least 100, 90, 80, 70, 60, 50, 40, 30, 20, 10, 9, 8, 7, 6, 5, 4, 3, 2, or 1% fewer) when modifying DNA than an otherwise similar system wherein, on the target DNA, the location of the nick to the second strand and the location of the nick to the first strand are located between the binding sites of the polypeptide and additional polypeptide.
[0360] 275. The system, kit, template RNA, or reaction mixture of any of the preceding embodiments, wherein the system produces fewer double-stranded breaks (e.g., at least 100, 90, 80, 70, 60, 50, 40, 30, 20, 10, 9, 8, 7, 6, 5, 4, 3, 2, or 1% fewer) when modifying DNA than an otherwise similar system wherein the location of the nick to the second strand (e.g., relative to the nick to the first strand) is such that the RT domain initiates reverse transcription away from the location of the nick to the second strand.
[0361] 276. The system, kit, template RNA, or reaction mixture of any of the preceding embodiments, wherein the system produces fewer deletions not encoded by the heterologous object sequence (e.g., at least 100, 90, 80, 70, 60, 50, 40, 30, 20, 10, 9, 8, 7, 6, 5, 4, 3, 2, or 1% fewer) when modifying DNA than an otherwise similar system wherein one or more of a PAM site, target site, or site a distance from the target site is not situated between the location of the first strand nick and the location of the second strand nick, e.g., as measured by PacBio long read sequencing, e.g., as described in Example 29.
[0362] 277. The system, kit, template RNA, or reaction mixture of any of the preceding embodiments, wherein the system produces fewer deletions (e.g., at least 100, 90, 80, 70, 60, 50, 40, 30, 20, 10, 9, 8, 7, 6, 5, 4, 3, 2, or 1% fewer) when modifying DNA than an otherwise similar system wherein the polypeptide and the additional polypeptide bind to sites on the target DNA not between the location of the nick to the first strand and the location of the nick to the second, e.g., as measured by PacBio long read sequencing, e.g., as described in Example 29.
[0363] 278. The system, kit, template RNA, or reaction mixture of any of the preceding embodiments, wherein the system produces fewer deletions not encoded by the heterologous object sequence (e.g., at least 100, 90, 80, 70, 60, 50, 40, 30, 20, 10, 9, 8, 7, 6, 5, 4, 3, 2, or 1% fewer) when modifying DNA than an otherwise similar system wherein, on the target DNA, the location of the nick to the second strand and the location of the nick to the first strand are located between the binding sites of the polypeptide and additional polypeptide, e.g., as measured by PacBio long read sequencing, e.g., as described in Example 29.
[0364] 279. The system, kit, template RNA, or reaction mixture of any of the preceding embodiments, wherein the system produces fewer deletions not encoded by the heterologous object sequence (e.g., at least 100, 90, 80, 70, 60, 50, 40, 30, 20, 10, 9, 8, 7, 6, 5, 4, 3, 2, or 1% fewer) when modifying DNA than an otherwise similar system wherein the location of the nick to the second strand (e.g., relative to the nick to the first strand) is such that the RT domain initiates reverse transcription away from the location of the nick to the second strand, e.g., as measured by PacBio long read sequencing, e.g., as described in Example 29.
[0365] 280. The system, kit, template RNA, or reaction mixture of any of the preceding embodiments, wherein the system produces fewer insertions not encoded by the heterologous object sequence (e.g., at least 100, 90, 80, 70, 60, 50, 40, 30, 20, 10, 9, 8, 7, 6, 5, 4, 3, 2, or 1% fewer) when modifying DNA than an otherwise similar system wherein one or more of a PAM site, target site, or site a distance from the target site is not situated between the location of the first strand nick and the location of the second strand nick, e.g., as measured by PacBio long read sequencing, e.g., as described in Example 29.
[0366] 281. The system, kit, template RNA, or reaction mixture of any of the preceding embodiments, wherein the system produces fewer insertions not encoded by the heterologous object sequence (e.g., at least 100, 90, 80, 70, 60, 50, 40, 30, 20, 10, 9, 8, 7, 6, 5, 4, 3, 2, or 1% fewer) when modifying DNA than an otherwise similar system wherein the polypeptide and the additional polypeptide bind to sites on the target DNA not between the location of the nick to the first strand and the location of the nick to the second, e.g., as measured by PacBio long read sequencing, e.g., as described in Example 29.
[0367] 282. The system, kit, template RNA, or reaction mixture of any of the preceding embodiments, wherein the system produces fewer insertions not encoded by the heterologous object sequence (e.g., at least 100, 90, 80, 70, 60, 50, 40, 30, 20, 10, 9, 8, 7, 6, 5, 4, 3, 2, or 1% fewer) when modifying DNA than an otherwise similar system wherein, on the target DNA, the location of the nick to the second strand and the location of the nick to the first strand are located between the binding sites of the polypeptide and additional polypeptide, e.g., as measured by PacBio long read sequencing, e.g., as described in Example 29.
[0368] 283. The system, kit, template RNA, or reaction mixture of any of the preceding embodiments, wherein the system produces fewer insertions not encoded by the heterologous object sequence (e.g., at least 100, 90, 80, 70, 60, 50, 40, 30, 20, 10, 9, 8, 7, 6, 5, 4, 3, 2, or 1% fewer) when modifying DNA than an otherwise similar system wherein the location of the nick to the second strand (e.g., relative to the nick to the first strand) is such that the RT domain initiates reverse transcription away from the location of the nick to the second strand, e.g., as measured by PacBio long read sequencing, e.g., as described in Example 29.
[0369] 284. The system, kit, template RNA, or reaction mixture of any of the preceding embodiments, wherein the system produces more desired Gene Writing modifications (e.g., at least 500, 400, 300, 200, 100, 90, 80, 70, 60, 50, 40, 30, 20, 10, 9, 8, 7, 6, 5, 4, 3, 2, or 1% more) when modifying DNA than an otherwise similar system wherein one or more of a PAM site, target site, or site a distance from the target site is not situated between the location of the first strand nick and the location of the second strand nick, e.g., as measured by PacBio long read sequencing, e.g., as described in Example 29.
[0370] 285. The system, kit, template RNA, or reaction mixture of any of the preceding embodiments, wherein the system produces more desired Gene Writing modifications (e.g., at least 500, 400, 300, 200, 100, 90, 80, 70, 60, 50, 40, 30, 20, 10, 9, 8, 7, 6, 5, 4, 3, 2, or 1% more) when modifying DNA than an otherwise similar system wherein the polypeptide and the additional polypeptide bind to sites on the target DNA not between the location of the nick to the first strand and the location of the nick to the second, e.g., as measured by PacBio long read sequencing, e.g., as described in Example 29.
[0371] 286. The system, kit, template RNA, or reaction mixture of any of the preceding embodiments, wherein the system produces more desired Gene Writing modifications (e.g., at least 500, 400, 300, 200, 100, 90, 80, 70, 60, 50, 40, 30, 20, 10, 9, 8, 7, 6, 5, 4, 3, 2, or 1% more) when modifying DNA than an otherwise similar system wherein, on the target DNA, the location of the nick to the second strand and the location of the nick to the first strand are located between the binding sites of the polypeptide and additional polypeptide, e.g., as measured by PacBio long read sequencing, e.g., as described in Example 29.
[0372] 287. The system, kit, template RNA, or reaction mixture of any of the preceding embodiments, wherein the system produces more desired Gene Writing modifications (e.g., at least 500, 400, 300, 200, 100, 90, 80, 70, 60, 50, 40, 30, 20, 10, 9, 8, 7, 6, 5, 4, 3, 2, or 1% more) when modifying DNA than an otherwise similar system wherein the location of the nick to the second strand (e.g., relative to the nick to the first strand) is such that the RT domain initiates reverse transcription away from the location of the nick to the second strand, e.g., as measured by PacBio long read sequencing, e.g., as described in Example 29.
[0373] 288. The system, kit, template RNA, or reaction mixture of any of the preceding embodiments, wherein the first nick and the second nick are at least 100, 110, 120, 130, 140, 150, 160, 170, 180, 190, 200, 220, 240, 260, 280, 300, 350, 400, 450, or 500 nucleotides apart, e.g., at least 100 nucleotides apart, (and optionally no more than 500, 400, 300, 200, 190, 180, 170, 160, 150, 140, 130, or 120 nucleotides apart).
[0374] 289. The system, kit, template RNA, or reaction mixture of any of the preceding embodiments, wherein the first nick and the second nick are 100-200, 110-200, 120-200, 130-200, 140-200, 150-200, 160-200, 170-200, 180-200, 190-200, 100-190, 110-190, 120-190, 130-190, 140-190, 150-190, 160-190, 170-190, 180-190, 100-180, 110-180, 120-180, 130-180, 140-180, 150-180, 160-180, 170-180, 100-170, 110-170, 120-170, 130-170, 140-170, 150-170, 160-170, 100-160, 110-160, 120-160, 130-160, 140-160, 150-160, 100-150, 110-150, 120-150, 130-150, 140-150, 100-140, 110-140, 120-140, 130-140, 100-130, 110-130, 120-130, 100-120, 110-120, or 100-110 nucleotides apart.
[0375] 290. The system, kit, template RNA, or reaction mixture of any of the preceding embodiments, wherein the system produces fewer insertions not encoded by the heterologous object sequence (e.g., at least 100, 90, 80, 70, 60, 50, 40, 30, 20, 10, 9, 8, 7, 6, 5, 4, 3, 2, or 1% fewer) when modifying DNA than an otherwise similar system wherein the location of the nick to the second strand is less than 100 nucleotides away from the location of the nick to the first strand (and optionally at least 20, 30, 40, 50, 60, 70, 80, or 90 nucleotides away), e.g., as measured by PacBio long read sequencing, e.g., as described in Example 29.
[0376] 291. The system, kit, template RNA, or reaction mixture of any of the preceding embodiments, wherein the system produces fewer deletions not encoded by the heterologous object sequence (e.g., at least 100, 90, 80, 70, 60, 50, 40, 30, 20, 10, 9, 8, 7, 6, 5, 4, 3, 2, or 1% fewer) when modifying DNA than an otherwise similar system wherein the location of the nick to the second strand is less than 100 nucleotides away from the location of the nick to the first strand (and optionally at least 20, 30, 40, 50, 60, 70, 80, or 90 nucleotides away), e.g., as measured by PacBio long read sequencing, e.g., as described in Example 29.
[0377] 292. Any above-numbered system, which does not comprise DNA, or which does not comprise more than 10%, 5%, 4%, 3%, 2%, or 1% DNA by mass or by molar amount.
[0378] 293. A method of making a system for modifying DNA (e.g., as described herein), the method comprising:
[0379] (a) providing a template nucleic acid (e.g., a template RNA or DNA) comprising a heterologous homology sequence having at least 85%, 90%, 95%, 96%, 97%, 98%, 99%, or 100% homology to a sequence comprised in a target DNA molecule, and/or
[0380] (b) providing a polypeptide of the system (e.g., comprising a DNA-binding domain (DBD) and/or an endonuclease domain) comprising a heterologous targeting domain that binds specifically to a sequence comprised in the target DNA molecule.
[0381] 294. The method of any of the preceding embodiments, wherein:
[0382] (a) comprises introducing into the template nucleic acid (e.g., a template RNA or DNA) a heterologous homology sequence having at least 85%, 90%, 95%, 96%, 97%, 98%, 99%, or 100% homology to the sequence comprised in a target DNA molecule, and/or
[0383] (b) comprises introducing into the polypeptide of the system (e.g., comprising a DNA-binding domain (DBD) and/or an endonuclease domain) the heterologous targeting domain that binds specifically to a sequence comprised in the target DNA molecule.
[0384] 295. The method of any of the preceding embodiments, wherein the introducing of (a) comprises inserting the homology sequence into the template nucleic acid.
[0385] 296. The method of any of the preceding embodiments, wherein the introducing of (a) comprises replacing a segment of the template nucleic acid with the homology sequence.
[0386] 297. The method of any of the preceding embodiments, wherein the introducing of (a) comprises mutating one or more nucleotides (e.g., at least 2, 3, 4, 5, 10, 15, 20, 25, 30, 35, 40, 50, 60, 70, 80, 90, or 100 nucleotides) of the template nucleic acid, thereby producing a segment of the template nucleic acid having the sequence of the homology sequence.
[0387] 298. The method of any of the preceding embodiments, wherein the introducing of (b) comprises inserting the amino acid sequence of the targeting domain into the amino acid sequence of the polypeptide.
[0388] 299. The method of any of the preceding embodiments, wherein the introducing of (b) comprises inserting a nucleic acid sequence encoding the targeting domain into a coding sequence of the polypeptide comprised in a nucleic acid molecule.
[0389] 300. The method of any of the preceding embodiments, wherein the introducing of (b) comprises replacing at least a portion of the polypeptide with the targeting domain.
[0390] 301. The method of any of the preceding embodiments, wherein the introducing of (a) comprises mutating one or more amino acids (e.g., at least 1, 2, 3, 4, 5, 6, 7, 8, 9, 10, 15, 20, 25, 30, 40, 50, 60, 70, 80, 90, 100, 150, 200, 250, 300, 400, 500, or more amino acids) of the polypeptide.
[0391] 302. A method for modifying a target site in genomic DNA in a cell, the method comprising contacting the cell with:
[0392] (a) a polypeptide or a nucleic acid encoding the polypeptide, wherein the polypeptide comprises (i) a reverse transcriptase (RT) domain, (ii) a DNA-binding domain (DBD); and (iii) an endonuclease domain, e.g., a nickase domain; and
   [0393] (b) a template RNA (or DNA encoding the template RNA) comprising (e.g., from 5′ to 3′) (i) optionally a sequence that binds the target site (e.g., a second strand of a site in a target genome), (ii) optionally a sequence that binds the polypeptide, (iii) a heterologous object sequence, and (iv) a 3′ target homology domain,
[0394] wherein:
[0395] (i) the polypeptide comprises a heterologous targeting domain (e.g., in the DBD or the endonuclease domain) that binds specifically to a sequence comprised in or adjacent to the target site of the genomic DNA; and/or
[0396] (ii) the template RNA comprises a heterologous homology sequence having at least 85%, 90%, 95%, 96%, 97%, 98%, 99%, or 100% homology to a sequence comprised in or adjacent to the target site of the genomic DNA;
   [0397] thereby modifying the target site in genomic DNA in a cell.
[0398] 303. A method for manufacturing an template RNA, comprising:
[0399] (a) providing an template RNA of any preceding embodiment, and
[0400] (b) assaying one or more of:
   [0401] (i) the length of the template RNA, e.g., whether the template RNA has a length that is above a reference length or within a reference length range, e.g., whether at least 80, 85, 90, 95, 96, 97, 98, or 99% of the template RNA present is greater than 100, 125, 150, 175, or 200 nucleotides long;
   [0402] (ii) the presence, absence, and/or length of a polyA tail on the template RNA, e.g., whether at least 80, 85, 90, 95, 96, 97, 98, or 99% of the template RNA present contains a polyA tail (e.g., a polyA tail that is at least 5, 10, 20, or 30 nucleotides in length (SEQ ID NO: 3664));
   [0403] (iii) the presence, absence, and/or type of a 5′ cap on the template RNA, e.g., whether at least 80, 85, 90, 95, 96, 97, 98, or 99% of the template RNA present contains a 5′ cap, e.g., whether that cap is a 7-methylguanosine cap, e.g., a O-Me-m7G cap;
[0404] (iv) the presence, absence, and/or type of one or more modified nucleotides (e.g., selected from dihydrouridine, inosine, 7-methylguanosine, 5-methylcytidine (5mC), 5′ Phosphate ribothymidine, 2′-O-methyl ribothymidine, 2′-O-ethyl ribothymidine, 2′-fluoro ribothymidine, C-5 propynyl-deoxycytidine (pdC), C-5 propynyl-deoxyuridine (pdU), C-5 propynyl-cytidine (pC), C-5 propynyl-uridine (pU), 5-methyl cytidine, 5-methyl uridine, 5-methyl deoxycytidine, 5-methyl deoxyuridine methoxy, 2,6-diaminopurine, 5′-Dimethoxytrityl-N4-ethyl-2′-deoxycytidine, C-5 propynyl-f-cytidine (pfC), C-5 propynyl-f-uridine (pfU), 5-methyl f-cytidine, 5-methyl f-uridine, C-5 propynyl-m-cytidine (pmC), C-5 propynyl-f-uridine (pmU), 5-methyl m-cytidine, 5-methyl m-uridine, LNA (locked nucleic acid), MGB (minor groove binder) pseudouridine (Ψ), 1-N-methylpseudouridine (1-Me-Ψ), or 5-methoxyuridine (5-MO-U)) in the template RNA, e.g., whether at least 80, 85, 90, 95, 96, 97, 98, or 99% of the template RNA present contains one or more modified nucleotides;
   [0405] (v) the stability of the template RNA (e.g., over time and/or under a pre-selected condition), e.g., whether at least 80, 85, 90, 95, 96, 97, 98, or 99% of the template RNA remains intact (e.g., greater than 100, 125, 150, 175, or 200 nucleotides long) after a stability test;
   [0406] (vi) the potency of the template RNA in a system for modifying DNA, e.g., whether at least 1% of target sites are modified after a system comprising the template RNA is assayed for potency; or
   [0407] (vii) the presence, absence, and/or level of one or more of a pyrogen, virus, fungus, bacterial pathogen, or host cell protein, e.g., whether the template RNA is free or substantially free of pyrogen, virus, fungus, bacterial pathogen, or host cell protein contamination.
[0408] 304. A method for manufacturing a system for modifying DNA, comprising:
[0409] (a) providing a system for modifying DNA of any preceding embodiment, and
[0410] (b) assaying one or more of:
   [0411] (i) the length of the template RNA, e.g., whether the template RNA has a length that is above a reference length or within a reference length range, e.g., whether at least 80, 85, 90, 95, 96, 97, 98, or 99% of the template RNA present is greater than 100, 125, 150, 175, or 200 nucleotides long;
   [0412] (ii) the presence, absence, and/or length of a polyA tail on the template RNA, e.g., whether at least 80, 85, 90, 95, 96, 97, 98, or 99% of the template RNA present contains a polyA tail (e.g., a polyA tail that is at least 5, 10, 20, or 30 nucleotides in length (SEQ ID NO: 3664));
   [0413] (iii) the presence, absence, and/or type of a 5′ cap on the template RNA, e.g., whether at least 80, 85, 90, 95, 96, 97, 98, or 99% of the template RNA present contains a 5′ cap, e.g., whether that cap is a 7-methylguanosine cap, e.g., a O-Me-m7G cap;
   [0414] (iv) the presence, absence, and/or type of one or more modified nucleotides (e.g., selected from pseudouridine, dihydrouridine, inosine, 7-methylguanosine, 1-N-methylpseudouridine (1-Me-Ψ), 5-methoxyuridine (5-MO-U), 5-methylcytidine (5mC), or a locked nucleotide in the template RNA, e.g., whether at least 80, 85, 90, 95, 96, 97, 98, or 99% of the template RNA present contains one or more modified nucleotides;
   [0415] (v) the stability of the template RNA (e.g., over time and/or under a pre-selected condition), e.g., whether at least 80, 85, 90, 95, 96, 97, 98, or 99% of the template RNA remains intact (e.g., greater than 100, 125, 150, 175, or 200 nucleotides long) after a stability test;
   [0416] (vi) the potency of the template RNA in a system for modifying DNA, e.g., whether at least 1% of target sites are modified after a system comprising the template RNA is assayed for potency;
   [0417] (vii) the length of the polypeptide, first polypeptide, or second polypeptide, e.g., whether the polypeptide, first polypeptide, or second polypeptide has a length that is above a reference length or within a reference length range, e.g., whether at least 80, 85, 90, 95, 96, 97, 98, or 99% of the polypeptide, first polypeptide, or second polypeptide present is greater than 600, 650, 700, 750, 800, 850, 900, 950, 1000, 1050, 1100, 1150, 1200, 1250, 1300, 1350, 1400, 1450, 1500, 1600, 1700, 1800, 1900, or 2000 amino acids long (and optionally, no larger than 2500, 2000, 1500, 1400, 1300, 1200, 1100, 1000, 900, 800, 700, or 600 amino acids long);
   [0418] (viii) the presence, absence, and/or type of post-translational modification on the polypeptide, first polypeptide, or second polypeptide, e.g., whether at least 80, 85, 90, 95, 96, 97, 98, or 99% of the polypeptide, first polypeptide, or second polypeptide contains phosphorylation, methylation, acetylation, myristoylation, palmitoylation, isoprenylation, glipyatyon, or lipoylation;
   [0419] (ix) the presence, absence, and/or type of one or more artificial, synthetic, or non-canonical amino acids (e.g., selected from ornithine, β-alanine, GABA, δ-Aminolevulinic acid, PABA, a D-amino acid (e.g., D-alanine or D-glutamate), aminoisobutyric acid, dehydroalanine, cystathionine, lanthionine, Djenkolic acid, Diaminopimelic acid, Homoalanine, Norvaline, Norleucine, Homonorleucine, homoserine, O-methyl-homoserine and O-ethyl-homoserine, ethionine, selenocysteine, selenohomocysteine, selenomethionine, selenoethionine, tellurocysteine, or telluromethionine) in the polypeptide, first polypeptide, or second polypeptide, e.g., whether at least 80, 85, 90, 95, 96, 97, 98, or 99% of the polypeptide, first polypeptide, or second polypeptide present contains one or more artificial, synthetic, or non-canonical amino acids;
   [0420] (x) the stability of the polypeptide, first polypeptide, or second polypeptide (e.g., over time and/or under a pre-selected condition), e.g., whether at least 80, 85, 90, 95, 96, 97, 98, or 99% of the polypeptide, first polypeptide, or second polypeptide remains intact (e.g., greater than 600, 650, 700, 750, 800, 850, 900, 950, 1000, 1050, 1100, 1150, 1200, 1250, 1300, 1350, 1400, 1450, 1500, 1600, 1700, 1800, 1900, or 2000 amino acids long (and optionally, no larger than 2500, 2000, 1500, 1400, 1300, 1200, 1100, 1000, 900, 800, 700, or 600 amino acids long)) after a stability test;
   [0421] (xi) the potency of the polypeptide, first polypeptide, or second polypeptide in a system for modifying DNA, e.g., whether at least 1% of target sites are modified after a system comprising the polypeptide, first polypeptide, or second polypeptide is assayed for potency; or
   [0422] (xii) the presence, absence, and/or level of one or more of a pyrogen, virus, fungus, bacterial pathogen, or host cell protein, e.g., whether the system is free or substantially free of pyrogen, virus, fungus, bacterial pathogen, or host cell protein contamination.
[0423] 305. A method for modifying a target site in genomic DNA in a cell, the method comprising:
   [0424] contacting the cell with:
      [0425] (a) a polypeptide or a nucleic acid encoding the polypeptide, wherein the polypeptide comprises (i) a reverse transcriptase (RT) domain, (ii) a DNA-binding domain (DBD); and (iii) an endonuclease domain, e.g., a nickase domain; and
      [0426] (b) a template RNA (or DNA encoding the template RNA) comprising (e.g., from 5′ to 3′) (i) optionally a sequence that binds the target site (e.g., a second strand of a site in a target genome), (ii) optionally a sequence that binds the polypeptide, (iii) a heterologous object sequence, and (iv) a 3′ target homology domain,
   [0427] thereby modifying the target site in genomic DNA in a cell.
[0428] 306. A method for modifying a target site in genomic DNA in a cell, the method comprising:
   [0429] contacting the cell with a system, polypeptide, template RNA, or DNA encoding the same of any preceding embodiment,
   [0430] thereby modifying the target site in genomic DNA in a cell.
[0431] 307. The method of any of the preceding embodiments, wherein a system, polypeptide, template RNA, or DNA are delivered to the target site by electroporation, e.g., nucleofection.
[0432] 308. The method of any of the preceding embodiments, which does not comprise contacting the cell with DNA, e.g., or which comprises contacting the cell with a composition that not comprise more than 10%, 5%, 4%, 3%, 2%, or 1% DNA by mass or by molar amount.
[0433] 309. The method of any of the preceding embodiments, which does not comprise contacting the cell with protein, e.g., or which comprises contacting the cell with a composition that not comprise more than 10%, 5%, 4%, 3%, 2%, or 1% protein by mass or by molar amount.
[0434] 310. The method of any of the preceding embodiments, which comprises contacting a target cell or population of target cells with at least two template RNAs and/or at least two GeneWriter polypeptides, such that at least two target sites (a first target site and a second target site) are modified in a target cell.
[0435] 311. The method of any of the preceding embodiments, wherein the first target site and the second site are each independently edited at a frequency of at least 5%, 10%, or 15% of copies of the site in a cell population.
[0436] 312. The method of any of the preceding embodiments, wherein the first target site and the second site are each independently edited at a frequency of at least 50%, 60%, 70%, or 80% of the level of editing obtained in an otherwise similar cell population contacted with an otherwise similar system targeting only one of the target sites.
[0437] 313. The method of any of the preceding embodiments, wherein the resulting cell population comprises no more than 5%, 10%, or 20% unwanted indels compared to the unwanted indels obtained in an otherwise similar cell population contacted with an otherwise similar system targeting only one of the target sites.
[0438] 314. The method of any of the preceding embodiments, wherein the cell is a primary cell.
[0439] 315. The method of any of the preceding embodiments, wherein the cell is a T cell.
[0440] 316. A method for modifying a target site in genomic DNA in a cell, the method comprising:
   [0441] contacting the cell, e.g., by nucleofection or lipid particle delivery, with:
      [0442] (a) a polypeptide or a nucleic acid encoding the polypeptide, wherein the polypeptide comprises (i) a reverse transcriptase (RT) domain, (ii) a DNA-binding domain (DBD); and (iii) an endonuclease domain, e.g., a nickase domain; and
      [0443] (b) a template RNA (or DNA encoding the template RNA) comprising (e.g., from 5′ to 3′) (i) optionally a sequence that binds the target site (e.g., a second strand of a site in a target genome), (ii) optionally a sequence that binds the polypeptide, (iii) a heterologous object sequence, and (iv) a 3′ target homology domain,
   [0444] thereby modifying the target site in genomic DNA in a cell,
   [0445] wherein the cell is euploid, is not immortalized, is part of a tissue, is part of an organism, is a primary cell, is non-dividing, is haploid (e.g., a germline cell), is a non-cancerous polyploid cell, or is from a subject having a genetic disease.
[0446] 317. The method of any of the preceding embodiments, wherein the template RNA comprises (i).
[0447] 318. The method of any of the preceding embodiments, wherein the template RNA comprises (ii).
[0448] 319. The method of any of the preceding embodiments, wherein the template RNA comprises (i) and (ii).
[0449] 320. A method for treating a subject having a disease or condition associated with a genetic defect, the method comprising:
   [0450] administering to the subject:
      [0451] (a) a polypeptide or a nucleic acid encoding the polypeptide, wherein the polypeptide comprises (i) a reverse transcriptase (RT) domain, (ii) a DNA-binding domain (DBD); and (iii) an endonuclease domain, e.g., a nickase domain; and
      [0452] (b) a template RNA (or DNA encoding the template RNA) comprising (e.g., from 5′ to 3′) (i) optionally a sequence that binds the target site (e.g., a second strand of a site in a target genome), (ii) optionally a sequence that binds the polypeptide, (iii) a heterologous object sequence, and (iv) a 3′ target homology domain,
   [0453] thereby treating the subject having a disease or condition associated with a genetic defect.
[0454] 321. The method of any of the preceding embodiments, wherein the template RNA comprises (i).
[0455] 322. The method of any of the preceding embodiments, wherein the template RNA comprises (ii).
[0456] 323. The method of any of the preceding embodiments, wherein the template RNA comprises (i) and (ii).
[0457] 324. A method for treating a subject having a disease or condition associated with a genetic defect, the method comprising:
   [0458] administering to the subject a system, polypeptide, template RNA, or DNA encoding the same of any preceding embodiment,
   [0459] thereby treating the subject having a disease or condition associated with a genetic defect.
[0460] 325. The method of any of the preceding embodiments, wherein the disease or condition associated with a genetic defect is an indication listed in any of Tables 9-12, and/or wherein the genetic defect is a defect in a gene listed in any of Tables 9-12.
[0461] 326. The method of any of the preceding embodiments, wherein the subject is a human patient.

### Definitions

[0462] Domain: The term “domain” as used herein refers to a structure of a biomolecule that contributes to a specified function of the biomolecule. A domain may comprise a contiguous region (e.g., a contiguous sequence) or distinct, non-contiguous regions (e.g., non-contiguous sequences) of a biomolecule. Examples of protein domains include, but are not limited to, an endonuclease domain, a DNA binding domain, a reverse transcription domain; an example of a domain of a nucleic acid is a regulatory domain, such as a transcription factor binding domain.

[0463] Exogenous: As used herein, the term exogenous, when used with reference to a biomolecule (such as a nucleic acid sequence or polypeptide) means that the biomolecule was introduced into a host genome, cell or organism by the hand of man. For example, a nucleic acid that is as added into an existing genome, cell, tissue or subject using recombinant DNA techniques or other methods is exogenous to the existing nucleic acid sequence, cell, tissue or subject.

[0464] First/Second Strand: As used herein, first strand and second strand, as used to describe the individual DNA strands of target DNA, distinguish the two DNA strands based upon which strand the reverse transcriptase domain initiates polymerization, e.g., based upon where target primed synthesis initiates. The first strand refers to the strand of the target DNA upon which the reverse transcriptase domain initiates polymerization, e.g., where target primed synthesis initiates. The second strand refers to the other strand of the target DNA. First and second strand designations do not describe the target site DNA strands in other respects; for example, in some embodiments the first and second strands are nicked by a polypeptide described herein, but the designations ‘first’ and ‘second’ strand have no bearing on the order in which such nicks occur.

[0465] Genomic safe harbor site (GSH site): A genomic safe harbor site is a site in a host genome that is able to accommodate the integration of new genetic material, e.g., such that the inserted genetic element does not cause significant alterations of the host genome posing a risk to the host cell or organism. A GSH site generally meets 1, 2, 3, 4, 5, 6, 7, 8 or 9 of the following criteria: (i) is located >300 kb from a cancer-related gene; (ii) is >300 kb from a miRNA/other functional small RNA; (iii) is >50 kb from a 5′ gene end; (iv) is >50 kb from a replication origin; (v) is >50 kb away from any ultraconservered element; (vi) has low transcriptional activity (i.e. no mRNA+/−25 kb); (vii) is not in copy number variable region; (viii) is in open chromatin; and/or (ix) is unique, with 1 copy in the human genome. Examples of GSH sites in the human genome that meet some or all of these criteria include (i) the adeno-associated virus site 1 (AAVS1), a naturally occurring site of integration of AAV virus on chromosome 19; (ii) the chemokine (C-C motif) receptor 5 (CCR5) gene, a chemokine receptor gene known as an HIV-1 coreceptor; (iii) the human ortholog of the mouse Rosa26 locus; (iv) the rDNA locus. Additional GSH sites are known and described, e.g., in Pellenz et al. epub Aug. 20, 2018 (doi.org/10.1101/396390).

[0466] Heterologous: The term heterologous, when used to describe a first element in reference to a second element means that the first element and second element do not exist in nature disposed as described. For example, a heterologous polypeptide, nucleic acid molecule, construct or sequence refers to (a) a polypeptide, nucleic acid molecule or portion of a polypeptide or nucleic acid molecule sequence that is not native to a cell in which it is expressed, (b) a polypeptide or nucleic acid molecule or portion of a polypeptide or nucleic acid molecule that has been altered or mutated relative to its native state, or (c) a polypeptide or nucleic acid molecule with an altered expression as compared to the native expression levels under similar conditions. For example, a heterologous regulatory sequence (e.g., promoter, enhancer) may be used to regulate expression of a gene or a nucleic acid molecule in a way that is different than the gene or a nucleic acid molecule is normally expressed in nature. In another example, a heterologous domain of a polypeptide or nucleic acid sequence (e.g., a DNA binding domain of a polypeptide or nucleic acid encoding a DNA binding domain of a polypeptide) may be disposed relative to other domains or may be a different sequence or from a different source, relative to other domains or portions of a polypeptide or its encoding nucleic acid. In certain embodiments, a heterologous nucleic acid molecule may exist in a native host cell genome, but may have an altered expression level or have a different sequence or both. In other embodiments, heterologous nucleic acid molecules may not be endogenous to a host cell or host genome but instead may have been introduced into a host cell by transformation (e.g., transfection, electroporation), wherein the added molecule may integrate into the host genome or can exist as extra-chromosomal genetic material either transiently (e.g., mRNA) or semi-stably for more than one generation (e.g., episomal viral vector, plasmid or other self-replicating vector).

[0467] Inverted Terminal Repeats: The term “inverted terminal repeats” or “ITRs” as used herein refers to AAV viral cis-elements named so because of their symmetry. These elements promote efficient multiplication of an AAV genome. It is hypothesized that the minimal elements for ITR function are a Rep-binding site (RBS; 5′-GCGCGCTCGCTCGCTC-3′ (SEQ ID NO: 1538) for AAV2) and a terminal resolution site (TRS; 5′-AGTTGG-3′ for AAV2) plus a variable palindromic sequence allowing for hairpin formation. According to the present invention, an ITR comprises at least these three elements (RBS, TRS and sequences allowing the formation of an hairpin). In addition, in the present invention, the term “ITR” refers to ITRs of known natural AAV serotypes (e.g. ITR of a serotype 1, 2, 3, 4, 5, 6, 7, 8, 9, 10 or 11 AAV), to chimeric ITRs formed by the fusion of ITR elements derived from different serotypes, and to functional variant thereof. By functional variant of an ITR, it is referred to a sequence presenting a sequence identity of at least 80%, 85%, 90%, preferably of at least 95% with a known ITR, allowing multiplication of the sequence that includes said ITR in the presence of Rep proteins.

[0468] Mutation or Mutated: The term “mutated” when applied to nucleic acid sequences means that nucleotides in a nucleic acid sequence may be inserted, deleted or changed compared to a reference (e.g., native) nucleic acid sequence. A single alteration may be made at a locus (a point mutation) or multiple nucleotides may be inserted, deleted or changed at a single locus. In addition, one or more alterations may be made at any number of loci within a nucleic acid sequence. A nucleic acid sequence may be mutated by any method known in the art.

[0469] Nucleic acid molecule: Nucleic acid molecule refers to both RNA and DNA molecules including, without limitation, cDNA, genomic DNA and mRNA, and also includes synthetic nucleic acid molecules, such as those that are chemically synthesized or recombinantly produced, such as RNA templates, as described herein. The nucleic acid molecule can be double-stranded or single-stranded, circular or linear. If single-stranded, the nucleic acid molecule can be the sense strand or the antisense strand. Unless otherwise indicated, and as an example for all sequences described herein under the general format “SEQ. ID NO:,” “nucleic acid comprising SEQ. ID NO: 1” refers to a nucleic acid, at least a portion which has either (i) the sequence of SEQ. ID NO: 1, or (ii) a sequence complimentary to SEQ. ID NO: 1. The choice between the two is dictated by the context in which SEQ. ID NO: 1 is used. For instance, if the nucleic acid is used as a probe, the choice between the two is dictated by the requirement that the probe be complimentary to the desired target. Nucleic acid sequences of the present disclosure may be modified chemically or biochemically or may contain non-natural or derivatized nucleotide bases, as will be readily appreciated by those of skill in the art. Such modifications include, for example, labels, methylation, substitution of one or more naturally occurring nucleotides with an analog, inter-nucleotide modifications such as uncharged linkages (for example, methyl phosphonates, phosphotriesters, phosphoramidates, carbamates, etc.), charged linkages (for example, phosphorothioates, phosphorodithioates, etc.), pendant moieties, (for example, polypeptides), intercalators (for example, acridine, psoralen, etc.), chelators, alkylators, and modified linkages (for example, alpha anomeric nucleic acids, etc.). Also included are synthetic molecules that mimic polynucleotides in their ability to bind to a designated sequence via hydrogen bonding and other chemical interactions. Such molecules are known in the art and include, for example, those in which peptide linkages substitute for phosphate linkages in the backbone of a molecule. Other modifications can include, for example, analogs in which the ribose ring contains a bridging moiety or other structure such as modifications found in “locked” nucleic acids. In various embodiments, the nucleic acids are in operative association with additional genetic elements, such as tissue-specific expression-control sequence(s) (e.g., tissue-specific promoters and tissue-specific microRNA recognition sequences), as well as additional elements, such as inverted repeats (e.g., inverted terminal repeats, such as elements from or derived from viruses, e.g., AAV ITRs) and tandem repeats, inverted repeats/direct repeats (e.g., transposon inverted repeats, e.g., transposon inverted repeats also containing direct repeats, e.g., inverted repeats also containing direct repeats), homology regions (segments with various degrees of homology to a target DNA), UTRs (5′, 3′, or both 5′ and 3′ UTRs), and various combinations of the foregoing. The nucleic acid elements of the systems provided by the invention can be provided in a variety of topologies, including single-stranded, double-stranded, circular, linear, linear with open ends, linear with closed ends, and particular versions of these, such as doggybone DNA (dbDNA), close-ended DNA (ceDNA).

[0470] Gene expression unit: a gene expression unit is a nucleic acid sequence comprising at least one regulatory nucleic acid sequence operably linked to at least one effector sequence. A first nucleic acid sequence is operably linked with a second nucleic acid sequence when the first nucleic acid sequence is placed in a functional relationship with the second nucleic acid sequence. For instance, a promoter or enhancer is operably linked to a coding sequence if the promoter or enhancer affects the transcription or expression of the coding sequence. Operably linked DNA sequences may be contiguous or non-contiguous. Where necessary to join two protein-coding regions, operably linked sequences may be in the same reading frame.

[0471] Host: The terms host genome or host cell, as used herein, refer to a cell and/or its genome into which protein and/or genetic material has been introduced. It should be understood that such terms are intended to refer not only to the particular subject cell and/or genome, but to the progeny of such a cell and/or the genome of the progeny of such a cell. Because certain modifications may occur in succeeding generations due to either mutation or environmental influences, such progeny may not, in fact, be identical to the parent cell, but are still included within the scope of the term “host cell” as used herein. A host genome or host cell may be an isolated cell or cell line grown in culture, or genomic material isolated from such a cell or cell line, or may be a host cell or host genome which composing living tissue or an organism. In some instances, a host cell may be an animal cell or a plant cell, e.g., as described herein. In certain instances, a host cell may be a bovine cell, horse cell, pig cell, goat cell, sheep cell, chicken cell, or turkey cell. In certain instances, a host cell may be a corn cell, soy cell, wheat cell, or rice cell.

[0472] Operative association: As used herein, “operative association” describes a functional relationship between two nucleic acid sequences, such as a 1) promoter and 2) a heterologous object sequence, and means, in such example, the promoter and heterologous object sequence (e.g., a gene of interest) are oriented such that, under suitable conditions, the promoter drives expression of the heterologous object sequence. For instance, the template nucleic acid may be single-stranded, e.g., either the (+) or (−) orientation but an operative association between promoter and heterologous object sequence means whether or not the template nucleic acid will transcribe in a particular state, when it is in the suitable state (e.g., is in the (+) orientation, in the presence of required catalytic factors, and NTPs, etc.), it does accurately transcribe. Operative association applies analogously to other pairs of nucleic acids, including other tissue-specific expression control sequences (such as enhancers, repressors and microRNA recognition sequences), IR/DR, ITRs, UTRs, or homology regions and heterologous object sequences or sequences encoding a transposase.

[0473] Pseudoknot: A “pseudoknot sequence” sequence, as used herein, refers to a nucleic acid (e.g., RNA) having a sequence with suitable self-complementarity to form a pseudoknot structure, e.g., having: a first segment, a second segment between the first segment and a third segment, wherein the third segment is complementary to the first segment, and a fourth segment, wherein the fourth segment is complementary to the second segment. The pseudoknot may optionally have additional secondary structure, e.g., a stem loop disposed in the second segment, a stem-loop disposed between the second segment and third segment, sequence before the first segment, or sequence after the fourth segment. The pseudoknot may have additional sequence between the first and second segments, between the second and third segments, or between the third and fourth segments. In some embodiments, the segments are arranged, from 5′ to 3′: first, second, third, and fourth. In some embodiments, the first and third segments comprise five base pairs of perfect complementarity. In some embodiments, the second and fourth segments comprise 10 base pairs, optionally with one or more (e.g., two) bulges. In some embodiments, the second segment comprises one or more unpaired nucleotides, e.g., forming a loop. In some embodiments, the third segment comprises one or more unpaired nucleotides, e.g., forming a loop.

[0474] Stem-loop sequence: As used herein, a “stem-loop sequence” refers to a nucleic acid sequence (e.g., RNA sequence) with sufficient self-complementarity to form a stem-loop, e.g., having a stem comprising at least two (e.g., 3, 4, 5, 6, 7, 8, 9, or 10) base pairs, and a loop with at least three (e.g., four) base pairs. The stem may comprise mismatches or bulges.

[0475] Tissue-specific expression-control sequence(s): As used herein, a “tissue-specific expression-control sequence” means nucleic acid elements that increase or decrease the level of a transcript comprising the heterologous object sequence in the target tissue in a tissue-specific manner, e.g., preferentially in an on-target tissue(s), relative to an off-target tissue(s). In some embodiments, a tissue-specific expression-control sequence preferentially drives or represses transcription, activity, or the half-life of a transcript comprising the heterologous object sequence in the target tissue in a tissue-specific manner, e.g., preferentially in an on-target tissue(s), relative to an off-target tissue(s). Exemplary tissue-specific expression-control sequences include tissue-specific promoters, repressors, enhancers, or combinations thereof, as well as tissue-specific microRNA recognition sequences. Tissue specificity refers to on-target (tissue(s) where expression or activity of the template nucleic acid is desired or tolerable) and off-target (tissue(s) where expression or activity of the template nucleic acid is not desired or is not tolerable). For example, a tissue-specific promoter (such as a promoter in a template nucleic acid or controlling expression of a transposase) drives expression preferentially in on-target tissues, relative to off-target tissues. In contrast, a micro-RNA that binds the tissue-specific microRNA recognition sequences (either on a nucleic acid encoding the transposase or on the template nucleic acid, or both) is preferentially expressed in off-target tissues, relative to on-target tissues, thereby reducing expression of a template nucleic acid (or transposase) in off-target tissues. Accordingly, a promoter and a microRNA recognition sequence that are specific for the same tissue, such as the target tissue, have contrasting functions (promote and repress, respectively, with concordant expression levels, i.e., high levels of the microRNA in off-target tissues and low levels in on-target tissues, while promoters drive high expression in on-target tissues and low expression in off-target tissues) with regard to the transcription, activity, or half-life of an associated sequence in that tissue.

[0476] The patent or application file contains at least one drawing executed in color. Copies of this patent or patent application publication with color drawing(s) will be provided by the Office upon request and payment of the necessary fee.

### BRIEF DESCRIPTION OF THE DRAWINGS

[0477] FIG. 1 is a schematic of the Gene Writing™ genome editing system.

[0478] FIG. 2 is a schematic of the structure of the Gene Writer™ genome editor polypeptide.

[0479] FIG. 3 is a schematic of the structure of exemplary Gene Writer™ template RNAs.

[0480] FIGS. 4A and 4B are a series of diagrams showing examples of configurations of Gene Writers using domains derived from a variety of sources. Gene Writers as described herein may or may not comprise all domains depicted. For example, a GeneWrite may, in some instances, lack an RNA-binding domain, or may have single domains that fulfill the functions of multiple domains, e.g., a Cas9 domain for DNA binding and endonuclease activity. Exemplary domains that can be included in a GeneWriter polypeptide include DNA binding domains (e.g., comprising a DNA binding domain, e.g., of a Table herein; a zinc finger; a TAL domain; Cas9; dCas9; nickase Cas9; a transcription factor, or a meganuclease), RNA binding domains (e.g., comprising an RNA binding domain of B-box protein, MS2 coat protein, dCas, or an element of a sequence of a Table herein), reverse transcriptase domains (e.g., comprising a reverse transcriptase domain of an element of a sequence of a Table herein; other retrotransposases (e.g., as listed in a Table herein); a peptide containing a reverse transciptase domain (e.g., as listed in a Table herein)), and/or an endonuclease domain (e.g., comprising an endonuclease domain of an element of a Table herein; Cas9; nickase Cas9; a restriction enzyme (e.g., a type II restriction enzyme, e.g., FokI); a meganuclease; a Holliday junction resolvase; an RLE retrotranspase; an APE retrotransposase; or a GIY-YIG retrotransposase). Exemplary GeneWriter polypeptides comprising exemplary combinations of such domains are shown in the bottom panel.

[0481] FIG. 5 is a diagram showing the modules of an exemplary GeneWriter RNA template. Individual modules of the exemplary template can be combined, re-arranged, and/or omitted, e.g., to produce a Gene Writer template. A=5′ homology arm; B=Ribozyme; C=5′ UTR; D=heterologous object sequence; E=3′ UTR; F=3′ homology arm.

[0482] FIG. 6 is a table listing the modules of an exemplary Gene Writer RNA template. Individual modules can be combined, re-arranged, and/or omitted, e.g., to produce a Gene Writer template. A=5′ homology arm; B=Ribozyme; C=5′ UTR; D=heterologous object sequence; E=3′ UTR; F=3′ homology arm.

[0483] FIGS. 7A and 7B are diagrams showing an exemplary second strand nicking process. (A) A Cas9 nickase is fused to a Gene Writer protein. The Gene Writer protein introduces a nick in a DNA strand through its EN domain (shown as *), and the fused Cas9 nickase introduces a nicks on either top or bottom DNA strands (shown as X). (B) A Gene Writer is targeted to DNA through its DNA biding domain and introduces a DNA nick with its EN domain (*). A Cas9 nickase is then used the generate a second nick (X) at the top or bottom strand, upstream or downstream of the EN introduced nick.

[0484] FIGS. 8A and 8B. The linker region at the C-terminus of the DNA-binding domain of R2Tg can be truncated and modified. Deletions in the Natural Linker from the myb domain at A or B to positions 1 or 2 along with replacement by 3GS (SEQ ID NO: 1024) or XTEN synthetic linkers were constructed (FIG. 8A). Integration efficiency was measured in HEK293T cells by ddPCR (FIG. 8B).

[0485] FIG. 9. Landing pads designed for testing target site mutations of R2Tg Gene Writer.

[0486] FIG. 10A. ddPCR assay measuring percentage of integrations from all lentiviral integrated landing pads per cell.

[0487] FIG. 10B. Amplicon-sequencing and NGS analysis of indels present at landing pads sites.

[0488] FIG. 11. AAVS1 ZFP replacement of DNA binding domain of a Retrotransposase Gene Writer. This Figure discloses “3GS Linker” as SEQ ID NO: 1024.

[0489] FIG. 12. Cas9 or Cas9 nickase replacement of DNA binding domain of Retrotransposase GeneWriters with or without active EN domain (*=mutant)

[0490] FIG. 13. AAVS1 ZFP fusion to a Retrotransposase Gene Writer with or without functional DNA binding domain.

[0491] FIGS. 14A and 14B. Schematic of nickaseCas9-GeneWriter fusions. (FIG. 14A) Schematic of nickaseCas9 fused to Gene Writer protein. (FIG. 14B) Schematic of 3′ extended gRNA.

[0492] FIGS. 15A and 15B. Schematic of nickaseCas9-GeneWriter fusions. (FIG. 15A) Schematic of nickaseCas9 fused to Gene Writer protein. (FIG. 15B) Schematic of donor transgene flanked by UTRs and homology to the cut site.

[0493] FIGS. 16A-16C. Schematic of constructs. (FIG. 16A) Schematic of Gene Writer protein. (FIG. 16B) Schematic of donor transgene flanked by UTRs and homology to the cut site. (FIG. 16C) Schematic of Cas9 constructs used.

[0494] FIGS. 17A and 17B. The schematics for mRNA encoding Gene Writer (FIG. 17A). The native untranslated regions (UTRs) were replaced by 5′ and 3′ UTRs optimized for the protein expression (shown as 5′ UTRexp and 3′ UTRexp). The Gene Writer protein expression was assayed by HiBit assay by probing HiBit tag expression (FIG. 17B). This Figure discloses “3GS” as SEQ ID NO: 1024.

[0495] FIG. 18. Genome integration induced by Gene Writer protein with its native UTRs and UTRs optimized for the protein expression. The Gene Writing activity with non-native UTRs is stimulated by the presence of the RNA template bearing the retrotransposon native UTRs.

[0496] FIG. 19. Delivery of Gene Writer system using mRNA encoding the polypeptide and plasmid DNA encoding the RNA template for retrotransposition.

[0497] FIG. 20. Diagrams of example 5′UTR engineering strategies. HA=homology arm; K=Kozak sequence; pA=poly A signal; AMa=A. maritima; Rx=other species of retrotransposon.

[0498] FIG. 21. Possible location of an intron (or introns) within the RNA template. Introns are shown by curved lines. 5′HA: 5′ homology arm; 3′ HA: 3′ homology arm; 5′ UTR: Retrotransposon-specific 5′UTR; 3′ UTR: Retrotransposon-specific 3′ UTR; GOI: gene of interest. Orange blocks correspond to the sequence designed to be expressed from the genomic location harboring its own cell specific promoter, poly(A) signal and UTRs for the protein expression (5′ and 3′ UTRₑₓₚ). The sequence can be oriented in the sense (shown above) or the antisense orientation related to retrotransposon UTRs and homology arms. The intron can be located within GOI, or within UTRₑₓₚ.

[0499] FIG. 22. Genome integration in HEK293T cells as reported by 3′ ddPCR assay. The Gene Writer mRNA at 0.5 μg/well was co-transfected with the RNA templates with or without enzymatically added cap 1 and the poly(A) tail. The Gene Writer mRNA to RNA transgene ratio was 1:1.

[0500] FIG. 23. Genome integration detected by 3′ ddPCR induced by expression of Gene Writer mRNA produced with either unmodified (G0) or modified nucleotides (pseudouridine (Ψ), 1-N-methylpseudouridine (1-Me-Ψ), 5-methoxyuridine (5-MO-U) or 5-methylcytidine (5mC)). 1 ug of Gene Writer mRNA per well was used. The non-modified RNA template was used. The Gene Writer RNA to the RNA template were co-transfected in 1:8 molar ratio.

[0501] FIG. 24. Construct diagram of driver and transgene plasmids. Homology arms (HA) and stuffer sequences are variable in this set of experiments.

[0502] FIGS. 25A-25C. (FIG. 25A) Timeline of experiment. (FIG. 25B) Schematic of R2Tg and transgene construct configurations. (FIG. 25C) Western Blot against Rad51 shows loss of Rad51 protein expression at day 3.

[0503] FIGS. 26A and 26B. U2OS cells were treated with a non targeting control siRNA (ctrl) or siRNA against Rad51, along with R2Tg Wt or control RT and EN mutants. ddPCR at the 3′ (FIG. 26A) or 5′ (FIG. 26B) junction was used to assess integration efficiency on day 3.

[0504] FIGS. 27A and 27B. (FIG. 27A) Sequence map of Ribozyme of R2 element from Taeniopygia guttata (R2Tg) in context of modules of Gene Writer transgene molecule RNA. The Ribozyme features are denoted as: P, based paired region; P′, based pair region complement strand; L, loop at end of P region; J, nucleotides joining base paired regions. Figure discloses SEQ ID NO: 1734. (FIG. 27B) Prediction of ribozyme secondary structure of R2Tg. Shaded box indicates a predicted catalytic position that could be used to inactivate the ribozyme. Figure discloses SEQ ID NO: 1734.

[0505] FIG. 28. Sequence map of Ribozyme of R2 element from Taeniopygia guttata (R2Tg) in context of modules of Gene Writer transgene molecule RNA. The Ribozyme features are denoted as: P, based paired region; P′, based pair region complement strand; L, loop at end of P region; J, nucleotides joining base paired regions. Figure discloses SEQ ID NO: 1734.

[0506] FIG. 29. Prediction of ribozyme secondary structure of R2 element from Taeniopygia guttata. Figure discloses SEQ ID NO. 1734.

[0507] FIG. 30. Gene Writing system for treating an exemplary repeat expansion disorder. Figure discloses SEQ ID NOS 1645, 1599, 1645, 1635-1636, 1645 and 1686-1688, respectively, in order of appearance.

[0508] FIG. 31. An illustration of two orientations of second strand nicking in an exemplary Gene Writing system.

[0509] FIGS. 32A and 32B. An illustration of the orientation and position of second strand nicking in an exemplary Gene Writing system and their effect on editing.

[0510] FIG. 33. Shows generation and expression of Cas9-RT fusion proteins. To assess expression of novel Gene Writer polypeptides in human cells, U2OS cells were transfected with Cas-RT expression plasmids harboring various RT domains from Tables 1 and 30 fused to a wild-type (WT) or Cas9(N863A) nickase. Cell lysates were collected on day 2 post-transfection and analyzed by Western blot using a primary antibody against Cas9. A primary antibody against GADPH was included as a loading control.

[0511] FIG. 34. Shows improving expression of Cas-RT fusions through choice of linker sequence. To assess how linkers can alter the expression of novel Gene Writer polypeptides in human cells, U2OS cells were transfected with Cas-RT expression plasmids harboring various linkers from Table 42 fusing the Cas9(N863A) nickase to the RT domain of an RNA-binding domain mutated R2Bm retrotransposase. Cell lysates were collected and analyzed by Western blot using a primary antibody against Cas9. A primary antibody against vinculin (left) or GADPH (right) was included as a loading control. Cas9 controls on the left represent titration of a Cas9 expression plasmid. Empty arrows indicate the original linker tested, while the filled arrow represents a linker (Linker 10) found to substantially improve expression of the fusion polypeptide. Sample numbers correspond to linker sequence identifiers in Table 42.

[0512] FIG. 35. Shows Cas/gRNA DNA targeting activity is preserved in Cas-RT fusions. Various RT domains were fused to Cas9(WT) and electroporated into U2OS cells. Genomic DNA was harvested and analyzed for mutational signatures by next generation sequencing. Mutations in the RNA or DNA-binding domains (RBD or DBD) of R2 retrotransposase domains is indicated, where relevant. Indel frequency is used here as a proxy for Cas activity preservation in the context of the RT fusion.

[0513] FIGS. 36A and 36B. Disclose application of mutations improving reverse transcriptase domains. Conserved reverse transcriptase domains from the retrovirus genera Betaretrovirus, Deltaretrovirus, Gammaretrovirus, Epsilonretrovirus, and Spumavirus were aligned and compared to mutations previously shown to improve RT activity (Anzalone et al Nat Biotechnol 38(7):824-844 (2020); Baranauskas et al Protein Eng Des Sel 25(10):657-668 (2012); Arezi and Hogrefe Nucleic Acids Res 37(2):473-481 (2009)). FIG. 36A shows a set of 3 core mutations was identified and applied to RTs from these genera as indicated in. FIG. 36B discloses additional mutations were applied with first priority from the set of T306K/W313F, or alternately from L139P/E607K where neither of the first set were deemed transferrable. Selected mutations are shown in Table 45. Figure discloses SEQ ID NOS 3610, 3623, 3637, 3611, 3624, 3638, 3611, 3624, 3639, 3612, 3625, 3640, 3613, 3626, 3641, 3611, 3627, 3642, 3614, 3628, 3643, 3615, 3629, 3644, 3616, 3630, 3645, 3617, 3630, 3645, 3618, 3631, 3646, 3619, 3632, 3647, 3620, 3633, 3648, 3621, 3634, 3649, 3622, 3635, 3650, 3622, 3636, 3651, 3652, 2060, 2738, 3653, 2086, 2758, 3653, 2086, 2759, 3654, 2087, 2773, 3655, 2088, 2775, 3653, 2086, 2863, 3656, 2103, 3046, 3657, 2104, 3080, 3658, 2120, 3081, 3658, 2175, 3081, 3659, 2221, 3082, 3660, 2279, 3102, 3661, 2525, 3103, 3662, 2704, 3122, 1850, 2736, 3125, 1905, 2737, and 2123, respectively, in order of appearance.

[0514] FIGS. 37A-37D. For FIG. 37A, U2OS cells were nucleofected with various Cas-RT fusion vectors in which the RT domain was selected from a database of monomeric retroviral reverse transcriptase domains. Editing of a HEK3 locus using a Template described in Table 43 was assessed by amplicon sequencing and analysis of precise editing vs indel signatures. Data are represented here as Activity Ratios, which are calculated as the ratio of the frequency of reads with the precisely intended edit (CTT insertion at the target nick site) to the frequency of reads with any other mutations (indels). Three Template RNA configurations assayed resulted in similar outcomes, so the results for a single template (Template P2 from Table 43) are shown. FIGS. 37B-37D show the activity ratio as calculated as the ratio of the frequency of reads with the precisely intended edit (CTT insertion at the target nick site) to the frequency of reads with any other mutations (indels) for various Cas-linker-RT fusions tested in U2OS cells. FIG. 37B shows activity ratios of various Cas-linker-RT fusions in which the RT domain was selected from a database of monomeric retroviral reverse transcriptase domains. FIG. 37C shows activity ratios of variants of the Cas-linker-RT fusions shown in FIG. 37B, screened for activity using RT domain and linker variations. For each RT source (e.g., MMLV) the results depicted from left to right in FIG. 37C correspond to results from constructs depicted in Table 52, in ascending order (e.g., the MMLV results from left to right correspond to results from MMLV-1 to MMLV-11 in Table 52, respectively). FIG. 37D shows the activity ratio of initial Cas-linker-RT fusions from FIG. 37B (“parental” Cas-linker RT fusions) compared to variant Cas-linker-RT fusions. Editing of a HEK3 locus using a Template RNA P2 described in Table 43 was assessed by amplicon sequencing and analysis of precise editing vs indel signatures. A non-targeting derivative of Template RNA P2, wherein the nucleotide sequence of the spacer region of Template RNA P2 was scrambled to remove its gRNA-mediated target specificity, was used as the Template RNA in construct negative controls.

[0515] FIG. 38 shows targeting multiple loci simultaneously results in efficient Gene Writing activity. HEK293 cells were nucleofected with Gene Writing systems comprising different compositions of Template plasmids to enable targeting of: 1) HEK3 alone, 2) HBB alone, or 3) both HBB and the HEK3 locus. Percent of editing is indicated for each locus upon delivery of one or both locus-specific Template RNA expression plasmids. Filled bars represent Perfect Writing events, while unfilled bars represent the frequency of indels. Target-locus-specific editing was seen when delivering either Template independently, and highly efficient and specific edits were seen at both loci when co-delivering the Templates.

[0516] FIG. 39. Shows effect of length on Gene Writing activity. HEK293T cells were nucleofected with all-RNA Gene Writing systems comprising various Template RNAs (Table 48) to test editing efficiency of the DNA-free approach at the HEK3 locus. Template 4, which encoded the same edit as Template 1, but with an addition of 20 nt at the 3′ end of the RT template, showed an approximately 3.1-fold drop in precise Writing activity and an approximately 2.4-fold drop in the ratio of precise corrections to indels.

[0517] FIG. 40. Shows effect of all-RNA delivery of Gene Writer using different mRNA compositions. Nucleofection of various Cas9-RT(MMLV) mRNAs (Table 49) into HEK293T using Template 1 (Table 48A). No strong effects were observed here in varying capping and UTR compositions.

[0518] FIG. 41. HEK293T cells were nucleofected with a Gene Writing system using a set Template (Template 1, Table 48) for editing the HEK3 locus and two different Cas-RT constructs. Sequence analysis indicated that both Cas-RT fusions made edits in a very precise and efficient manner. In both systems, there was an increase in efficiency under conditions including the optional secondary nick. These data show successful cloning and Precise Writing by the PERV RT domain in the context of these Cas-RT fusions.

[0519] FIG. 42. Shows the effect of all-RNA delivery of Gene Writer employing modified nucleotides. mRNA molecules encoding the Cas-RT(MMLV) polypeptide were varied in composition to determine effects (Table 49). Here, Template 1 is used to edit the HEK3 locus after incorporating modified nucleotides in the mRNA component. Gene Writing activity with a 5moU-modified mRNA component was found to both high and precise.

[0520] FIGS. 43A-43C show the effect of all-RNA delivery of Gene Writer using different mRNA compositions delivered into the cell via lipid particles. FIG. 43A shows all-RNA lipofection of various Cas9-RT(MMLV) mRNAs into HEK293T was performed using Template 1 (Table 48) and delivering via Lipofectamine 3000. FIG. 43B shows all-RNA lipofection of various Cas9-RT(MMLV) mRNAs into HEK293T was performed using Template 1 (Table 48) and delivering via MessengerMax reagent. These data indicated higher precise editing efficiencies with the MessengerMax reagent. FIG. 43C shows assay of two Templates differing in total length using MessengerMax reagent. No major changes in efficiency of editing were found to be associated with the template change in this experiment. Where included head-to-head, the addition of the second-nick gRNA resulted in an increase in efficiency of the system.

[0521] FIG. 44. shows all-RNA delivery of Cas-RT using lipid-based systems. The Cas9-RT(MMLV) and Cas9-RT(PERV) were delivered into HEK293T cells with Template 1 (Table 48) using MessengerMax lipid reagent. Here, activity for both enzymes was around 5% Precise Writing.

[0522] FIGS. 45A and 45B show expression of all-RNA Gene Writer system in primary human CD4+ T cells. FIG. 45A shows Gene Writer protein expression from mRNAs with varying doses delivered into primary human CD4+ T cells at day 1 post-nucleofection. Gene Writer was detected by an antibody targeting a Cas9 part of the polypeptide. GAPDH, a housekeeping gene, was detected by an antibody against GAPDH. Increasing expression levels were observed with increasing doses of nucleofected mRNA encoding the polypeptide were delivered, e.g., 0, 2.5, 5, and 10 μg Gene Writer mRNAs. Data for the detection of protein expression shown comprised 2 replicate. FIG. 45B shows Cell viability after nucleofection of 6 Template RNAs. Viability of primary CD4+ T cells after RNA delivery of the Gene Rewriter system at day 3 post nucleofection. Cell viability was assessed by flow cytometry after live/dead staining of harvested T cells (mean±s.d., n=2 replicates).

[Gate: Live cells in a singlet population of cell population selected by FSC/SSC size plot]

[0523] FIGS. 46A and 46B show Gene Writing in primary human CD4+ T cells. FIG. 46 A shows precise editing of the HEK3 genomic locus by a Gene Writer system in primary human CD4+ T cells, without addition of second-nick gRNA. FIG. 46 B shows precise editing of the HEK3 genomic locus by a Gene Writer system in primary human CD4+ T cells. Genomic DNA was extracted from cells at day 3 post-nucleofection. Genome editing of HEK3 was examined by PCR-based amplicon-sequencing assay. DNA amplicons containing the expected genomic alteration were identified as Precise Write events, whereas amplicons with unintended editing (e.g. insertion, deletion) were counted as Indels. The percentage of each was calculated based on total reads per condition (mean±s.d., n=2 replicates).

[0524] FIGS. 47A and 47B show use of a second-nick gRNA for Gene Writing in primary human CD4+ T cells. The data generated in FIG. 46 are shown here for a direct comparison of potential effects of second-nick gRNA on efficiency. FIG. 47A shows in this experiment, the addition of a second-nick gRNA did not result in an enhanced precise writing signal. FIG. 47B shows rather, the use of a second-nick gRNA may have increased the frequency of indels. Thus, in some embodiments, a second nick gRNA sequence may be absent from a system described herein. Precise editing of HEK3 genomic site by the Gene Writer system in primary human CD4+ T cells, without (FIG. 47A) or with addition of second-nick gRNA (FIG. 47B). Genomic DNA was extracted from cells at day 3 post-nucleofection. Genome editing of HEK3 was examined by PCR-based amplicon-sequencing assay. DNA amplicons containing the expected genomic alteration by Gene Writer system were identified as Precise Write events, whereas amplicons with unintended editing (e.g. insertion, deletion) were counted as Indels. The percentage of each was calculated based on total reads per condition (mean±s.d., n=2 replicates).

[0525] FIG. 48 shows screening construct design for retrotransposon-mediated integration in human cells. A driver plasmid comprising a retrotransposase (Driver) expression cassette is transfected together with a template plasmid comprising a retrotransposon-dependent reporter cassette. Whereas expression from the template plasmid results in a non-functional GFP because of an interrupting antisense intron, transcription of the template molecule from the template plasmid results in the generation of an RNA with the intron removed by splicing that can then be reverse transcribed and integrated by the system. Expression of the reporter cassette will thus only occur from the integrated reporter cassette (Integrated gDNA, bottom) and not from the template plasmid. HA=homology arm, where applicable; CMV=mammalian CMV promoter; HiBit=HiBit tag for quantification of protein expression; T7=T7 RNA polymerase promoter; UTR=untranslated sequence, e.g., native retrotransposon UTRs; pA=poly A signal; SD-SA is used to indicate the splice-donor and splice-acceptor sites of an antisense intron in the GFP coding sequence.

[0526] FIG. 49. Screening of candidate retrotransposons identifies 25 candidates working to integrate a trans payload in human cells. A total of 163 retrotransposon systems were assayed for activity in human cells as described in Example 39. Integration as measured by ddPCR is shown as copies/genome for each retrotransposon driver/template system. The height of each bar indicates the average value of two replicates.

[0527] FIGS. 50A and 50B show luciferase activity assay for primary cells. LNPs formulated as according to Example 44 were analyzed for delivery of cargo to primary human (A) and mouse (B) hepatocytes, as according to Example 45. The luciferase assay revealed dose-responsive luciferase activity from cell lysates, indicating successful delivery of RNA to the cells and expression of Firefly luciferase from the mRNA cargo.

[0528] FIG. 51 discloses LNP-mediated delivery of RNA cargo to the murine liver. Firefly luciferase mRNA-containing LNPs were formulated and delivered to mice by iv, and liver samples were harvested and assayed for luciferase activity at 6, 24, and 48 hours post administration. Reporter activity by the various formulations followed the ranking LIPIDV005>LIPIDV004>LIPIDV003. RNA expression was transient and enzyme levels returned near vehicle background by 48 hours. Post-administration.

### DETAILED DESCRIPTION

[0529] This disclosure relates to compositions, systems and methods for targeting, editing, modifying or manipulating a DNA sequence (e.g., inserting a heterologous object sequence into a target site of a mammalian genome) at one or more locations in a DNA sequence in a cell, tissue or subject, e.g., in vivo or in vitro. The heterologous object DNA sequence may include, e.g., a substitution, a deletion, an insertion, e.g., a coding sequence, a regulatory sequence, or a gene expression unit.

[0530] More specifically, the disclosure provides reverse transcriptase-based systems for altering a genomic DNA sequence of interest, e.g., by inserting, deleting, or substituting one or more nucleotides into/from the sequence of interest. This disclosure is based, in part, on a bioinformatic analysis to identify reverse transcriptase sequences, for example in retrotransposons from a variety of organisms (see Table 1 or 3).

[0531] The disclosure provides, in part, Gene Writer™ genome editors comprising a polypeptide component and a template nucleic acid (e.g., template RNA) component. In some embodiments, a Gene Writer™ genome editor can be used to introduce an alteration into a target site in a genome. In some embodiments, the polypeptide component comprises a writing domain (e.g., a reverse transcriptase domain), a DNA-binding domain, and an endonuclease domain (e.g., nickase domain). In some embodiments, the template nucleic acid (e.g., template RNA) comprises a sequence that binds a target site in the genome (e.g., that binds to a second strand of the target site), a sequence that binds the polypeptide component, a heterologous object sequence, and a 3′ target homology domain. Without wishing to be bound by theory, it is thought that the template nucleic acid (e.g., template RNA) binds to the second strand of a target site in the genome, and binds to the polypeptide component (e.g., localizing the polypeptide component to the target site in the genome). It is thought that the endonuclease (e.g., nickase) of the polypeptide component cuts the target site (e.g., the first strand of the target site), e.g., allowing the 3′homology domain to bind to a sequence adjacent to the site to be altered on the first strand of the target site. It is thought that the writing domain (e.g., reverse transcriptase domain) of the polypeptide component uses the 3′ target homology domain as a primer and the heterologous object sequence as a template to, e.g., polymerize a sequence complementary to the heterologous object sequence. Without wishing to be bound by theory, it is thought that selection of an appropriate heterologous object sequence can result in substitution, deletion, or insertion of one or more nucleotides at the target site.

[0532] In embodiments, the disclosure provides a nucleic acid molecule or a system for retargeting, e.g., of a Gene Writer polypeptide or nucleic acid molecule, or of a system as described herein. Retargeting (e.g., of a Gene Writer polypeptide or nucleic acid molecule, or of a system as described herein) generally comprises: (i) directing the polypeptide to bind and cleave at the target site; and/or (ii) designing the template RNA to have complementarity to the target sequence. In some embodiments, the template RNA has complementarity to the target sequence 5′ of the first-strand nick, e.g., such that the 3′ end of the template RNA anneals and the 5′ end of the target site serves as the primer, e.g., for target-primed reverse transcription (TPRT). In some embodiments, the endonuclease domain of the polypeptide and the 5′ end of the RNA template are also modified as described.

### Gene Writer™ Genome Editors

[0533] Gene Writer™ genome editors are systems that are capable of modifying a host cell's genome and can be applied for the mutation, deletion, or other modification of a genomic target sequence, including the insertion of heterologous payloads. In some embodiments, these systems take inspiration from a group of naturally evolved mobile genetic elements known as retrotransposons. Gene Writer™ polypeptides can also comprise RT domains derived from sources other than retrotransposons, e.g., from viruses.

[0534] Non-long terminal repeat (LTR) retrotransposons are a type of mobile genetic elements that are widespread in eukaryotic genomes. They include two classes: the apurinic/apyrimidinic endonuclease (APE)-type and the restriction enzyme-like endonuclease (RLE)-type. The APE class retrotransposons are comprised of two functional domains: an endonuclease/DNA binding domain, and a reverse transcriptase domain. The RLE class are comprised of three functional domains: a DNA binding domain, a reverse transcription domain, and an endonuclease domain. The reverse transcriptase domain of non-LTR retrotransposon functions by binding an RNA sequence template and reverse transcribing it into the host genome's target DNA. The RNA sequence template has a 3′ untranslated region which is specifically bound to the transposase, and a variable 5′ region generally having Open Reading Frame(s) (“ORF”) encoding transposase proteins. The RNA sequence template may also comprise a 5′ untranslated region which specifically binds the retrotransposase.

[0535] In some embodiments, as described herein, the elements of such non-LTR retrotransposons can be functionally modularized and/or modified to target, edit, modify or manipulate a target DNA sequence, e.g., to insert an object (e.g., heterologous) nucleic acid sequence into a target genome, e.g., a mammalian genome, by reverse transcription. Such modularized and modified nucleic acids, polypeptide compositions and systems are described herein and are referred to as Gene Writer™ gene editors. A Gene Writer™ gene editor system comprises: (A) a polypeptide or a nucleic acid encoding a polypeptide, wherein the polypeptide comprises (i) a reverse transcriptase domain, and either (x) an endonuclease domain that contains DNA binding functionality or (y) an endonuclease domain and separate DNA binding domain; and (B) a template RNA comprising (i) a sequence that binds the polypeptide and (ii) a heterologous insert sequence. For example, the Gene Writer™ genome editor protein may comprise a DNA-binding domain, a reverse transcriptase domain, and an endonuclease domain. In some embodiments, the DNA-binding function may involve an RNA component that directs the protein to a DNA sequence, e.g, a gRNA. In other embodiments, the Gene Writer™ genome editor protein may comprise a reverse transcriptase domain and an endonuclease domain. In certain embodiments, the elements of the Gene Writer™ gene editor polypeptide can be derived from sequences of non-LTR retrotransposons, e.g., APE-type or RLE-type retrotransposons or portions or domains thereof. In some embodiments the RLE-type non-LTR retrotransposon is from the R2, NeSL, HERO, R4, or CRE clade. In some embodiments the Gene Writer™ genome editor is derived from R4 element X4_Line, which is found in the human genome. In some embodiments the APE-type non-LTR retrotransposon is from the R1, or Tx1 clade. In some embodiments the Gene Writer™ genome editor is derived from Tx1 element Mare6, which is found in the human genome. The RNA template element of a Gene Writer™ gene editor system is typically heterologous to the polypeptide element and provides an object sequence to be inserted (reverse transcribed) into the host genome. In some embodiments the Gene Writer™ genome editor protein is capable of target primed reverse transcription. In some embodiments, the Gene Writer genome editor protein is capable of second strand synthesis. Table 50 shows exemplary Gene Writer proteins and associated sequences from a variety of retrotransposases, identified using data mining. Column 1 indicates the family to which the retrotransposon belongs. Column 2 lists the element name. Column 3 indicates an accession number, if any. Column 4 lists an organism in which the retrotransposase is found. Column 5 lists the predicted 5′ untranslated region, and column 6 lists the predicted 3′ untranslated region; both are segments that are predicted to allow the template RNA to bind the retrotransposase of column 7. (It is understood that columns 5-6 show the DNA sequence, and that an RNA sequence according to any of columns 5-6 would typically include uracil rather than thymidine.) Column 7 lists the predicted retrotransposase amino acid sequence. Column 8 lists the predicted RT domain present based on sequence analysis, column 9 lists the start codon position, and column 10 lists the stop codon position.

Lengthy table referenced here
US20230348939A1-20231102-T00001
Please refer to the end of the specification for access instructions.

[0536] In some embodiments the Gene Writer™ genome editor is combined with a second polypeptide. In some embodiments the second polypeptide is derived from an APE-type non-LTR retrotransposon. In some embodiments the second polypeptide has a zinc knuckle-like motif. In some embodiments the second polypeptide is a homolog of Gag proteins.

[0537] Inspired by the success of retrotransposons in nature, it is further discussed here that the natural function of a retrotransposon can be recapitulated using functional parts derived from completely independent systems. For example, a functional Gene Writer™ can be made up of unrelated DNA binding, reverse transcription, and endonuclease domains. This modular structure allows combining of functional domains, e.g., dCas9 (DNA binding), MMLV reverse transcriptase (reverse transcription), FokI (endonuclease). In some embodiments, multiple functional domains may arise from a single protein, e.g., Cas9 nickase (DNA binding, endonuclease), R2 retrotransposon (DNA binding, reverse transcription, endonuclease).

[0538] In some embodiments, a Gene Writer™ system is capable of producing an insertion into the target site of at least 45, 50, 55, 60, 65, 70, 75, 80, 85, 90, 95, or 100 nucleotides (and optionally no more than 500, 400, 300, 200, or 100 nucleotides). In some embodiments, a Gene Writer™ system is capable of producing an insertion into the target site of at least 1, 2, 3, 4, 5, 6, 7, 8, 9, 10, 15, 20, 25, 30, 35, 40, 45, 50, 55, 60, 65, 70, 75, 80, 85, 90, 95, or 100 nucleotides (and optionally no more than 500, 400, 300, 200, or 100 nucleotides). In some embodiments, a Gene Writer™ system is capable of producing an insertion into the target site of at least 0.2, 0.3, 0.4, 0.5, 0.6, 0.7, 0.8, 0.9, 1, 1.5, 2, 2.5, 3, 3.5, 4, 4.5, 5, 5.5, 6, 6.5, 7, 7.5, 8, 8.5, 9, 9.5 or 10 kilobases (and optionally no more than 1, 5, 10, or 20 kilobases). In some embodiments, a Gene Writer™ system is capable of producing a deletion of at least 81, 85, 90, 95, 100, 110, 120, 130, 140, 150, 160, 170, 180, 190, or 200 nucleotides (and optionally no more than 500, 400, 300, or 200 nucleotides). In some embodiments, a Gene Writer™ system is capable of producing a deletion of at least 81, 85, 90, 95, 100, 110, 120, 130, 140, 150, 160, 170, 180, 190, or 200 nucleotides (and optionally no more than 500, 400, 300, or 200 nucleotides). In some embodiments, a Gene Writer™ system is capable of producing a deletion of at least 1, 2, 3, 4, 5, 6, 7, 8, 9, 10, 15, 20, 25, 30, 35, 40, 45, 50, 55, 60, 65, 70, 75, 80, 85, 90, 95, 100, 110, 120, 130, 140, 150, 160, 170, 180, 190, or 200 nucleotides (and optionally no more than 500, 400, 300, or 200 nucleotides). In some embodiments, a Gene Writer™ system is capable of producing a deletion of at least 0.2, 0.3, 0.4, 0.5, 0.6, 0.7, 0.8, 0.9, 1, 1.5, 2, 2.5, 3, 3.5, 4, 4.5, 5, 5.5, 6, 6.5, 7, 7.5, 8, 8.5, 9, 9.5 or 10 kilobases (and optionally no more than 1, 5, 10, or 20 kilobases). In some embodiments, a Gene Writer system is capable of producing a substitution into the target site of at least 1, 2, 3, 4, 5, 6, 7, 8, 9, 10, 15, 20, 25, 30, 35, 40, 45, 50, 60, 70, 80, 90, or 100 or more nucleotides. In some embodiments, the substitution is a transition mutation. In some embodiments, the substitution is a transversion mutation. In some embodiments, the substitution converts an adenine to a thymine, an adenine to a guanine, an adenine to a cytosine, a guanine to a thymine, a guanine to a cytosine, a guanine to an adenine, a thymine to a cytosine, a thymine to an adenine, a thymine to a guanine, a cytosine to an adenine, a cytosine to a guanine, or a cytosine to a thymine.

### Polypeptide Component of Gene Writer™ Gene Editor System

[0539] Domains and Functions:

[0540] In some embodiments, the Gene Writer™ polypeptide possesses the functions of DNA target site binding, template nucleic acid (e.g., RNA) binding, DNA target site cleavage, and template nucleic acid (e.g., RNA) writing, e.g., reverse transcription. In some embodiments, each functions is contained within a distinct domain. In some embodiments, a function may be attributed to two or more domains (e.g., two or more domains, together, exhibit the functionality). In some embodiments, two or more domains may have the same or similar function (e.g., two or more domains each independently have DNA-binding functionality, e.g., for two different DNA sequences). In other embodiments, one or more domains may be capable of enabling one or more functions, e.g., a Cas9 domain enabling both DNA binding and target site cleavage. In some embodiments, the domains are all located within a single polypeptide. In some embodiments, a first domain is in one polypeptide and a second domain is in a second polypeptide. For example, in some embodiments, the Gene Writer™ polypeptide may be split between a first polypeptide and a second polypeptide, e.g., wherein the first polypeptide comprises a reverse transcriptase (RT) domain and wherein the second polypeptide comprises a DNA-binding domain and an endonuclease domain, e.g., a nickase domain. As a further example, in some embodiments, the first polypeptide and the second polypeptide each comprise a DNA binding domain (e.g., a first DNA binding domain and a second DNA binding domain). In some embodiments, the first and second polypeptide may be brought together post-translationally via a split-intein.

[0541] Writing Domain:

[0542] In certain aspects of the present invention, the writing domain of the Gene Writer™ system possesses reverse transcriptase activity and is also referred to as a reverse transcriptase domain (a RT domain). In some embodiments, the RT domain comprises an RT catalytic portion and and RNA-binding region (e.g., a region that binds the template RNA).

[0543] In certain aspects of the present invention, the writing domain is based on a reverse transcriptase domain of an APE-type or RLE-type non-LTR retrotransposon. A wild-type reverse transcriptase domain of an APE-type or RLE-type non-LTR retrotransposon can be used in a Gene Writer™ system or can be modified (e.g., by insertion, deletion, or substitution of one or more residues) to alter the reverse transcriptase activity for target DNA sequences. In some embodiments the reverse transcriptase is altered from its natural sequence to have altered codon usage, e.g. improved for human cells. In some embodiments the reverse transcriptase domain is a heterologous reverse transcriptase from a different retrovirus, LTR-retrotransposon, or non-LTR retrotransposon. In certain embodiments, a Gene Writer™ system includes a polypeptide that comprises a reverse transcriptase domain of an RLE-type non-LTR retrotransposon from the R2, NeSL, HERO, R4, or CRE clade, or of an APE-type non-LTR retrotransposon from the R1, or Tx1 clade. In certain embodiments, a Gene Writer™ system includes a polypeptide that comprises a reverse transcriptase domain of a non-LTR retrotransposon, LTR retrotransposon, group II intron, diversity-generating element, retron, telomerase, retroplasmid, retrovirus, or an engineered polymerase listed in Table 1 or Table 3. In some embodiments, a Gene Writer™ system includes a polypeptide that comprises a reverse transcriptase domain listed in Table 2. In embodiments, the amino acid sequence of the reverse transcriptase domain of a Gene Writer™ system is at least about 50%, at least about 60%, at least about 70%, at least about 80%, at least about 85%, at least about 90%, at least about 95%, at least about 96%, at least about 97%, at least about 98%, at least about 99% identical to the amino acid sequence of a reverse transcriptase domain of a non-LTR retrotransposon, LTR retrotransposon, group II intron, diversity-generating element, retron, telomerase, retroplasmid, retrovirus, or an engineered polymerase whose DNA sequence is referenced in Table 1 or Table 3, or of a peptide comprising an RT domain referenced in Table 2. In some embodiments, the RT domain has a sequence selected from Table 1 or 3, or a sequence of a peptide comprising an RT domain selected from Table 2, or a sequence having at least 70%, 75%, 80%, 85%, 90%, 95%, 96%, 97%, 98%, or 99% identity thereto. In some embodiments, the RT domain comprising a Gene Writer polypeptide has been mutated from its original amino acid sequence, e.g., has at least 1, 2, 3, 4, 5, 6, 7, 8, 9, 10, 20, 30, 40, 50, 60, 70, 80, 90, or 100 substitutions. In some embodiments, the RT domain is derived from the RT of a retrovirus, e.g., HIV-1 RT, Moloney Murine Leukemia Virus (MMLV) RT, avian myeloblastosis virus (AMV) RT, Rous Sarcoma Virus (RSV) RT. In some embodiments, the RT domain is derived from the RT of a Group II intron, e.g., the group II intron maturase RT from Eubacterium rectale (MarathonRT) (Zhao et al. RNA 24:2 2018), the RT domain from LtrA, the RT TGIRT (or trt). In some embodiments, the RT domain is derived from the RT of a retron, e.g., the reverse transcriptase from Ec86 (RT86). In some embodiments, the RT domain is derived from a diversity-generating retroelement, e.g., from the RT of Brt. In some embodiments, the RT domain is derived from the RT of a retroplasmid, e.g., the RT from the Mauriceville plasmid. In some embodiments, the RT domain is derived from a non-LTR retrotransposon, e.g., the RT from R2Bm, the RT from R2Tg, the RT from LINE-1, the RT from Penelope or a Penelope-like element (PLE). In some embodiments, the RT domain is derived from an LTR retrotransposon, e.g., the reverse transcriptase from Ty1. In some embodiments, the RT domain is derived from a telomerase, e.g., TERT. A person having ordinary skill in the art is capable of identifying reverse transcription domains based upon homology to other known reverse transcription domains using routine tools as Basic Local Alignment Search Tool (BLAST). In some embodiments, the reverse transcriptase contains the InterPro domain IPR000477. In some embodiments, the reverse transcriptase contains the pfam domain PF00078. In some embodiments, the RT contains the InterPro domain IPR013103. In some embodiments, the RT contains the pfam domain PF07727. In some embodiments, the reverse transcriptase contains a conserved protein domain of the cd00304 RT_like family, e.g., cd01644 (RT_pepA17), cd01645 (RT_Rtv), cd01646 (RT_Bac_retron_I), cd01647 (RT_LTR), cd01648 (TERT), cd01650 (RT_nLTR_like), cd01651 (RT_G2_intron), cd01699 (RNA_dep_RNAP), cd01709 (RT_like_1), cd03487 (RT_Bac_retron_II), cd03714 (RT_DIRS1), cd03715 (RT_ZFREV_like). Proteins containing these domains can additionally be found by searching the domains on protein databases, such as InterPro (Mitchell et al. Nucleic Acids Res 47, D351-360 (2019)), UniProt (The UniProt Consortium Nucleic Acids Res 47, D506-515 (2019)), or the conserved domain database (Lu et al. Nucleic Acids Res 48, D265-268 (2020)), or by scanning open reading frames for reverse transcriptase domains using prediction tools, for example InterProScan. The diversity of reverse transcriptases has been described in, but not limited to, those used by prokaryotes (Zimmerly et al. Microbiol Spectr 3(2):MDNA3-0058-2014 (2015); Lampson B. C. (2007) Prokaryotic Reverse Transcriptases. In: Polaina J., MacCabe A. P. (eds) Industrial Enzymes. Springer, Dordrecht), viruses (Herschhorn et al. Cell Mol Life Sci 67(16):2717-2747 (2010); Menéndez-Arias et al. Virus Res 234:153-176 (2017)), and mobile elements (Eickbush et al. Virus Res 134(1-2):221-234 (2008); Craig et al. Mobile DNA III 3rd Ed. DOI:10.1128/9781555819217 (2015)), each of which is incorporated herein by reference.

[0544] In some embodiments, the reverse transcriptase (RT) domain exhibits enhanced stringency of target-primed reverse transcription (TPRT) initiation, e.g., relative to an endogenous RT domain. In some embodiments, the RT domain initiates TPRT when the 3 nt in the target site immediately upstream of the first strand nick, e.g., the genomic DNA priming the RNA template, have at least 66% or 100% complementarity to the 3 nt of homology in the RNA template. In some embodiments, the RT domain initiates TPRT when there are less than 5 nt mismatched (e.g., less than 1, 2, 3, 4, or 5 nt mismatched) between the template RNA homology and the target DNA priming reverse transcription. In some embodiments, the RT domain is modified such that the stringency for mismatches in priming the TPRT reaction is increased, e.g., wherein the RT domain does not tolerate any mismatches or tolerates fewer mismatches in the priming region relative to a wild-type (e.g., unmodified) RT domain. In some embodiments, the RT domain comprises a HIV-1 RT domain. In embodiments, the HIV-1 RT domain initiates lower levels of synthesis even with three nucleotide mismatches relative to an alternative RT domain (e.g., as described by Jamburuthugoda and Eickbush J Mol Biol 407(5):661-672 (2011); incorporated herein by reference in its entirety).

[0545] In some embodiments, the RT domain forms a dimer (e.g., a heterodimer or homodimer). In some embodiments, the RT domain is monomeric. In some embodiments, an RT domain, e.g., a retroviral RT domain, naturally functions as a monomer or as a dimer (e.g., heterodimer or homodimer). In some embodiments, an RT domain naturally functions as a monomer, e.g., is derived from a virus wherein it functions as a monomer. Exemplary monomeric RT domains, their viral sources, and the RT signatures associated with them can be found in Table 30 with descriptions of domain signatures in Table 32. In some embodiments, the RT domain of a system described herein comprises an amino acid sequence of Table 30, or a functional fragment or variant thereof, or a sequence having at least 70%, 80%, 90%, 95%, or 99% identity thereto. In embodiments, the RT domain is selected from an RT domain from murine leukemia virus (MLV; sometimes referred to as MoMLV) (e.g., P03355), porcine endogenous retrovirus (PERV) (e.g., UniProt Q4VFZ2), mouse mammary tumor virus (MMTV) (e.g., UniProt P03365), Mason-Pfizer monkey virus (MPMV) (e.g., UniProt P07572), bovine leukemia virus (BLV) (e.g., UniProt P03361), human T-cell leukemia virus-1 (HTLV-1) (e.g., UniProt P03362), human foamy virus (HFV) (e.g., UniProt P14350), simian foamy virus (SFV) (e.g., UniProt P23074), or bovine foamy/syncytial virus (BFV/BSV) (e.g., UniProt 041894), or a functional fragment or variant thereof (e.g., an amino acid sequence having at least 70%, 80%, 90%, 95%, or 99% identity thereto). In some embodiments, an RT domain is dimeric in its natural functioning. Exemplary dimeric RT domains, their viral sources, and the RT signatures associated with them can be found in Table 31 with descriptions of domain signatures in Table 32. In some embodiments, the RT domain of a system described herein comprises an amino acid sequence of Table 31, or a functional fragment or variant thereof, or a sequence having at least 70%, 80%, 90%, 95%, or 99% identity thereto. In some embodiments, the RT domain is derived from a virus wherein it functions as a dimer. In embodiments, the RT domain is selected from an RT domain from avian sarcoma/leukemia virus (ASLV) (e.g., UniProt A0A142BKH1), Rous sarcoma virus (RSV) (e.g., UniProt P03354), avian myeloblastosis virus (AMV) (e.g., UniProt Q83133), human immunodeficiency virus type I (HIV-1) (e.g., UniProt P03369), human immunodeficiency virus type II (HIV-2) (e.g., UniProt P15833), simian immunodeficiency virus (SIV) (e.g., UniProt P05896), bovine immunodeficiency virus (BIV) (e.g., UniProt P19560), equine infectious anemia virus (EIAV) (e.g., UniProt P03371), or feline immunodeficiency virus (FIV) (e.g., UniProt P16088) (Herschhorn and Hizi Cell Mol Life Sci 67(16):2717-2747 (2010)), or a functional fragment or variant thereof (e.g., an amino acid sequence having at least 70%, 80%, 90%, 95%, or 99% identity thereto). Naturally heterodimeric RT domains may, in some embodiments, also be functional as homodimers. In some embodiments, dimeric RT domains are expressed as fusion proteins, e.g., as homodimeric fusion proteins or heterodimeric fusion proteins. In some embodiments, the RT function of the system is fulfilled by multiple RT domains (e.g., as described herein). In further embodiments, the multiple RT domains are fused or separate, e.g., may be on the same polypeptide or on different polypeptides.

[0546] In some embodiment, a GeneWriter described herein comprises an integrase domain, e.g., wherein the integrase domain may be part of the RT domain. In some embodiments, an RT domain (e.g., as described herein) comprises an integrase domain. In some embodiments, an RT domain (e.g., as described herein) lacks an integrase domain, or comprises an integrase domain that has been inactivated by mutation or deleted. In some embodiment, a GeneWriter described herein comprises an RNase H domain, e.g., wherein the RNase H domain may be part of the RT domain. In some embodiments, an RT domain (e.g., as described herein) comprises an RNase H domain, e.g., an endogenous RNAse H domain or a heterologous RNase H domain. In some embodiments, an RT domain (e.g., as described herein) lacks an RNase H domain. In some embodiments, an RT domain (e.g., as described herein) comprises an RNase H domain that has been added, deleted, mutated, or swapped for a heterologous RNase H domain. In some embodiments, mutation of an RNase H domain yields a polypeptide exhibiting lower RNase activity, e.g., as determined by the methods described in Kotewicz et al. Nucleic Acids Res 16(1):265-277 (1988) (incorporated herein by reference in its entirety), e.g., lower by at least 10%, 20%, 30%, 40%, 50%, 60%, 70%, 80%, or 90% compared to an otherwise similar domain without the mutation. In some embodiments, RNase H activity is abolished.

[0547] In some embodiments, an RT domain is mutated to increase fidelity compared to to an otherwise similar domain without the mutation. For instance, in some embodiments, a YADD (SEQ ID NO: 1539) or YMDD (SEQ ID NO: 1540) motif in an RT domain (e.g., in a reverse transcriptase) is replaced with YVDD (SEQ ID NO: 1541). In embodiments, replacement of the YADD (SEQ ID NO: 1539) or YMDD (SEQ ID NO: 1540) or YVDD (SEQ ID NO: 1541) results in higher fidelity in retroviral reverse transcriptase activity (e.g., as described in Jamburuthugoda and Eickbush J Mol Biol 2011; incorporated herein by reference in its entirety).

[0548] In some embodiments, the reverse transcriptase domain is one selected from an element of Table 1 or Table 3.

Table 1: Exemplary reverse transciptase domains from different types of sources.

[0549] Sources include Group II intron, non-LTR retrotransposon, retrovirus, LTR retrotransposon, diversity-generating retroelement, retron, telomerase, retroplasmid, and evolved DNA polymerase. Also included are the associated RT signatures from the InterPro, pfam, and cd databases. Although the evolved polymerase RTX can perform RNA-dependent DNA polymerization, no RT signatures were identified by InterProScan, so polymerase signatures are included instead.

TABLE 1

| | | | | | RT |
|---|---|---|---|---|---|
| Protein | Type | Accession | UniProt | Sequence | signatures |
| MarathonRT | Group | CBK92290.1 | D4JMT6 | MDTSNLMEQILSSDNLNRAYLQVV | IPR000477, |
| | II | | | RNKGAEGVDGMKYTELKEHLAKN | PF00078, |
| | intron | | | GETIKGQLRTRKYKPQPARRVEIPKP | cd01651 |
| | | | | DGGVRNLGVPTVTDRFIQQAIAQVL | |
| | | | | TPIYEEQFHDHSYGFRPNRCAQQAIL | |
| | | | | TALNIMNDGNDWIVDIDLEKFFDTV | |
| | | | | NHDKLMTLIGRTIKDGDVISIVRKYL | |
| | | | | VSGIMIDDEYEDSIVGTPQGGNLSPL | |
| | | | | LANIMLNELDKEMEKRGLNFVRYA | |
| | | | | DDCIIMVGSEMSANRVMRNISRFIEE | |
| | | | | KLGLKVNMTKSKVDRPSGLKYLGF | |
| | | | | GFYFDPRAHQFKAKPHAKSVAKFK | |
| | | | | KRMKELTCRSWGVSNSYKVEKLNQ | |
| | | | | LIRGWINYFKIGSMKTLCKELDSRIR | |
| | | | | YRLRMCIWKQWKTPQNQEKNLVK | |
| | | | | LGIDRNTARRVAYTGKRIAYVCNK | |
| | | | | GAVNVAISNKRLASFGLISMLDYYI | |
| | | | | EKCVTC (SEQ ID NO: 1542) | |
| TGIRT, | Group | AAT72329.1 | Q6DKY2 | MALLERILADRNLITALKRVEANQG | IPR000477, |
| trt | II | | | APGIGDVSTDQLRDIYRAHWSTIRA | PF00078, |
| | intron | | | QLLAGTYRPAPVRRVGIPKGPGGTR | cd01651 |
| | | | | QLGITPVVDRLIQQIALQELTPIFDPD | |
| | | | | FSPSSFGFRPGRNAHDAVRQAQGYI | |
| | | | | QEYGRYVVDMDLKEFFDRVNHDLI | |
| | | | | MSRVARKVDKKRVLKLIRYALQAG | |
| | | | | VMIEGVKVQTEEGTQPGGPLSPLLA | |
| | | | | NILLDDLDKELEKRGLKFCYRADDC | |
| | | | | NIYVSKLRAGQRVKQSIQRFLEKTL | |
| | | | | KLKVNEEKSVADRPWKRAFGLFSF | |
| | | | | TPERKARIRLAPRSIQRLKQRIRQLT | |
| | | | | NPNWSISMPREIHRVNQYVGMWIG | |
| | | | | YFRLVTEPSVLQTIEGWIRRRLRLC | |
| | | | | WQLQWKRVRTRIRELRALGLKETA | |
| | | | | VMEIANRTKGAWRTTKPQTLHQAL | |
| | | | | GKYTWTAQGLKTSLQRYFELRQG | |
| | | | | (SEQ ID NO: 1543) | |
| LtrA | Group | AAB06503.1 | P0A3U0 | MKPTMAILERISKNSQENIDEVFTRL | IPR000477, |
| | II | | | YRYLLRPDIYYVAYQNLYSNKGAS | PF00078, |
| | intron | | | TKGILDDTADGFSEEKIKKIIQSLKD | cd01651 |
| | | | | GTYYPQPVRRMYIAKKNSKKMRPL | |
| | | | | GIPTFTDKLIQEAVRIILESIYEPVFED | |
| | | | | VSHGFRPQRSCHTALKTIKREFGGA | |
| | | | | RWFVEGDIKGCFDNIDHVTLIGLINL | |
| | | | | KIKDMKMSQLIYKFLKAGYLENWQ | |
| | | | | YHKTYSGTPQGGILSPLLANIYLHEL | |
| | | | | DKFVLQLKMKFDRESPERITPEYRE | |
| | | | | LHNEIKRISHRLKKLEGEEKAKVLLE | |
| | | | | YQEKRKRLPTLPCTSQTNKVLKYVR | |
| | | | | YADDFIISVKGSKEDCQWIKEQLKL | |
| | | | | FIHNKLKMELSEEKTLITHSSQPARF | |
| | | | | LGYDIRVRRSGTIKRSGKVKKRTLN | |
| | | | | GSVELLIPLQDKIRQFIFDKKIAIQKK | |
| | | | | DSSWFPVHRKYLIRSTDLEIITIYNSE | |
| | | | | LRGICNYYGLASNFNQLNYFAYLM | |
| | | | | EYSCLKTIASKHKGTLSKTISMFKD | |
| | | | | GSGSWGIPYEIKQGKQRRYFANFSE | |
| | | | | CKSPYQFTDEISQAPVLYGYARNTL | |
| | | | | ENRLKAKCCELCGTSDENTSYEIHH | |
| | | | | VNKVKNLKGKEKWEMAMIAKQRK | |
| | | | | TLVVCFHCHRHVIHKHK (SEQ ID | |
| | | | | NO: 1544) | |
| R2Bm | non- | AAB59214.1 | V9H052 | MMASTALSLMGRCNPDGCTRGKH | IPR000477, |
| | LTR | | | VTAAPMDGPRGPSSLAGTFGWGLAI | PF00078, |
| | retro- | | | PAGEPCGRVCSPATVGFFPVAKKSN | cd01650 |
| | transposon | | | KENRPEASGLPLESERTGDNPTVRG | |
| | | | | SAGADPVGQDAPGWTCQFCERTFS | |
| | | | | TNRGLGVHKRRAHPVETNTDAAPM | |
| | | | | MVKRRWHGEEIDLLARTEARLLAE | |
| | | | | RGQCSGGDLFGALPGFGRTLEAIKG | |
| | | | | QRRREPYRALVQAHLARFGSQPGPS | |
| | | | | SGGCSAEPDFRRASGAEEAGEERCA | |
| | | | | EDAAAYDPSAVGQMSPDAARVLSE | |
| | | | | LLEGAGRRRACRAMRPKTAGRRND | |
| | | | | LHDDRTASAHKTSRQKRRAEYARV | |
| | | | | QELYKKCRSRAAAEVIDGACGGVG | |
| | | | | HSLEEMETYWRPILERVSDAPGPTP | |
| | | | | EALHALGRAEWHGGNRDYTQLWK | |
| | | | | PISVEEIKASRFDWRTSPGPDGIRSG | |
| | | | | QWRAVPVHLKAEMFNAWMARGEI | |
| | | | | PEILRQCRTVFVPKVERPGGPGEYRP | |
| | | | | ISIASIPLRHFHSILARRLLACCPPDA | |
| | | | | RQRGFICADGTLENSAVLDAVLGDS | |
| | | | | RKKLRECHVAVLDFAKAFDTVSHE | |
| | | | | ALVELLRLRGMPEQFCGYIAHLYDT | |
| | | | | ASTTLAVNNEMSSPVKVGRGVRQG | |
| | | | | DPLSPILFNVVMDLILASLPERVGYR | |
| | | | | LEMELVSALAYADDLVLLAGSKVG | |
| | | | | MQESISAVDCVGRQMGLRLNCRKS | |
| | | | | AVLSMIPDGHRKKHHYLTERTFNIG | |
| | | | | GKPLRQVSCVERWRYLGVDFEASG | |
| | | | | CVTLEHSISSALNNISRAPLKPQQRL | |
| | | | | EILRAHLIPRFQHGFVLGNISDDRLR | |
| | | | | MLDVQIRKAVGQWLRLPADVPKAY | |
| | | | | YHAAVQDGGLAIPSVRATIPDLIVR | |
| | | | | RFGGLDSSPWSVARAAAKSDKIRK | |
| | | | | KLRWAWKQLRRFSRVDSTTQRPSV | |
| | | | | RLFWREHLHASVDGRELRESTRTPT | |
| | | | | STKWIRERCAQITGRDFVQFVHTHI | |
| | | | | NALPSRIRGSRGRRGGGESSLTCRA | |
| | | | | GCKVRETTAHILQQCHRTHGGRILR | |
| | | | | HNKIVSFVAKAMEENKWTVELEPR | |
| | | | | LRTSVGLRKPDIIASRDGVGVIVDV | |
| | | | | QVVSGQRSLDELHREKRNKYGNHG | |
| | | | | ELVELVAGRLGLPKAECVRATSCTI | |
| | | | | SWRGVWSLTSYKELRSIIGLREPTLQ | |
| | | | | IVPILALRGSHMNWTRFNQMTSVM | |
| | | | | GGGVG (SEQ ID NO: 1545) | |
| LINE-1 | non- | AAC51271.1 | O00370 | MTGSNSHITILTLNVNGLNSPIKRHR | IPR000477, |
| | LTR | | | LASWIKSQDPSVCCIQETHLTCRDT | PF00078, |
| | retro- | | | HRLKIKGWRKIYQANGKQKKAGVA | cd01650 |
| | transposon | | | ILVSDKTDFKPTKIKRDKEGHYIMV | |
| | | | | KGSIQQEELTILNIYAPNTGAPRFIKQ | |
| | | | | VLSDLQRDLDSHTLIMGDFNTPLSIL | |
| | | | | DRSTRQKVNKDTQELNSALHQTDLI | |
| | | | | DIYRTLHPKSTEYTFFSAPHHTYSKI | |
| | | | | DHIVGSKALLSKCKRTEIITNYLSDH | |
| | | | | SAIKLELRIKNLTQSRSTTWKLNNLL | |
| | | | | LNDYWVHNEMKAEIKMFFETNENK | |
| | | | | DTTYQNLWDAFKAVCRGKFIALNA | |
| | | | | YKRKQERSKIDTLTSQLKELEKQEQ | |
| | | | | THSKASRRQEITKIRAELKEIETQKT | |
| | | | | LQKINESRSWFFERINKIDRPLARLIK | |
| | | | | KKREKNQIDTIKNDKGDITTDPTEIQ | |
| | | | | TTIREYYKHLYANKLENLEEMDTFL | |
| | | | | DTYTLPRLNQEEVESLNRPITGSEIV | |
| | | | | AIINSLPTKKSPGPDGFTAEFYQRYK | |
| | | | | EELVPFLLKLFQSIEKEGILPNSFYEA | |
| | | | | SIILIPKPGRDTTKKENFRPISLMNID | |
| | | | | AKILNKILANRIQQHIKKLIHHDQVG | |
| | | | | FIPGMQGWFNIRKSINVIQHINRAKD | |
| | | | | KNHVIISIDAEKAFDKIQQPFMLKTL | |
| | | | | NKLGIDGMYLKIIRAIYDKPTANIIL | |
| | | | | NGQKLEAFPLKTGTRQGCPLSPLLF | |
| | | | | NIVLEVLARAIRQEKEIKGIQLGKEE | |
| | | | | VKLSLFADDMIVYLENPIVSAQNLL | |
| | | | | KLISNFSKVSGYKINVQKSQAFLYN | |
| | | | | NNRQTESQIMGELPFTIASKRIKYLG | |
| | | | | IQLTRDVKDLFKENYKPLLKEIKEDT | |
| | | | | NKWKNIPCSWVGRINIVKMAILPKV | |
| | | | | IYRFNAIPIKLPMTFFTELEKTTLKFI | |
| | | | | WNQKRARIAKSILSQKNKAGGITLP | |
| | | | | DFKLYYKATVTKTAWYWYQNRDI | |
| | | | | DQWNRTEPSEIMPHIYNYLIFDKPEK | |
| | | | | NKQWGKDSLLNKWCWENWLAICR | |
| | | | | KLKLDPFLTPYTKINSRWIKDLNVK | |
| | | | | PKTIKTLEENLGITIQDIGVGKDFMS | |
| | | | | KTPKAMATKDKIDKWDLIKLKSFCT | |
| | | | | AKETTIRVNRQPTTWEKIFATYSSD | |
| | | | | KGLISRIYNELKQIYKKKTNNPIKKW | |
| | | | | AKDMNRHFSKEDIYAAKKHMKKCS | |
| | | | | SSLAIREMQIKTTMRYHLTPVRMAII | |
| | | | | KKSGNNRCWRGCGEIGTLVHCWW | |
| | | | | DCKLVQPLWKSVWRFLRDLELEIPF | |
| | | | | DPAIPLLGIYPKDYKSCCYKDTCTR | |
| | | | | MFIAALFTIAKTWNQPNCPTMIDWI | |
| | | | | KKMWHIYTMEYYAAIKNDEFISFV | |
| | | | | GTWMKLETIILSKLSQEQKTKHRIFS | |
| | | | | LIGGN (SEQ ID NO: 1546) | |
| Penelope | non- | AAL14979.1 | Q95VB5 | MERSPEPSININGRHAVCTATNMSY | IPR000477, |
| | LTR | | | AKIKTKYKDSKRTINKFQLTLVKLT | PF00078, |
| | retro- | | | KLKSSLKFLLKCRKSNLIPNFIKNLT | cd00304 |
| | transposon | | | QHLTILTTDNKTHPDITRTLTRHTHF | |
| | | | | YHTKILNLLIKHKHNLLQEQTKHMQ | |
| | | | | KAKTNIEQLMTTDDAKAFFESERNI | |
| | | | | ENKITTTLKKRQETKHDKLRDQRNL | |
| | | | | ALADNNTQREWFVNKTKIEFPPNV | |
| | | | | VALLAKGPKFALPISKRDFPLLKYIA | |
| | | | | DGEELVQTIKEKETQESARTKFSLL | |
| | | | | VKEHKTKNNQNSRDRAILDTVEQT | |
| | | | | RKLLKENINIKILSSDKGNKTVAMD | |
| | | | | EDEYKNKMTNILDDLCAYRTLRLD | |
| | | | | PTSRLQTKNNTFVAQLFKMGLISKD | |
| | | | | ERNKMTTTTAVPPRIYGLPKIHKEG | |
| | | | | TPLRPICSSIGSPSYGLCKYIIQILKNL | |
| | | | | TMDSRYNIKNAVDFKDRVNNSQIRE | |
| | | | | EETLVSFDVVSLFPSIPIELALDTIRQ | |
| | | | | KWTKLEEHTNIPKQLFMDIVRFCIEE | |
| | | | | NRYFKYEDKIYTQLKGMPMGSPAS | |
| | | | | PVIADILMEELLDKITDKLKIKPRLLT | |
| | | | | KYVDDLFAITNKIDVENILKELNSFH | |
| | | | | KQIKFTMELEKDGKLPFLDSIVSRM | |
| | | | | DNTLKIKWYRKPIASGRILNFNSNHP | |
| | | | | KSMIINTALGCMNRMMKISDTIYHK | |
| | | | | EIEHEIKELLTKNDFPPNIIKTLLKRR | |
| | | | | QIERKKPTEPAKIYKSLIYVPRLSERL | |
| | | | | TNSDCYNKQDIKVAHKPTNTLQKFF | |
| | | | | NKIKSKIPMIEKSNVVYQIPCGGDNN | |
| | | | | NKCNSVYIGTTKSKLKTRISQHKSD | |
| | | | | FKLRHQNNIQKTALMTHCIRSNHTP | |
| | | | | NFDETTILQQEQHYNKRHTLEMLHII | |
| | | | | NTPTYKRLNYKTDTENCAHLYRHL | |
| | | | | LNSQTTSVTISTSKSADV (SEQ ID | |
| | | | | NO: 1547) | |
| M-MLV | Retro | ADS42990.1 | P03355[6 | TLNIEDEHRLHETSKEPDVSLGSTW | IPR000477, |
| RT | virus | | 60-1330] | LSDFPQAWAETGGMGLAVRQAPLII | PF00078, |
| | | | | PLKATSTPVSIKQYPMSQEARLGIKP | cd03715 |
| | | | | HIQRLLDQGILVPCQSPWNTPLLPV | |
| | | | | KKPGTNDYRPVQDLREVNKRVEDI | |
| | | | | HPTVPNPYNLLSGLPPSHQWYTVLD | |
| | | | | LKDAFFCLRLHPTSQPLFAFEWRDP | |
| | | | | EMGISGQLTWTRLPQGFKNSPTLFD | |
| | | | | EALHRDLADFRIQHPDLILLQYVDD | |
| | | | | LLLAATSELDCQQGTRALLQTLGNL | |
| | | | | GYRASAKKAQICQKQVKYLGYLLK | |
| | | | | EGQRWLTEARKETVMGQPTPKTPR | |
| | | | | QLREFLGTAGFCRLWIPGFAEMAAP | |
| | | | | LYPLTKTGTLFNWGPDQQKAYQEI | |
| | | | | KQALLTAPALGLPDLTKPFELFVDE | |
| | | | | KQGYAKGVLTQKLGPWRRPVAYLS | |
| | | | | KKLDPVAAGWPPCLRMVAAIAVLT | |
| | | | | KDAGKLTMGQPLVILAPHAVEALV | |
| | | | | KQPPDRWLSNARMTHYQALLLDTD | |
| | | | | RVQFGPVVALNPATLLPLPEEGLQH | |
| | | | | NCLDILAEAHGTRPDLTDQPLPDAD | |
| | | | | HTWYTDGSSLLQEGQRKAGAAVTT | |
| | | | | ETEVIWAKALPAGTSAQRAELIALT | |
| | | | | QALKMAEGKKLNVYTDSRYAFATA | |
| | | | | HIHGEIYRRRGLLTSEGKEIKNKDEI | |
| | | | | LALLKALFLPKRLSIIHCPGHQKGHS | |
| | | | | AEARGNRMADQAARKAAITETPDT | |
| | | | | STLL (SEQ ID NO: 1548) | |
| RSV RT | Retro | AAC82561.1 | P03354[7 | TVALHLAIPLKWKPDHTPVWIDQW | IPR000477, |
| | virus | | 09-1567 | PLPEGKLVALTQLVEKELQLGHIEPS | PF00078, |
| | | | | LSCWNTPVFVIRKASGSYRLLHDLR | cd01645 |
| | | | | AVNAKLVPFGAVQQGAPVLSALPR | |
| | | | | GWPLMVLDLKDCFFSIPLAEQDREA | |
| | | | | FAFTLPSVNNQAPARRFQWKVLPQ | |
| | | | | GMTCSPTICQLVVGQVLEPLRLKHP | |
| | | | | SLCMLHYMDDLLLAASSHDGLEAA | |
| | | | | GEEVISTLERAGFTISPDKVQREPGV | |
| | | | | QYLGYKLGSTYVAPVGLVAEPRIAT | |
| | | | | LWDVQKLVGSLQWLRPALGIPPRL | |
| | | | | MGPFYEQLRGSDPNEAREWNLDMK | |
| | | | | MAWREIVRLSTTAALERWDPALPL | |
| | | | | EGAVARCEQGAIGVLGQGLSTHPRP | |
| | | | | CLWLFSTQPTKAFTAWLEVLTLLIT | |
| | | | | KLRASAVRTFGKEVDILLLPACFRE | |
| | | | | DLPLPEGILLALKGFAGKIRSSDTPSI | |
| | | | | FDIARPLHVSLKVRVTDHPVPGPTV | |
| | | | | FTDASSSTHKGVVVWREGPRWEIK | |
| | | | | EIADLGASVQQLEARAVAMALLLW | |
| | | | | PTTPTNVVTDSAFVAKMLLKMGQE | |
| | | | | GVPSTAAAFILEDALSQRSAMAAVL | |
| | | | | HVRSHSEVPGFFTEGNDVADSQATF | |
| | | | | QAYPLREAKDLHTALHIGPRALSKA | |
| | | | | CNISMQQAREVVQTCPHCNSAPALE | |
| | | | | AGVNPRGLGPLQIWQTDFTLEPRM | |
| | | | | APRSWLAVTVDTASSAIVVTQHGR | |
| | | | | VTSVAVQHHWATAIAVLGRPKAIK | |
| | | | | TDNGSCFTSKSTREWLARWGIAHTT | |
| | | | | GIPGNSQGQAMVERANRLLKDRIRV | |
| | | | | LAEGDGFMKRIPTSKQGELLAKAM | |
| | | | | YALNHFERGENTKTPIQKHWRPTVL | |
| | | | | TEGPPVKIRIETGEWEKGWNVLVW | |
| | | | | GRGYAAVKNRDTDKVIWVPSRKVK | |
| | | | | PDITQKDEVTKKDEASPLFAG (SEQ | |
| | | | | ID NO: 1549) | |
| AMV | Retro | HW606680.1 | — | TVALHLAIPLKWKPNHTPVWIDQW | IPR000477, |
| RT | virus | | | PLPEGKLVALTQLVEKELQLGHIEPS | PF00078, |
| | | | | LSCWNTPVFVIRKASGSYRLLHDLR | cd01645 |
| | | | | AVNAKLVPFGAVQQGAPVLSALPR | |
| | | | | GWPLMVLDLKDCFFSIPLAEQDREA | |
| | | | | FAFTLPSVNNQAPARRFQWKVLPQ | |
| | | | | GMTCSPTICQLIVGQILEPLRLKHPS | |
| | | | | LRMLHYMDDLLLAASSHDGLEAAG | |
| | | | | EEVISTLERAGFTISPDKVQREPGVQ | |
| | | | | YLGYKLGSTYVAPVGLVAEPRIATL | |
| | | | | WDVQKLVGSLQWLRPALGIPPRLM | |
| | | | | GPFYEQLRGSDPNEAREWNLDMKM | |
| | | | | AWREIVQLSTTAALERWDPALPLEG | |
| | | | | AVARCEQGAIGVLGQGLSTHPRPCL | |
| | | | | WLFSTQPTKAFTAWLEVLTLLITKL | |
| | | | | RASAVRTFGKEVDILLLPACFREDLP | |
| | | | | LPEGILLALRGFAGKIRSSDTPSIFDI | |
| | | | | ARPLHVSLKVRVTDHPVPGPTVFTD | |
| | | | | ASSSTHKGVVVWREGPRWEIKEIAD | |
| | | | | LGASVQQLEARAVAMALLLWPTTP | |
| | | | | TNVVTDSAFVAKMLLKMGQEGVPS | |
| | | | | TAAAFILEDALSQRSAMAAVLHVRS | |
| | | | | HSEVPGFFTEGNDVADSQATFQAY | |
| | | | | (SEQ ID NO: 1550) | |
| HIV RT | Retro | AAB50259.1 | P04585[5 | PISPIETVPVKLKPGMDGPKVKQWP | IPR000477, |
| | virus | | 88-1147] | LTEEKIKALVEICTEMEKEGKISKIGP | PF00078, |
| | | | | ENPYNTPVFAIKKKDSTKWRKLVDF | cd01645 |
| | | | | RELNKRTQDFWEVQLGIPHPAGLK | |
| | | | | KKKSVTVLDVGDAYFSVPLDEDFR | |
| | | | | KYTAFTIPSINNETPGIRYQYNVLPQ | |
| | | | | GWKGSPAIFQSSMTKILEPFRKQNP | |
| | | | | DIVIYQYMDDLYVGSDLEIGQHRTK | |
| | | | | IEELRQHLLRWGLTTPDKKHQKEPP | |
| | | | | FLWMGYELHPDKWTVQPIVLPEKD | |
| | | | | SWTVNDIQKLVGKLNWASQIYPGIK | |
| | | | | VRQLCKLLRGTKALTEVIPLTEEAEL | |
| | | | | ELAENREILKEPVHGVYYDPSKDLI | |
| | | | | AEIQKQGQGQWTYQIYQEPFKNLKT | |
| | | | | GKYARMRGAHTNDVKQLTEAVQKI | |
| | | | | TTESIVIWGKTPKFKLPIQKETWETW | |
| | | | | WTEYWQATWIPEWEFVNTPPLVKL | |
| | | | | WYQLEKEPIVGAETFYVDGAANRE | |
| | | | | TKLGKAGYVTNRGRQKVVTLTDTT | |
| | | | | NQKTELQAIYLALQDSGLEVNIVTD | |
| | | | | SQYALGIIQAQPDQSESELVNQIIEQ | |
| | | | | LIKKEKVYLAWVPAHKGIGGNEQV | |
| | | | | DKLVSAGIRKVL (SEQ ID NO: 1551) | |
| Ty1 | LTR | AAA66938.1 | Q07163- | AVKAVKSIKPIRTTLRYDEAITYNK | IPR013103, |
| | retro- | | 1[1218- | DIKEKEKYIEAYHKEVNQLLKMKT | PF07727 |
| | transposon | | 1755] | WDTDEYYDRKEIDPKRVINSMFIFN | |
| | | | | KKRDGTHKARFVARGDIQHPDTYD | |
| | | | | SGMQSNTVHHYALMTSLSLALDNN | |
| | | | | YYITQLDISSAYLYADIKEELYIRPPP | |
| | | | | HLGMNDKLIRLKKSLYGLKQSGAN | |
| | | | | WYETIKSYLIQQCGMEEVRGWSCV | |
| | | | | FKNSQVTICLFVDDMVLFSKNLNSN | |
| | | | | KRIIEKLKMQYDTKIINLGESDEEIQ | |
| | | | | YDILGLEIKYQRGKYMKLGMENSL | |
| | | | | TEKIPKLNVPLNPKGRKLSAPGQPG | |
| | | | | LYIDQDELEIDEDEYKEKVHEMQKL | |
| | | | | IGLASYVGYKFRFDLLYYINTLAQHI | |
| | | | | LFPSRQVLDMTYELIQFMWDTRDK | |
| | | | | QLIWHKNKPTEPDNKLVAISDASYG | |
| | | | | NQPYYKSQIGNIYLLNGKVIGGKST | |
| | | | | KASLTCTSTTEAEIHAISESVPLLNN | |
| | | | | LSYLIQELNKKPIIKGLLTDSRSTISII | |
| | | | | KSTNEEKFRNRFFGTKAMRLRDEVS | |
| | | | | GNNLYVYYIETKKNIADVMTKPLPI | |
| | | | | KTFKLLTNKWIH (SEQ ID NO: 1552) | |
| Brt | Diversity- | NP_958675.1 | Q775D8 | MGKRHRNLIDQITTWENLLDAYRK | IPR000477, |
| | generating | | | TSHGKRRTWGYLEFKEYDLANLLA | PF00078, |
| | retro- | | | LQAELKAGNYERGPYREFLVYEPKP | cd01646 |
| | element | | | RLISALEFKDRLVQHALCNIVAPIFE | |
| | | | | AGLLPYTYACRPDKGTHAGVCHVQ | |
| | | | | AELRRTRATHFLKSDFSKFFPSIDRA | |
| | | | | ALYAMIDKKIHCAATRRLLRVVLPD | |
| | | | | EGVGIPIGSLTSQLFANVYGGAVDR | |
| | | | | LLHDELKQRHWARYMDDIVVLGD | |
| | | | | DPEELRAVFYRLRDFASERLGLKISH | |
| | | | | WQVAPVSRGINFLGYRIWPTHKLLR | |
| | | | | KSSVKRAKRKVANFIKHGEDESLQR | |
| | | | | FLASWSGHAQWADTHNLFTWMEE | |
| | | | | QYGIACH (SEQ ID NO: 1553) | |
| RT86 | Retron | AAA61471.1 | P23070 | MKSAEYLNTFRLRNLGLPVMNNLH | IPR000477, |
| | | | | DMSKATRISVETLRLLIYTADFRYRI | PF00078, |
| | | | | YTVEKKGPEKRMRTIYQPSRELKAL | cd03487 |
| | | | | QGWVLRNILDKLSSSPFSIGFEKHQS | |
| | | | | ILNNATPHIGANFILNIDLEDFFPSLT | |
| | | | | ANKVFGVFHSLGYNRLISSVLTKICC | |
| | | | | YKNLLPQGAPSSPKLANLICSKLDY | |
| | | | | RIQGYAGSRGLIYTRYADDLTLSAQ | |
| | | | | SMKKVVKARDFLFSIIPSEGLVINSK | |
| | | | | KTCISGPRSQRKVTGLVISQEKVGIG | |
| | | | | REKYKEIRAKIHHIFCGKSSEIEHVR | |
| | | | | GWLSFILSVDSKSHRRLITYISKLEK | |
| | | | | KYGKNPLNKAKT (SEQ ID NO: | |
| | | | | 1554) | |
| TERT | Telomerase | AAG23289.1 | O14746 | MPRAPRCRAVRSLLRSHYREVLPLA | IPR000477, |
| | | | | TFVRRLGPQGWRLVQRGDPAAFRA | PF00078, |
| | | | | LVAQCLVCVPWDARPPPAAPSFRQ | cd01648 |
| | | | | VSCLKELVARVLQRLCERGAKNVL | |
| | | | | AFGFALLDGARGGPPEAFTTSVRSY | |
| | | | | LPNTVTDALRGSGAWGLLLRRVGD | |
| | | | | DVLVHLLARCALFVLVAPSCAYQV | |
| | | | | CGPPLYQLGAATQARPPPHASGPRR | |
| | | | | RLGCERAWNHSVREAGVPLGLPAP | |
| | | | | GARRRGGSASRSLPLPKRPRRGAAP | |
| | | | | EPERTPVGQGSWAHPGRTRGPSDR | |
| | | | | GFCVVSPARPAEEATSLEGALSGTR | |
| | | | | HSHPSVGRQHHAGPPSTSRPPRPWD | |
| | | | | TPCPPVYAETKHFLYSSGDKEQLRP | |
| | | | | SFLLSSLRPSLTGARRLVETIFLGSRP | |
| | | | | WMPGTPRRLPRLPQRYWQMRPLFL | |
| | | | | ELLGNHAQCPYGVLLKTHCPLRAA | |
| | | | | VTPAAGVCAREKPQGSVAAPEEED | |
| | | | | TDPRRLVQLLRQHSSPWQVYGFVR | |
| | | | | ACLRRLVPPGLWGSRHNERRFLRNT | |
| | | | | KKFISLGKHAKLSLQELTWKMSVR | |
| | | | | DCAWLRRSPGVGCVPAAEHRLREEI | |
| | | | | LAKFLHWLMSVYVVELLRSFFYVT | |
| | | | | ETTFQKNRLFFYRKSVWSKLQSIGIR | |
| | | | | QHLKRVQLRELSEAEVRQHREARP | |
| | | | | ALLTSRLRFIPKPDGLRPIVNMDYV | |
| | | | | VGARTFRREKRAERLTSRVKALFSV | |
| | | | | LNYERARRPGLLGASVLGLDDIHRA | |
| | | | | WRTFVLRVRAQDPPPELYFVKVDV | |
| | | | | TGAYDTIPQDRLTEVIASIIKPQNTY | |
| | | | | CVRRYAVVQKAAHGHVRKAFKSH | |
| | | | | VSTLTDLQPYMRQFVAHLQETSPLR | |
| | | | | DAVVIEQSSSLNEASSGLFDVFLRF | |
| | | | | MCHHAVRIRGKSYVQCQGIPQGSIL | |
| | | | | STLLCSLCYGDMENKLFAGIRRDGL | |
| | | | | LLRLVDDFLLVTPHLTHAKTFLRTL | |
| | | | | VRGVPEYGCVVNLRKTVVNFPVED | |
| | | | | EALGGTAFVQMPAHGLFPWCGLLL | |
| | | | | DTRTLEVQSDYSSYARTSIRASLTFN | |
| | | | | RGFKAGRNMRRKLFGVLRLKCHSL | |
| | | | | FLDLQVNSLQTVCTNIYKILLLQAY | |
| | | | | RFHACVLQLPFHQQVWKNPTFFLR | |
| | | | | VISDTASLCYSILKAKNAGMSLGAK | |
| | | | | GAAGPLPSEAVQWLCHQAFLLKLT | |
| | | | | RHRVTYVPLLGSLRTAQTQLSRKLP | |
| | | | | GTTLTALEAAANPALPSDFKTILD | |
| | | | | (SEQ ID NO: 1555) | |
| Maurice | Retro | NC_00157 | Q36578 | MPNHRLPNCVSYLGENHELSWLHG | cd00304 |
| ville RT | plasmid | 0.1 | | MFGLLKRSNPQTGGILGWLNTGPN | |
| | | | | GFVKYMMNLMGHARDKGDAKEY | |
| | | | | WRLGRSLMKNEAFQVQAFNHVCK | |
| | | | | HWYLDYKPHKIAKLLKEVREMVEI | |
| | | | | QPVCIDYKRVYIPKANGKQRPLGVP | |
| | | | | TVPWRVYLHMWNVLLVWYRIPEQ | |
| | | | | DNQHAYFPKRGVFTAWRALWPKL | |
| | | | | DSQNIYEFDLKNFFPSVDLAYLKDK | |
| | | | | LMESGIPQDISEYLTVLNRSLVVLTS | |
| | | | | EDKIPEPHRDVIFNSDGTPNPNLPKD | |
| | | | | VQGRILKDPDFVEILRRRGFTDIATN | |
| | | | | GVPQGASTSCGLATYNVKELFKRY | |
| | | | | DELIMYADDGILCRQDPSTPDFSVEE | |
| | | | | AGVVQEPAKSGWIKQNGEFKKSVK | |
| | | | | FLGLEFIPANIPPLGEGEVKDYPRLR | |
| | | | | GATRNGSKMELSTELQFLCYLSYKL | |
| | | | | RIKVLRDLYIQVLGYLPSVPLLRYRS | |
| | | | | LAEAINELSPKRITIGQFITSSFEEFTA | |
| | | | | WSPLKRMGFFFSSPAGPTILSSIFNNS | |
| | | | | TNLQEPSDSRLLYRKGSWVNIRFAA | |
| | | | | YLYSKLSEEKHGLVPKFLEKLREINF | |
| | | | | ALDKVDVTEIDSKLSRLMKFSVSAA | |
| | | | | YDEVGTLALKSLFKFRNSERESIKAS | |
| | | | | FKQLRENGKIAEFSEARRLWFEILKL | |
| | | | | IRLDLFNASSLACDDLLSHLQDRRSI | |
| | | | | KKWGSSDVLYLKSQRLMRTNKKQL | |
| | | | | QLDFEKKKNSLKKKLIKRRAKELRD | |
| | | | | TFKGKENKEA (SEQ ID NO: 1556) | |
| RTX | Engineered | QFN49000.1 | — | MILDTDYITEDGKPVIRIFKKENGEF | IPR006134, |
| | polymerase | | | KIEYDRTFEPYLYALLKDDSAIEEVK | PF00136, |
| | | | | KITAERHGTVVTVKRVEKVQKKFL | cd05536 |
| | | | | GRPVEVWKLYFTHPQDVPAIMDKIR | |
| | | | | EHPAVIDIYEYDIPFAIRYLIDKGLVP | |
| | | | | MEGDEELKLLAFDIETLYHEGEEFA | |
| | | | | EGPILMISYADEEGARVITWKNVDL | |
| | | | | PYVDVVSTEREMIKRFLRVVKEKDP | |
| | | | | DVLITYNGDNFDFAYLKKRCEKLGI | |
| | | | | NFALGRDGSEPKIQRMGDRFAVEV | |
| | | | | KGRIHFDLYPVIRRTINLPTYTLEAV | |
| | | | | YEAVFGQPKEKVYAEEITTAWETGE | |
| | | | | NLERVARYSMEDAKVTYELGKEFL | |
| | | | | PMEAQLSRLIGQSLWDVSRSSTGNL | |
| | | | | VEWFLLRKAYERNELAPNKPDEKE | |
| | | | | LARRHQSHEGGYIKEPERGLWENIV | |
| | | | | YLDFRSLYPSIIITHNVSPDTLNREGC | |
| | | | | KEYDVAPQVGHRFCKDFPGFIPSLL | |
| | | | | GDLLEERQKIKKRMKATIDPIERKLL | |
| | | | | DYRQRAIKILANSLYGYYGYARAR | |
| | | | | WYCKECAESVIAWGREYLTMTIKEI | |
| | | | | EEKYGFKVIYSDTDGFFATIPGADA | |
| | | | | ETVKKKAMEFLKYINAKLPGALELE | |
| | | | | YEGFYKRGLFVTKKKYAVIDEEGKI | |
| | | | | TTRGLEIVRRDWSEIAKETQARVLE | |
| | | | | ALLKDGDVEKAVRIVKEVTEKLSK | |
| | | | | YEVPPEKLVIHKQITRDLKDYKATG | |
| | | | | PHVAVAKRLAARGVKIRPGTVISYI | |
| | | | | VLKGSGRIVDRAIPFDEFDPTKHKY | |
| | | | | DAEYYIEKQVLPAVERILRAFGYRK | |
| | | | | EDLRYQKTRQVGLSARLKPKGTLE | |
| | | | | GSSHHHHHH (SEQ ID NO: 1557) | |

TABLE 1

| Signature | Database | Short Name | Description |
|---|---|---|---|
| cd00304 | CDD | RT like | RT_like: Reverse transcriptase (RT, RNA-dependent |
| | | | DNA polymerase)_like family. An RT gene is usually |
| | | | indicative of a mobile element such as a retrotransposon |
| | | | or retrovirus. RTs occur in a variety of mobile elements, |
| | | | including retrotransposons, retroviruses, group II introns, |
| | | | bacterial msDNAs, hepadnaviruses, and caulimoviruses. |
| | | | These elements can be divided into two major groups. |
| | | | One group contains retroviruses and DNA viruses whose |
| | | | propagation involves an RNA intermediate. They are |
| | | | grouped together with transposable elements containing |
| | | | long terminal repeats (LTRs). The other group, also called |
| | | | poly(A)-type retrotransposons, contain fungal |
| | | | mitochondrial introns and transposable elements that lack |
| | | | LTRs. [PMID: 1698615, PMID: 8828137, PMID: |
| | | | 10669612, PMID: 9878607, PMID: 7540934, PMID: |
| | | | 7523679, PMID: 8648598] |
| cd01645 | CDD | RT Rtv | RT_Rtv: Reverse transcriptases (RTs) from retroviruses |
| | | | (Rtvs). RTs catalyze the conversion of single-stranded |
| | | | RNA into double-stranded viral DNA for integration into |
| | | | host chromosomes. Proteins in this subfamily contain long |
| | | | terminal repeats (LTRs) and are multifunctional enzymes |
| | | | with RNA-directed DNA polymerase, DNA directed |
| | | | DNA polymerase, and ribonuclease hybrid (RNase H) |
| | | | activities. The viral RNA genome enters the cytoplasm as |
| | | | part of a nucleoprotein complex, and the process of |
| | | | reverse transcription generates in the cytoplasm forming a |
| | | | linear DNA duplex via an intricate series of steps. This |
| | | | duplex DNA is colinear with its RNA template, but |
| | | | contains terminal duplications known as LTRs that are not |
| | | | present in viral RNA. It has been proposed that two |
| | | | specialized template switches, known as strand-transfer |
| | | | reactions or “jumps”, are required to generate the LTRs. |
| | | | [PMID: 9831551, PMID: 15107837, PMID: 11080630, |
| | | | PMID: 10799511, PMID: 7523679, PMID: 7540934, |
| | | | PMID: 8648598, PMID: 1698615] |
| cd01646 | CDD | RT_Bac_retron I | RT Bac retron I: Reverse transcriptases (RTs) in |
| | | | bacterial retrotransposons or retrons. The polymerase |
| | | | reaction of this enzyme leads to the production of a |
| | | | unique RNA-DNA complex called msDNA (multicopy |
| | | | single-stranded (ss)DNA) in which a small ssDNA |
| | | | branches out from a small ssRNA molecule via a 2′- |
| | | | 5′ phosphodiester linkage. Bacterial retron RTs produce |
| | | | cDNA corresponding to only a small portion of the retron |
| | | | genome. [PMID: 1698615, PMID: 16093702, PMID: |
| | | | 8828137] |
| cd01648 | CDD | TERT | TERT: Telomerase reverse transcriptase (TERT). |
| | | | Telomerase is a ribonucleoprotein (RNP) that synthesizes |
| | | | telomeric DNA repeats. The telomerase RNA subunit |
| | | | provides the template for synthesis of these repeats. The |
| | | | catalytic subunit of RNP is known as telomerase reverse |
| | | | transcriptase (TERT). The reverse transcriptase (RT) |
| | | | domain is located in the C-terminal region of the TERT |
| | | | polypeptide. Single amino acid substitutions in this region |
| | | | lead to telomere shortening and senescence. Telomerase is |
| | | | an enzyme that, in certain cells, maintains the physical |
| | | | ends of chromosomes (telomeres) during replication. In |
| | | | somatic cells, replication of the lagging strand requires the |
| | | | continual presence of an RNA primer approximately 200 |
| | | | nucleotides upstream, which is complementary to the |
| | | | template strand. Since there is a region of DNA less than |
| | | | 200 base pairs from the end of the chromosome where this |
| | | | is not possible, the chromosome is continually shortened. |
| | | | However, a surplus of repetitive DNA at the chromosome |
| | | | ends protects against the erosion of gene-encoding DNA. |
| | | | Telomerase is not normally expressed in somatic cells. It |
| | | | has been suggested that exogenous TERT may extend the |
| | | | lifespan of, or even immortalize, the cell. However, recent |
| | | | studies have shown that telomerase activity can be |
| | | | induced by a number of oncogenes. Conversely, the |
| | | | oncogene c-myc can be activated in human TERT |
| | | | immortalized cells. Sequence comparisons place the |
| | | | telomerase proteins in the RT family but reveal hallmarks |
| | | | that distinguish them from retroviral and retrotransposon |
| | | | relatives. [PMID: 9110970, PMID: 9288757, PMID: |
| | | | 9389643, PMID: 9671703, PMID: 9671704, PMID: |
| | | | 10333526, PMID: 11250070, PMID: 15363846, PMID: |
| | | | 16416120, PMID: 16649103, PMID: 16793225, PMID: |
| | | | 10860859, PMID: 9252327, PMID: 11602347, PMID: |
| | | | 1698615, PMID: 8828137, PMID: 10866187] |
| cd01650 | CDD | RT_nL | RT_nLTR: Non-LTR (long terminal repeat) |
| | | TR_like | retrotransposon and non-LTR retrovirus reverse |
| | | | transcriptase (RT). This subfamily contains both non-LTR |
| | | | retrotransposons and non-LTR retrovirus RTs. RTs |
| | | | catalyze the conversion of single-stranded RNA into |
| | | | double-stranded DNA for integration into host |
| | | | chromosomes. RT is a multifunctional enzyme with RNA- |
| | | | directed DNA polymerase, DNA directed DNA |
| | | | polymerase and ribonuclease hybrid (RNase H) activities. |
| | | | [PMID: 1698615, PMID: 10605110, PMID: 10628860, |
| | | | PMID: 11734649, PMID: 12117499, PMID: 12777502, |
| | | | PMID: 14871946, PMID: 15939396, PMID: 16271150, |
| | | | PMID: 16356661, PMID: 2463954, PMID: 3040362, |
| | | | PMID: 3656436, PMID: 7512193, PMID: 7534829, |
| | | | PMID: 7659515, PMID: 8524653, PMID: 9190061, |
| | | | PMID: 9218812, PMID: 9332379, PMID: 9364772, |
| | | | PMID: 8828137] |
| cd01651 | CDD | RT_G2 intron | RT_G2_intron: Reverse transcriptases (RTs) with group II |
| | | | intron origin. RT transcribes DNA using RNA as |
| | | | template. Proteins in this subfamily are found in bacterial |
| | | | and mitochondrial group II introns. Their most probable |
| | | | ancestor was a retrotransposable element with both gag- |
| | | | like and pol-like genes. This subfamily of proteins |
| | | | appears to have captured the RT sequences from |
| | | | transposable elements, which lack long terminal repeats |
| | | | (LTRs). [PMID: 1698615, PMID: 8828137, PMID: |
| | | | 12403467, PMID: 11058141, PMID: 11054545, PMID: |
| | | | 10760141, PMID: 10488235, PMID: 9680217, PMID: |
| | | | 9491607, PMID: 7994604, PMID: 7823908, PMID: |
| | | | 3129199, PMID: 2531370, PMID: 2476655] |
| cd03487 | CDD | RT_Bac_retron_II | RT Bac retron IL Reverse transcriptases (RTs) in |
| | | | bacterial retrotransposons or retrons. The polymerase |
| | | | reaction of this enzyme leads to the production of a |
| | | | unique RNA-DNA complex called msDNA (multicopy |
| | | | single-stranded (ss)DNA) in which a small ssDNA |
| | | | branches out from a small ssRNA molecule via a 2′- |
| | | | 5′ phosphodiester linkage. Bacterial retron RTs produce |
| | | | cDNA corresponding to only a small portion of the retron |
| | | | genome. [PMID: 1698615, PMID: 8828137, PMID: |
| | | | 11292805, PMID: 9281493, PMID: 2465092, PMID: |
| | | | 1722556, PMID: 1701261, PMID: 1689062] |
| cdO3715 | CDD | RT_ZFREV_like | RT_ZFREV_like: A subfamily of reverse transcriptases |
| | | | (RTs) found in sequences similar to the intact endogenous |
| | | | retrovirus ZFERV from zebrafish and to Moloney murine |
| | | | leukemia virus RT. An RT gene is usually indicative of a |
| | | | mobile element such as a retrotransposon or retrovirus. |
| | | | RTs occur in a variety of mobile elements, including |
| | | | retrotransposons, retroviruses, group II introns, bacterial |
| | | | msDNAs, hepadnaviruses, and caulimoviruses. These |
| | | | elements can be divided into two major groups. One |
| | | | group contains retroviruses and DNA viruses whose |
| | | | propagation involves an RNA intermediate. They are |
| | | | grouped together with transposable elements containing |
| | | | long terminal repeats (LTRs). The other group, also called |
| | | | poly(A)-type retrotransposons, contain fungal |
| | | | mitochondrial introns and transposable elements that lack |
| | | | LTRs. Phylogenetic analysis suggests that ZFERV |
| | | | belongs to a distinct group of retroviruses. [PMID: |
| | | | 14694121, PMID: 2410413, PMID: 9684890, PMID: |
| | | | 10669612, PMID: 1698615, PMID: 8828137] |
| cdO5536 | CDD | POLBc_B3 | DNA polymerase type-B B3 subfamily catalytic domain. |
| | | | Archaeal proteins that are involved in DNA replication |
| | | | are similar to those from eukaryotes. Some members of |
| | | | the archaea also possess multiple family B DNA |
| | | | polymerases (B1, B2 and B3). So far there is no specific |
| | | | function(s) has been assigned for different members of the |
| | | | archaea type B DNA polymerases. Phylogenetic analyses |
| | | | of eubacterial, archaeal, and eukaryotic family B DNA |
| | | | polymerases are support independent gene duplications |
| | | | during the evolution of archaeal and eukaryotic family B |
| | | | DNA polymerases. Structural comparison of the |
| | | | thermostable DNA polymerase type B to its mesostable |
| | | | homolog suggests several adaptations to high temperature |
| | | | such as shorter loops, disulfide bridges, and increasing |
| | | | electrostatic interaction at subdomain interfaces. [PMID: |
| | | | 10997874, PMID: 11178906, PMID: 10860752, PMID: |
| | | | 10097083, PMID: 10545321] |
| cd05780 | CDD | DNA_polB_Kod1_ | The 3′-5′ exonuclease domain of archaeal family-B DNA |
| | | like_exo | polymerases with similarity to Pyrococcus kodakaraensis |
| | | | Kod1, including polymerases from Desulfurococcus (D. |
| | | | Tok Pol) and Thermococcus gorgonarius (Tgo Pol). |
| | | | Kodl, D. Tok Pol, and Tgo Pol are thermostable enzymes |
| | | | that exhibit both polymerase and 3′-5′ exonuclease |
| | | | activities. They are family-B DNA polymerases. Their |
| | | | amino termini harbor a DEDDy-type DnaQ-like 3′-5′ |
| | | | exonuclease domain that contains three sequence motifs |
| | | | termed ExoI, ExoII and ExoIII, with a specific YX(3)D |
| | | | pattern at ExoIII. These motifs are clustered around the |
| | | | active site and are involved in metal binding and catalysis. |
| | | | The exonuclease domain of family B polymerases |
| | | | contains a beta hairpin structure that plays an important |
| | | | role in active site switching in the event of nucleotide |
| | | | misincorporation. Members of this subfamily show |
| | | | similarity to eukaryotic DNA polymerases involved in |
| | | | DNA replication. Some archaea possess multiple family- |
| | | | B DNA polymerases. Phylogenetic analyses of |
| | | | eubacterial, archaeal, and eukaryotic family-B DNA |
| | | | polymerases support independent gene duplications |
| | | | during the evolution of archaeal and eukaryotic family-B |
| | | | DNA polymerases. [PMID: 18355915, PMID: 16019029, |
| | | | PMID: 11178906, PMID: 10860752, PMID: 10097083, |
| | | | PMID: 10545321, PMID: 9098062, PMID: 12459442, |
| | | | PMID: 16230118, PMID: 11988770, PMID: 11222749, |
| | | | PMID: 17098747, PMID: 8594362, PMID: 9729885] |
| PF00078 | Pfam | RVT 1 | A reverse transcriptase gene is usually indicative of a |
| | | | mobile element such as a retrotransposon or retrovirus. |
| | | | Reverse transcriptases occur in a variety of mobile |
| | | | elements, including retrotransposons, retroviruses, group |
| | | | II introns, bacterial msDNAs, hepadnaviruses, and |
| | | | caulimoviruses. [PMID: 1698615] |
| PF00136 | Pfam | DNA_pol B | This region of DNA polymerase B appears to consist of |
| | | | more than one structural domain, possibly including |
| | | | elongation, DNA-binding and dNTP binding activities. |
| | | | [PMID: 9757117, PMID: 8679562] |
| PF07727 | Pfam | RVT 2 | A reverse transcriptase gene is usually indicative of a |
| | | | mobile element such as a retrotransposon or retrovirus. |
| | | | Reverse transcriptases occur in a variety of mobile |
| | | | elements, including retrotransposons, retroviruses, group |
| | | | II introns, bacterial msDNAs, hepadnaviruses, and |
| | | | caulimoviruses. This Pfam entry includes reverse |
| | | | transcriptases not recognised by the Pfam:PF00078 |
| | | | model. [PMID: 1698615] |
| IPR000477 | InterPro | RT_dom | The use of an RNA template to produce DNA, for |
| | | | integration into the host genome and exploitation of a host |
| | | | cell, is a strategy employed in the replication of retroid |
| | | | elements, such as the retroviruses and bacterial retrons. |
| | | | The enzyme catalysing polymerisation is an RNA- |
| | | | directed DNA-polymerase, or reverse trancriptase (RT) |
| | | | (2.7.7.49). Reverse transcriptase occurs in a variety of |
| | | | mobile elements, including retrotransposons, retroviruses, |
| | | | group II introns [PMID: 12758069], bacterial msDNAs, |
| | | | hepadnaviruses, and caulimoviruses. Retroviral reverse |
| | | | transcriptase is synthesised as part of the POL polyprotein |
| | | | that contains; an aspartyl protease, a reverse transcriptase, |
| | | | RNase H and integrase. POL polyprotein undergoes |
| | | | specific enzymatic cleavage to yield the mature proteins. |
| | | | The discovery of retroelements in the prokaryotes raises |
| | | | intriguing questions concerning their roles in bacteria and |
| | | | the origin and evolution of reverse transcriptases and |
| | | | whether the bacterial reverse transcriptases are older than |
| | | | eukaryotic reverse transcriptases [PMID: 8828137], |
| | | | Several crystal structures of the reverse transcriptase (RT) |
| | | | domain have been determined [PMID: 1377403], |
| IPR006134 | InterPro | DNA- | DNA is the biological information that instructs cells how |
| | | dir_DNA_pol_B_ | to exist in an ordered fashion: accurate replication is thus |
| | | multi_dom | one of the most important events in the life cycle of a cell. |
| | | | This function is performed by DNA- directed DNA- |
| | | | polymerases 2.7.7.7) by adding nucleotide triphosphate |
| | | | (dNTP) residues to the 5′ end of the growing chain of |
| | | | DNA, using a complementary DNA chain as a template. |
| | | | Small RNA molecules are generally used as primers for |
| | | | chain elongation, although terminal proteins may also be |
| | | | used for the de novo synthesis of a DNA chain. Even |
| | | | though there are 2 different methods of priming, these are |
| | | | mediated by 2 very similar polymerases classes, A and B, |
| | | | with similar methods of chain elongation. A number of |
| | | | DNA polymerases have been grouped under the |
| | | | designation of DNA polymerase family B. Six regions of |
| | | | similarity (numbered from I to VI) are found in all or a |
| | | | subset of the B family polymerases. The most conserved |
| | | | region (I) includes a conserved tetrapeptide with two |
| | | | aspartate residues. It has been suggested that it may be |
| | | | involved in binding a magnesium ion. All sequences in |
| | | | the B family contain a characteristic DTDS motif (SEQ |
| | | | ID NO: 1558), and possess many functional domains, |
| | | | including a 5′-3′ elongation domain, a 3′-5′ exonuclease |
| | | | domain [PMID: 8679562], a DNA binding domain, and |
| | | | binding domains for both dNTP's and pyrophosphate |
| | | | [PMID: 9757117], This domain of DNA polymerase B |
| | | | appears to consist of more than one activities, possibly |
| | | | including elongation, DNA-binding and dNTP binding |
| | | | [PMID: 9757117], |
| IPR013103 | InterPro | RVT_2 | A reverse transcriptase gene is usually indicative of a |
| | | | mobile element such as a retrotransposon or retrovirus. |
| | | | Reverse transcriptases occur in a variety of mobile |
| | | | elements, including retrotransposons, retroviruses, group |
| | | | II introns, bacterial msDNAs, hepadnaviruses, and |
| | | | caulimoviruses. This entry includes reverse transcriptases |
| | | | not recognised by IPR000477 [PMID: 1698615], |

[0550] Table 3 (below) shows exemplary Gene Writer™ proteins and associated sequences from a variety of retrotransposases, identified using data mining. Column 1 indicates the family to which the retrotransposon belongs. Column 2 lists the element name. Column 3 indicates an accession number, if any. Column 4 lists an organism in which the retrotransposase is found. Column 5 lists the predicted 5′ untranslated region, and column 6 lists the predicted 3′ untranslated region; both are sequences that are predicted to allow the template RNA to bind the retrotransposase of column 7. (It is understood that columns 5-6 show the DNA sequence, and that an RNA sequence according to any of columns 5-6 would typically include uracil rather than thymidine.) Column 7 lists the predicted retrotransposase amino acid sequence.

TABLE 3
Exemplary Retrotransposon Sequences

| | | | | 5. | 6. | 7. |
|---|---|---|---|---|---|---|
| 1. | 2. | 3. | 4. | Predicted | Predicted | Predicted Amino |
| Family | Element | Accession | Organism | 5′UTR | 3′UTR | Acid Sequence |
| R2 | R2- | — | Taeniopygia | GTCTAGTTACAACTGGGCAT | TTCAGGTTATTTAGATGCTT | MASCPKPGPPVSAGAMSLES |
| | 1_TG | | guttata | CGCTGCAGAGATCGCACCTC | AGTTTTTGTACCTTTCTTGT | GLTTHSVLAIERGPNSLANS |
| | | | | CTCGTGGTCCCGCTGGTAGC | TTTGTTTAGGATTTTGATAG | GSDFGGGGLGLPLRLLRVSV |
| | | | | CCTTCGAAGGGTGACTAAGT | TGTTAGTATTTTTATATTTT | GTQTSRSDWVDLVSWSHPGP |
| | | | | CGATCTCTGCCCCAGGTACG | TGTACGATTGCATAATGTTC | TSKSQQVDLVSLFPKHRVDL |
| | | | | GAGCCGTTGGGACTCACCAG | TTTTTTATACAGTTCTGTTT | LSKNDQVDLVAQFLPSKFPP |
| | | | | TCCAACGTAACTCCTGCCTA | TAATAAAATAGACGATAGCT | NLAENDLALLVNLEFYRSDL |
| | | | | AATTCGGTGAAACAAATTCC | AGAGACGTTAGGGCAGCCAC | HVYECVHFAAHWEGLSGLPE |
| | | | | TCGGTAAAAAGCCCC | AAGCCAGTTAGGTAGCGGAT | VYEQLAPQPCVGETLHSSLP |
| | | | | (SEQ ID NO: 1140) | AGTAGGTAGGAACAGACTTT | RDSELFVPEEGSSEKESEDA |
| | | | | | TACTATTTCATAACGCGTCA | PKTSPPTPGKHGLEQTGEEK |
| | | | | | ATTACCACCTGATTTGGACC | VMVTVPDKNPPCPCCGTRVN |
| | | | | | AATTCACGGGATTTGTCCAA | SVLNLIEHLKVSHGKRGVCF |
| | | | | | GGTGGACGGGCCACCTTTAC | RCAKCGKENSNYHSVVCHFP |
| | | | | | TTAACCCGGAAAAGGAACAT | KCRGPETEKAPAGEWICEVC |
| | | | | | ATATAATTTATGTGTGTTCG | NRDFTTKIGLGQHKRLAHPA |
| | | | | | ATAAA | VRNQERIVASQPKETSNRGA |
| | | | | | (SEQ ID NO: 1263) | HKRCWTKEEEELLIRLEAQF |
| | | | | | | EGNKNINKLIAEHITTKTAK |
| | | | | | | QISDKRRLLSRKPAEEPREE |
| | | | | | | PGTCHHTRRAAASLRTEPEM |
| | | | | | | SHHAQAEDRDNGPGRRPLPG |
| | | | | | | RAAAGGRTMDEIRRHPDKGN |
| | | | | | | GQQRPTKQKSEEQLQAYYKK |
| | | | | | | TLEERLSAGALNTFPRAFKQ |
| | | | | | | VMEGRDIKLVINQTAQDCFG |
| | | | | | | CLESISQIRTATRDKKDTVT |
| | | | | | | REKHPKKPFQKWMKDRAIKK |
| | | | | | | GNYLRFQRLFYLDRGKLAKI |
| | | | | | | ILDDIECLSCDIPLSEIYSV |
| | | | | | | FKTRWETTGSFKSLGDFKTY |
| | | | | | | GKADNTAFRELITAKEIEKN |
| | | | | | | VQEMSKGSAPGPDGITLGDV |
| | | | | | | VKMDPEFSRTMEIFNLWLTT |
| | | | | | | GKIPDMVRGCRTVLIPKSSK |
| | | | | | | PDRLKDINNWRPITIGSILL |
| | | | | | | RLFSRIVTARLSKACPLNPR |
| | | | | | | QRGFIRAAGCSENLKLLQTI |
| | | | | | | IWSAKREHRPLGVVFVDIAK |
| | | | | | | AFDTVSHQHIIHALQQREVD |
| | | | | | | PHIVGLVSNMYENISTYITT |
| | | | | | | KRNTHTDKIQIRVGVKQGDP |
| | | | | | | MSPLLFNLAMDPLLCKLEES |
| | | | | | | GKGYHRGQSSITAMAFADDL |
| | | | | | | VLLSDSWENMNTNISILETF |
| | | | | | | CNLTGLKTQGQKCHGFYIKP |
| | | | | | | TKDSYTINDCAAWTINGTPL |
| | | | | | | NMIDPGESEKYLGLQFDPWI |
| | | | | | | GIARSGLSTKLDFWLQRIDQ |
| | | | | | | APLKPLQKTDILKTYTIPRL |
| | | | | | | IYIADHSEVKTALLETLDQK |
| | | | | | | IRTAVKEWLHLPPCTCDAIL |
| | | | | | | YSSTRDGGLGITKLAGLIPS |
| | | | | | | VQARRLHRIAQSSDDTMKCF |
| | | | | | | MEKEKMEQLHKKLWIQAGGD |
| | | | | | | RENIPSIWEAPPSSEPPNNV |
| | | | | | | STNSEWEAPTQKDKFPKPCN |
| | | | | | | WRKNEFKKWTKLASQGRGIV |
| | | | | | | NFERDKISNHWIQYYRRIPH |
| | | | | | | RKLLTALQLRANVYPTREFL |
| | | | | | | ARGRQDQYIKACRHCDADIE |
| | | | | | | SCAHIIGNCPVTQDARIKRH |
| | | | | | | NYICELLLEEAKKKDWVVFK |
| | | | | | | EPHIRDSNKELYKPDLIFVK |
| | | | | | | DARALVVDVTVRYEAAKSSL |
| | | | | | | EEAAAEKVRKYKHLETEVRH |
| | | | | | | LTNAKDVTFVGFPLGARGKW |
| | | | | | | HQDNFKLLTELGLSKSRQVK |
| | | | | | | MAETFSTVALFSSVDIVHMF |
| | | | | | | ASRARKSMVM |
| | | | | | | (SEQ ID NO: 1016) |
| R2 | R2- | — | Geospiza | AGACTTAAGTGAGTTTGGTT | GGTAGATAATCTTTGTATAG | VGLCPSPGVDGTHQPNDSFQ |
| | 1_Gfo | | fortis | ACAACTGGGCATAGCTGCAG | TGGGGGGGGATCTCATGTAC | NFGETNFSVQVARLVTRNLA |
| | | | | AGACCGCGCCTCCTCGCGGC | CGGGTTTCTTTTATTTGATT | PRSVRGNGFGSGMATHPVPA |
| | | | | CCCGCTGGTAAGCCCTTAAC | TTCAATAAAACAGACGGTAG | DESGHESDPFLVGRSCGQPA |
| | | | | AGGGTGACTAA | CTAGGTTCGCAAGGCAGCCA | RLTRQSVGTQTSRDDILPSK |
| | | | | (SEQ ID NO: 1141) | CAAGCCAAAGATAGGTAGGG | TTKLTENELDLLVNFSLELY |
| | | | | | TGCTCATAGTGAGTAGGGAC | RSDLQGFVQEGIHFSVNREV |
| | | | | | AGTGCCTTTTGATTCACAAC | LEGFPEVYEQPAPQPAVGDD |
| | | | | | GCGTCAATACCATCTGACAC | LNTSLPPDNNICVLEKGSSE |
| | | | | | GGATACCCTTACCGGACTTG | AVEDGTPEVAHPVPETQGKE |
| | | | | | TCATGATCTCCCAGACTTGT | SPNNIVMVTLPNKNPPCPCC |
| | | | | | CCAAGGTGGACGGGCCACCT | RVRLHSVLALIEHLKGSHGK |
| | | | | | TTACTTAACCCGGAAAAGGA | KRACFRCVKCGRENFNYHST |
| | | | | | ACATATATTAATTATATGTG | VCHIAKCKGPKVEKAPVGEW |
| | | | | | TTCGGAAAA | ICEVCGRDFTTKIGLGQHKR |
| | | | | | (SEQ ID NO: 1264) | LAHPLVRNQERIDASQPKET |
| | | | | | | SNRGAHKRCWTKEEEEMLIK |
| | | | | | | LEVQFEGHRNINKLIAEHLT |
| | | | | | | TKTSKQISDKRRLLPRKQLT |
| | | | | | | DLSKGVAGQKVLDPGLSHQP |
| | | | | | | QLGVVDNGLGGGHLPGGPAA |
| | | | | | | EGRTIEPLGHHLDKDNGHRE |
| | | | | | | IADQHKAGRLQAHYRKKIRK |
| | | | | | | RLSEGMISNFPEVFEQLLDC |
| | | | | | | QEAQPLINQAAQDCFGCLDS |
| | | | | | | ASQIRKALRKQNTQKDQGDQ |
| | | | | | | PKRPAQKWMKKRAVKRGHFL |
| | | | | | | RFQKLFHLDRGKLAKIILDD |
| | | | | | | VECLSCDIPPSEIYSVFKAR |
| | | | | | | WETPGQFAGLGDFEINRKAN |
| | | | | | | NKAFRDLITAKEILKNVREM |
| | | | | | | TKGSAPGPDGIALGDIRKMD |
| | | | | | | PEYTRTAELFNLWLTSGEIP |
| | | | | | | DMVRGCRTVLIPKSSKPERL |
| | | | | | | KDINNWRPITIGSILLRLFS |
| | | | | | | RIITARLTKACPLNPRQRSF |
| | | | | | | ISAAGCSENLKLLQTIIRTA |
| | | | | | | KNEHRPLGVVFVDIAKAFDT |
| | | | | | | VSHQHIIHVLQRRRVDPHII |
| | | | | | | GLVKNMYKDISTVITTKKNT |
| | | | | | | YTDKIQIQVGVKQGDPLSPL |
| | | | | | | LFNLAMDPLLCKLEEHGKGF |
| | | | | | | HRGQSKITAMAFADDLVLLS |
| | | | | | | DSWEDMNANIKILETFCDLT |
| | | | | | | GLKTQGQKCHGFYIKPTKDS |
| | | | | | | YTVNNCAAWTINGTPLNMIN |
| | | | | | | PGESEKYLGLQFDPWVGIAK |
| | | | | | | TSLPEKLDFWLERIDRAPLK |
| | | | | | | PFQKLDILKTYTIPRLTYVA |
| | | | | | | DHSEMKAGALEALDRTIRSA |
| | | | | | | VKDWLHLPSSTCDAILYTSM |
| | | | | | | KDGGLGVTKLVGLIPSVQAR |
| | | | | | | RLHRIAQSPEETMKDFLEKA |
| | | | | | | QMEKMYEKLWVQAGGKRKRM |
| | | | | | | PSIWEALPEVVPSIDTATTS |
| | | | | | | EWEAPNPKSKYPRPCNWRRK |
| | | | | | | EFKKWTKLIAQGWGIRCFKG |
| | | | | | | DKISNNWIRHYRYIPHRKLL |
| | | | | | | TAIQLRASVYPTREFLARGR |
| | | | | | | EDNCVKSCRHCEAAEESCAH |
| | | | | | | IIGMCPVVRDARIKRHNRIC |
| | | | | | | ERLMEEAGKRDWTVFQEPHI |
| | | | | | | RDVTKELYKPDLIFVKEGLA |
| | | | | | | LVVDVTIRFESTKTTLEEAA |
| | | | | | | AEKVNKYKHLETEVRNLTNA |
| | | | | | | KDVIFMGFPLGARGQWYNKN |
| | | | | | | FELLDTLGLPRSRQDIIAKT |
| | | | | | | LSTDALISSVDIIHMFASRG |
| | | | | | | RRQHA |
| | | | | | | (SEQ ID NO: 1386) |
| R2 | R2- | — | Zonotrichia | CGACTTGAGAAGGTCTGGTT | GTAGTCACATTGCACTTTCT | NKFLGKSRVAYCLKPGPPVS |
| | 1_ZA | | albicollis | ACAACTGGGCATAGCTGCAG | GTAACTTGCACTGGGTGTGG | DRGKEFGSGLTTHPEPESES |
| | | | | AGATCGCGCCTCCTCGTGGC | GATGTGGGCCTGGGGTGTGG | GHDPTVPNPGPSLGAGEGAQ |
| | | | | CCCGCTGGTAAGCCCTTAAC | GTTATGGGGTATATATGTGG | PLPLLRVSVGTQTCEEDFIT |
| | | | | AGGGTGACTAAGTCGATCTC | GATATTCTGGTGGGAATGTC | SRPTKLPGIESELGPLVKFS |
| | | | | TGCCCCAGTCCAGGAGCCGC | CATTCACTGTATGCCTATCT | LEVYRSDLKGDVQFEGIHFP |
| | | | | TGGGTTTCACCAGCCCAGCG | TTTTAATAAAAAGACGGTAG | DNWGVLEGFPEVYEQLAPQP |
| | | | | ATTCCTTCCAAATTCGGTGA | CTAGGTTCGCGAAGCAGCCA | NGGDELNHSLPGDREGDVLE |
| | | | | (SEQ IDNO: 1142) | CAAGCCAATAGCCAGTTAGG | KDSSEKEKEAAPEALPSVQR |
| | | | | | TAGCTCATAGTGGGTAGGTG | ARSEQLPDNIVKVTVPDKNP |
| | | | | | ACAGGAACCTTTGACTCAGA | PCPCCGVRLNSVLALIEHLK |
| | | | | | ACGCGTCCATTAACATCTAG | GSHGRRRVCFRCAKCGRENF |
| | | | | | AACGGACCAAACTTCGGACA | NHHSTVCHYAKCKGPQIERP |
| | | | | | TGCACCGATTAACCGGATTT | PVGEWICEVCGRDFTTKIGL |
| | | | | | GTCCAAGGTGGACGGGCCAC | GQHKRHMHAMVRNQERIDAS |
| | | | | | CTTTACTTAACCCGGAAAGG | QPKETSNRGAHKRCWTKEEE |
| | | | | | GAACATATATAGTTATATGT | ELLMKLEVQFENHKNINKLI |
| | | | | | GTTCGTAATA | AEQLTTKTAKQISDKRRMLL |
| | | | | | (SEQID NO: 1265) | KKGRGTTGNLETEPGMSHQS |
| | | | | | | QAKVKDNGLGGDHLPGGPVV |
| | | | | | | DKGTIGKPGQHLDTDNSHQI |
| | | | | | | TAGKKKGGGLQARYRRRIMK |
| | | | | | | RLAAGTINIFPKVFKELIND |
| | | | | | | QEARPLINQTTEDCFGLLDS |
| | | | | | | ACQIRTALREKGKSQEERPR |
| | | | | | | KQYQKWMKKRAIKRGDYLRF |
| | | | | | | QRLFHLDRGKLARIILDNTE |
| | | | | | | SLSCDISPSEIYSVFKARWE |
| | | | | | | TPGHFNGLGDFEIKGKANNK |
| | | | | | | AFRDFITAKEIEKNVREMSK |
| | | | | | | GSAPGPDGIALGDIKKMDPG |
| | | | | | | YSRTAELFNLWLTAGDIPDM |
| | | | | | | VRGCRTVLIPKSTTPERLKD |
| | | | | | | INNWRPITIGSILLRLFSRI |
| | | | | | | ITARMTKACPLNPRQRGFIS |
| | | | | | | APGCSENLKLLQSIIRTAKN |
| | | | | | | EHKPLGVIFVDIAKAFDTVS |
| | | | | | | HQHIIHVLQQRRVDPHIVGL |
| | | | | | | VNNMYKDISTYVTTKKNTHT |
| | | | | | | DKIQIRVGVKQGDPLSPLLF |
| | | | | | | NLAMDPLLCKLEESGKGFHR |
| | | | | | | GQSSITAMAFADDLVLLSDS |
| | | | | | | WENMKENIKILETFCNLTGL |
| | | | | | | KTQGQKCHGFYIKPTKDSYT |
| | | | | | | INNCPAWTINGTPLNMINPG |
| | | | | | | ESEKYLGLQIDPWTGVAKYD |
| | | | | | | LSTKLKIWLESIDRAPLKPL |
| | | | | | | QKLDILKTYTIPRLTYLADH |
| | | | | | | SEMKAGALEALDQQIRTAVK |
| | | | | | | DWLHLPSCTCDAILYVSTRD |
| | | | | | | GGLGVTKLAGLIPSVQARRL |
| | | | | | | HRIAQSPDETMKDFLEKAQM |
| | | | | | | EKMYEKLWVQAGGKKKGMPS |
| | | | | | | IWEALPMTVPPTNTGNLSEW |
| | | | | | | EAPNPKSKYPKPCDWRRKEL |
| | | | | | | KKWTKLESQGRGVKNFRNDT |
| | | | | | | ISNDWIQYYRRIPHRKLLTA |
| | | | | | | IQLRANVYPTREFLARGRGD |
| | | | | | | NYVKFCRHCEADLETCGHII |
| | | | | | | GFCPVTKDARIKRHNRICDR |
| | | | | | | LCEEAAKREWVVFKEPHLRD |
| | | | | | | ATTELFKPDVIFVKEDRALV |
| | | | | | | VDVTVRYESAKTTLEAAAME |
| | | | | | | KVDKYKHLEAEVKELTNAKD |
| | | | | | | VVFMGFPLGARGKFYKGNFN |
| | | | | | | LLETLGLPKTRQLSVAKTLS |
| | | | | | | TYALMSSVDIVHMFASRSRK |
| | | | | | | PNV |
| | | | | | | (SEQ ID NO: 1387) |
| R2 | R2Dr | AB097 | Danio | AATCCCCCCTACCCAATCCC | AAATCCCAGCGGGATACAGC | MESTAKGKSYWMARRPVEGA |
| | | 126 | rerio | CCCGTCGTGACCTCCAGGCC | AAGAAGGTATCGGATCTAAT | TEGSLGRVPFVTRDPKRKPE |
| | | | | AGGAATCACGAGCGTACGAC | AAGGTTGAGCGAGGAGAGGG | AKRTLTHGLGLRECSVVLTR |
| | | | | AGTGGCCATCCGGCAATGAC | TGGAGATCCTTTGGGGGGGG | LIEGRRGRDHTPSGWNAQRG |
| | | | | AATAGCGTGACTAACGACAA | TCGGGCTAAGTTCCCCTCTC | MPNDESSVEEPNGPIPSNPI |
| | | | | TGAGTCAGATCCATGACCCT | GGGTCCTCCCACGGTGACGC | PTGTQALPEPMADGEQGEHP |
| | | | | TGGAGTGGGTTAACCTCCGC | TCTACCCCTCCCTCCTCGCT | GVVVTLPLRDLNCPLCGGSA |
| | | | | CTCTTTAAAAAC | CGTAGAACCCAACGGTGAAC | STAVKVQRHLAFRHGTVPVR |
| | | | | (SEQ ID NO: 1143) | ACGGTTGGCAGGATGAAGTG | FSCESCGKTSPGCHSVLCHI |
| | | | | | ACGTGAGGGGTAAGACATGC | PKCRGPTGEPPEKVVKCEGC |
| | | | | | GTACGTGAGCGCGCATTTTT | SRTFGTRRACSIHEMHVHSE |
| | | | | | GCTGTTCTCTGGACTGGGTT | IRNRKRIAQDRQEKGTSTDG |
| | | | | | TCGTCCCCCTCACAACCATC | EGRAGVERADAGEGPSGEGI |
| | | | | | ACTTACACTATAGGGGCACA | PPKRPRRARTPREPSEPPAN |
| | | | | | GCGGCTCCTACCTCCCTCCC | PPILSPQPDLPPGGLRDLLR |
| | | | | | TATGACCCCCCCTTCCCATA | EVASGWVRAARDGGTVIDSV |
| | | | | | CCGATCCATGGCTGTTCTAG | LAAWLDGNDRLPELVDAATQ |
| | | | | | TCTGGACCGAGGGTCGGACG | RTLQGLPAGRLARRPATFVA |
| | | | | | GGGCATTTGAAGGTAGCTGG | PNRRRGRWGRRLKLLAKRRA |
| | | | | | AATCCTCCGCTGCTGCGAGC | YHDCQIRFRKDPARLAANIL |
| | | | | | CTGAGGTCGATGGTTAGAGG | DGKSETSCPINEQAIHEHFR |
| | | | | | TGAAATACTTGGGAGGAGAC | NKWANPSPFGGLGRFGTENR |
| | | | | | ACAGCCTCCGGAGAGCCCCT | ANNAHLLGPISKSEVQTSLR |
| | | | | | CCCGGGTGGTCATCATGGCA | NASNASTPGPDGVGKRDISN |
| | | | | | ACCGGGTGAAACCTTACGGT | WDPECETLTQLFNMWWFTGV |
| | | | | | TTCACTTACGAAACAGCACC | IPSRLKKSRTVLLPKSSDPG |
| | | | | | ATAACAGCGCCGTAATAGCG | AEMEIGNWRPITIGSMVLRL |
| | | | | | CACCGGTGTGACTACTGTCC | FTRVINTRLTEACPLHPRQR |
| | | | | | AGTGCTGATATTCTCATCTG | GFRRSPGCSENLEVLECLLR |
| | | | | | GAGAATACAACACGGGTAAT | HSKEKRSQLAVVFVDFAQAF |
| | | | | | GGCAGAGTATTCAAAACCCA | DTVSHEHMLSVLEQMNVDPH |
| | | | | | AATGTTTACGATCGACCAAC | MVNLIREIYTNSCTSVELGR |
| | | | | | GGAGTCGTTCCCTTGCATCT | KEGPDIPVRVGVKQGDPLSP |
| | | | | | AGGCCGGACCCGAAACTGCC | LLFNLALDPLIQSLERTGKG |
| | | | | | GTAATTGCCCGTCCCCAAGG | CEAEGHKVTALAFADDLALV |
| | | | | | TAGCCTCTTAGAAAACCGAA | AGSWEGMAHNLALVDEFCLT |
| | | | | | GCCCGGTCGGGGCGGTGGTT | TGLTVQPKKCHSFMVRPCRG |
| | | | | | GCGGCGGCGCTGCGGGGGCC | AFTVNDCPPWVLGGKALQLT |
| | | | | | TGCTGCTCGGGCGGCGTCGG | NIENSIKYLGVKVNPWAGIE |
| | | | | | TGTGCCGCGGTGGTTGCGGT | KPDLTVALDRWCKRIGKSLL |
| | | | | | GGTGCGGCGGGGATCTCGGT | KPSQKVYILNQFAIPRLFYL |
| | | | | | CCTTGCGGTGCCGCTGTGCC | ADHGGAGDVMLQNLDGTIRK |
| | | | | | GCCGCGGTCGCGTCGGTGGC | AVKKWLHLPPSTCNGLLYAR |
| | | | | | GCTGGGGTGGTGGCCCGAGT | NCNGGLGICKLTRHIPSMQA |
| | | | | | GGCGTCGGCGTGCCACTGCC | RRMFRLANSSDPLMKAMMRG |
| | | | | | CATAGTCGCCCGCGGGGGCG | SRVEQKFKKAWMRAGGEESA |
| | | | | | ACCGATCTGGAGGGGCGAGG | LPRVFGANQYQEGEEVANDL |
| | | | | | GGGCTCGCGGGACTTTAACG | VPRCPMPSDWRLEEFQHWMG |
| | | | | | AGAAACGGAACGCAACTTCT | LPIQGVGIAGFFRNRVANGW |
| | | | | | CGCATCGCTCCCGGGACTTT | LRKPAGFKERHYIAALQLRA |
| | | | | | CCCCCCTCGTTCAGCCGAGG | CVYPTLEFQQRGRSKAGAAC |
| | | | | | GATGCCAAAAGGCATGAAAG | RRCSSRLESSSHILGKCPAV |
| | | | | | GTAAGTACCATACCGGTCCG | QGARIRRHNKICDLLKAEAE |
| | | | | | CAAAACTCTCTTCTGACTCG | TRGWEVRREWAFRTPAGELR |
| | | | | | GTTCTCTGTTGGTTTTCTAG | RLDLVLILGDEALVIDVTVR |
| | | | | | AGTAACAACGAGGTGGAGGA | YEFAPDTLQNAGKDKVSYYG |
| | | | | | GAGGGACATGGCAGGGACTC | PHKEAIARELGVRRVDIHGF |
| | | | | | CCATTCGTGCCAGCGGGTGG | PLGARGLWLASNSKVLELMG |
| | | | | | GGACAGATCGAAGGAACGGT | LSRERVKVFSRLLSRRVLLY |
| | | | | | TCGAGGGCGTAACAGACGAG | SIDIMRTFYATLQ |
| | | | | | AGGGAATCCGGTCACACATT | (SEQ ID NO: 1388) |
| | | | | | GATGCCATGCCTAAATAGGC | |
| | | | | | GAGGTTTGTATTTCTACTTT | |
| | | | | | GTGGGTTCAGTATAGTCGGA | |
| | | | | | GCATATGGTCGGTTGTCCCG | |
| | | | | | TTGTTTTCACGGCGGGCAAG | |
| | | | | | CGACTATCATGATAAAGTAG | |
| | | | | | AATGGGAGACGGGCTCCCTG | |
| | | | | | ACAAACCCGGAAAGGCGCCC | |
| | | | | | CCCCGTGGTTCGTAGCAGCT | |
| | | | | | GACGGATCACGCTCGAAGAA | |
| | | | | | AAATGAGTGAGAGGGGACGC | |
| | | | | | CGCAACCAC | |
| | | | | | (SEQ ID NO: 1266) | |
| R2 | R2- | — | Gasterosteus | CATATTGGGGTCTCAGGAGG | GGAGGGGAGTAGGTCTCTAC | MLRGGVGTPPAGGAGAVGPG |
| | 1_GA | | aculeatus | AGACACAGGGTCTGTTGCGG | TCTGACCCGAAGGGCCCCCC | MASPGGCSVRFSPGGRRLLG |
| | | | | CTCCGGTAAACGGTACCGGA | CGTTTCAGACCTGATTCTAG | HRTGGLSPSVSWRLKRLSVS |
| | | | | GTCGGTTAAGCATCGTTTGG | GCTACCTGTGCCTAATTGGG | LRRWSGPGLLGADGAGGGAA |
| | | | | GCCCGCCTCCACGTGGTGGT | GGGGTCCCAAAGAGATGTTG | VASPRGTQVLGSGAGRRWLG |
| | | | | CCGCGGTAACACCAATAGGG | TCTGTTGTAGAAGGGTTTGC | HGSRGSSPSAARGLRRLTVR |
| | | | | TGGCTAAGAGGCCCAGTAAT | GCCACTGACTGCACGGAAGG | LKRLSGGLLSPKACRDAEEG |
| | | | | TTCCCCGAATTGTCTTCCCC | GTGGGCCTCGACAGGTAGGG | SSSSPGFRNPKGLGGRGLTP |
| | | | | CCCGCGCGGGGGGGACCCCC | GTTACATGACTCCGTGCTGC | LGSRRFCRLTVSLNRWRGSL |
| | | | | CTTTAGTGTCGGAGCGGTCG | TCAGCAGACCCGCGCCTCTG | VKLNASSRASGRRTPVKPAC |
| | | | | CGCCTCCGCGTTTGGGGTGT | AGACCGGGTAGGGCTACTTG | DSRAGRGSEHAEGGGVSAAP |
| | | | | CGCAGGCGTGAGCCTTCGTC | AACAAGCGACGCCCTGGTGT | MVLRSRRKLTFSVDGDSNSG |
| | | | | CCCTTAAGTTCAGACGGTCC | ATGTCCGTATCCTAACCTGG | DRARSGSVSAARPGHLLVDG |
| | | | | CGGCTTCTTGCCGGGCCAAC | TTTGGGAAAGCCGATACCGG | ESASSRSGPAGDARLAGPST |
| | | | | CCCCGGTGCAGCGTTCTCCC | CAATGCCCGCCACAGGTGTC | RSRRKGCLPPVDFENPKKRT |
| | | | | ATGTTGGATCGGCACCCAGC | GCGCACCCCACGGGATGACG | RLMAKMTNGNPTSHVPCPAP |
| | | | | CCCGGGTGCCATGCGAGTTC | TATGGGCCCCGGGGGACCTC | CSNGHEGGGRVAVIEGRLPE |
| | | | | AGACATTTTGTTTATGTATC | ATGGATACTCCACTGGACTT | LSGSRISGIQPALPVETSFV |
| | | | | GTCTGCGTGGTTGACTTGCT | GCACAATCCTGGTGTACTGG | GQSTGRGADGDANANSSPPS |
| | | | | AAGCTCATTTCCTCCTCTCA | ATGCAGCGACGTTGGTGACA | PNLGGSVGMVPAVRDGTPPL |
| | | | | CTGCGTCCCCCCAGGTGCTG | TAAGCAATCGCTAAGTCGGG | GRPGEDHSRECAGGNTPLWM |
| | | | | ATCGGTTGAAGAGGATTCGT | GTAGGGGAGGTGGGGACCTC | LEDSFRCDYCPREFGTRAGR |
| | | | | CGTTGACCTCGGCGGTGAAT | GGCACGGCTGTAGGAACGGG | SLHMRRAHLAEYDGAGFCWG |
| | | | | TTGGGATTGTATTATACAGG | TGTATGGGCTCCGGCAGCCG | ERLSEFAATRLWSTEETKKL |
| | | | | TAGGTATAGAGGGCGTGCGG | TCGTCACTCCCATACAACAC | AVFCERGVPSPSECRAIAAS |
| | | | | (SEQ ID NO: 1144) | AGGGGCTGCATCCTGGTGGC | LGAGKTHHQVRSKCRLVFEA |
| | | | | | CGGTGCTAGTTGGTTCTGGA | IRRRELLEVAAATERLEKSA |
| | | | | | AGCCCGCCCGGGCTGGTTCG | RRKQPAVPPAPVHGVRGVLR |
| | | | | | CAGAAGCAGGGTGCGCCCAG | GLLGKRVPREGGTTGSTSAR |
| | | | | | GGTAGGTTTGGTATATCTGG | IVRRDDCRQGAVASASLNLI |
| | | | | | GTCCGGTGCGATACCTATCG | RRLGRKATGRSGRRRVLGRP |
| | | | | | ATGGGCAGCGAGGGCCGCCT | PRMDVRRSVRMRRMRRFLYR |
| | | | | | CGTGACGCGCTGTGTGGAGC | LARLGWAKLAMFVLDGQMGA |
| | | | | | TGGAGCCGGCCTGGGTATGA | SCPVPLVEVSAVFRERWSIV |
| | | | | | ACAGTTCTTGCGGATGTGGC | RAFLGLGQFGGFGTADNAGF |
| | | | | | GTAGCTAGATAGTACCCGTG | GKLIDPAEVRAHLQSIKNRS |
| | | | | | GTTGTGGGCGTGGTGTCGAC | SPGPDGITKVALSKWDPEGI |
| | | | | | CAAATGTTGTCCTGTGTGCA | KLAHMYSTWLVSAGIPKVFK |
| | | | | | CATAGGCCAAGGGTTACGTG | KCRTTLIPKTGDVSLHGDVG |
| | | | | | GGTGGCAGTCAGAAGCACCC | QWRPITIASLVLRLYSRILT |
| | | | | | GCACCTGGAAGTGATTGCCC | ERMTVACPSHPRQRGFIASP |
| | | | | | CGGGATCCCGGCTCTCTGTG | GCSENLMLLEGCMSLSKAGN |
| | | | | | AAGAGCTACCTTGAGGAAAG | GSLAVVFVDFAKAFDTVSHE |
| | | | | | GTGTTCCGCTGGAACTCAAG | HLLSVLVQKGLDQHMVELIK |
| | | | | | ACCCTACAGTAGGGGATATC | DSYENSVTKVHCQEGCSTDI |
| | | | | | AACTGGCTTTGAGGTGCTGT | AMKVGVKQGDSMSPLLFNLA |
| | | | | | GATTCCGGAACCAGGGCGAG | LDPLIQQLEREGRGFPVNGK |
| | | | | | GGCGAGTACTTAGAGCATGT | SITAMAFADDLAIVSDSWEG |
| | | | | | CCAAAAGCCCGGGGAACGTT | MRANLDILVDFCELTGMRTQ |
| | | | | | CCGGGGGCCTGCTTGGGTCG | PSKCHGFLIEKSGSRSYKVN |
| | | | | | TTGGACCCACATCCGTAAAA | RCEPWLLNDTALHMVGPKES |
| | | | | | CGATGGATCTCGCGTCGGCG | IKYLGVQVNPWTGIFAEDTV |
| | | | | | CTCGGGAGAACTTCCCGCAT | AKLRQWVVAISKTPLRPLDK |
| | | | | | GAACGCTGATTGCATGTGAG | VSLLCQFAVPRVIFVADHCM |
| | | | | | AACGCCCCCACGGCGGCGGG | LSAKALTEMDRSIRQAVKRW |
| | | | | | GCAGGCGCTCCCCCTGGGTG | LHLARCTTNGLLYSRKSSGG |
| | | | | | TAAGGCTCGGGGGGGTCACG | LGIPKLSMIVPAMQARRLLG |
| | | | | | GCTCCGCTCTAAAAG | LSRSKDETVRWMFLETTDHV |
| | | | | | (SEQ ID NO: 1267) | AFERAWLRAGGSPDEVPELG |
| | | | | | | PDLVEGSPAEGNADPVSTVR |
| | | | | | | PRKRIVPCDWRQVEFDRWAG |
| | | | | | | QLVQGKGIRTFEADKISNCW |
| | | | | | | LYDYPPNKLKPGDFTAAVQL |
| | | | | | | RANVYPTRELAGRGRTDTID |
| | | | | | | VCCRHCGEAPETCWHILALC |
| | | | | | | PKVKRCRIQRHHKVCQVLVA |
| | | | | | | EAERHGWEVEREKRWMLPSG |
| | | | | | | ECVAPDLICWLDELALIVDV |
| | | | | | | TVRYEFDEESLERARIEKEC |
| | | | | | | KYRPLIPVIRASRVQTKKVT |
| | | | | | | VYGFPLGARGKWPAKNELLL |
| | | | | | | ADLGLSKARTRSFAKLLSRR |
| | | | | | | VLLHSLDVMRTFMR |
| | | | | | | (SEQ ID NO: 1389) |
| R2 | R2_BM | AB076 | Bomby | GGGCGATACGCATAATTTTA | GCCTTGCACAGTAGTCCAGC | MMASTALSLMGRCNPDGCTR |
| | | 841 | x mori | ATTTCCCGATTGAAATCCAG | GGTAAGGGTGTAGATCAGGC | GKHVTAAPMDGPRGPSSLAG |
| | | | | TCGTCTTAATCTGGTGACCA | CCGTCTGTTTCTTCCCCGGA | TFGWGLAIPAGEPCGRVCSP |
| | | | | GTGGCGCGGTCACCAGTATA | GCTCGCTCCCTTGGCTTCCC | ATVGFFPVAKKSNKENRPEA |
| | | | | GTGCACAGGACGTGAATGGC | TTATATTTAACATCAGAAAC | SGLPLESERTGDNPTVRGSA |
| | | | | TCCGAGGCTGGCGGAGTCAC | AGACATTAAACATCTACTGA | GADPVGQDAPGWTCQFCERT |
| | | | | TCACTATAAGTGTGAGAGAC | TCCAATTTCGCCGGCGTACG | FSTNRGLGVHKRRAHPVETN |
| | | | | GATGTCCTGTGCCAAGTATA | GCCACGATCGGGAGGGTGGG | TDAAPMMVKRRWHGEEIDLL |
| | | | | CGTCCAACCCTAACGGGTTA | AATCTCGGGGATCTTCCGAT | ARTEARLLAERGQCSGGDLF |
| | | | | AGTGAAATTAGTTGCTCATA | CCTAATCCATGATGATTACG | GALPGFGRTLEAIKGQRRRE |
| | | | | ACAGGGACGGTGTACCTGTT | ACCTGAGTCACTAAAGACGA | PYRALVQAHLARFGSQPGPS |
| | | | | TGCTCGTGGCTGGCTATCGA | TGGCATGATGATCCGGCGAT | SGGCSAEPDFRRASGAEEAV |
| | | | | ATGGACGGGACCAATACACC | GAAAA | EERCAEDAAAYDPSAVGQMS |
| | | | | CCCCTGTTAGTAATGGGGTA | (SEQ ID NO: 1268) | PDAARVLSELLEGAGRRRAC |
| | | | | AGAGAGAGCGGTCTGAAACT | | RAMRPKTAGRRNDLHDDRTA |
| | | | | ATGGCCGAAATCACGACGCC | | SAHKTSRQKRRAEYARVQEL |
| | | | | CCACTCCTACCCATAACCTG | | YKKCRSRAAAEVIDGACGGV |
| | | | | CACGTGGTACCGCCGCACAT | | GHSLEEMETYWRPILERVSD |
| | | | | TGACCGATACGGGAGGAGGG | | APGPTPEALHALGRAEWHGG |
| | | | | GCAGCACTTGAATCACGTAG | | NRDYTQLWKPISVEEIKASR |
| | | | | TCTTGGTGTAGCCATTGCGG | | FDWRTSPGPDGIRSGQWRAV |
| | | | | GACTACAGCCCTCGTAAGTG | | PVHLKAEMFNAWMARGEIPE |
| | | | | CCGCCTTAGAACGCAACGGG | | ILRQCRTVFVPKVERPGGPG |
| | | | | GCAATAGGTGGGCCGGGGCG | | EYRPILIASIPLRHFHSILA |
| | | | | CTAGCGGGGGGGAGTAATCT | | RRLLACCPPDARQRGFICAD |
| | | | | CCCCTGTTGGCGTGCACCGC | | GTLENSAVLDAVLGDSRKKL |
| | | | | ACTGCTCCCACTGGGGGCAG | | RECHVAVLDFAKAFDTVSHE |
| | | | | TGTCATCCGGAAACAGGTGG | | ALVELLRLRGMPEQFCGYIA |
| | | | | GCCGGGGCGCCACCAGGGGG | | HLYDTASTTLAVNNEMSSPV |
| | | | | GAGCAATCCCTCCTG | | KVGRGVRQGDPLSPILFNVV |
| | | | | (SEQ ID NO: 1145) | | MDLILASLPERVGYRLEMEL |
| | | | | | | VSALAYADDLVLLAGSKVGM |
| | | | | | | QESISAVDCVGKQMGLRLNC |
| | | | | | | RKSAVLSMIPDGHRKKHHYL |
| | | | | | | TERTFNIGGKPLRQVSCVER |
| | | | | | | WRYLGVDFEASGCVTLEHSI |
| | | | | | | SSALNNISRAPLKPQQRLEI |
| | | | | | | LRAHLIPRFQHGFVLGNISD |
| | | | | | | DRLRMLDVQIRKAVGQWLRL |
| | | | | | | PADVPKAYYHAAVQDGGLAI |
| | | | | | | PSVRATIPDLIVRRFGGLDS |
| | | | | | | SPWSVARAAAKSDKIRKKLR |
| | | | | | | WAWKQLRRFSRVDSTTQRPS |
| | | | | | | VRLFWREHLHASVDGRELRE |
| | | | | | | STRTPTSTKWIRERCAQITG |
| | | | | | | RDFVQFVHTHINALPSRIRG |
| | | | | | | SRGRRGGGESSLTCRAGCKV |
| | | | | | | RETTAHILQQCHRTHGGRIL |
| | | | | | | RHNKIVSFVAKAMEENKWTV |
| | | | | | | ELEPRLRTSVGLRKPDIIAS |
| | | | | | | RDGVGVIVDVQVVSGQRSLD |
| | | | | | | ELHREKRNKYGNHGELVELV |
| | | | | | | AGRLGLPKAECVRATSCTIS |
| | | | | | | WRGVWSLTSYKELRSIIGLR |
| | | | | | | EPTLQIVPILALRGSHMNWT |
| | | | | | | RFNQMTSVMGGGVG |
| | | | | | | (SEQ ID NO:1390) |
| R2 | R8Hm-A | — | Hydra | TTCAAGTGGATGAAGCTGGG | TAAATGCCAAAAGTTGCTTG | MNLLIVTSSIKESDVPSSGK |
| | | | vulgaris | AAGGTAATCTGTAGTTGGTT | GGCTAAATGATACGTACGCT | GGVAVNNITAGASGKDTCVI |
| | | | | GAGTTGGTTGCAGATTACTG | AGAAAAAGCGACTTGCTGCA | IHPGTDGIWCCTECVEIHNS |
| | | | | CTGTCGATTTTGCTTTCTAT | CGGATGACGGTTCATCAGAG | GKDLKRHLAKRHPSVTISGY |
| | | | | TGAAAGCCTGTCTCTACGGG | CCCGATATGTGCATGTCAAG | KCNLCPFVSERQLSVGTHLR |
| | | | | TCCTGAAGCTTGAATTTTGG | GCGGCAGGGAGAATCACTAG | YCRGVKEVVKREFACASCSF |
| | | | | TAGCTATAGTTTTGTGGGAG | TGTAGCTGTTCTTTCCATTA | SSDTFSGLQVHMQRKHIAEW |
| | | | | GAAAGTGGAATTTTGTACCA | CGACTTACGCGGTTAACGTG | NDQLKEKTEFAWTDRELREL |
| | | | | TCTTTTGTCTCTCGTATCTA | GCACGATAGATTTACACCAG | AEKELTTPSFRYNKIFYAAL |
| | | | | CTATAGTAAATCCGGTCATG | GAAATAATACGTGAAGGGTT | GTSRTYDAVRKIRYNDRYKS |
| | | | | CAGCCTCTACGCGGCGCAAC | CCACCATATACTGGAGTTTA | AIAEMRSQIADAAAAAQERD |
| | | | | TAGAAACTTGGATCAGTGAT | GATCTATGAGGGAAACATTT | VERGLVSAHSDRGKEMLPVV |
| | | | | CAAGGCTAATGCATGCCGGG | GTAATAAGTCAGTCTGGTAA | ETKSDIQVNNDIKKDIELTP |
| | | | | TCTCCTCAGATTAGGAGTAT | CCTGGCGCCGCTGTTGAGTC | NSRQKQTNLALARPAVIEVE |
| | | | | AATACAAATCTGACTTCATC | AAATTAACTATGTCAATACT | EDLGRQDVKQYLASLRQDDY |
| | | | | ACTAAGAGGCTATGGGGCTA | CATTAAGTTATCGACTTTGA | TSPAERSIFAYCREETNWSA |
| | | | | ACGATCCTATAGTCTCG | TATGGCATGGGGTGATTCCG | TKRQVLKISRTTRGLRQPKK |
| | | | | (SEQ ID NO: 1146) | CGTTATATCAAAGTCAAACA | VRPFEFPEGFKPNRNMRKWR |
| | | | | | TGATGATTGCAATGAGAAAC | KYRFLQECYREKRAETVSKI |
| | | | | | TACCACGCTTGGTCACGTTT | LDGTFIDEPEEEIRPELEEV |
| | | | | | GTGAGGAGAACATCTCATTC | QRMYIDRLEKRTQLDTTKIV |
| | | | | | AAGCCTCCCGGATGTCGGCA | QTDEVFCLQSYGRITIGEVR |
| | | | | | CCCGCTGACATCTTCTGGCT | DALGASKKDSASGPDGLLLQ |
| | | | | | TATGAAAATTTTCATTAATT | DVRRLGPLLLCNIFNMWYLH |
| | | | | | TTTGTAAGTCATGGGCGGCT | GIPVEENRCRTILLYKSGDR |
| | | | | | TGAAAGC | HLASNYRPVTIGNMLNRLYA |
| | | | | | (SEQ ID NO: 1269) | KIWDKRIRKNVRLHVRQKAF |
| | | | | | | IPVDGCFENVKTIQCVLQSY |
| | | | | | | RKRKLEHNVVFIDLAKAFDT |
| | | | | | | VLHDSIRKALWRKGVPSGVV |
| | | | | | | KVVDSLYAGAVTSISVGKTK |
| | | | | | | TRSICINSGVKQGCPLSPLL |
| | | | | | | FNLILDELAERIEATGCGLD |
| | | | | | | LDGHVLSSMAFADDYVLLAK |
| | | | | | | DSVEMNELIRVCSTFFKEKG |
| | | | | | | LSVNPGKCQSLRVLPVKEKK |
| | | | | | | RSMKVLVRPHRWWRIKDQDV |
| | | | | | | DIPSMTYDSLGKYLGVSIDP |
| | | | | | | TGKIALPIEEWKNWMTKLKE |
| | | | | | | CKLKPEQKVKILKEVVCSRV |
| | | | | | | NYVLRMSECGISELRSWTRF |
| | | | | | | VRNWAKNIIHLPTWCSSDWI |
| | | | | | | HSIKGLGIPDVSKGIVIQRM |
| | | | | | | RASEKMSTSEDGIVRVVGAR |
| | | | | | | LVQKNRVLWEKAGFEGIELK |
| | | | | | | AARRHCEVERLNNIGNITNG |
| | | | | | | VALKTIAAVSSVNRYWMIED |
| | | | | | | NLKSGNKILVWKAMAGAIPT |
| | | | | | | KINLSRGVADQTLKKCRRCG |
| | | | | | | LTAETDGHILAGCHTSSDAY |
| | | | | | | SKRHNMLCDKLAKELKLNGG |
| | | | | | | PNRRVWRERTCFTSTGRRYR |
| | | | | | | PDIIVKDDSKITVIDMTCPY |
| | | | | | | EKSEGHLIQCESAKVTKYEP |
| | | | | | | LKLDKYWTRELEGANGIVAE |
| | | | | | | KVELMGLAIGAIGTIMRSTL |
| | | | | | | RKLCELKSGRIVRRLQMIAC |
| | | | | | | NNSAQIIKGHLSRATRRNLR |
| | | | | | | (SEQ ID NO: 1391) |
| R2 | R8Hm-B | — | Hydra | CTTGGGGTCACTGACACATT | ATGCCCGAGGTAGTTGGGAT | MSNRITIGDVPSVGKGGLTV |
| | | | vulgaris | TTTCGGTAGCCATAGTTTTT | AATGATGCACAAGCTCGTAA | NKQTAGADGAEACVVIHPGA |
| | | | | TGAGAGGAAGAGTGGAAGTT | GGCGACTTGCTGCACGTATG | KGIWSSPACLRKFTIGKELR |
| | | | | TTTCCATGAGTCGTCTCTCG | CCGCTAAACGCTTAGCTCGA | AHLAQIHKLAPSAVRYRCNK |
| | | | | TATAAACTGTGGTAAATCCG | TGAGTGCATGTCAAGACGGT | CPYEGDVQLSVGTHLRYCKG |
| | | | | GCCATCCAGCCTCTACGCGG | CGGGAGTATGATCAGTGGAG | IAGVVEEKKQFACAICNFSS |
| | | | | CGCAACTAGAAACTTGGATC | CTGACTTTCCAGACAACTCA | DTFSGLQVHKQRKHVVEWNE |
| | | | | AGTGATCAAGGCTAATGGAT | CGCGGATTCGCGTGCGGTGG | QLKEKTEFAWTDRELRELAV |
| | | | | GACGGGACTCCATGGATAAG | ATACAACACCTGGTATAACA | KEVTIPFSVVNTETFAVLDI |
| | | | | GAGATATAAAGATCTTATTT | TATGAAGGGTTCCATCTAGT | TTRTKDAVRKIRYTDRYKSI |
| | | | | GAACGCATCTTAAGGGGTTA | ACAGGGATAACGATCCATGG | LAEVRAQVNAVAEEAPQASD |
| | | | | TGGGGCTAACACCCCCTTAA | GAGCAAACTAATTAGTTGGA | ESQITLLVNTGRGAELQPAV |
| | | | | TTCTGGTGCACATTTATTGA | GGTAATCCAACGCCGCTGTT | INITDSIELVTDVNEVEMVT |
| | | | | CCGTT | GAGTCAGTTTTTAACCGCCA | SNSTNEEQPINAPVEPAVIE |
| | | | | (SEQ ID NO: 1147) | GTCAACTCTTGTAGGTTATC | ADLGRQDAKLYLASLRQSDC |
| | | | | | GGTCTTCGGCAGACCTTGGA | TNASDRWTLAYCRGEVDWCK |
| | | | | | CCGCCTAGCGCCGGCCAACA | TKSRLFKVSRHARGLRQPQR |
| | | | | | GTTTGTCGTCGACTAACATG | VENWEFPEGFRPNRNLRKWR |
| | | | | | ATGATTTGCGAGAGAAACCC | KYSFLQSCYRTKKKETVSKI |
| | | | | | ACGCTTTGTCACTTATGTGA | LDGTFKDTPEEEIRPELEEV |
| | | | | | GGATAAAATCTCTTGTCCAT | QRVYVDRLEVRTQLDTTRTV |
| | | | | | ATGATCCTTTGAAGGGAACA | HIDERFDLVSYGRITIREVQ |
| | | | | | GCGCTTTGAGCTTGCTCGGC | DAISASKKDASGGPDGLLLQ |
| | | | | | GTTGGCACCTTTAGTCTGTA | DVKKASPRQLCIIFNMWYLH |
| | | | | | ATATTTTCTTGATATTATGG | GIPVVENRCRTILLHKGGEK |
| | | | | | ACGAAAAAGGTAGTATGGTT | HLTSNYRPVTIGNMLNRVYA |
| | | | | | GCA (SEQ ID NO:1270) | KIWDRRIRKNLQLHVRQKAF |
| | | | | | | VPLDGCFENVKTIQCILQSY |
| | | | | | | RRSRREHNVVFVDLAKAFDT |
| | | | | | | ILHDSIEKALLRKGIPRSVI |
| | | | | | | KVVDSLYAGAVTSITVGKTK |
| | | | | | | TRPICINSGVKQGCPLSPLL |
| | | | | | | FNLVIDELAERLEATGCGLD |
| | | | | | | LEGHVISSMAFADDYVLLAK |
| | | | | | | DSVEMNVLMNVCNTFFEEKG |
| | | | | | | LAVNPAKCQSLRVLPVKGKR |
| | | | | | | SMKVLTRTHRWWKINNQDVE |
| | | | | | | IPSMTYESVGKYLGVMIDPA |
| | | | | | | GKIALPIEEWKLWLTRLREC |
| | | | | | | KLKPDQKVKVLKEVVCARAN |
| | | | | | | YVLRMSGCGICELRKWSRFV |
| | | | | | | RGWVKSIIHFPAWCNSEWMH |
| | | | | | | SSKGLGIPDVVSGIVIQRMR |
| | | | | | | AAEKMAKSTDGVVRVVGARI |
| | | | | | | VQTNRVLWKRAGLAGIELDA |
| | | | | | | ARKFCEVKRVNKIGNQTNGG |
| | | | | | | ALKTIAESSVSRHWLLEKNI |
| | | | | | | RPGNKILVWKAMAGVIPTKI |
| | | | | | | NLSRGVADQTLKKCRCCGLT |
| | | | | | | AETDCHILAGCPTSRDAYSK |
| | | | | | | RHNLLCDKLAKELRLNGGPS |
| | | | | | | RRVWRERMCLSGNGRRYKPD |
| | | | | | | IVVKDDGVITVIDMACPYEK |
| | | | | | | SERHLSQCEDAKVAKYEPLR |
| | | | | | | LDRSWTQELEGNNGRSANEI |
| | | | | | | SVVGIAVGAIGTITRKTQRI |
| | | | | | | LSKLKLAKVGRPLQIIACNE |
| | | | | | | SAQIIRRHLSGSRLRNLR |
| | | | | | | (SEQ ID NO: 1392) |
| R2 | R9Av | GQ39 | Adineta | GAAATAGTTTGCAATGGTAG | ACTAGTCTCCTTCTTCTATT | MNLPIREHAVSVHNINKFNY |
| | | 8057 | vaga | GTGTATGGCGCCTCTGTGTC | AGTCAGTCTAATTAATTTTT | LCQLCSKSYDTINSVKAHYV |
| | | | | TCTCTTTCGCTGGATATAGT | CTTACATTCTACATCTAGTT | ACRRQKNASSTTAVPTNVIN |
| | | | | TTGACGATTTTGTACCAGGT | CCATTATTAAATTGGTATGA | NNQLAINTNQVISRNPLQCV |
| | | | | ATCTGTTTCTTGTGAGTTCA | TCAGTGCTATCTCTGCTACA | ECLMKQVDFYAKDTKALVTH |
| | | | | GCACCAGTTTGAACAGGCTT | CTCAATGCTTAATCGTATGT | MRTKHAAAYEESKKVATRRV |
| | | | | AGCGATAGACCTTCGAACTT | TATTGACAGTCTGACACTTG | AWSPDEDQILAELEVKLKKI |
| | | | | GAAACACTGTTGTGAAGCTG | ATTACTCTTACGACATATGC | QKGQLLSRLVVEYNKCADKS |
| | | | | GCTGGGCCCCTGCAGATTTT | ACTGTTTGCTTCAGAGAAAC | KAPSRSKDAIRTRRQQHDYK |
| | | | | CTCGATTAGAACGTGAGTGT | CACTGTTCATATAGTGAAGT | LLLRSLQSQQPPVGSEDSDS |
| | | | | TACGTCCAGAATGACCCACC | TCCTCAGTTTTCTGTTGATA | DISSSNNNPLTTTHNVTPTP |
| | | | | AGTGGTTAGTTCTACGTTGC | TATTCTTCTTTCATTCTCGC | DSSNVVLLIQKIRESVDSIV |
| | | | | CCTGGAAAGGAGAAAAGTTG | TTCTCCTTTTCTACTGTGTT | KITNLKLNTNMLNAASAFIN |
| | | | | AGCTAAAATCGCACGGCCTA | CTTTTTATCAGTTTTTTGTG | QNNNMDPLELSMRGIEEDVK |
| | | | | GTTGTTTATCAAATAGGCAC | GAAAAATTGAGAATAAATAA | AIRDKELQKPTRNVPSSTTS |
| | | | | GGTGAGGAACTCTTCTATGT | AGT | RKPTRNAKRLEKSKKYGYYQ |
| | | | | ACCCTGACTAAAGTACTCAC | (SEQ ID NO: 1271) | HLYYNNKKKLVAEILDGETS |
| | | | | TTGTGCGCTGGGTTTGCTCC | | GAKPPPMNLVEDYYRNIWSR |
| | | | | CCCTCGCATTGACTTATCTG | | STIDDSPVNNIKTVNSDSIF |
| | | | | ATCGCACTACCCACCAAACG | | APISRDEIKLALSNTKKDSA |
| | | | | AAACATAAACTTAGCTCGTG | | AGPDAVTIKEAKAIIDNLYV |
| | | | | GTATCAGTCCACAGCGTGTG | | AYNIWLGVQGIPEQLKLNKT |
| | | | | CAGTCGGATTCAGGGGAGCG | | ILIPKGNSDLSLLKNWRPIT |
| | | | | TGTTAGTGACAAGCAGGATA | | ISSIILRVYNRLLAYRMNKI |
| | | | | ATATTAACATAGTTAATGTT | | FKTNDKQVGFKPVNGCGINI |
| | | | | AAGGCGTTCAACATTCCTTA | | SWLHSLLKHARLNKNSIYAC |
| | | | | TCCAATTGGAAGAGTTGACT | | LVDVSKAFDSVSHQSIVRAL |
| | | | | GTGAAGTTTGTCATGAAGAC | | TMNGAPSLLVKLIMDQYTNV |
| | | | | ATTGGACAA | | NTVITCSGSISNKINISSGV |
| | | | | (SEQ ID NO: 1148) | | KQGDPLSSLLFNLVIDELFD |
| | | | | | | VIKDQYGYTIDNIGTTNARC |
| | | | | | | FADDLTLISSSRMGMNKLLE |
| | | | | | | LTTKFFKERGLNVNPSKCMS |
| | | | | | | IGMSKGYKGKKSKIESEPLF |
| | | | | | | SITDAQIPMLGYIDKTTRYL |
| | | | | | | GVNFTSIGAIDAKRIKKDLQ |
| | | | | | | DTLDKLEHLKLKAQCKMDLL |
| | | | | | | RTYMIPRFMFQLIHTELYPK |
| | | | | | | LLIKMDILIRKLAKRILHLP |
| | | | | | | ISTSSEFFYLPFKEGGLQLT |
| | | | | | | SLKEAVGLAKIKLHKKIMSS |
| | | | | | | NDPMLCYLIESQRSRIVEHF |
| | | | | | | MKDLKLGDSLTLNEMNNIKE |
| | | | | | | CFMKEKRISFAQKIHGVGFE |
| | | | | | | VFSSSPLTNQWINGEIKTMT |
| | | | | | | TKTYINSIKLRTNTLETRVT |
| | | | | | | TSRGLNIIKTCRRCHVADES |
| | | | | | | LMHVLQCCSSTKGLRYSRHH |
| | | | | | | KICAKVANKLVMNGYGVFRE |
| | | | | | | KSYPDPNNSGSYLRPDIIAV |
| | | | | | | KNGHVIVLDVTVVYEVTGAT |
| | | | | | | FINAYQTKINKYNAIMVQIE |
| | | | | | | QMFNCVNGELHGLVIGSRGS |
| | | | | | | IHHSQLHIWHQMGFSSIELK |
| | | | | | | YVAIGCMEDSLRIMSTFSKA |
| | | | | | | IT (SEQ ID NO: 1393) |
| R2 | R2Ol | LC349 | Oryzias | CGCACAGGGGACACAGAGCC | GGGGGACAGCTGGGAGTCTC | MGTDTVYVGQDYPSGLSKRV |
| | | 444 | latipes | TGCCCAAGTACCGCTCCCGA | GGCATGATTACAAATCTTGC | PARLVAGPMLRERSCHAHVF |
| | | | | GGGAGCGGGAAACGGGGGGG | GCTGCACTCGGATGTCGTCC | RAGHMWNWRTSLPSGRWDQP |
| | | | | TGACTATCCCCTGGGGTCCG | CCGTGACGGACACATTAATC | ALEKSRVLTRSVATATDPEI |
| | | | | GCGAGAGCGCTGGTCTACGG | CGGAAAGCGAGTGGTGACTC | TSYPGKSVSTSTQVQEEDWC |
| | | | | ACCAGGGGTGGCTGTGGGCA | GCCTCAAG | SRESGWISPGLAPEEPSVVS |
| | | | | GGCTGCTCCTCAGGCCAGTT | (SEQ ID NO: 1272) | EITASMVATMRVATEEVVLE |
| | | | | GATTAGTTACGCATGGGCTG | | PQPEQVVTILPEHGRNVPPG |
| | | | | TACCTCCACGTGGTCCCGCT | | LAEQDTASPIEVSVLLPDLA |
| | | | | GGTAACGACTTGTCGGCTAA | | ENCPLCGVPSGGLRLLGKHF |
| | | | | ATCAGCCCGCCCACCATCTG | | AVRHAGVPVTYECRKCAWRS |
| | | | | GGATATGGTTGACCGTCTAA | | PNSHSISCHVPKCRGRARMP |
| | | | | CCCCAGTACTCAGGTCACAA | | SGDPGIACDLCEARFATEVG |
| | | | | ACAAA | | VAQHKRHVHPVEWNKVRLER |
| | | | | (SEQ ID NO: 1149) | | RGARGGGIKATKLWSVAEVE |
| | | | | | | TLIRLIREHGDSGATYQLIA |
| | | | | | | DELGRGKTAEQVRSKKRLLR |
| | | | | | | IDTASNSPDDAEVEEERLES |
| | | | | | | LAVRSSSRSPPSLVATRVRE |
| | | | | | | AVARGESEGGEEIRAIAALI |
| | | | | | | RDVDQNPCLIETSASDIISK |
| | | | | | | LGRRVDGPKRPRPVVREQTQ |
| | | | | | | EKGWVRRLARRKREYREAQY |
| | | | | | | LYSRDQARLAAQILDGAASQ |
| | | | | | | ECALPVDQVYGAFREKWETV |
| | | | | | | GQFHGLGEFRTGARADNWEF |
| | | | | | | YSPILAAEVKENLMRMANGT |
| | | | | | | APGPDRISKKALLDWDPRGE |
| | | | | | | QLARLYTTWLIGGVIPRVFK |
| | | | | | | ECRTKLLPKSSDPVELQDIG |
| | | | | | | GWRPVTIGSMVTRLFSRILT |
| | | | | | | MRLTRACPINPRQRGFLASS |
| | | | | | | SGCAENLLIFDEIVRRSRRD |
| | | | | | | GGPLAVVFVDFARAFDSISH |
| | | | | | | EHILCVLEEGGLDRHVIGLI |
| | | | | | | RNSYVDCVTRVGCVEGMTPP |
| | | | | | | IQMKVGVKQGDPMSPLLFNL |
| | | | | | | AMDPLIHKLETAGTGLKWGD |
| | | | | | | LSIATLAFADDLVLVSDSEE |
| | | | | | | GMGRSLGILEKFCQLTGLRV |
| | | | | | | QPRKCHGFFMDKGVVNGCGT |
| | | | | | | WEICGSPIHMIPPGESVRYL |
| | | | | | | GVQVGPGRGVMEPDLIPTVH |
| | | | | | | TWIERISEAPLKPSQRMRVL |
| | | | | | | NSFALPRIIYQADLGKVTVT |
| | | | | | | KLAQIDGIVRKAVKKWLHLS |
| | | | | | | PSTCNGLLYSRNRDGGLGLL |
| | | | | | | KLERLIPSVRTKRIYRMSRS |
| | | | | | | PDIWTRRMTSHSVSKSDWEM |
| | | | | | | LWVQAGGERGSAPVMGAVEA |
| | | | | | | APTDVERSPDYPDWRREENL |
| | | | | | | AWSALRVQGVGADQFRGDRT |
| | | | | | | SSSWIAEPASVGFAQRHWLA |
| | | | | | | ALALRAGVYPTREFLARGKE |
| | | | | | | KSGAACRRCPARLESCSHIL |
| | | | | | | GQCPFVQANRIARHNKVCVL |
| | | | | | | LATEAERFGWTVIREFRLED |
| | | | | | | AAGGLKIPDLVCKKADTVLI |
| | | | | | | VDVTVRYEMDGETLKRAASE |
| | | | | | | KVKHYLPVGQQITDKVGGRC |
| | | | | | | FKVMGFPVGARGKWPASNNT |
| | | | | | | VLAELGVPAGRMRTFARLVS |
| | | | | | | RRTLLYSLDILRDFMREPAG |
| | | | | | | RGTRVALIPAATGAAN |
| | | | | | | (SEQ ID NO: 1394) |
| R2 | R2_LP | AF015 | Limulus | TGGGAGGAGACCCAAACTAT | ATTTTGTCTCTTTCCCCAAT | GIDGYMFGYARASGSTSVSI |
| | | 814 | polyphemus | CCTAGGATGGGGCGGAACCG | GATGTCTACTAGCACGCTGC | QSSSMTEGETNERATPRASD |
| | | | | ACCATATGAGCCATATTAAC | CGAAGCTAGATAGATTGAGG | SSSVSIQSSCVTEGECLPPT |
| | | | | ATTGCCCACACTATCCTCTG | AATCTGCGTAATCTGTAATG | DNCNPSVENQLPCVTEGRFE |
| | | | | GAGGTACCTCCTCGTGGTAC | ATTACGCCTCATGGGCATCT | RVGSLVTVRLPFRKVACDLC |
| | | | | GGCTGGATATAGGTAAATCC | ATCGGTAGCGTCGACCCTGA | SKEFLTYSKFAVHQANFHNS |
| | | | | TGTAACCAAATCCTCCAACC | CGTTAAATTGGGTAATAAGA | ETQACCTYCGKSDGNHHSIA |
| | | | | CGTGAAGGAGAACACTAAAA | AATATCGA | CHVPKCPWRRTVTFAANLSN |
| | | | | CCCATATAGTGGCCTCGCCA | (SEQ ID NO: 1273) | FLCDLCNDSFKTKSGLSQHK |
| | | | | ACCACTATATGTCCAACGGC | | RHKHPCSRNAERILSLGVRT |
| | | | | AGGAGAAGCTATCTCCCGGA | | PSARPRQVVWSEEETRTLRE |
| | | | | TGGGAAGGAAAACCCTAAAC | | VEVVYSGQKNINVLCAGHLP |
| | | | | CGTGATGGGAACTTACCGGC | | GKTSKQVSDKRRDLHRIRSS |
| | | | | CCCATCAGCTATTGGGTACC | | NVHGTPTTQSRGDPVEQVEE |
| | | | | CGGTAGGGACTTGCAACCCT | | YEELDWEGMHPFPDPDSKFC |
| | | | | ACCCTGTATTTGCATTTTAT | | SYLDQLRDQKGLTEPVWQEI |
| | | | | AGGGAACCGGTCGGCCCTAT | | EIVAQEWVENLAHVQSSWNH |
| | | | | ATCAGAGTAGACCGTTTATT | | ERTTKQVPENNTPARRPFKR |
| | | | | AAATATGGGTGAAAATATTA | | RLHRVERYKRFQRMYDLQRK |
| | | | | ACAGTAAAAGCTATGGTTTG | | RLAEEILDGREAVTCNLKKE |
| | | | | GCGTCCGTGTGGTGCCAGGG | | EIKDHYDQVYGVSNDRVSLD |
| | | | | CGGCGGCCAAACCCGAGCTA | | DCPRPPGANNTDLLKPFTPT |
| | | | | CTTGGCACCAACTGGGGATG | | EVMDSLQGMKNGAPGPDKIT |
| | | | | GTAGCTTCCGAGCGATTCCC | | LPFLQKRLKNGIHVSLANVF |
| | | | | TGGCGACGTGGGACCGATCG | | NLWQFSGRIPECMKSNRSVL |
| | | | | ACGATGGAGTCCAAACATCC | | IPKGKSNLRDVRNWRPITIS |
| | | | | GGAATAGAGGAATTGAGAAA | | SIVLRLYTRILARRLERAVQ |
| | | | | TACCTATTCCACCACCGGCT | | INPRQRGFVPQAGCRDNIFL |
| | | | | CACATACCCAAGGTGAACCC | | LQSAMRRAKRKGTLALGLLD |
| | | | | GGTGCAACTAGAGTACAACC | | LSKAFDTVGHKHLLTSLERF |
| | | | | TATCTGTGGCGGTAGGTGCC | | AVHPHFVRIVEDMYSGCSTS |
| | | | | GAACCACTCAGGTGACGGGC | | FRVGSQSTRPIVLMRGVKQG |
| | | | | TTGTTTATTGATGTCTCCCT | | DPMSPILFNIALDPLLRQLE |
| | | | | ACGAGACACGAATTGTGACA | | EESRGFMFREGQAPVSSLAY |
| | | | | AATCCACTCCGGTGGACAAT | | ADDMALLAKDHASLQSMLGT |
| | | | | TACCCGATCTATGAACCTGT | | VDKFCSGNGLGLNIAKSAGL |
| | | | | TACCGATATTAGACAAGAAA | | LIRGANKTFTVNDCPSWLVN |
| | | | | ATAAAGAACTGACAACGCCT | | GETLPMIGPEQTYRYLGASI |
| | | | | AGAGCTTCAGGCAGCATGTC | | CPWTGINSGPVKPTLEKWIA |
| | | | | TGTAAGTATCCAGTCATCGA | | NITESPLKPHQRVDILCKYA |
| | | | | GCGTGACTGAGGGCGAAATT | | LPRLFYQLELGTLNFKELKE |
| | | | | GATAATAACTCTGAAACTGA | | LDSMVKQAVKRWCHLPACTA |
| | | | | (SEQ ID NO: 1150) | | DGLLYSRHRDGGLAVVKLES |
| | | | | | | LVPCLKIKTNLRLVHSTDPV |
| | | | | | | ISSLAESDGLVGAIEGIAQK |
| | | | | | | AGLPIPTPDQRSGTYHSNWR |
| | | | | | | DMERRSWERLALHGQGVELF |
| | | | | | | KGSRSANHWLPRPVGMKPHH |
| | | | | | | WVKCLAMRANVYPTKRGLSR |
| | | | | | | GNLSKNKDSAKCRGCTSMRE |
| | | | | | | TLCHLSGQCPKLKSMRIRRH |
| | | | | | | NKICEHLIAEASFKGWKVLQ |
| | | | | | | EPTLVTDNGERRRPDLIFHR |
| | | | | | | DDKAVVVDVTVRYEISKDTL |
| | | | | | | REAYASKVRRYGCLTEQIKD |
| | | | | | | LTGATSVVFHGFPMGARGAW |
| | | | | | | FPESSDVMADLNIRSKYFEE |
| | | | | | | FLCRRTILYTLDLLWKSNNE |
| | | | | | | QYLERLAP |
| | | | | | | (SEQ ID NO: 1395) |
| NeSL | NeSL-1 | Z82058 | Caenor | GCTCACTTTCTATCGTGTTA | CCTCCAGGGCACGCCGCACG | MLRRKGRHRMVMVNSVKWQP |
| | | | habditis | ACCGTACGTTTACACTCCCA | CCAAAAGTCCTGGCATAACT | SAHAEAIGTGKSWAPQRSQA |
| | | | elegans | GTGAGTGTAATAAAGGTTAT | CTGCAAATAACATCAAACGT | SEHGWQSNAMFDPPNRILFA |
| | | | | TCGATAGAGGGTGTCTCCCT | CAATCAACTCCACAAACTCT | RDSWSLNQSTHLQNQRSGSG |
| | | | | CTTTCTTGGGTAATTCTTCG | CCACTCTCTTCAAGTCTTCT | LGIRPGQVRNNMVGGGPHRA |
| | | | | GCGGTCCGGGGTCTCTCCCT | CGGTGCTTCCAACACCACAA | GDPKRRVELVSIQGSEVTVR |
| | | | | CGTCTTTTTTTTAAACTTTT | TGGTGAAAGCTCCTTCACCT | TIYPSDEIFSCYSKSCDIKT |
| | | | | CTTTCTCATCCACTCTTTTG | TTTCCCTCCAAAATTCTTCC | KAGYGPEDLKHLTRHIKNEH |
| | | | | CTCCTTTTTACTAACTCTTG | CATGTGGGGAAGTCCTGTTC | GLKARWAYQCGLCNEKSDPS |
| | | | | TACTCTATAGTCTTTTCTCA | TTGTAAGCTCTCCGGAGGCT | VSEGHKWMEAHMVAVHQSSA |
| | | | | TCCCCCATCCGCCGTTGGGC | GCAAGAGCAGAAGAAATTCT | EKRIKSYQKCTGARVAEQLQ |
| | | | | AAAGTTTATTTACTTTGTTA | TCTTTCTGACAAGGTCAGAA | AAAPSLTVPGKHKSGSRDAA |
| | | | | AATCCATATTTTATCTCTCT | GGAAGTCCTGTTCTTGAGGC | KDSMTPTKDDDPKTRIYQTR |
| | | | | CACCCGTACAGAAAGCGTCT | GTCCATCCCGGGCGTCATAG | SVVKKSTQKTAEPTDEGSRG |
| | | | | CCTTCTCAAACGCTTTTCTG | GAGAGATCAGATGCACCTTC | PKYASIFQKSVKARKSLALL |
| | | | | TACTTTTTCTTATATTTTCA | TAGCAGGAGCTAGAAGGGCT | CELSSPKPMNPLPTNELTLK |
| | | | | TTAACATATTTTTCCTGTTT | GCCCTGTCTTGAGATCCCCA | EGNSRELAKEEAPSEGIDDI |
| | | | | ATACTAACCTAACCTCCATT | CGGGGGTCAATAGACGGGAG | VIIDLDESEESPPRRKRFNT |
| | | | | GTCAATTACTAACTAACTTG | GGGCTGCTGGCTTTCTCTTT | WCLDHESSREAWLDDTAIFW |
| | | | | TACAACGGATTTCG | TTAAGAGGAAGCACCAATCC | YISYLCRGSTKYSALDPCLW |
| | | | | (SEQ ID NO: 1151) | GGAGATCCTTAGGGGTCAAA | SMYKVKGSRYILDRLESSIT |
| | | | | | GGATTAAAAGGCAGCAGGTC | YFFPICEEDHWTLLVLKDNS |
| | | | | | CAATTCTCCTCACTGACTTC | YYYANSLHQEPRGPVRDFIN |
| | | | | | GGTCAGAGAGGAGTCCCGCC | DSKRARKEFKVQVPLQRDSF |
| | | | | | TTGGAGACCTCCCCGGGGAG | NCGVHICLMTNSIMAGGKWH |
| | | | | | GTTGCTGAAGAGGCGGAAGC | SEEDVRNFRKRLKKTLQEEG |
| | | | | | TCCTTCTAGCAAGAGCTAGA | YELYSVNSLGIPFQAPTTEQ |
| | | | | | GGGAGTTCCCAGTCCTGAAA | MDYKETRCKRSYASVLTQIS |
| | | | | | CCCTTGCGGTTGATGATGGA | PPAKRPDCKPDNNIFVPTKD |
| | | | | | ATGGAAGAGTACTTCGGTAC | CAAEGNPQEKGRNESPEEIN |
| | | | | | TGCTCGTTGCTCTCTCTGCG | TEHIVVAGKPANNISPRCRS |
| | | | | | TTTTACTGCCGAGGGCCGGA | TSEMLFEMVKATTSSGRSSL |
| | | | | | TTTGCTCGAATCGCGAAAGG | GTMTQDEFIRTSTIAEAVPL |
| | | | | | TCTCAATCGACCATTCAAGA | MSIKLPPMELPRKILPPIPP |
| | | | | | TGACGGCTTATCTAAGGTCC | RKPTQTNGGQKGKQQRVPTG |
| | | | | | GAAAGCAGTTGGGAGAGTAA | KPDTLNAKVRNWENNQLESY |
| | | | | | CGTGTTCTCCTACCTTTCAA | AMEGRSFQRLEWLTEVLTAS |
| | | | | | GTTGAATGGTCGTTTTACTG | IQKAAAGDEGIVDIICKRNP |
| | | | | | TTTGGGATAGCTGACTTGAT | PLEVAKGEMCTQTENKRKTT |
| | | | | | GCTAGTACGCTTCATCTGTG | NNAARIADPIQSSKGAGDVK |
| | | | | | GATGACGCTCCCCAAGCAGT | ASYWKERARTYNRIIGSKEE |
| | | | | | CAAGTAGACTTGAAAGGTGC | LCKIPIDQLEDFFKKSTSRT |
| | | | | | CCTCGCCCTAGTTAGCTCTT | NVQESIMKEKSSKIPALKIG |
| | | | | | AGACCTTATGGGTCGCCATG | NWMEKKFIGKEVAFALRKTK |
| | | | | | GTTGTGGACGGGTATGCTTG | DTAQGADGLRYHHLQWFDPS |
| | | | | | CCGGAGCCGAGTCGTGTTTC | GELLAKVYNECQRHRKIPKH |
| | | | | | TTAGAACCAACCTCGACGAG | WKEAETILLFKNGDQSKPEN |
| | | | | | GCGAAAGCTTGCACAAGTTA | WRPISLMPVIYKLYSSLWNR |
| | | | | | GCACAATTGTGGTAGGGCCG | RIRAVPNVLSKCQRGFQERE |
| | | | | | ACTAGAAAATGAGTCCCTTA | GCNESLAILRTAIDVAKGKR |
| | | | | | GGGGGTTACGCCTTGGCGAA | RNLAVAWLDLTNAFGSIPHE |
| | | | | | AGTGAGGACAATTGGCATTG | LIEYALTAYGFPQMVVDVVK |
| | | | | | ACGGGTGCTTCGGCACTAGG | DMYQGASMRVKNATEKSDRI |
| | | | | | CAAAGGCGCCACCACACTGT | PIMSGVKQGDPISPTLFNIC |
| | | | | | CCAATCTCTAAAAAGTTCAC | LETVIRRHLESANGHQCLKT |
| | | | | | ATTCATCGAAGAACTACCGG | RIKVLAFADDMAILTDSPDQ |
| | | | | | AACCAACCACACATGTGTTG | LQRELSKLDNDCTPLNLIFK |
| | | | | | AAACCTACACGGTGGAAGGG | PAKCASLVIQKGVVRSASIK |
| | | | | | AAAGGAAAGCTTCGCTGGAA | LKGNAIRCLDENTTYKYLGV |
| | | | | | CGAAAAGAACGGATAGGTTC | QTGSAARISAMDLLEKVTKE |
| | | | | | CCCTTCTTGATGGCTGTGAG | LECVVKSDLTPPQKLDCLKT |
| | | | | | GCTTAGGATGGACGGGAAGG | FTLSKLTYMYGNSIPLITEI |
| | | | | | CCGTGAGGCCTCAGGCGGGT | KMFANIVIRGVKVMHRIPVR |
| | | | | | AACTCGGCCAGACGCTAGTT | GSPLEYIHLPVKDGGLGVAC |
| | | | | | GATCTTCGGATCACGACAGC | PKTTCMITFLVSTLKKLWSD |
| | | | | | CCTGGCTAAGAGGAACCCTG | DEYIKTLFTSLAEEVVKKES |
| | | | | | GATGGAGTGTGAAGGATGGG | KKSTVTMDDIADYLNVEERI |
| | | | | | CGGGTAGGGGGTTAAGCCTG | NRSEFGYNSITRLRDVMRNL |
| | | | | | TTGACAGACCACCGACTGCA | AITGDSPLYRLKMVVKNGKI |
| | | | | | GTCACAAAATCAGTGATTAT | ALLVQATSESMERIYTEEDA |
| | | | | | GCGGGTGGACCAATCTGTTG | KKLQRSLKDQVNKALKHRFN |
| | | | | | GCGGGTGTTTCCCTCTACCT | TTKVVKSKVVRVVQQHPASN |
| | | | | | GACCCCGCAATATGGTATGT | RFVTKGGNLSLACHRFVHKA |
| | | | | | ACGATCCTCGGATCTAAAAT | RLNLLACNYNNYDKSKSKVC |
| | | | | | TCATAATGGCCCACCACAAC | RRCGKDLETQWHILQNCPFG |
| | | | | | CATAAACCTCCCTAGCAGCT | FSKKITERHDAVLHKVKTLI |
| | | | | | GGTGGTCCCGATAATTCGGG | ESGGKKNWTMKIDEELPGFS |
| | | | | | TTCTTGCCACTACTGCGACC | RLRPDICLKSPDEKQIILAD |
| | | | | | CAGGCTCGCC | VACPYEHGVEAMERSWQAKI |
| | | | | | (SEQ ID NO: 1274) | DKYETGFAHLRKSGTKLTVL |
| | | | | | | PIIIGSLGSWWKPTGDSLKE |
| | | | | | | LGIKGSVINSAIPELCATVL |
| | | | | | | EHSKNTYWNHIFGEAYIPNP |
| | | | | | | MRNGHAKPAGNGWKKERLQK |
| | | | | | | APVRPTN |
| | | | | | | (SEQ ID NO: 1396) |
| CRE | Cnl1 | — | Cryptococcus | CCCTCTTAATACCCCATAAC | TGAGGAAGAGGAGGTTGGAT | MSLQRAKNARGDPGRCNLCS |
| | | | neoformans | ACATAACAACCCCCTAATCA | TATTTTTTCTTTTCTTTAAT | ADYRDLKDHLNKQHSTHFFV |
| | | | | ACGTTCTCTGCACCTTAAAC | AAGTTGTTTATTTAAGTAGT | PSDLRGSSLVACPRCGTPCS |
| | | | | ACCACCAAC | TTCTTTCATTCGGGCAACCC | AGTGLSRHQSRYCGLTAPRI |
| | | | | (SEQ ID NO: 1152) | ACACGACAACCCAATAAATT | RRNRVGNSTNTSRCPPSNTA |
| | | | | | AAACAACGAAAAATGCAACC | ASPIVPSPSPERPSPPQPAE |
| | | | | | TCTATAACCC | VVASLEPLSEAEEVLEVAQV |
| | | | | | (SEQ ID NO: 1275) | DAETVDTLEGTRRAPESVPR |
| | | | | | | SAEEGSTRVRELNMTAPEEE |
| | | | | | | HRGEEESSHTNPTAPAGLEN |
| | | | | | | AVSSTLGPSPGTLPSLLPSQ |
| | | | | | | ECANERFLYLAHLPVRSKPL |
| | | | | | | PNNLVTDFMDAAERCALAYI |
| | | | | | | AQPSDSTLLAFLALPKVGLT |
| | | | | | | QALAPEQPLRPSTFLKQFPH |
| | | | | | | IPWPEQPPARRPPSNIRPDT |
| | | | | | | TKQVIKLVENGRLGAAERVL |
| | | | | | | EEDASVAELDQGVIDQLITK |
| | | | | | | HPKGPSCPFGNAVGPTPGKA |
| | | | | | | PDIDTIQKALDSFKPDTAPG |
| | | | | | | VSGWSVPLLKTAAKREPVKQ |
| | | | | | | FLQLLCAAIANNTAPGRSML |
| | | | | | | RTSRLIPLKKDDGSIRPIAV |
| | | | | | | GELIYRLCAKALIISHFQPD |
| | | | | | | FLLPFQLGVKSIGGVEPIVR |
| | | | | | | LTERVLEGSAGAEFSFLASL |
| | | | | | | DASNAFNRVDRAEMAAAVKT |
| | | | | | | HAPTLWRTCKWAYGDSSDLV |
| | | | | | | CGDKILQSSQGVRQGDPFGP |
| | | | | | | LFFSITLRPTLNALSQSLGP |
| | | | | | | STQALAYLDDIYLFSNDSQV |
| | | | | | | LSKTTQFLADKQHIIKLNEK |
| | | | | | | KCKLISFDEIRQEGFKMLGT |
| | | | | | | MVGGKEKRAEFLEGRIRKEM |
| | | | | | | AKVGKLKDLPHQHALLLLRF |
| | | | | | | CIQQNLRHLQRSLRSDDLVD |
| | | | | | | LWERLDTMLWEEVKRMRMRQ |
| | | | | | | REDTAEEEALGRSLTKLPAR |
| | | | | | | LGGLGLLSFKDVAPLAYRSA |
| | | | | | | AEASDTLLDNLGLLSSPEEP |
| | | | | | | PTPIPQRTRCAELWESQQEA |
| | | | | | | ILHNLGDTERKRLTENASRL |
| | | | | | | GRSWLSVIPYLQPLRLSNVE |
| | | | | | | IASGLHDRTLVGSSIPVCRF |
| | | | | | | CGSDSPLGHDELCRARNPWT |
| | | | | | | QRRHNAINRVIYQHLKQIQG |
| | | | | | | ATVEIEPHTLSGQRRNDLRV |
| | | | | | | RGSSALAFTDYDLKVYSLGD |
| | | | | | | RDARSTVTPCAPNGKLADFC |
| | | | | | | LDRCVNWLDKVGQVVSKNAP |
| | | | | | | KVTGGVFKPIILSTGGLMSR |
| | | | | | | STADEWKDWRDAMPVGGFEK |
| | | | | | | MEKRIGVELVKARARTLVL |
| | | | | | | (SEQ ID NO: 1397) |
| CRE | CRE- | — | Chondrus | ACGCCCCCTATCCATTTCTG | TAAGTCCTTGACGCCTGCCC | MSQPNISSAETPLSQLPTPV |
| | 12_CCri | | crispus | CCAGCCTCCCATCGGCTCGC | CGTGATACAGCATCGGTACC | PTPPSPSNPSLSLPTVRDLL |
| | | | | CGTCTCCGCAACCCCTCTTC | CCTAGCATTTGAATAAAAAA | LCPIRSSHVYSSIPSSCLHS |
| | | | | CTCGGCTGTACCAGTTCCGC | (SEQ ID NO: 1276) | FTMLLIKTVRAASATMTPTE |
| | | | | TCCCACAACCTCCCTCGCCA | | SHRAFIHLHILPIAVLRRSF |
| | | | | CA | | RGETGWRSRTGQHHALRQRI |
| | | | | (SEQ ID NO: 1153) | | RRASSGRHWAALWHEALAAH |
| | | | | | | QVDLDYRTRHSRRYQASATS |
| | | | | | | RHRIGRAMRLAADAQYGRAM |
| | | | | | | SALKAKPLPDLHAAATRDTL |
| | | | | | | TALHPPPASPVQPLSPTDLP |
| | | | | | | PVPEITEGQVLRAARALNPT |
| | | | | | | SAAGPDHLSPRILQLLARTT |
| | | | | | | ISPEAGVTGLSALTNLVRRL |
| | | | | | | ARGDIPDRTAPLLAAATLIP |
| | | | | | | LQPRPHKIRPIAVGQALRRL |
| | | | | | | VTKVLLPPAIQDTRDHLLPE |
| | | | | | | QLANSVASGMDAIVHDTRML |
| | | | | | | MHRHGRNPDYIMVSVDARNA |
| | | | | | | FNTFSRQSLLDRLPLQTPSL |
| | | | | | | ARFLNLIYGRTVPDLVLPSS |
| | | | | | | PRFLMKSQEGTQQGDPASML |
| | | | | | | LFSLAIQPLLRRLTRECRLD |
| | | | | | | LNRWYADDGTLVGPISEVIK |
| | | | | | | ALRILRDDGPQSGFHVNINK |
| | | | | | | CRAYWPTVMPEKLSELLRIF |
| | | | | | | PLHVECGEGGVALLGAPLGT |
| | | | | | | DAFVRRHLMNKVQSCHASLS |
| | | | | | | LLDEIPDARTRFHLHRVTGS |
| | | | | | | VCKVEHVFRLTPPHLSLPAA |
| | | | | | | TKFDEQQIAAYSRLNDVAVS |
| | | | | | | TSMATQIGLPFRLGGHGFTP |
| | | | | | | LSPFIHASYAASLIEAAPVR |
| | | | | | | VKGPHNPSESFYRRMARRHI |
| | | | | | | VHVLGALNPEVRTRGILGTH |
| | | | | | | SPLGPFEPEALLSRPERVHH |
| | | | | | | TLIQAMQGATSRLYWEHTAW |
| | | | | | | DLDPLPRNHSAASVRRRARY |
| | | | | | | NSLRAPGAASFLCSHPSLTS |
| | | | | | | RVPSAVWSCMLRRHLDTPVY |
| | | | | | | CDSIRPLICSHCCKPMDARG |
| | | | | | | DHAAICRHGFGVVHRHNTVR |
| | | | | | | NLLARHAFRAAGLCCDLEVP |
| | | | | | | SLLPNTANRPADILVQPAPP |
| | | | | | | PSGALPDRPTAYDVTVRSPY |
| | | | | | | CRSTMSLAAKGLAGAAEAAD |
| | | | | | | LDKLRVHSRTVRDAFHLQPD |
| | | | | | | SPLPLLDWHFVPLAFDTLGA |
| | | | | | | TSSRTMAVLEYLAHRIANRT |
| | | | | | | YSSYGTAKIRLLORISFAVW |
| | | | | | | SSLASATLSRMPYHGAALSS |
| | | | | | | PAQV |
| | | | | | | (SEQ ID NO: 1398) |
| CRE | CRE- | — | Chondrus | CNCCAGCCAMCGATCCCGCC | TAATTCACCTTCATATCTGC | MAXXPXISPPGAPPAPLRYR |
| | 13_CCri | | crispus | GCCACTCGCMGCCCGGCCGT | TAGTGTCTCTGTAAGCGCAC | MLQCPPPLPKXXXXPVPHPM |
| | | | | CTCGACCGCCACCTCCCCGA | CCCTCATGCATTGATAAAAT | SSPIRXRLPHRXMRGPPSXT |
| | | | | SGCCCCAGCCCATC | TACCCCCCA | PPRDMHRPHGTPGPHSHRXC |
| | | | | (SEQ ID NO: 1154) | (SEQ ID NO: 1277) | GRPPXHCTHASXQPRXAXHX |
| | | | | | | LQXPKLRSPPPHPHVSPLIL |
| | | | | | | CXGPLPTPMTQPRMKRALSX |
| | | | | | | SAKAPPTKRPSASQGPAASS |
| | | | | | | HDXPRTPPPXPPRPPPYRFP |
| | | | | | | PPTLDQHXFALSXAYPHPXP |
| | | | | | | RRPPSPXRXLRHSFPPRFGX |
| | | | | | | QTFSSIPGPRLHSTVLLLIR |
| | | | | | | LVRAATAANTPETTTLXSCT |
| | | | | | | FTCSRLPFFERPSXAXLAGG |
| | | | | | | PRAVNFMLSACXYGERVXDE |
| | | | | | | SGXSYXXKXHCITSHPPRPR |
| | | | | | | RYSRQHSRNHHTXFLHLHLL |
| | | | | | | PTAXLREAFRGEXGWRSSRG |
| | | | | | | QLHALRLXIRRACTGREWGL |
| | | | | | | LXXEALDAHSXRTEWQHTHA |
| | | | | | | RRPSPPVSPSARAARAMRLA |
| | | | | | | SQAQYGRAMRTFTNPPLADL |
| | | | | | | NDPATMERLQALHPTPTVPV |
| | | | | | | VPLPPSAQPRPPEVTXEAVX |
| | | | | | | RAVRRLNPNSAAGPDRMSPK |
| | | | | | | LLHLLAHTPISPEAGVTGLS |
| | | | | | | ALTNLVSRLARGSLPPCTIP |
| | | | | | | LASAATLLPLQPRPGKIRPI |
| | | | | | | AIGQALRRLVTKXLLPAAID |
| | | | | | | DCRDHLAPEQXANGIPNGID |
| | | | | | | AIVHDARMLVRRHGNDPHYX |
| | | | | | | MVSIDASNAFNNFSRQQVLD |
| | | | | | | QLPTRAPSLSRYLDMVYARA |
| | | | | | | PSPLVLPSXPPTILHSRXGS |
| | | | | | | QQGDPASMLLFSLALQPLTR |
| | | | | | | LISRECXLXMNRWYADDGTI |
| | | | | | | IGRIDEVXKALDIITKEGPR |
| | | | | | | FQFFLNPSKTRVFWPSRQXD |
| | | | | | | LLSPLMTVGPLRVIDEGGVX |
| | | | | | | LLGAPIGSPSXMAQYIREXL |
| | | | | | | NTCKTALAHLDHIPEARMRF |
| | | | | | | HLHRVSASACRLQHLFRLVP |
| | | | | | | PDFAXPFAQQFDRDQLXAYX |
| | | | | | | RFNSVTMSPRIVPKYGCXFX |
| | | | | | | TXATASPHWHLPYTPXTLLA |
| | | | | | | SSIPLQHGYKVPTFPPSLSI |
| | | | | | | SVLHEARCGSFFEIYLHSXN |
| | | | | | | PHTSRCDYVAKNRAQIRLXF |
| | | | | | | SHGGHGLTSLASTIHASYAA |
| | | | | | | SLIDTAPARLQGPHFPAVSQ |
| | | | | | | YQRFARGPLRVVLRNLPSFV |
| | | | | | | QPAHFSMTEXDLGCLEPXAL |
| | | | | | | LARPERIHTFLLQAQYSAAA |
| | | | | | | SSYWQXPLWESFPNPGDHSA |
| | | | | | | ASLRKRVRYNSLLAPGATSF |
| | | | | | | LTAHPAATSRVHNATWSTML |
| | | | | | | RRHLDAPVTNDSISPLRCXH |
| | | | | | | CSKPMDARGDHAXIXSHGFG |
| | | | | | | TLHRHNTVRNVLARQLFRVA |
| | | | | | | GLAYSLEVPFLIPNTAARPA |
| | | | | | | DILVQPPPPAPGLPPDXPTA |
| | | | | | | YDVTICSPFRRGMLYHAARH |
| | | | | | | RGGAADAASVRKXKALERTI |
| | | | | | | RXALLIEDDNXPPPLDWHFQ |
| | | | | | | PLSFDALGAPSQSTVHVIED |
| | | | | | | HAKLMALRNSCTIATAKSRI |
| | | | | | | QQRLSFAIWSSAAAAILSRL |
| | | | | | | PTHAADISYPIEV |
| | | | | | | (SEQ ID NO: 1399) |
| CRE | CRE- | — | Acanthamoeba | TAACCCTAACCCTCTCCCTC | TAAGCCGCGCGACGAGGACG | MATTTISRSPSSSSSSSSAR |
| | 1_ACas | | castellanii | GGCCCCTCTACCCTAAAGCG | GCCAGGACGACCAGGACGAC | SRASASTSASVASIPRLFRD |
| | | | | CCCTAATCGACCGGCGACGC | GGCGACGGCGACCACCTAGC | GRFHCPLAHCQTRTSTWQDL |
| | | | | CCTAATCGCTACCCTCTACG | ACCGCACGCGCCACGACATA | SAHLTRMHDGDVPRDVAAAC |
| | | | | CCCTAATCGACTTTGGCGCC | TTGTCGCGCGCTGTACAGGC | GIVQCLHEGCRKWFRGAAGL |
| | | | | AAAGCGACTTTCCCCGGCCG | GGCTAGGTCGAGCCCAGCCG | ASHRGKARHAPPPAPRAALA |
| | | | | ATTTTCTTCCTGCCTTTTTC | ACCGTTCTGAGCCTCAGTCG | VAAVPRADSRGRTPAPTPSV |
| | | | | TTTTCTCTCCAAGCGACGCG | GCTTGAGCCCCCGGCTTCCC | APPXAGPPPRAAPRAAPSPL |
| | | | | CCTTTTACTTTGCCGCCGTT | AAGGCCTACCGGGGCGGCTC | PCPPALPHPPPSASPPTSSV |
| | | | | CTGTTTTTTCTTTTCTCTTT | TTTTTCGCCCTGGTTTTTGC | TSPCSPPTTPPSQPSPDLFS |
| | | | | GCACTTCGCTTCTACTTCAC | CGGCCTGTTTTTTCTCTCCC | GFANAPTTPSPPSTPXSSPA |
| | | | | ACCTCCTCCTCCTCCTTCTC | CCTTTTCCCCCCTTTTCCAT | GSPIPAARRFVLPVATPYPA |
| | | | | GACCCGCGCGGCCTCGAGCG | TTGTACTTAGTTTTTCCTTC | PAPRANRPKLSPVARPFVPK |
| | | | | ACTTGCTGCAGCGGCTCCCG | GGCCGCGGCAGCTTGTTGCC | ARAGAIPEASSPVTPQDRAV |
| | | | | GCCTCCCCCACGCGGCCTGC | CGGCATAGTGTTAATATGTT | SRREDAAAAPSSAPGLGLAD |
| | | | | TACTCCCGCTTTCTAGACGC | TAAAAAACGTGTAAATAAAT | EHEDDDTYGGDTIALTAPHA |
| | | | | CCCCGGTCTTGCTCTCAGTC | AACTGTTTAACCCTAACCCT | PRETRAPFEFEACFLEEEAP |
| | | | | TCCCGCATCGAAGCGGTAGT | AACCCTAA | ATAGDLPPYARAFLACPSAR |
| | | | | CGGGGTACGTGCTCAAGTGA | (SEQ ID NO: 1278) | LQEIPRRLKSAWQAAAKTIA |
| | | | | CTCAAGCCTCTTTTCAGCCT | | EAALDCHTAGDTQGYNAHLR |
| | | | | CGGCGCTCTCTCAATCCGCC | | LFIELPARGLAVPTNCRGAA |
| | | | | TCAGTCTTAGCCTTTCAAGT | | RTKLQRERLLDIAAGRIPAI |
| | | | | TGCTCGATTACGCTCTCGAA | | PDPPCDAPGADDALRGFPVS |
| | | | | TCGCTCTCTCTCTCAGTCTC | | GTTAGDVSNDDDSGGVHDRP |
| | | | | AGTCTCAGTCTCAATCTCGA | | AATASARQAKRLVEQGLSSR |
| | | | | TCTTGCCTTCGCCTTCGTCT | | ALRALERGEPAVASADTLGR |
| | | | | CGACGCCTTGCTCTCGWAAT | | LEALHPPNPTDRGLWPGAPK |
| | | | | CGCTGCCACTACGTGCCAGC | | AAIPRVTAKHLAQVAKELPR |
| | | | | TTTTTCGTGCCTTGTCTTCG | | GSAPGPSGWTFELVQAAIDR |
| | | | | TGTCGACCCGGACCGTTTGC | | QPTGTVAAFLIDMAQRALRG |
| | | | | AAGCCCTCGCCTTCGTACCC | | TLHWRGLLTASRLVALKKPD |
| | | | | CGCTCTCGTAGCCGTTCTCA | | GGVRPIAVGEALYRVIGRLV |
| | | | | TCGCTGAAGCGTTCTACGCG | | LKADRVMSSADATQYVGRHQ |
| | | | | CTGGCAGCAAGCCTCGGCCC | | YGVAYPGGVEAPVHAVRELH |
| | | | | TAGCTTGTAGCGCCGCCGGT | | DSGQLRAVVSLDWRNAFNSL |
| | | | | GGCCGCTCGCCAAC | | DRVHTALLIADRAPALARLY |
| | | | | (SEQ ID NO: 1155) | | EWSYREDSVLVLPRAFEKAG |
| | | | | | | LPASLLSQAGVRQGDVLGPL |
| | | | | | | FFAIGAAPVLDEIDAIPYVT |
| | | | | | | PRAYLDDIFVTIPHGVTDAA |
| | | | | | | TKAAVAATFATAEREGAAAG |
| | | | | | | LRLNRCKSAVWAADAEALLP |
| | | | | | | PHAAGAREDVESCAPVREGL |
| | | | | | | KILGAPVGSPAFVAKSLDGI |
| | | | | | | IKRAIGTLDLVADAELPLQH |
| | | | | | | KLVLLRQCVAQIPTFWARAV |
| | | | | | | PDAGPALAVWDTALLRRTGA |
| | | | | | | LVGLDVRDGSLQADIARLPV |
| | | | | | | RLGGLGLRSMKDTAPRAFVA |
| | | | | | | SILFAAALANTRRSELTCSA |
| | | | | | | STARRLRAALPELARTDACN |
| | | | | | | DEAAWRRSIARGVFPDVDKL |
| | | | | | | GTTQLQRVLQGMADSKSAHR |
| | | | | | | TRRQVPFLFAAVFEDAATPG |
| | | | | | | SGAWLAAIPSDPTLVLPDAE |
| | | | | | | LAEAVRIKLLTTTANAAGVC |
| | | | | | | PACHKTGIDPSHAYTCVSLS |
| | | | | | | HLRTARHDVVVRRVELACKT |
| | | | | | | EKPVREHVLAIPPVAPTDNN |
| | | | | | | NNGDEDGSPVTTADDNADGH |
| | | | | | | AVATKRRPETRASARAAAAA |
| | | | | | | ATAAAAAAIINDNSLLSDDD |
| | | | | | | DDDDHDDNCHGEERGEGERN |
| | | | | | | VTCPGHYTATPFAADDTLDN |
| | | | | | | SDEDNEDNAHEDDDEDGKDD |
| | | | | | | NDDDVYNNCNSSSSDGDEGG |
| | | | | | | DDLDYEYSDQSVTRSVDAAT |
| | | | | | | GESPNPERPTTPTRALLRAD |
| | | | | | | LWLPATSTAVDVMVAAACRR |
| | | | | | | SRAKAFDRAVSRKAAKYGPA |
| | | | | | | VADGSIAKVVPFVVSPFGVL |
| | | | | | | SRPAKAFLKRAMGDTTAAKQ |
| | | | | | | AKARLRLAVAAVRGTARLSY |
| | | | | | | AWGACAALIVGGN |
| | | | | | | (SEQ ID NO: 1400) |
| CRE | Cre- | — | Fragilariopsis | ATCAATCTAATACTGAAGGC | TAGCACCACCATCTATTCAT | MAPLPWNAATSSPPSPVPLT |
| | 1_FCy | | cylindrus | AATACCAAACTCAACCCGAA | ATCCACACACTGACCACCTC | NDKKKDSTLPTATSKNLSKN |
| | | | | ATCAAAATCGTTAGAATCAA | CACCTTCACAACTCCACTCT | NNNKNNNTNRINNIKNNDNT |
| | | | | TATACGACCCCCGCTGCTGT | CAATTCCCCTGACTACTAAG | NDGSNKINLKLPPAAVKITN |
| | | | | ACATGTCCAGCCGGATCTCG | AAATATTTCATGGTGGTTAC | PYKNKKKNKKKNNAGKSNPK |
| | | | | TTGTAAAGAAGATTGCAGCT | ATTGGAGGTATCCCAACACC | TNQNPNSSPLSDNDDDDTDS |
| | | | | GTAAAAAAGTTGGACTTCTT | AAGCACAAAATGAACCCACT | SNITINRRLKFGTDDLAPPN |
| | | | | TGTTCTTCCTGTGAAGAAGT | AACCCTCTCATCCTATCCAC | PPSNTNTIGTATAATAATAT |
| | | | | TGATTGTGGCTGTTCAAATT | GGGGACCACCTTTGAGCAGA | TTATAATATTATNTTTTTTT |
| | | | | CTTTTCATAATAAAGAATTA | ACACCATTCATATTACAACC | TNNTTGDNLASNINNNNNNN |
| | | | | (SEQ IDNO: 1156) | TTTAGCTAGATTAAGATAAT | NSGSNNSNTNNINNTDGNGS |
| | | | | | TATTTAGTACATATTTTATA | NNRPPPRVYTVDPRSDLPGA |
| | | | | | CTATTAAAAAAAAAAAAAAA | EISAANKMLDEVYGDHVHDN |
| | | | | | A (SEQ ID NO:1279) | PGSHLSGLISSSQDQLWQGY |
| | | | | | | FRRLIPHNQSLYDCPKGKLG |
| | | | | | | KDITNEYSNLFEAIMNGKCN |
| | | | | | | MEKLLVFPVVVLQRRHGVTK |
| | | | | | | NADVKRRLLSRLTAWKEGKF |
| | | | | | | KYLVEDTHRDLIAKQSKARG |
| | | | | | | DTTPAHRAKVYSSKLMRGHL |
| | | | | | | QSAVNYITDREGGGILYPYD |
| | | | | | | VDEKSGHTVSRVLQDKHPSM |
| | | | | | | RDPGPTAMPAYESVPELPTL |
| | | | | | | EITADTVEIVAGKLSGGAGL |
| | | | | | | SGVDSIQLKHLLLHHGQASQ |
| | | | | | | RLRNVCAKFGRWLANEHPPW |
| | | | | | | ASYRAMLANRLIALDKMPGI |
| | | | | | | RPVGIGDTWRRFFAKLVLAV |
| | | | | | | SMSYATDCCGSDQLCAGLRA |
| | | | | | | GVDGAIHGLSAMWREMESEE |
| | | | | | | NTGFVLIDADNAFNEVSRIN |
| | | | | | | MLWTIRHEWPAGARFAFNCY |
| | | | | | | RHHSLLVVRNPGGKPFTFFS |
| | | | | | | KEGVTQGDPFAMIAYGVALL |
| | | | | | | PLIRKLKELNVLLVQSWYAD |
| | | | | | | DASAAGKFDEILRLFQDLLR |
| | | | | | | MGPDFGYFPNASKSILITHP |
| | | | | | | DNVVAAHHFFNETHGLGFKI |
| | | | | | | STGSRFLGGFIGDTTSRDEY |
| | | | | | | VSTKIADWIHGTKELAAVAR |
| | | | | | | LKYPHAAYTGITKCLQHKWS |
| | | | | | | FTQRVIPGIDDLFQPLEDEL |
| | | | | | | TNNLLPALFGDPPSTMDDKL |
| | | | | | | RLLTALPVKHAGLALPNPVT |
| | | | | | | SSATNYKNSTLMSSHLLLAV |
| | | | | | | QGKINFSLQDHRDTCQSSLS |
| | | | | | | ASRELRQTENDSSLTNLLAA |
| | | | | | | LPPAAAGQPSTTRAIKRAGE |
| | | | | | | TGLWLTTIPNHINGNILGCD |
| | | | | | | EFIDAIRLRYQKVPHNLPAK |
| | | | | | | CDGCGSAFDVGHALQCKSGG |
| | | | | | | LIIRRHDELNLELASLAKMA |
| | | | | | | LRESAIRAEPEINPSASIMD |
| | | | | | | SPTTITAIDTNGDRGDLLIK |
| | | | | | | GFWDNGMDAIIDVRITDTDA |
| | | | | | | KSYRTRDPKKVLQSQEKEKK |
| | | | | | | KKYLDQCLLQRRAFTPFVVS |
| | | | | | | VDGLIGYEASNVLKQLSKRL |
| | | | | | | ADKWNKPYSVTCGIVRSRIS |
| | | | | | | IACARASNQCLRGSRIPFKT |
| | | | | | | MSRQIQWEDGAGAGLYRIVR |
| | | | | | | (SEQ ID NO: 1401) |
| CRE | Cre- | — | Hydra | TTTCTAATGTTACGTGATAT | TAACTTGTATTTTTAAATTG | MNMVSICKRCDRSFTTLKGL |
| | 1_HM | | vulgaris | GATATGGTTAGTTCATGGTT | TTTTATTAGTTT | NIHKGQCKIFVSNTNKQINN |
| | | | | AGTTTATGTTTATGCTTAGT | (SEQ ID NO: 1280) | VVNNELTTPNKNKVEINTIL |
| | | | | TTATGGAAAATCGTTTATTT | | NCDEISVEHYSTNTPYLPKI |
| | | | | ATGGCACAATATTGTTTGCT | | NICESIIDPNDYLWGHMPFS |
| | | | | GTTTTTAAATTTATGTAACG | | FLLNHVNTIYDEIVFYHKNL |
| | | | | TGTGCATTTGATGTATATTC | | FKVPSGKGGKMFIEELTFWL |
| | | | | TTGAACTTTTTAATCTGAAT | | KQFNNRTKLNGIAMKCFMIV |
| | | | | TTTTACTTGGTTTAATACGT | | PSLMLQKPSIRSKAKEHAEC |
| | | | | TTATTATATTCTTCGATTGA | | LVRRITLWRNGNFSELMREI |
| | | | | GCAATTTATCCTATCAAAGC | | RYIQSKINTSKKKRTFEDIS |
| | | | | AATTTATCCTTCGATTCGAG | | RIFAKLMMEGKVAAALKVLD |
| | | | | CAATTTATCCTTCGATTCGA | | RESSGILQCSESVLKELKSK |
| | | | | GCAATTTATCCTTCGATTGA | | HPDETPVQDNCLLYGPLQNT |
| | | | | GCAATTTATCCTATCAAAAT | | PECLFDSIDEISIFNSALQT |
| | | | | TAGCATATATACTGCAATTT | | KGSAGPSGMDADLYRRVLCS |
| | | | | TCAAATAATCTACGAAATAA | | KCFGPSCKTLREEIATFTKN |
| | | | | GTTCACTTACTGAAAATCAT | | IATKSYQPDIVQPYIACRLI |
| | | | | TAAGTAAAAGAAGAAAGGAA | | PLDKNPGIRPIGIGEVLRRI |
| | | | | GAAAAAATAAAAATAAAAAG | | VGKTISHHCQKEIKEAAGPL |
| | | | | TAGTAAATCCTTTCATAACA | | QTCAGHGAGAEAAIHAMQKI |
| | | | | ATAATCATTCTATTATTAAA | | FHQEDTDGVLLIDARNAFNC |
| | | | | TTTAAAGGAATATTTTGGTT | | LNRSVALHNIQITCPILAMY |
| | | | | TTGTACTAAATCATGCGTTC | | LVNTYRKPAKLFIYGGETIF |
| | | | | ATATTTCACCGAAGAAGGGG | | SKEGTTQGDPLAMPWYSLST |
| | | | | GCTGCTATATTTTTGTTTGA | | VTIINTLKLVIPDVKQVWLA |
| | | | | AGTTGTTTATCTTAAAACTT | | DDATAAGKLQSLKKWYKCLE |
| | | | | TAAACTTGTGTTCAACCAAC | | DVGGLYGYYVNQSKCWLIVK |
| | | | | CGTAAACATTAGTTCGCTGT | | SDNQAEEAKLIFGNSINITT |
| | | | | TCGCTCAAATTATCTACAAT | | QGKRHLGAALGSEAYKKVYC |
| | | | | ATAAAATTTATCAATCTTTI | | EDLVSKWSKELNNLCEIATT |
| | | | | TTCGTTACGGTAAACAATAA | | QPQAAYSAFIKGYRSKFTYF |
| | | | | ACAATAAAATAACTATAGTT | | LRTIEAFENFVTPVEKILSE |
| | | | | ATTTTATTGTTTACCGCATA | | KLLPVLFGTDCSIIKENRDL |
| | | | | TTGTTTAACTATAGTTAAAC | | LALNPSEGGLGICNLITEAK |
| | | | | AAAGTATTTGTTTATGGAAC | | EQHTASKKITNLHIKSILDQ |
| | | | | ATTACCAGTATCTCTTGTTA | | SDVMKEKDDFGKTFSEIKTK |
| | | | | AGGTAAACAACAAAACATAG | | TNMDKSKKKKEEVKKIHAGL |
| | | | | ACGGCATCTCTTTTTAAGGT | | PENLKLLVEQACDKGASSWL |
| | | | | AATTAAGTATACGGCTAATA | | NTLPIKEQHLDLNKEEFKDA |
| | | | | ATAAAAATATACAGCTAATA | | LRLRYNVPLANLPSYCACGE |
| | | | | ATAAAATCTTCA | | KFDELHAMSCKKGGFVCNRH |
| | | | | (SEQ ID NO: 1157) | | DNIRDLLTVCLNKVCTDVQA |
| | | | | | | EPHLIPLTNEKFNFKTANTN |
| | | | | | | DEARLDIKAKGFWRKGETAF |
| | | | | | | FDVRVTHVNSKSSKKQPTKH |
| | | | | | | IFRRHEDAKKREYLERVLEV |
| | | | | | | EHGTFTPLIFGTNGGFGDEC |
| | | | | | | KRFTALLAQKLSLKMGERYG |
| | | | | | | AVINWLRTRLSMEITRASLL |
| | | | | | | CLRGSRTPFRHYNTDDVGLE |
| | | | | | | NVQCGLI |
| | | | | | | (SEQ ID NO: 1402) |
| CRE | CRE- | — | Lactuca | ACATTAAATTAGAGAGGTTG | TGAACTATATTTTATATATT | MASSSTSSSDICLCPFRSFH |
| | 1_LSa | | sativa | ATGTTTCAATGGAAGAAGAT | AAAAAAA | CCPNGEVGSKGIXRMISHIK |
| | | | | GAAATTCCAAGAAGCTATTT | (SEQ ID NO: 1281) | RHHLLTEDRKCVLREALSSD |
| | | | | TTGTTGCCCACCAAGTGTTT | | VGLFMAVEETLKAFGQWMCG |
| | | | | GATAAAATGTCCAAACTAAT | | KCMTLHALSRYCHHPDGRVX |
| | | | | TTTTCTCTTGTTGCAGCTTT | | FVTGADGSSRYIVGILKPST |
| | | | | ATTGTTCAAGATAATGTAGT | | KESVTNALGGLVFDVGLLDR |
| | | | | TTGCTTAGTTTGAGCGTTCC | | VFKEPITTVKSIPHSCRLAF |
| | | | | TTGTGCACACCAACAGTGTG | | SQALKTALYKVIAQPGSVDA |
| | | | | TTGGTGTGCCATTTCCTTTC | | WICLLLLPRCTLQVFRPKNR |
| | | | | CTTCCTTTTTAACTATTGCT | | QECRSGNRKSLQQSSILKSL |
| | | | | TCATAGCTTAAGCTTCATCT | | DTWGKEDGIRKLVQNMLDNP |
| | | | | CGAGGCTTGTTCTCTTGT | | EVGAMGQGGGILQKESTSSN |
| | | | | (SEQ ID NO: 1158) | | TNIRQCLRKVADGHFTAAVK |
| | | | | | | VLCSSGVAPYNGDTIKALED |
| | | | | | | KHPFRPPPSMPSPIISEPPL |
| | | | | | | VADFDCVFGCIKSFPKGTSC |
| | | | | | | GRDGLRAQHXLDALCGEGSA |
| | | | | | | IATDLIRAITSVVNLWLAGR |
| | | | | | | CPTILAEFVASAPLTPLIKP |
| | | | | | | DNGIRPIAVGTIWRRLVSKV |
| | | | | | | AMKGVGKEMAKYLNDFQFGV |
| | | | | | | GVSGGAEVVLHSANRVLSEH |
| | | | | | | HADGSLAMLTVDFSNAFNLV |
| | | | | | | DRSALLHEVKRMCPSISLWV |
| | | | | | | NFLYGQAARLYIGDQHIWSA |
| | | | | | | TGVQQGDPLGPLLFALVLHP |
| | | | | | | LVHKIRDNCKLLLHAWYLDD |
| | | | | | | GTVIGDSEEVARVLNIIRVN |
| | | | | | | GPGLGLELNIKKTEIFWPSC |
| | | | | | | DGRKLRADLFPTDIGRPSLG |
| | | | | | | VKLLGGAVSRDAGFISGLAM |
| | | | | | | KRAVNAVDLMGLLPQLCDPQ |
| | | | | | | SELLLLRSCMGIAKLFFGLR |
| | | | | | | TCQPVHIEEAALFFDKGLRR |
| | | | | | | SIEDMVVCGGPFFGDIQWRL |
| | | | | | | ASLPIRFGGLGLYSAYEVSS |
| | | | | | | YAFVASRAQSWALQDHILRD |
| | | | | | | SGICGMDSDYLCAMTRLRDT |
| | | | | | | IPGFDCSGFTNKDTPPKSQK |
| | | | | | | ALACALFSKIVKDMEVDFDM |
| | | | | | | TVRQKAVFECLRAPHAQDFL |
| | | | | | | LTIPIDGLGQHMSPVEYRTI |
| | | | | | | LRYRLMIPLFPIDEICPVCR |
| | | | | | | KACLDTFGEHAVHCRELPGF |
| | | | | | | KYRHDVVRDVLFDACRRAGI |
| | | | | | | SAKKEAPVNFLTDPQDGRST |
| | | | | | | LRPADILVFGWVGGKHACVD |
| | | | | | | LTGVSPLVGLRSGGFTAGHA |
| | | | | | | ALKAAACKVAKHENACIENQ |
| | | | | | | HVFVPFAFDTFGFLAPEAVE |
| | | | | | | LLNRVQRVMHSNVISPRSTD |
| | | | | | | VVFKRISFAIQKGLAAQLVA |
| | | | | | | RLPSIDMY |
| | | | | | | (SEQ ID NO: 1403) |
| CRE | Cre- | — | Monosiga | CATCTTGGCGTGAACCACGT | TAGGTAGGCACCGTCTCGGG | MATESGGEDSWTQVRGAKRP |
| | 1_MB | | brevicollis | TGTCAGACAAAATCTGCAAC | GGTCCCTCTGTGGGGATCCC | SAESPPSNTTTSPSQTHRSA |
| | | | | CCCGCTCTTTGCGGCCCGCG | TGTGTGCACCTGTCGCTCCC | KHTKHGSARHDRNHVFPDPM |
| | | | | TTTTGGCGGCGCCCTCGCTC | TAGGTGGTTCCTCGTTGTGT | TTPLRPHARHSVPTARASSH |
| | | | | CCACCGTGTCCGCTCGCTTG | CTTTTGATGGCTTGACTTGT | VPSTSPAAGATESSARAVVP |
| | | | | CTCGCTTGCTTGCCCCGCGG | ATTTTTGTTTTAATTTTGCT | AAEPVTRTSNGGGEQHPIIG |
| | | | | AC | TTAATTTTTGCTGTATTTGT | NTSNASPRTPRTPSSPRSFA |
| | | | | (SEQ ID NO: 1159) | GTGGTATTTTTGCTGAATTT | QVAAAMPAAATATSSAPMTE |
| | | | | | TTGTAAGGTCCTTTGTATGA | DLSASVPSEPNGSGEQQPSP |
| | | | | | TGTCTTTGTCTTCTGTGGTC | ESTGQTHHSIPNTPSDFLTM |
| | | | | | GGTTGTTTTCCTCAATCCGA | SSDESDSPPRSTALRAPTPI |
| | | | | | CGTTGTGTCTCGTTGGATGT | APPAHDGDGDTNGSATPEPL |
| | | | | | GAGCGTGCCGTGGTGTTCTT | VQSPTPAQMVLPYPSGTQQT |
| | | | | | TGTGTTTGTGCTGTGATGGC | HSDPSPPSASPPATTILPAA |
| | | | | | TTGTAGTTGTGATGTGTGAC | ISHPVEHSEHANSAPLGEVS |
| | | | | | TGCCTTTTTGGGTGTCTTGT | ESETHNTAGEHSESEQDVLL |
| | | | | | GTTTGAAATGGCCGTATCTC | SDPAPPIAANVLDAQRKVLL |
| | | | | | TGGTTATACTTGGTCGTTTT | KTSGHRQLLACPFGLCKCKG |
| | | | | | GTACGATTTTTGTTTCTATG | PRLDRKAWVNHVLREHPYDE |
| | | | | | TGCGTGATTCTTCGCGCTTG | QATDLVKQVMEAKLVAQCNK |
| | | | | | TACTTCTTGGCATGATAGAA | CHLFFEAAGISQHRSRCGAN |
| | | | | | GCCAATGAATGTGTCTTGTT | LKRATEALFHAAGHDLLEIM |
| | | | | | CTCTTGTGTTGTTTTGCGTG | RGAWPQQCVGSRISVCELLK |
| | | | | | CCGTCGTGATTTTGATGTCG | LARHPLMQRSRYPSNATETK |
| | | | | | GGGTTGCACAGCTTTGCTTT | LMAATLSQLYWSAVHSDYTA |
| | | | | | CAGCTCTGAGGTTCAAACAC | EEREMCWALILALPSMLLSA |
| | | | | | CTAATTTA | PSTALSTIDLRNMFHDRLRW |
| | | | | | (SEQ ID NO: 1282) | LVTGQLGRVVDAMRKAVARK |
| | | | | | | QSRRGQLNAGAGAHPNDAVD |
| | | | | | | QSLRSLVRDPDLADEAWANH |
| | | | | | | VTNRLNRGQIAKAFDADKAR |
| | | | | | | AVIGNSEVQAVRDLLVPPGL |
| | | | | | | TPYIASTPASTSTLAPATAV |
| | | | | | | SSPTVSFTKGELPKALAATK |
| | | | | | | GVTDPYGWSGELLASIYRIK |
| | | | | | | EHFSQVLGPRQGSTSDPTAP |
| | | | | | | SDGDAPQGPTTATGGPQVAL |
| | | | | | | NKIFHHIANNTVPESIRHAL |
| | | | | | | CSINYTILEKANGKFRPVGT |
| | | | | | | DSIFNKVVNRALLEQQQPHI |
| | | | | | | AHLLQASPELAVGVKDGISA |
| | | | | | | AVGMAFGELQACESTPGWTM |
| | | | | | | LSLDFKSAFNYTDRARLHEI |
| | | | | | | VADKVPGLLRAFERHYARPT |
| | | | | | | THCIVDKFFKVIDIDVGQGI |
| | | | | | | VQGNELSPFFFALYSCEVLG |
| | | | | | | LLDATTDYRCKVIKYLDDIV |
| | | | | | | LMGPAEDVAADVEIVKARAE |
| | | | | | | SAGLHLQPSKSRFYMPRHHS |
| | | | | | | ASITAIKSVLPDAVRETANT |
| | | | | | | GMTVLGTPIGRREWMKKQLN |
| | | | | | | DKAKHIAGKLNDMLTTGVSL |
| | | | | | | QALLTAMQYVPSLINHLYTL |
| | | | | | | PPSLTSGLSELLNRACKDTF |
| | | | | | | VKAFFAKVNLSAPAGAEGHD |
| | | | | | | VTLEQLLEARLFTRANTGGF |
| | | | | | | GLHDLVERGPVAYVCNMAKL |
| | | | | | | ATRYPRVYDRLLEDASRAAD |
| | | | | | | FEAHVORAGFQMATVKDAAT |
| | | | | | | QRPAEIIALRSKAALDDLMA |
| | | | | | | KCALDLQQAYLASREWGVST |
| | | | | | | VLTMRGRDKLRRLSDTTFAI |
| | | | | | | AVVSMMGFGLHELINVKPTD |
| | | | | | | KCPLCSSKTPQPRLTREHLL |
| | | | | | | TCRPIKRHNALRDEMGRLLR |
| | | | | | | YATLSHVWVEKSGYNANGQS |
| | | | | | | CRIDLHCRNPFPGGALGPAL |
| | | | | | | PDLGIDVTVRTAQPPTTSQA |
| | | | | | | CIKVGAALRRAEKEKRDYYT |
| | | | | | | GFNHGKTLIVPAAMTTTGGF |
| | | | | | | ASSFVDLLGQLARCAEARGV |
| | | | | | | YQPGLDEAFVPRWKGRFAAL |
| | | | | | | VHQMNADHIQRHFGGVCLRS |
| | | | | | | S |
| | | | | | | (SEQ ID NO: 1404) |
| CRE | CRE- | — | Hydra | AATTTAAAAAAAAAAAATCG | TGAGCTCTTATAAATTTATA | MSSCKVTIPHVCPYCKVELK |
| | 2_HMa | | vulgaris | TTTATTTATGGCATAATACT | TTATAGCATTTTGTTTTA | TICGINRHILKCKKNPLQIP |
| | | | | GTTTGTAATTTTTGAAAATT | (SEQ ID NO: 1283) | SLQKTNTSLTLEPNTKVIPS |
| | | | | CGTGCAACAACTGCAGTTAA | | ITKQNDIIIASTSSNNLAFN |
| | | | | ATTGAAGAGCTGAAATTTAA | | QKKDYTLTPTYSRKTTPVSI |
| | | | | GATCTGAGCTTTTCAATCAG | | LSSMKMTPISITSHIVRRKL |
| | | | | AGTTTTTTACCCTAAAACAT | | PELPSQTTNHLFNENFINVP |
| | | | | TAAATTTTATCATAACAAAA | | FLPEIMNHLPVPNNNVMWGV |
| | | | | ATCGTTCTAATATTATTAAA | | YSYQQFKLFVDSTYDEIVNY |
| | | | | CTTAAAGAAATTCGTTCTTA | | RRNIFNIPSGKAGKEFIEEL |
| | | | | TATCAAATCTTATTTCAGTG | | TFWLRKFNSTSSLNSIALKV |
| | | | | TTTCACAGACGAAGGGTTTT | | TMILPNLLLQKPSAKSKSKE |
| | | | | ACTAGATTTTTATTTTTTCA | | HTLCLTRRIDLWKKGDTSLL |
| | | | | ACTTTTGAATTTGTTTATTA | | LKEVRNIQKKFVNSKXKRSM |
| | | | | TAAAACTGTAAACTAGTGTG | | DDISRIFAKLIMEGKITAAL |
| | | | | CAACCAACCGTAAAAAWTAG | | KFLEKEASSGILPLSDNTLK |
| | | | | TTAGCTGTTCACCCAAAATA | | DLKSKHPEPSRVEDYSLLFG |
| | | | | TTATTCAGTATGAAAATATT | | PIDLIPKCFFDCIDEQLVMK |
| | | | | TAATCTTCTTTATTCGCAGT | | AAFATKGSAGPSGMDADIYR |
| | | | | AAACAATAAAATATCTAGTT | | RILCSKNFIKEGKELRKEIA |
| | | | | AAACAAAATATTTCTTAATA | | KMTQNLLTETYEPTFLEAFT |
| | | | | ATAAAAAACAAAAACTTTTT | | ACRLIPLDKNPGIRPIGVGE |
| | | | | CTTAACAAGTACA | | VLRRIIGKVISWSFNSEIKE |
| | | | | (SEQ ID NO: 1160) | | AAGPLQTCAGHGAGAEAAVH |
| | | | | | | AMKEIFDNVQTDAILLIDAK |
| | | | | | | NAFNCMNRQVALHNIQIICP |
| | | | | | | LISIYLINTYRNPSRLFVAG |
| | | | | | | GKEISSQEGTTQGDPLAMPW |
| | | | | | | YSCNTTIIIEHLLVNYPQVK |
| | | | | | | QVWLADDAAASGSIANLHSW |
| | | | | | | YQHLIDEGCKHGYYVNQSKC |
| | | | | | | WLIVKSPSLAENAGIVFGKS |
| | | | | | | VNITTEGQRHLGSVIGSQNF |
| | | | | | | KNKYCTEKVAKWLTELKQLC |
| | | | | | | KVAETQPQAAFIAFTKGFRS |
| | | | | | | KFTYFLRTIPKFEQYLAPVD |
| | | | | | | EILSHLLLPTLFGKDTPFED |
| | | | | | | HIRKLFTLTPRDGGLGIPIL |
| | | | | | | VEEAPHQFLSSVKLTKNLVQ |
| | | | | | | QIIDQDKILKTKNSSGNVLE |
| | | | | | | DLEKILTTDRLKHRKEKIIA |
| | | | | | | VDSMQPDSMLRNIQQTRSEC |
| | | | | | | ASTWLNALPLENQGFVLNKE |
| | | | | | | EFRDALCLRYNFDLKNIPRI |
| | | | | | | CECGEPFNVTHALSCKKGGF |
| | | | | | | ISSRHDNIRNLFTTLLKRVC |
| | | | | | | INVQSEPHLIPLDNENFYFH |
| | | | | | | TANKSNQARLDIKANGFWRN |
| | | | | | | GQTAFFDVRVTHVNSMSNKN |
| | | | | | | LDIAAIFRKHEKEKKREYGE |
| | | | | | | RVREVEHGSLTPLVFGTNGG |
| | | | | | | MGKECHRFVRRLAEKLAEKQ |
| | | | | | | NEKYSVVMTWLRTKLSFEIL |
| | | | | | | RSTILCLRGSRTPWTKKNDF |
| | | | | | | EIGVDFKMDALEARI |
| | | | | | | (SEQ ID NO: 1405) |
| CRE | MoTe | JQ747 | Magnaporthe | CCCGAACCCGAACCCAAACC | TAATAGGTAACGTCCCTATT | MVCPTCNGVYADYNDHIRKK |
| | R1 | 487 | oryzae | CAAACCCAAACCCAAACCCA | TTTGTCTTTGGTTTTGTTTT | HPDERYTALQLQPLGLTPCP |
| | | | | AACCCAAACCCAAACCCAAA | TATCTTTGTTTTTGTTTTTG | ICKTACKNDLGVKTHLSKIH |
| | | | | CCCGGAGGGTTCCCAAGTCG | TTTTCGTTTTTGTTTTTGTT | KISGASKISTQPRIRTENTD |
| | | | | CCTAAACCCGAAGGGTTTAG | TTCGTTTTTGTTTTTTTTTT | NTNSVPTSSFNPVLPEIQTL |
| | | | | GATATTATTTCGTTTATTAG | TGTTTTTGTTTTTGTTTTTG | TPGLNNSRWADNPRKRRADT |
| | | | | AATTGGATAATTATTTACCC | CCTTTGTTTTTGTTTTTATC | PSPTRGRNTRPRRFSYTDID |
| | | | | CTGTTGGACAGGGGGGTTGC | TTTATTTTTGTTTTTGTTTT | LTNDEPADNPRANNPRVNNP |
| | | | | AGGGGTTAAATTAAGGTTTT | TACTTTGTTTTATTTGTTTT | RVNNEPPSSPNSLPSISEFH |
| | | | | TTATTATTTATGCGCCGTTT | ATATTTACCTTTTGATTTTT | TPGTLPLTNSNISLKDQHDK |
| | | | | ATTTGTTTACCCCCCCAAAT | TCTATTTTTCCCACCCTTAT | ITGPILQKPLIQKLIEYSKI |
| | | | | ATTATAAAAGCGCGTTCCAT | TATTATAACCCCAACCTACT | PIPEHHLHARQAKIFADAAN |
| | | | | CCTCTTAGGAAAAGCGAAGC | AATATTTTTTCTTTTTTCTT | RIAKNFIQSPTEKTLFNLLI |
| | | | | TTTTCCTTGTAAAAGTCGCT | TTTTCTTTTTACGGTTTTAT | LPRIFGIGLINGKVTKIMQN |
| | | | | AGACTTTTACTATAAAAGTC | TTTCCCGTTTGTTTTTTCTA | FPSQIPPIPKIDFPSEKTDS |
| | | | | GCTAGACTTTTATACCAATC | TTTTATTTGTACGACAAAAC | DPVLNAKKLLEKGYIGRAAK |
| | | | | TTTTAACAAAAAGCGTAGCT | CCTTAGCAAATAAGCTTAGA | AIIDPTPVAPETPESLNILR |
| | | | | TTTTGTTGCCAATCTATTAA | ATATAATAAAGCGCGAATTA | EKHPIGQNNPFNTKSQPISG |
| | | | | AAAAAGCGGAGCTTTTTTTA | AAA | RQITEKAILLAISSIGREKA |
| | | | | ACTTTTTCTTTTTTTTTTTT | (SEQ ID NO: 1284) | PGLSGWTRSLLDAAIKIPTQ |
| | | | | TTTTCTTTTTTTTTTTTTTT | | NDVIPALRLLTDMIRQGTAP |
| | | | | TTTCTTTTTTTTTTTTTTTT | | GRELLCASRLIGLSKPDGGV |
| | | | | TTTTTTATATATATTATTAT | | RPIAVGDLLYKIAFKAILNT |
| | | | | TATTATTATTAGCGGTGGGG | | LWSPNCLLPYQLGVNSIGGV |
| | | | | CTATTTATGCGCTTTAATTT | | EPAIFTLEEAIMGPNINGIK |
| | | | | GTGCGGGGCTATTTATGCGC | | SITSLDLKNAFNSVSRAAIA |
| | | | | TTTAATTTGTGCGGGGCTAT | | SSVAKYAPTFYRSTCWAYNQ |
| | | | | TAATGCGCTTTAACTTTACA | | PSILITENGSVLASAQGIRQ |
| | | | | AATTTTATTTATGCGCTTTA | | GDPLGPLLFSLAFRPTLETI |
| | | | | ATTGCTGCGGGCCTGTTAAT | | QKSLPYTYIAAYLDDVYILS |
| | | | | GCGCTTTAATTTACAAATTT | | KTPVKDKIAKIIEKSPFTLN |
| | | | | CATTAATGCGCTTTAACTTT | | SAKTTETDIDTLKTNGLKTL |
| | | | | TATATTTACTAATGCGTTAT | | GSFIGPTELRKEFLQNKIQN |
| | | | | TTATATAATTGCTATTATTA | | FESSINALKKLPKQYGLLIL |
| | | | | TCGTTGCTATTATTATTATT | | RKSTQLLLRHLLRTLNSQDL |
| | | | | GCTATTATTATCGTTATTAT | | WELWEKTDKLIADFVINLTV |
| | | | | TATTGCAATTTTATTATATA | | TKRKKRPITDFVTPLITLPI |
| | | | | AACCCTCGTTTGTCCCTCGA | | KDGGFGLLRHNGIAQDIYFA |
| | | | | TTTATCCCGTTTCTTTTCCA | | AKDLTTEIRHKIQRISNDFP |
| | | | | TCCCATCGCGCGTTTTCGTA | | QNQSPTATEILHLLHNGVLA |
| | | | | AGCTTTGGTTTTCGTAGGAT | | DCKNGLTNAQLNALTENASY |
| | | | | TTGCTTTCGTAGGCTTTGCT | | LGRKWLNILPIQKSNRLTDW |
| | | | | TTCGTAGGCTTTCGTCAGCT | | EMAEAVRLRLLAPVKPLTHP |
| | | | | TTTACCTGCTTTTATTTTTT | | CNHCGNRTNINHEDVCKGAV |
| | | | | CTTTTTCTTTTTATTCCCCC | | RKYTARHDQINRSFVNSLKS |
| | | | | CCCTTTTTTTTACCTGGTTT | | RPEIDVEIEPDLNNENNVNN |
| | | | | ATTAGCGGTTTACCTGCTTT | | ANTTTENPTPSPNGQNDTGC |
| | | | | TATTACCTGGTTCCCCTTTA | | LFTTPIRSGTRNGQNGLRAD |
| | | | | CCTGTTTTATTAGCGGTTTA | | FAVINGVSKYYYDVQIVAIN |
| | | | | CCTGCTTTTATTACCTGGTT | | KDSGNTNPLNTLADAANNKR |
| | | | | CCCCTTTACCTACTTTATAA | | RKYQFLDPFFHPIIISAGGL |
| | | | | GCGGTTTACCTGCTTTTATT | | MEKDTAQAYKQIQKLIGPVA |
| | | | | ACCTGGTTCCCCTTTACCTG | | AHWLDTSISLILLRSRTTAA |
| | | | | TTTTATTAGCGGTTTACCTG | | ISIAKNRPRA |
| | | | | CTTTTATTACCTGGTTCCCC | | (SEQ ID NO: 1406) |
| | | | | TTTACCTGTTTTATTAGCGG | | |
| | | | | TTTACCAGCTTTTATTACCT | | |
| | | | | GGTTCCCCTTTACCTACTTT | | |
| | | | | ATTAGCGGTTTACCCGTTTC | | |
| | | | | TATTAGTGGGCATTTATTTC | | |
| | | | | CCGTTTTTATTAGCAGTTAA | | |
| | | | | ATTTACCCTTTTAAGGTTAT | | |
| | | | | TTACCTGCTTTTATTCACAG | | |
| | | | | GGCACCCCTGTTTTTACTAG | | |
| | | | | CAGTTAAATTTACCTTTTTA | | |
| | | | | AGGTTATTTACCTGCTTTTA | | |
| | | | | TTCACAGGGCACCCCTGTTT | | |
| | | | | TTACCAGCAGTTAAATTTAC | | |
| | | | | CTTTTTAAGGTTATTTACCT | | |
| | | | | GCTTTTATTAACAACCCTTT | | |
| | | | | ATTTTTTCCTATTAACGGGT | | |
| | | | | ATTTATTTACCTGTTTTATT | | |
| | | | | GGAATTCACCCGTTGGACGG | | |
| | | | | C | | |
| | | | | (SEQ ID NO: 1161) | | |
| HERO | HERO- | — | Branchiostoma | TTTTCAGTCTGGCTCAGCCA | TGATTAAAGACCCGAAACAC | MNAVCVCGKVCKNQRGLRIH |
| | 2_BF | | floridae | GTGACCGCCGGGAAAGTCCG | CCAATGACCCCGGGTTCATC | QTKMACLRRVQAEHRSGAVA |
| | | | | GCTGACTACCACGAATAGGG | ACTGATGATGTGTCCCTGTT | TTVEPVLSASAPGQTEEDQG |
| | | | | TGGTGACAGCTGGATAGACA | CGCACTACCAGAGTGTATTC | PEAPHSARNLRATPAPPQGR |
| | | | | GACGACAGCTCGGAAAGACG | TAGAG | KSDHHRVKWPAANSKEWSQF |
| | | | | GCATTGGGGCAGTATGGGTT | (SEQ ID NO: 1285) | DEDVDMILESVSRGSTDQKL |
| | | | | GGCACCCCTAACTGCATCTC | | QSMCTVIMSMGAERFGTIGQ |
| | | | | CCCTAGGAGAGCATCCCGCA | | RKPTDTMKPNRREVKIRQLR |
| | | | | ACACGCTACAAAGAACCACA | | QELKSLRRSFKASTSGEERA |
| | | | | AAGAGCAATACCCCCAGGGA | | ALAELTHHLREKLRTLRRAE |
| | | | | TGCCCGAGAGGGGGGGAGGA | | WHKKKGKERARKRSAFITNP |
| | | | | TGAGCATCCCATTCGGACGG | | FGFTKRLLGQKRSGNLTCPV |
| | | | | TCCAATCGGTATTGACCCCA | | EEINLHLSNTFSDASRDVDL |
| | | | | GCAAACGGAGAATCGACA | | GPCPLLVTSPEPEVHFDISE |
| | | | | (SEQ ID NO: 1162) | | PTLKEVRETVKAARSSSAPG |
| | | | | | | PSGVVYKVYKHCPRLVVRLW |
| | | | | | | RILKVVWRRGKVAADWRQAE |
| | | | | | | GVWIPKEEESSKVDQFRLIS |
| | | | | | | LLSVEGKIFFKIVAQRLIKY |
| | | | | | | LLDNQYIDTSVQKGGVPGVP |
| | | | | | | GCLEHTGVVTQLIREAKENR |
| | | | | | | GDLAVLWLDLANAYGSIPHK |
| | | | | | | LVETALTRHHVPESIQNLIL |
| | | | | | | DYYSNFWLRAGSSTATSAWQ |
| | | | | | | RLEKGIITGCTISVPLFALA |
| | | | | | | MNMIVKGAEAGCRGPVSRSG |
| | | | | | | TRQPPIRAFMDDLTVMTATV |
| | | | | | | PVCRWLLQGLERLITWARMS |
| | | | | | | FKPAKSRSLVLKKGKVAERF |
| | | | | | | RFTLGGTQIPTVSEKPVKSL |
| | | | | | | GKVFNSSLKDTASVQQTRSD |
| | | | | | | LTTWLEGIDKTGLPGSFKAW |
| | | | | | | MFQHGVLPRVLWPLLVYEVP |
| | | | | | | MTMVEQLERTISRFLRKWLG |
| | | | | | | LPRSLSNIALYGRSTKLQLP |
| | | | | | | LSGLTEEFKVTRAREVLMYR |
| | | | | | | DSSDSKVSSAGIHVRTGRKW |
| | | | | | | KAQEAVDQAEARLRHSVLVG |
| | | | | | | SVAVGRAGLGSCPKPRYDKV |
| | | | | | | SGKEKRLLIQDEIRAGEEED |
| | | | | | | RRCRMVGMRKQGAWTRWEHA |
| | | | | | | DSRKVTWPELCRAEPSRIKF |
| | | | | | | LISSVYDVLPSPANLHVWGL |
| | | | | | | AETPSCQLCQRRGTLEHILS |
| | | | | | | CCPKALGEGRYRWRHDQVLR |
| | | | | | | VLADTVSNAIQSSRSQQPPK |
| | | | | | | KSIVFVRAGEKTRQQPTSAG |
| | | | | | | GLLSTARDWQLLVDLGRQLK |
| | | | | | | FPEHIVATSLRPDMVLVSES |
| | | | | | | TRQVVLLELTVPWEERISEA |
| | | | | | | NERKRAKYAELVVQSQSNGW |
| | | | | | | RARCVPVEVGCRGFAGQSLA |
| | | | | | | YVLKLLGVRGFRLRKSIRDI |
| | | | | | | LEAAEKASRWLWFRRGEPWK |
| | | | | | | PHGHRSGNDQPRLGRPGEGV |
| | | | | | | W |
| | | | | | | (SEQ ID NO: 1407) |
| HERO | HERO- | — | Danio | TTCAAGCCTGGCGCAGCCAG | TGATCAACCCCGGCTGGGTC | MTHANEQTTNKIYVTCICGK |
| | 2_DR | | rerio | TGACTCCTAGGAATAGACTA | ACCTGGGTGAGAGTGTATGA | LCKNHWGLKIHQARMKCLEQ |
| | | | | GGTGGCAACCAAGAATAGTT | TGTTGAGAGACCCGAAACAC | ESKVQRTGPEPGETQEEPGP |
| | | | | TGGTCGACTACTGGAGAGAC | TCAATGATCCCAGGATACAT | EATHRAKSLHVPEPQTPSEV |
| | | | | AGTTGACGGCACGGAAAGAC | CACTGATGATGTGTCCCAAA | VQQRIKWPPASKGSEWLQFD |
| | | | | GGCACTTGGGACAGTATGGG | TGCATCCATGAGATGTTTCT | EDVSNIIQAIAKGDADSRLK |
| | | | | TTAGCACCCCAGCCTGTGTC | TGCATAA | TMTTIIFSYALERFGCIEKG |
| | | | | TTTCGTGAGAGAGAACCCAA | (SEQ ID NO: 1286) | KTKPTTPYTMNRRATQIHHL |
| | | | | ACAAGCTACGGAAAGCCCCA | | RQELRSLKKLYKKATDEEKQ |
| | | | | CAGAGATATACCCCCAGGAG | | PLAELKNILRKKLMILRRAE |
| | | | | ATCCCGAGAGGGGGGGAGGA | | WHRRRGRERARKRAAFITNP |
| | | | | TGAGATCTCCAATCGGACGG | | FGFTKQLLGDKRSGRLECSI |
| | | | | ATCAAAGGTTA | | EEVNRFIEETVSDPLREQEL |
| | | | | (SEQ ID NO: 1163) | | EPNKALISPTPPAREFSLRG |
| | | | | | | PSLKEVKEIIKASRSASTPG |
| | | | | | | PSGIPYLVYKRCPGLLLHLW |
| | | | | | | KILKVIWQRGRVAEQWRCAE |
| | | | | | | GVWIPKEENSKNINQFRIIS |
| | | | | | | LLSVEGKVFFSIVSRRLTEF |
| | | | | | | LLENNYIDPSVQKGGIPGAP |
| | | | | | | GCLEHTGVVTQLIREAHENR |
| | | | | | | GDLVVLWLDLANAYGSIPHK |
| | | | | | | LVELALHRHHVPSKIKDLIL |
| | | | | | | DYYNNFKMRVTSGSETSSWH |
| | | | | | | RIGKGIITGCTISVILFALA |
| | | | | | | MNMVVKSAEVECRGPLTKSG |
| | | | | | | VRQPPIRAYMDDLTITTTTV |
| | | | | | | PGSRWILQGLERLIAWARMS |
| | | | | | | FKPSKSRSMVLKKGKVVDKF |
| | | | | | | HFSISGSVIPTITEQPVKSL |
| | | | | | | GKLFDSSLKDSAAIQKSKKE |
| | | | | | | LGAWLAKVDKSGLPGRFKAW |
| | | | | | | IYQHSILPRVLWPLLIYAVP |
| | | | | | | MSTVESLERKISGFLRKWLG |
| | | | | | | LPRSLTSAALYGTSNTLQLP |
| | | | | | | FSGLTEEFMVVRTREALQYR |
| | | | | | | DSRDGKVSSACIEVRTGRKW |
| | | | | | | NAGKAVEVAESRLQQKALVG |
| | | | | | | TVATGRAGLGYFPKTLVSQV |
| | | | | | | KGKERHHLLQGEVRASVEEE |
| | | | | | | RVSRVVGLRQQGAWTRWNTL |
| | | | | | | QRRITWANILQADFQRVRFL |
| | | | | | | VQAVYDVLPSPSNLHVWGKN |
| | | | | | | ETPSCLLCSGRGSLEHLLSS |
| | | | | | | CPKALADGRYRWRHDQVLKA |
| | | | | | | IAASLASAINTSKNHRAPRK |
| | | | | | | AVHFIKAGEKPRALPQLTTG |
| | | | | | | LLHKASDWQLEVDLGKQLRF |
| | | | | | | PHHIAATRLRPDIIAISEAS |
| | | | | | | RQLIILELTVPWEERIEEAN |
| | | | | | | ERKRAKYQELVEECRERGWR |
| | | | | | | TYYEPIEIGCRGFAGRSLCK |
| | | | | | | VLSRLGITGVAKKRAIRSAS |
| | | | | | | EAAEKATRWLWIKRADPWTA |
| | | | | | | VGTQVGT |
| | | | | | | (SEQ ID NO: 1408) |
| HERO | HERO- | — | Branchiostoma | CTGACCAGCAGACGGGAAGC | TAGAAACCCACAAGGCTGAG | MALPAVRSGPASTWTLLITL |
| | 3_BF | | floridae | CCGCGACCAACTAGTCTCCG | AAATGTAGAGCATCTGTATG | VIVAAKGTDGFMSFKLPLLS |
| | | | | CAAATATTGCACACAGGGCG | GACAATATTGATGATTGAAA | TDTWSGYNNDVKTLLGPLHH |
| | | | | ACCCTATGGAGCTGATTCAG | TGTTGTGATTTTAGATCAAA | ELATNEMSPKLAGEGFSDIM |
| | | | | TCAAATTTCCTCTGAGATAT | TTTAGAAATATGAAAACCGA | CDFMASKPEFSHTTEESHSE |
| | | | | ACCGATAACTATCTACAGAA | ACTAAACTAAATATAATGTT | GYISHEPQSLAQVKRLKNKL |
| | | | | ACTGCACAGTTAGTTTGGAA | TTTTTTAAAGTAATGATAAG | RKKAFRADATPEDRKAFRDA |
| | | | | AGAGCTTTTCTACTGAAAGA | CAATACCCACATTGTGCAAT | IKTYSFMKRQQKRKETTKSA |
| | | | | CAGCAAAATCCGCCACTTTA | ACTATCTATGTTATGTCCTT | AHQEKEYHKNFWKFAGKCAK |
| | | | | GACGAGCGTCAAGACTGCCC | TGTCCCCCCTGCATGTTTGG | GQLDIPPVKPAFSVYYANEY |
| | | | | TCCCCATAACCAAT | TCAATAATGACCATCGTGTC | YKNKYSHPTRVDFNKLLWFP |
| | | | | (SEQ ID NO: 1164) | CTGGGCTCCGTGTACCTTTC | HLPVEEQLPANSFDMSPVRP |
| | | | | | TTTACTATGAATAAAGAATG | KDIKAVLSKRCATSAPGPDG |
| | | | | | ATTTTACTAC | IMYGHLKHLPACHLFLSTLF |
| | | | | | (SEQ ID NO: 1287) | SKLLESGDPPTSWSSGNVSL |
| | | | | | | IHKDGSPEAAENFRMICLTS |
| | | | | | | CVSKIFHQILSERWAKYMTC |
| | | | | | | NDLIDPETQKAFLTGINGCV |
| | | | | | | EHVQVMREILAHAKKNRRTV |
| | | | | | | HITWFDLADAFGSVEHELIY |
| | | | | | | YQMERNGFPPIITTYIKNLY |
| | | | | | | SRLKGKVKGPGWESDPFPFG |
| | | | | | | RGVFQGDNLSPIIFLTVFQP |
| | | | | | | ILQHLKGVEQQHGYNLNDKH |
| | | | | | | YVTLPFADDFCLITTNKRQH |
| | | | | | | QKLITQISSNTKSMNLKLKP |
| | | | | | | RKCKSMSIVSGKPSDISFTI |
| | | | | | | DGDPVKTTKDAPEKFLGGYI |
| | | | | | | TFLSKTKETYDILAKTIETT |
| | | | | | | VENINKSAIRNEYKLRVYME |
| | | | | | | YAFPSWRYMLMVHDLTDTQL |
| | | | | | | QKLDSIHTKAIKTWLRMQPS |
| | | | | | | ATNAILYNTRGLNFKSISDL |
| | | | | | | YLEAHALAYSRSVLKADEKV |
| | | | | | | KHALQAKLDRESQWTRKMQK |
| | | | | | | WGIGKCHTIHQQAIHVAKDS |
| | | | | | | EWTSVRKHVKQQVTDMRHDV |
| | | | | | | WTKHQENLLQQGQMLQLLEE |
| | | | | | | EKCDLTWRSAMYNLPRGILS |
| | | | | | | FAVRASIDALPTLCNLTTWG |
| | | | | | | KRNTDKCKLCGNRETLHHVL |
| | | | | | | NHCGVALQQGRYTFRHNSVL |
| | | | | | | KHITDTIIESIDTSRINATI |
| | | | | | | YADIQGYTTNGGTIPVHTIP |
| | | | | | | TTQKPDLIIYLPEQKTLHIH |
| | | | | | | ELTVPFEKNIKTSHDRKVNK |
| | | | | | | YSTLAADLETAGISATLTCF |
| | | | | | | EVGSRGLVTPENKTRLRTLF |
| | | | | | | KIVKAKPPKTLFTDISRIAM |
| | | | | | | LSSYAIWNSRHEPYWESETL |
| | | | | | | L |
| | | | | | | (SEQ ID NO: 1409) |
| HERO | HERO | — | Danio | AAAGCAGTAGAG | TAGCATGCCACTTGGACACA | MTTHRAEVTTSGKTQEEPGP |
| | Dr | | rerio | (SEQ ID NO: 1165) | GGCCGGGGTCTGATCAGCCT | EATHSAQSLLVSPTPAAGRS |
| | | | | | CGGTCGGGTCGCCTGGAGGA | PATQSCPQVTAAHNSPQSPQ |
| | | | | | GGGTGTCTGTTGCAAGACCC | SQQVAVTRSDCVPLAQPRIQ |
| | | | | | GAAACACCCTGTGAGCCCAG | WPQSSKKAEWLQFDKDVNQI |
| | | | | | GAAACAACACTGATGATGTG | LEVTGKGGVDQRLSTMTTLI |
| | | | | | TCCAAGGTTGTGCATCAGGA | VNIAAERFGTVTPKPTPSTY |
| | | | | | GATGTTTCTGTAAC | TPSHRVKEIKRLRKELKLLK |
| | | | | | (SEQ ID NO: 1288) | RQYKAAGEVERAGLEDLRGI |
| | | | | | | LRKQLVNLCRAEYHRKRRRE |
| | | | | | | RARKRAAFLANPFKLTKQLL |
| | | | | | | GQKRTGKLTCSKEAINNHLK |
| | | | | | | ATYSDPNREQPLGPCGALLT |
| | | | | | | PPEPTSEFNMKEPCRSEVEE |
| | | | | | | VVRRARSSSAPGPSGVPYKV |
| | | | | | | YKNCPKLLHRLWKALKVIWR |
| | | | | | | RGKIAQPWRYAEGVYIPKEE |
| | | | | | | KSENIDQFRVISLLSVESKI |
| | | | | | | FFSIVAKRLSNFLLSNKYID |
| | | | | | | TSMQKGGIPGVPGCLEHTGV |
| | | | | | | VTQLIREAREGRGDLAVLWL |
| | | | | | | DLTNAYGSIPHKLVEVALEK |
| | | | | | | HHVPQKVKDLIIDYYSKFSL |
| | | | | | | RVSSGQLTSDWHQLEVGIIT |
| | | | | | | GCTISVTLFALAMNMMVKAA |
| | | | | | | ETECRGPLSKSGVRQPPIRA |
| | | | | | | FMDDLTVTTTSVPGARWILQ |
| | | | | | | GLERLVAWARMSFKPAKSRS |
| | | | | | | LVLRKGKVRDEFRFRLGQHQ |
| | | | | | | IPSVTERPVKSLGKAFNCSL |
| | | | | | | NDRDSIRETSTAMEAWLKAV |
| | | | | | | DKSGLPGRFKAWVYQHGILP |
| | | | | | | RLLWPLLIYEVPMTVVEGFE |
| | | | | | | QKVSSYLRRWLGLPRSLSNI |
| | | | | | | ALYGNTNKLKLPFGSVREEF |
| | | | | | | IVARTREHLQYSGSRDAKVS |
| | | | | | | GAGIVIRTGRKWRAAEAVEQ |
| | | | | | | AETRLKHKAILGAVAQGRAG |
| | | | | | | LGSLAATRYDSASGRERQRL |
| | | | | | | VQEEVRASVEEERTSRAVAM |
| | | | | | | RQQGAWMKWEQAMERNVTWK |
| | | | | | | DIWTWNPLRIRFLIQGVYDV |
| | | | | | | LPSPSNLYIWGRVETPACPL |
| | | | | | | CSKPGTLEHILSSCSKALGE |
| | | | | | | GRYRWRHDQVLKSIAEAISK |
| | | | | | | GIKDSRYRQATAKVIQFIKE |
| | | | | | | GQRPERTAKNCSAGLLSTAR |
| | | | | | | DWVMTVDLERQLKIPPHITQ |
| | | | | | | STLRPDIILVSEATKQLILL |
| | | | | | | ELTVPWEERMEEAQERKRGK |
| | | | | | | YQELVEQCRANGWRTRCMPV |
| | | | | | | EVGSRGFASYTLSKAYGTLG |
| | | | | | | ITGTNRRRALSNNVEAAEKA |
| | | | | | | SRWLWLKRGEQWGQ |
| | | | | | | (SEQ ID NO: 1410) |
| HERO | HEROFr | — | Takifugu | AGACTAGGTGACAACCAAGA | TGATCACCCCGGCTGGGTCG | MTPAMEMTTTVTCICSKLCK |
| | | | rubripes | ACAGTTWGGTCGACTACTGG | CCTGGGCGAGGGTGTATGAT | NQRGLKIHQARMKCLEREVE |
| | | | | AAAGACAGTTGGCAGCTCGG | GTCGTGAGACCCGAAACACC | VQRTGPGPGETQEEPGQEAT |
| | | | | AAAGACGGCACCCGGGACAG | CTATGAACCCAGGATACATC | HRSQSLHVPEPPNPNRVVQQ |
| | | | | TATGGGTTAGCACCCCAGCC | CTGACGATGTGTCCCAGTGC | QRIKWPPANRRSEWLQFDED |
| | | | | TGTATCTTTCGCGAGAAGGA | ATCCAGGAGATGTAKCTTTA | VSNIIQATAKGDVDSRLQAI |
| | | | | ACCCAAACAAGCTACGGAAA | AGT | STIIVSYGSERFGRIEKGNT |
| | | | | GCCCTACAGAGAAACACCCC | (SEQ ID NO: 1289) | ETTSYTMNRRSFKIHQLRKE |
| | | | | CAGGAGATCCCGAGAGGGGG | | LRTLKKQFKRAXDGDKQALK |
| | | | | GGAGGATGAGATCTCCAATC | | ELYNILRKKLKTLRRAEWHR |
| | | | | GGACGGACCTAACGTTA | | RRGRERARKRAAFIANPFRF |
| | | | | (SEQ ID NO: 1166) | | SKQLLGDKRSGRLECSREEV |
| | | | | | | NRFLQNTMSDPLRGQDLGPN |
| | | | | | | RALISPAPPSAEFKLAEPSL |
| | | | | | | KEVEEVIKAARSASSPGPSG |
| | | | | | | VPYLVYKRCPEILRHLWKAL |
| | | | | | | KVIWRRGRVADQWRCAEGLW |
| | | | | | | IPKEEDSKNINQFRTISLLS |
| | | | | | | VEGKVFFSIVSRRLTEFLLK |
| | | | | | | NNYIDTSVQKGGIPGVPGCL |
| | | | | | | EHNGVVTQLIREAHESKGEL |
| | | | | | | AVLWLDLTNAYGSIPHKLVE |
| | | | | | | LALHLHHVPSKIKDLILDYY |
| | | | | | | NNFRLRVTSGSVTSDWHRLE |
| | | | | | | KGIITGCTISVVLFVLAMNM |
| | | | | | | VVKAAEVECRGPLSRSGVRQ |
| | | | | | | PPIRAYMDDLTVTTTSVPGC |
| | | | | | | RWILQGLERLILWARMSFKP |
| | | | | | | TKSRSMVLKKGKVVDKFRFS |
| | | | | | | ISGTVIPSITEQPVKSLGKL |
| | | | | | | FDSSLKDTAAIQKSTEELGG |
| | | | | | | WLTKVDKSGLPGRFKAWIYQ |
| | | | | | | YSILPRVLWPLLVYAVPVTT |
| | | | | | | VESFERKISSFLRRWLGLPR |
| | | | | | | SLNSAALYGTSNTLQLPFSG |
| | | | | | | LTEEFKVARTREALQYRDSR |
| | | | | | | DCKVSSAGIEVKTGRKWKAE |
| | | | | | | KAVXVAESRLRQKALVGAVA |
| | | | | | | TGRTGLGYFPKTQVSHARGK |
| | | | | | | ERNHLLQEEVRAGVEEERVG |
| | | | | | | RAVGLRQQGAWTRWESALQR |
| | | | | | | KVTWSNIMQADFHRVRFLVA |
| | | | | | | AVYDALPSPANLHAWGKSET |
| | | | | | | PTCSLCSGRGSLEHLLSSCP |
| | | | | | | KSLADGRYRWRHDQVLKAVA |
| | | | | | | ESIALAISTXKHHHAPKKAI |
| | | | | | | SFIKAGERPRAGPQITTGLL |
| | | | | | | HTAXDWQLHVDLGKQLIFPQ |
| | | | | | | HIATTSLRPDMIIISEASKH |
| | | | | | | LIMLELTVPWEERIEEANER |
| | | | | | | KRAKYQELVEECRGRGWRTF |
| | | | | | | YEPIEVGCRGFAGRSLCKAF |
| | | | | | | GRLGVTGTAKKRAIKXASEA |
| | | | | | | AERATRWXWLKRADPWVATG |
| | | | | | | TQAGS |
| | | | | | | (SEQ ID NO: 1411) |
| HERO | HEROTn | — | Tetraodon | AGATTGGTCTGGCTAAGCCA | TGATCACTCCCAGTCGGGTC | MATTQASVKPTAVATCVCGK |
| | | | nigroviridis | GTGACGTCCAGGAACAGACT | GCCTGGGTGAGGGGGTCTGA | ICKNPRGLKIHQTKMGCLAS |
| | | | | GGCTGACGACCACGAATAGA | TGTTGAAAGACCCGAAACCC | VQPEQRARFSLSESREVPAR |
| | | | | GTGGTGACAGCTTGGATAGA | CCGATGACCCCAGGTACTAT | AEPYGPQQPHSPEALGETQE |
| | | | | CAGCTGACAGCAGGGAAAGA | CACTGACGATGTGTCCAAGA | ERGQESPHSAQNLRAQVAQA |
| | | | | CGGCAACCGGGGCAGGAAGG | CATGCATCAATAGGTGTATT | PDNPQHHRRVKWPPASKVSE |
| | | | | GCTAGCAACCCAGCCTGCAT | TAGAAATC | WQQLDEDLEGILESTAKGGV |
| | | | | CTTCCGTGAGGAAGAACCCA | (SEQ ID NO: 1290) | DRKLQTMTTLVISFATERYG |
| | | | | AAACTTGCTACGAAGAGCCC | | TMEKRAAPEKYTKNRRAEKI |
| | | | | GAAGCAAAGATACCCCCAGG | | SQLRQELRVLKKQFKGASED |
| | | | | GGAGCCCGAGAGGGGGGGAG | | QKPGLAELRCTLRKKLLTLR |
| | | | | AATGAGCTCCCCAAACGGAC | | RAEWHRRRAKERAKKRAAFL |
| | | | | GGATAAC | | ANPFGFTKQLLGQKRSAHLE |
| | | | | (SEQ ID NO: 1167) | | CAKEEVDSYLHDTFSDAERE |
| | | | | | | NSLGECRVLISPPEPACSFN |
| | | | | | | TKAPTWKEIQTVVRAARNNS |
| | | | | | | APGPNGVPYLVYKRCPKLLA |
| | | | | | | RLWKILRVIWRRGKVAHQWR |
| | | | | | | WAEGVWVPKEEKSTLIEQFR |
| | | | | | | TISLLNVEGKIFFSILSHRL |
| | | | | | | SDFLLKNQYIDSSVQKGGIP |
| | | | | | | GVPGCLEHCGVVTQLIREAR |
| | | | | | | EGRGSLAVLWLDLANAYGSI |
| | | | | | | PHKLVEMALARHHVPGPIKT |
| | | | | | | LIMDYYDSFHLRVTSGSVTS |
| | | | | | | EWHRLEKGIITGCTISVIIF |
| | | | | | | ALAMNMLAKSAEPECRGPIT |
| | | | | | | KSGIRQPPIRAFMDDLTVTT |
| | | | | | | TSVPGCRWILQGLERLMTWA |
| | | | | | | RMRFKPGKSRSLVLKAGKVT |
| | | | | | | DRFRFYLGGTQIPSVSEKPV |
| | | | | | | KSLGKMFDGSLKDAASIRET |
| | | | | | | NDQLGHWLTLVDKSGLPGKF |
| | | | | | | KAWVYQHGILPRILWPLLVY |
| | | | | | | EFPISTVEGLERRVSSCLRR |
| | | | | | | WLGLPRSLSSNALYGNNNKL |
| | | | | | | TLPFSSLAEEFMVTRAREVL |
| | | | | | | QYRESKDPKVALAGIEVRTG |
| | | | | | | RRWRAQEAVDQAESRLHHKE |
| | | | | | | LVGAVATGRAGLGTTPTTHL |
| | | | | | | SRLKGKERRDQVQLEVRASI |
| | | | | | | EEQRASQWVGLRQQGAWTRW |
| | | | | | | EEAMARKISWPELWRAEPLR |
| | | | | | | IRFLIQSVYDVLPSPSNLFL |
| | | | | | | WGKVESPSCPLCQGRGTLEH |
| | | | | | | ILSSCPKALGEGRYRWRHDQ |
| | | | | | | VLKAIAESISSAMEYSKRLP |
| | | | | | | LPGRGVRFVRAGEQPPPQPR |
| | | | | | | AQPGLLATARDWQLRVDLGK |
| | | | | | | QLKFPENIVETNLRPDIVLH |
| | | | | | | SQSSKQVILLELTVPWEERM |
| | | | | | | EEAYERKAGKYAELVEDCRR |
| | | | | | | AGWRSRCLPIEVGGRGFAGK |
| | | | | | | SLCKAFSLLGITGMRRRKAI |
| | | | | | | CAASEAAERASRWLWIQRDK |
| | | | | | | PWTSASWTQAGN |
| | | | | | | (SEQ ID NO: 1412) |
| NeSL | LIN9_SM | — | Schmidtea | AAACGACATCATGAACGCTT | TAAAATGGCAAAAAGATATT | MMDSRQLNTPKIRKYQNPKM |
| | | | mediterranea | GGCCGCAACAATCCAGTTAT | TCAAGATGAATTGTGGACTC | TNDIMKSYNYAVLSDVTPQE |
| | | | | CCCTGCGGTAACATTGTGGA | ATCTAAAAAATGACCACCTT | TTQTTTHLNVDIDNETTQPK |
| | | | | ACTCATAAGACAAGTACTAA | GAGTCCAAATATGCCTAGCT | QPLTKSGKPKSKPIAVSYKF |
| | | | | AAGAAGAATTAGAAAAATTA | ATCATGGTTGCTGATGGAAA | KDATFIWDTTPQTNPPRDCT |
| | | | | GAAGAAAAAATTGAAAATAA | CAGTAAGGCACCTGATAGCT | KLIDKTRPRKTIFKKSAFQS |
| | | | | TTTATTTATAAAATTTAAAA | AACTTTTCACTGTGAATATC | YLKKELSNETFVEVKTFLMA |
| | | | | ATTTAAATAAATTTAAAAAT | TTCAGATATTCACAGTGACA | THKYRFKDENSRLLAYRIIN |
| | | | | TTAAATTTAAATTTAAATGA | CGAAAGGACACCACTAGTAA | RYVMETANEFKETEFDMARF |
| | | | | AGATAAAAATTTATTTAATC | AAACCACTAGTTTTTTCTGA | AKFFTIPENWLKHLKPYSTA |
| | | | | CAATAAATAATCAAGAAAAT | CACCTCTTGCTACAAACTCT | TETSPADRIKVQKLVDLTCR |
| | | | | CAAGAAA | GTAAAAATCAAAAGGATCGA | YPFKTQEEQTSVANFLHFFT |
| | | | | (SEQ ID NO: 1168) | TAGGCCGCGCTTTCACGGTC | QRSIIGISRDYKFQKFIPFM |
| | | | | | TGTATTCGTACTGAAAATCA | ARKNTRPETTSTMVTTSPTE |
| | | | | | AGATCAAGGAAGCTTTTCCC | QNRLPMVIITPLEEPKSEHR |
| | | | | | CTTTTAGTCAACACCAGGTT | RPEKRGASNDTIVLSDEEFP |
| | | | | | TCTGTCCTAGTTGAGCTTCC | LLKRRTLPTRKSKNPTGAGN |
| | | | | | CTTGGGACATCTGCGTTACC | VPTETECTDEVKFILNNEYQ |
| | | | | | ATTTGACAGATGTACCGCCC | IECKECGKVWENVRNGLNHL |
| | | | | | CAGTCAAACTCCCCACCTGA | RQKHDFPNRTDVMVSCVRCE |
| | | | | | CACTGTCCTCAAAACAGTTC | VPIKGAECVNHIKNHKKDDK |
| | | | | | AATTGCATCCGAAGATCGCA | EESEAGSLVANTQDIPNESS |
| | | | | | ATTTTTTCACTAAAATAAAT | LSQAAIEVYLRNILKMKENQ |
| | | | | | TAACAAAAGTTAATTATACT | ERNIQYLEPSTANFLINRNL |
| | | | | | GCTTCATTGAGTAAGTAGAA | RAFYQNVKIEKLIGWEQVIW |
| | | | | | AAACAATC | LIHWNKCHWIVYLANCDSKT |
| | | | | | (SEQ ID NO: 1291) | SVILDSDNQMTLQQRCNIKA |
| | | | | | | KFDKFLEGTFEEKTVLGTLE |
| | | | | | | RKVPQQPNNFDCGIYVIQYI |
| | | | | | | SDFLKDPQRIDYHTPDSKRI |
| | | | | | | RKEIGELILEEMKNPASKIK |
| | | | | | | NPNKEIQSLLOKFRLLQINV |
| | | | | | | NDVFHWFAAEYQKSLPKIRT |
| | | | | | | KRDGKLNKLSCSYQIQRLFG |
| | | | | | | LAPKRAVKEIYFQETSTADL |
| | | | | | | ETRVLNEHFKKDESTMKECK |
| | | | | | | IKNGNHYQDWITKAQIDNKE |
| | | | | | | ILEALKNSTDSAPGEDNIPL |
| | | | | | | RQWIIWNNDGVLFDMFNYIK |
| | | | | | | RTHDIPDMWKNYTTTLLIKP |
| | | | | | | GKSQESNIPANWRPISILPT |
| | | | | | | SYRIFMKVLNKRVLEWANRG |
| | | | | | | ELISKWQKAVDKANGCDEHS |
| | | | | | | YVIQALIEKANRSYYKNEQC |
| | | | | | | HLAFLDLADAFGSIPFQVIW |
| | | | | | | HTLKNMGMDEETINLLKEIY |
| | | | | | | KDCSTKYKCGKNESEKIKIT |
| | | | | | | KGVRQGCPLSMTLFSLCIQY |
| | | | | | | LIQGIAEKKKGATIAGQEVC |
| | | | | | | ILAYADDLVIVANTAKDMQM |
| | | | | | | LLTTIENLAKQADLIFKPAK |
| | | | | | | CGYYRDPRDKKSMMKIYGKE |
| | | | | | | ISIVDEKNVYTYLGVRIGDT |
| | | | | | | KKKDLNVRFEEVKKKTTAIF |
| | | | | | | KSKLRSDQKLEAYNIFCQSK |
| | | | | | | FVYILQGEDIAKTKIETYDE |
| | | | | | | EIKKMIKEDILKLQDKSPFT |
| | | | | | | DFVIYSPREKGGLGITKIID |
| | | | | | | EQTIQTINRTAKLLNSSHRA |
| | | | | | | IRAIIYEELIQVANLRGEKE |
| | | | | | | INTIEEALKWLEGTNKYKKN |
| | | | | | | SNAKTTWITRVREAFQTLEK |
| | | | | | | KHKIKVRFVPKENCIGYKIK |
| | | | | | | CDTQEKIVELDNSKELSKSL |
| | | | | | | HWMIKEAYYKEWKALKCQGY |
| | | | | | | IISLKTSEFMEWKMPRGLPD |
| | | | | | | PDWRFLTKVKANMLDVNMKQ |
| | | | | | | ANQGGRLGSTKCRKCEDKES |
| | | | | | | ASHVINHCASGNWSRVEKHN |
| | | | | | | QVQNELAKELTKRNISFEKD |
| | | | | | | SIPKETKESLRPDLVIRLKD |
| | | | | | | KIMIVDIKCPFDEESAIESA |
| | | | | | | RNKNIDKYRELAKEIQAKTG |
| | | | | | | LQTTVSTFVVCSLGTWDKRN |
| | | | | | | NELLRQMGIRYEESKEMRIN |
| | | | | | | MIQKAIHGSRKTYDHHRNFN |
| | | | | | | NG |
| | | | | | | (SEQ ID NO: 1413) |
| NeSL | NeSL- | — | Caenor | AAGGACGCTGGTTTAAGGCC | TAAACCCACACGAGAMCTAC | MPLXISDCVHLVSAEGDTMN |
| | 1_CBre | | habditis | GAATTCGTTCGTTCTTTTTC | GACGCCATAAGATCAGGCAT | GRSTCGPLSRSSSVVSRSRS |
| | | | brenneri | TGGCGGTCTTGCTTTGAGCT | GTACGGATGTGAATGAGACT | SPSPSVPPHPSPSIGPDTGL |
| | | | | TGGTTTCCGATCCT | GATGAACGGAATGAGCACGT | SAGIIGTSRGCSLWLPEVDN |
| | | | | (SEQ ID NO: 1169) | GCCCATAAGATCGGGTATKA | ALSQWLRKGLERDHEVLVCG |
| | | | | | AAGAWCAGAGACGATCCCTA | FEAAKPLSLSKARLLRKTPR |
| | | | | | MCATCGGGAAAACACGAGTT | NTGVVRHILEFDGRLVHTNC |
| | | | | | ATACTGCTTCACTGAMCTCG | NETECVLSTLXSXXAVEVVR |
| | | | | | CTAAGCTCTCATAATGACCG | ISLKCEPREPCEPKCVLSIL |
| | | | | | AACTTGTTCGCAACTGCCTC | CSDKIVXISFECETREPFPF |
| | | | | | CTAACCGGGCGGGTGTGAGA | FXDRKFREPIPFVFERMYDP |
| | | | | | AGGGAGGTCGCCTTGAGGCG | RDPIPSFICWMYDLRQRMTP |
| | | | | | GACGCAATGAGGGATGTGTG | GTLPXNPLSXENKDSWGRPA |
| | | | | | CAGGTTCCCCCTCTTGAGAT | VIKNEIRSMRSYLEENVKEN |
| | | | | | CCGAAAGTCTAAAAGTACTA | RLNLLRRLRGGGEGKKMIRK |
| | | | | | GACCGAAAGATCGAGGACGG | LVAEKKSDTEAVCRILYPLD |
| | | | | | ACGGGATGGCCGCGAGGCAC | DRYECFVDGCETTSTMGYGS |
| | | | | | ACGGCGGGTAACACAGCCAG | SDLKYMTTHIKKEHGVKVQW |
| | | | | | ATAACCTAGTAGATCTTCGG | TYECSLCNKQAPFMGGAASK |
| | | | | | ATCTCGTCGGCCTGGAGATA | WVTAHMATKHTETVKLKLKP |
| | | | | | TGTGGAACCCTGGGAAAGGA | SISTTAKVAAKLDEIAVSLP |
| | | | | | GAAAGTTGTTTGTTGGGCTG | KPRQVRVLRDPDEVKEKVAK |
| | | | | | GCAAGAGTGAAGTTTGAATG | PTLASTREEVKRNALRNMAP |
| | | | | | TGAACCACCGTCATGCAACC | LVELSSQNQLTGAERPEETS |
| | | | | | ACTAAACCAGTGGCGATGCG | EAMRLEECRTPEKIAELEGK |
| | | | | | GGTGGAGTCATCACAGGAAA | IQTRTVTKKLSALKESMEKR |
| | | | | | ATGTTTCTGTTGCTTGACTT | TREEKVGKPSLAPIHEEVKK |
| | | | | | ATCAGTGTTTGATATCGCCC | TARRSLAPLVEPSTFTHLTG |
| | | | | | TCAGGCACAAGTATGAAGGC | ASRLQAVRDAFSKANKDAAA |
| | | | | | CCCCACCCACATAAACTCCC | KRRSSLAKPARLSEIMNTTF |
| | | | | | TAGCAACTGGTAGTCCAGCA | TKETVNETKEPVNDTDESIA |
| | | | | | AGCGCTGGTWCTTGCTACTA | TIQPQVRVYRFNTWCLDHET |
| | | | | | TTGCGCCCCAGGCTCGCCC | TREAWLTGEVVDWFMGKVTE |
| | | | | | (SEQ ID NO: 1292) | KKDQYRVFDSLVWSMYKFHG |
| | | | | | | VGYVLDLMRDPLTYFLPICE |
| | | | | | | HDHWVLLVIDEKGIWYGDSK |
| | | | | | | GAEPCREIAKFIEETKRERR |
| | | | | | | MFPVPVPLQRDGVNCGVHIC |
| | | | | | | LMVKSIVNGEPWYTEEEVKV |
| | | | | | | FRRNVKRGLKEFGFELYSER |
| | | | | | | IVYVGDDSIKVNDEHDDDVV |
| | | | | | | FLSEETNNTTFTIEQAEDPA |
| | | | | | | EEDAQHLESPVKPVKLMELK |
| | | | | | | IPKIEIKKKEIRRKPKQQIE |
| | | | | | | KKRKVPTGKPDELLVRVRLW |
| | | | | | | LEREVQSYFDSGKRFQRLEW |
| | | | | | | ILDVLTAAIHKATAGDEQAI |
| | | | | | | ERIEKRSPPLEVEEGEMSTQ |
| | | | | | | TEPKKRERKEKESGCEMKAS |
| | | | | | | HKEMYFKNRSKAFNVIIGKD |
| | | | | | | SKQCEIPIETLQKFFEGTTA |
| | | | | | | ETNVPAEVLKEMGSRLPKLE |
| | | | | | | ALDWMEANFIESEVSDAMKK |
| | | | | | | TKDTAPGVDGLRYHHLKWFD |
| | | | | | | PEYKMLTLLYNECKNHRKIP |
| | | | | | | SHWKEAETILLYKGGDETRP |
| | | | | | | DNWRPISLMPTIYKLYSSLW |
| | | | | | | NRRIRSVGGVMSKCQRGFQE |
| | | | | | | REGCNESIGILRTAIDVAKG |
| | | | | | | KRRNLSVAWLDLTNAFGSVP |
| | | | | | | HELIKSTLESYGFPEMVTEI |
| | | | | | | VMDMYRGASIRIKSKNEKSE |
| | | | | | | QIVIKSGVKQGDPISPTLFN |
| | | | | | | MCLENVIRRHLDSASGHRCI |
| | | | | | | KTKVKVLAFADDMAILAENR |
| | | | | | | DQLQTELNKLDKECESLNLI |
| | | | | | | FKPVKCASLIIERGMVNKNA |
| | | | | | | EVVLRGKPIRNLDENGSYKY |
| | | | | | | LGVHTGIATRVSTMQLLESV |
| | | | | | | TKEMDLVNQSGMAPFQKLDC |
| | | | | | | LKTFVLPKLTYMYANAIPKL |
| | | | | | | TELKVFANLTMRMVKEIHEI |
| | | | | | | PIKGSPLEYVQLPPSQGGLG |
| | | | | | | VACPKITALITFLVNVMKKL |
| | | | | | | WSSDSYIRKLYRDYLDEVAE |
| | | | | | | TETGMEEMTKEDIAKYLSGD |
| | | | | | | VPIDKKAFGYNTFTRVRDVC |
| | | | | | | NSLTXIXGAPLHKLKIVERD |
| | | | | | | GDFAILVQATKEGMEKIFTC |
| | | | | | | AQEKKLQQLLKAEVNTALAH |
| | | | | | | RFFTEKPVKSAVMSVMRQYP |
| | | | | | | QSNAFVKNGKNVSIAVHSWI |
| | | | | | | HKARLNALHCNFNTYGENKS |
| | | | | | | KVCRRCGKDVETQLHILQXC |
| | | | | | | EYGLPKLINERHDAVLHVVR |
| | | | | | | NLIRKGSKKDWKLKIDETVS |
| | | | | | | SCNQLRPDIYMCSPDGKEVI |
| | | | | | | MADVTCPYESGMQAMQESWN |
| | | | | | | RKVTKYEGGFSHFXKMGKKF |
| | | | | | | TVLPIVVGSLGTWWKPTTNS |
| | | | | | | LVQLGIEKXTIRRVIPELCS |
| | | | | | | MTMEYSKDVYWNHIFGDTFR |
| | | | | | | KPPMRFGVEKPKGNSWKKEG |
| | | | | | | SEPKGAASSD |
| | | | | | | (SEQ ID NO: 1414) |
| NeSL | NeSL- | — | Caenor | GCGCCCCGGGTTACATTGTC | TAAAAGCCAAAAGCCACGGA | WRRPAPKQTKNSSLHHLGHE |
| | 1_CJap | | habditis | GGGGCCACCTTTCTCTTGGA | GCATCGGGAAAGAAAAATGG | VKRIARLKPGIFEFHAKPKN |
| | | | japonica | GTAGAGTACAGTCTACTAAT | AAAAGGACTGAAAACGAGAC | SSLHHLGHGVKRXARLKPGI |
| | | | | TTTTTGATAAGCTAGTCGGG | TGAAAAATCCCAAACAAAAC | FEFHAKXKNSSLHHLGHEVK |
| | | | | TCCGAACCACTAGAGTTTGC | AAATCCAAAACAAACTGAAA | RIARLKPGIFEFHAKPKNSS |
| | | | | TTGAAAATGCGTCAAACCAG | AAAAAAAAAAAACAAAACAA | LHHLGHEVRRNSRLKPGIFG |
| | | | | CATTTTAGAACTCGCCCAAA | AAACTGGACAGACACTGGAA | FYQKSKNSSLHHLGHEVRRI |
| | | | | AGTTCGGCCCCGACCCCCAA | ACAGTGTCAGGCAAAGTCGC | ARLKPGILEFHAKNRIKSGL |
| | | | | ACAAATGGGACCTTCTTGAC | CGATTATACTGTTCCACGCC | KVTFLSDLXAHAGALACSRF |
| | | | | GATTTTCCCTGAAAATCGGA | TTAAAAGTCCCGAAATGGCG | LASTLKTEHCRQKSFKPVGF |
| | | | | GGATGGAATGGTCCCCTATT | CAAAACAACCTGAATCTATC | LLHFLKNSSINEVASLRNVK |
| | | | | CTTGTAAATAGKACTGTGCA | TGAAAGTGCTCCAAACCACG | KXFLEFFSGKPIGGMASFSR |
| | | | | ATACCCCTTCGTCATCTGTG | CACAACTCGGAGAAAATCAG | TKITFFKLCLKNFVLSAENP |
| | | | | GGGAACAGATGACACGTGAC | GGACAAGTTGCTTCACGCAA | PIIRQKTNONKASXVQIARG |
| | | | | GTCATCCGTGTAGACGTCAC | CGGGCTGGGACAGGTACCCC | GHLSDCLPSQKMAGVLGRLF |
| | | | | GTTTTCCCGTGCCTGCGGGA | CTCCTGAAACCGCGAGGTTG | LSVQSTLSHRPFDTLLRSDD |
| | | | | GCCCCCAATCGAGCAATTTT | AGGATGGACGGGAAGGCCGC | DKRGRKTIKLQFFIKENLVT |
| | | | | TGCTCTTTTGAGTGTCTGGA | GAGGCTTATGGCGGGTAACT | PXVARDVKILXKQTKNNSGN |
| | | | | ACGCTTGAAACCCCAGACAA | CGGTTGGTGTGCTAGTAGAT | SDSNSETKNFSKNKVSRQNG |
| | | | | ATCAGGCCCAGTCGTCGGAA | GATTTATATCCGACAGCCCC | PLIGGGNHKKIGENQITRTL |
| | | | | AATTTCTTTTTGAAATTTTT | AACTAAGAGGAATCCTGGGA | EIESKSDDNKVLVLRILYPT |
| | | | | TGGCGCCTGCGAAAAAAATT | AAGGAAAACTTGAAAAAGTT | NDWYKCYSQWCQHKSLVGYG |
| | | | | TTTTAACCGCCACAAACCCC | TTTACAGGGCTGGTAATAGT | AHDLKYLTDHIKSTHSKKVE |
| | | | | CGGGAGGCGCGGWTAGGGAT | TCAGCACAATTGTAGTCTAC | WSYQCSICDAKAEGTGTKAA |
| | | | | ATCGATGTCATCGACTCGTC | TGTCTTGCAACCACAACAAA | RWITAHMPKVHGIEATHRIK |
| | | | | GGTGATCTTTGATTTTCTCT | CCAGTGGTTCTGCGGGTAGA | QNSEKTTNVKTANSLQEMAL |
| | | | | CTGCGTCTCCTATTTTGGAA | TCAAACTATAATTTGTGTGT | SLQKPKNGPKKVVMATSTTP |
| | | | | CAGTCTCGACCAAAAAACCG | TTTCTTTTACTTGACCCGGG | EKKISELESKIQTREVAKQL |
| | | | | GGCCTGGCAACCCACCGAAT | CAACACATTATACCACGTCC | SALKESAQKNQQGNKTKNVK |
| | | | | CCGGATGTCGGAGGGATTTG | ACAAGGACGAATTCATAATG | SSLKTIAENTNETKKISARK |
| | | | | GCAAGAAATGTTGGAAATAA | GCCCCTCCCTAAATAAACTC | SLINYLKPEDVLNHIPKEPK |
| | | | | CGAAATTTCGTTATTTTCAG | CCTAGCAACTGGTGGTCCGG | PASAKXGLQELTGAQRLQET |
| | | | | CACAATTGTCAAACCGGCAA | CGAAGCCGGTTCTTGCCACT | RRRFMAGNRRDSIARRESLS |
| | | | | GAAAACTGGATGGACAAGAC | ATTGCGCCCCAGGCTCGCCC | LGKISNSFKIELKNAPEKTT |
| | | | | ACACAATTTACCGGAAATTG | | LKKPAVTQKQNTSQNVSSST |
| | | | | TGCTTGTTACGTCGAATTTC | (SEQ ID NO: 1293) | VVKENKTGNDVITIDDTETV |
| | | | | CCAATTTTGAAAAAATTCCT | | KRKINTWCLDHESTENAWMA |
| | | | | CGTTCCACTGGTCGGGACGC | | DDIIFWYIQKQIEISLDNKK |
| | | | | GAGGTCAGACGATCTGCACG | | FKVIDPLIWTTYRIYGVECV |
| | | | | TCTGAAACCCAAAATCTTCG | | QDELVGFEKYFFPICENGHW |
| | | | | GATTTTATGCAGTAG | | VLLIIDDKRVWYSDSLADKP |
| | | | | (SEQ ID NO: 1170) | | IEVIEDLINKLNRTQGKFNQ |
| | | | | | | TVPKQKDGFNCGVHVCLVAK |
| | | | | | | SVITENFWYTEKDVNDFRKT |
| | | | | | | VKLWLFSEGFELYSEPYKQI |
| | | | | | | QNKNISVNSEKNQISDNEKN |
| | | | | | | WGDKTQTVNESTLKERDEDI |
| | | | | | | FLLRPHISVGVALKTEDEKN |
| | | | | | | QKAENLKAPQKLKAIRRLKI |
| | | | | | | LKTCLKKLTAVKGKPEETER |
| | | | | | | AAIPNLMAIKLKTPPKVEPV |
| | | | | | | RRNPEKGENYXKSQPNKKRQ |
| | | | | | | IPTGKPDELVKKVREWFEIQ |
| | | | | | | FQAYFEDGKSFQRLEWXTGL |
| | | | | | | LTAAIHKASAGDEQAVGKII |
| | | | | | | KRCPPLEIEEGEMATQTETK |
| | | | | | | QKPKNQKSTKGANSSSSIRE |
| | | | | | | AYAENRARTFNKIIGKDDKC |
| | | | | | | EIPIEKIEKFFENTTSNTNV |
| | | | | | | PTETLARITSDLPKLEIGSW |
| | | | | | | IEEEFREKEVAEALKKTKDT |
| | | | | | | APGVDGLRYHHLSWFDPKXK |
| | | | | | | LLTKLYNECREHKKIPGHWK |
| | | | | | | EAETVLLYKGGDETQAENWR |
| | | | | | | PISLMPTICKLYSSLWNKRI |
| | | | | | | KSVTGVLSKCQRGFQEREGC |
| | | | | | | NESIAILRTAIEAAKGTKKS |
| | | | | | | LSIAWLDLTNAFGSVPHESI |
| | | | | | | EATLIAYGFPGMVTEVIKDM |
| | | | | | | YNGASIRVKTKNEKSKQILI |
| | | | | | | KSGVKQGDPISPTLFNICLE |
| | | | | | | SVIXRHLKSADGHKCIXSNI |
| | | | | | | KLLAFADDMAILSDSKTKLQ |
| | | | | | | QELQKMDDDCTPLNLIFKPA |
| | | | | | | KCASLIIEWGKVQKDQKIKL |
| | | | | | | KGQFIRSLAEQDTYKYLGVQ |
| | | | | | | TGIETRVSAMQLMKKTVSEL |
| | | | | | | DKINCSALAXWQKLDAVKTF |
| | | | | | | VLPKMTYMYANTVPKLSELK |
| | | | | | | EFANITMRAIKVMQNIPVKG |
| | | | | | | SPLEYVOLPIGKGGLGVACP |
| | | | | | | KTTALITYLVSTMKKLWSTD |
| | | | | | | DYIRKLHTDYLKMVAIKETK |
| | | | | | | TKEVTLEDLASYLSDDKTVC |
| | | | | | | KKAVGYNSFTRVREICKTLS |
| | | | | | | KNKGALLSQLKIIAKDGKLA |
| | | | | | | ILVQAXKDGKTKIFTHDHVK |
| | | | | | | TLQKXLKKEINEALLHRFTT |
| | | | | | | EKRVKSEVVRVVQEYPQCNS |
| | | | | | | FVRDGGKVSIGAHRFVHKAR |
| | | | | | | LNLLACNYNTWQDAATKQCR |
| | | | | | | RCGYEKETQWHILSSCPKSM |
| | | | | | | GGKITERHDSVLKTVKEMIQ |
| | | | | | | TGSLKNWKLKLDHELPGSTR |
| | | | | | | LRPDIYLRSPNGSEIILGDV |
| | | | | | | TIPYEHGIEAMQTAWQKKIE |
| | | | | | | KYEEGFKYLRSTGKKLTIVP |
| | | | | | | IVVGALGSWWKPTTDSLVSL |
| | | | | | | GIDKNTVKRAIPEICSTVLE |
| | | | | | | YSKNIYWNHIFGDSYQKVPM |
| | | | | | | FFGGEKPKGQSWKKVKPPEG |
| | | | | | | KTASNHEPPG |
| | | | | | | (SEQ ID NO: 1415) |
| NeSL | NeSL- | — | Caenor | CGCGAACCAGTCAT | TAGCCGATCGTAAAAGAAAC | MTVFIDRGIGERGQMAVCSL |
| | 1_CRem | | habditis | (SEQ ID NO: 1171) | CGAGCCGTAACAACAAGCAA | HRYFSFSPFSPIPPYVNNGS |
| | | | remanei | | AGTAAACAAAAGAAAAATCA | FGENGCGTDKSLLPVIEVVV |
| | | | | | ATAAAAAGGAAGGTTGACCT | REVKINWSENILVVECLIMV |
| | | | | | CAGACCCCGAGGAGGGAAGA | KSGERVVVKRQNLEKVIQNL |
| | | | | | GAGACACCSAGAAAAAGAGA | ARINSTLFSNLGNQIFCVVP |
| | | | | | GACGCAGAGAAAAGGAGAGA | RIKDSTNKEQGYRKEKQXKF |
| | | | | | CACCTCTCATAAGGAGAGGT | HVSFRSIKSQVPPYLRGGGD |
| | | | | | AGGTCAATCCAAATGTAAAC | VMEDTEIRGIRKLEPEAQLD |
| | | | | | AGAAAAAACCAGTGGGGAGG | SSKPLICRVLYPTQGYMYKC |
| | | | | | AAAGAAAGACTGATTTCACC | FYPKCKGHSNGSTDLRSLKK |
| | | | | | CACTAAAATGAATTTGGAAA | HMVDKHFTNIEFAYKCATCM |
| | | | | | CAGAATTTGGAAGAGAAAAG | FLTTGKSATALKSIKAHMAS |
| | | | | | AGAAAGGGAAACCTAAAGAA | HHKVTMEPGKKSLVQKLNAR |
| | | | | | AATAGTTCTCTTGCCAAAAT | LEEAAPSLPMPRNRSKVIQL |
| | | | | | TCTGTAGAGGAATACTTTGT | TPEKSISELEKKKQTRSVAK |
| | | | | | CAAAACATGATAGAAACCAG | QLSTLKESAQKKEEEVKIAE |
| | | | | | TAATCTGGTACGAAAGACAA | VKKREPRLSIIPESNVRRSL |
| | | | | | GTAAGACCTGAACTGACAAG | AAGLEQCINPEQSVAQRIRE |
| | | | | | AAGGAAGTCAGAAAGAAATA | KREEYAKASREAAAKRRSSL |
| | | | | | CCGCTCACAAAGCCTGTGAT | AMKPARLPDKENEITLQETK |
| | | | | | CGATTCTCTTACCTACTGAA | KIDDPIVIDLEKECILTTVL |
| | | | | | CTTGTTCTCTTGGCCTCGTA | QVPRNQFNSWCLEHETTIDA |
| | | | | | ACCGGCTAAAGGGAGAAGGA | WLTDEVIHMYMCTITENRKY |
| | | | | | ATGTTAATTGGAGATAGACA | FMAIDPVLWPVYVRNGAEDL |
| | | | | | TAAAGATAGGTGGAGTGAAG | LRRTSCPGTFFFPICESNHW |
| | | | | | GTCCTGTTCTTGAAACTAGG | VLLVIEHDVYWYLDPKGEEP |
| | | | | | AGGAATGTGGAAAGAGCAGA | KGNVEILLESMKRKRQYYEF |
| | | | | | AGGCCGCGAGGCTTTAGACG | PPPSQRDNVNCGVHVCLMAK |
| | | | | | GGTAACTCAGTCAGTTGCTA | SIVDECGYNWYSEEDVRSFR |
| | | | | | GTGGTCTTCGGATCCAACGG | TNMKDILKSKGYELCPEPYN |
| | | | | | CTTCGGACATAGTGAGGAAC | RQNLLKTEKQKEVILEEMID |
| | | | | | CCTGGGTACGGAGAAGAAAT | SFVVEDDMTFTVHRDSDHGD |
| | | | | | GGAAAAGAGATAGGGCGGGC | DEVEHLKTIEQEPENEISEI |
| | | | | | AAAGGCTAAGTTCATACACT | ENVEGSVDSVIPKLMEMRVQ |
| | | | | | GTCATGCAACCACTAAACCA | TPPVINEKRGKKRVSAKEKP |
| | | | | | GTGGGATCTGCGGGTGAATC | RKQKEKEQKVPTGKPDELVK |
| | | | | | ACTTTCGAAAAGAAGTGAAT | RVRVWFEKEFKSYVEDGKSF |
| | | | | | GGACGTGCTGATGTCTGACT | QRLEWXTDVLTAAIQKASAG |
| | | | | | TTAAAGAAGTCTGAAATTAA | DEKAVELIEKRCPPLEXEEG |
| | | | | | AAAAACAGATATAAAGGCCC | EMCTQTEKKKKPKSGKGNGG |
| | | | | | CTCACTATAAACTCCACAGC | QESMKSLMASYSENRAKTYN |
| | | | | | AACAGGTGGTCCGGCGAGGC | RIIGKHSKQCEIPIAKVQKF |
| | | | | | CGGTTCTTGCCACCATTGCA | FEGTTAETNVPKETLKEMCS |
| | | | | | CCCCAGGCTCGTC | RLPKVEVGTWIEGEFSESEV |
| | | | | | (SEQ ID NO: 1294) | TEALKKTKDTAPGVDGLRYH |
| | | | | | | HLKWFDPELKMLSQIYNECR |
| | | | | | | EHRKIPKHWKEAETILLYKG |
| | | | | | | GDESKXDNWRPISLMPTIYK |
| | | | | | | LYSSLWNRRIRAVKGVMSKC |
| | | | | | | QRGFQEREGCNESIGILRTA |
| | | | | | | IDVAKGKKRNIAVAWLDLTN |
| | | | | | | AFGSVPHELIKETLESYGFP |
| | | | | | | EIVVDVVEDMYRDASIRVTT |
| | | | | | | RTEKSDQIMIKSGVKQGDPI |
| | | | | | | SPTLFNMCLESVIRRHLDRS |
| | | | | | | VGHRCLKTKIKVLAFADDMA |
| | | | | | | VLAESSEQLQKELTAMDADC |
| | | | | | | SALNLLFKPAKCASLILEKG |
| | | | | | | IVNRLNEVVLRGKPIRNLME |
| | | | | | | NETYKYLGVQTGTETRVSIM |
| | | | | | | DHITEVSREIDLVNMSQLAM |
| | | | | | | HQKLDILKAFILPKMTYMYQ |
| | | | | | | NTTPKLSELKVFANLVMRSV |
| | | | | | | KEFHNIPLKGSPLEYVQLPV |
| | | | | | | GKGGLGVACPKNTALLTFLV |
| | | | | | | TIMKKLWSSDSYIRKLYTDY |
| | | | | | | LEEVAKVEIGKFEVNLNDLA |
| | | | | | | EFLSDERAVDSKLFGFNAFT |
| | | | | | | RVREVVRSLCKNKDSPLHSL |
| | | | | | | KIIEREGKLAISVQATEESI |
| | | | | | | EKIFTEDQEKKLMYLLKGEL |
| | | | | | | NTALQHRFFTQKVFKSEVMR |
| | | | | | | VVQQHPQSNSFVRNGGKMSF |
| | | | | | | SAQRFVHPGRLNQLPCNYNT |
| | | | | | | WAKGRTKLCRRCAKNENETQ |
| | | | | | | SHILQVCDYSIGNIIKERHD |
| | | | | | | AVLYKFRELIKRGSKGHWLE |
| | | | | | | RTDRTVPNTGSQLKPDLYLE |
| | | | | | | SPDGKHVILADVTVPYERGI |
| | | | | | | EGMQKAWNEKINKYTDGYKE |
| | | | | | | IFRRQGKSLVVLPLVVGSLG |
| | | | | | | TWWKPTEESLIKLGVEKTTV |
| | | | | | | RRIIPETCGMVAEYSKNCYW |
| | | | | | | RHIYGEKYVQTPMINGGKKP |
| | | | | | | EGNDWKKCEKGIEVPKVTN |
| | | | | | | (SEQ ID NO: 1416) |
| NeSL | NeSL- | — | Trichomonas | GGGTGAGTAGTCTAGTGGT | TAAGAAGAGATAAGACGAGT | MIPVLGTGGPEKLPLQSYVY |
| | 1_TV | | vaginalis | (SEQ ID NO: 1172) | GAGAAGAACAGAAGCATAGT | CGNTAITDSFTPTAKTILKP |
| | | | | | AGGATTGGCAGAGCTTAAGC | EEQNLDIVLKNIAALNPENY |
| | | | | | GATGTCACTCGGTACGAAAC | SDLIRSLSKMEFRLDYPKEI |
| | | | | | GTGTACCAAACACCGGATTC | ENYWISEKLFSQSIASLPIS |
| | | | | | CGTGCTAGGAATCACAAGCC | LLVASMFSPEDRDLSTEPFH |
| | | | | | AAAATAAAAGAGACACCACG | CNADGCNFHCDNCERMVEHI |
| | | | | | AAAATTACTCACCCTCCCTC | REHHNTDPMINTFETTEDTF |
| | | | | | AAACAGATAATAATATTAAC | RRITAIKIDKTGIEELNPLK |
| | | | | | CTCCCATCCATCAGTCCGTA | YRCSYCDELFTEAEDHAIHM |
| | | | | | TGGTCTGATAACAGACTAGC | ISHLTEKLSPDISFFFNDIL |
| | | | | | ACCACATCCATGATACACTC | RLYKTIDKPTVQNLFPETQV |
| | | | | | ATTGGAGTGAAAACCACCAA | AIFDTLEETNRFRLIVGREA |
| | | | | | CAACAAATCCACCTAGACCA | IETIEEAFPPSPPGTDRKPS |
| | | | | | AATCCTGCCCCACCTCCACC | IIITDTCQLRFVPCMDEPPK |
| | | | | | CAAGTAGCTCGCTTCGCTCG | GDLGILTLLLRDFSAHNIPI |
| | | | | | CTCACCTAAAACTTTGCTCG | KSLNNKELIADKDIDYSPDF |
| | | | | | CTCGCTTCGCTCGCTCGTCT | VEGALANAEEHDTTNSQNNN |
| | | | | | TAACCCTTTCCGAATAAACA | GRYINSAEKLTEFLIQCEDY |
| | | | | | CTTACAATTCCCGGCTCGCC | LTNIKTLEDLERFYTTIKDY |
| | | | | | CCATTTTTT | RVNKEVIAEDTPIFVYFLVE |
| | | | | | (SEQ ID NO: 1295) | EGKLPKPGLRCPLESYEGHE |
| | | | | | | DKAFESLRKLCDHFKGEIAK |
| | | | | | | TSFDPKVHTIDIWVEFLAQA |
| | | | | | | YGTGTFVYKDENGNIDLDTH |
| | | | | | | VFKCPYADCSYTNNDRSKLM |
| | | | | | | DHMKTKKHAKNVYIERYGFF |
| | | | | | | WGIVIEGVNRPKGIVYPTLK |
| | | | | | | DIKEHACRKCPEAGCNTYVT |
| | | | | | | ELSDIKEHLKKKHKSTTAGV |
| | | | | | | DGEIAHTDATYCWITKEELD |
| | | | | | | ALHAERARERAEQVDNTPVQ |
| | | | | | | QIINADNNEENNENQEDNGN |
| | | | | | | NEEADALDPPNNTTETEDEA |
| | | | | | | VHAVIINPPATEEEEVAIIA |
| | | | | | | EARRNIPELQQAEERGCVTP |
| | | | | | | KMTSLVRLKLLKGGGELFNK |
| | | | | | | KLTPLATRYAATGNTEADKI |
| | | | | | | KVDYLTLKCNAALREMIYTN |
| | | | | | | NHSESKFMTAENGEDTAPPP |
| | | | | | | RISEDTRDRIQKAANEIKGT |
| | | | | | | LIKVVKHISHARCLKDSTRD |
| | | | | | | DEHNKFVEMIAKIKNDLRDN |
| | | | | | | KFEQYNIEEIFQGPISDQSI |
| | | | | | | LNIVNTEDNNEFIKKMDYIN |
| | | | | | | RILGTPQDASPYARKKLQAC |
| | | | | | | FADNPTKTLRNIILADKVPQ |
| | | | | | | QSLKPSEYLDYYGPQWANEA |
| | | | | | | EGYENFLHHDYALPERYGQV |
| | | | | | | FANDFLDFMTNESKIIEVIR |
| | | | | | | NKNHLSAHGLDGIPNSVYML |
| | | | | | | FPVSAAKFLSILFRSIIISG |
| | | | | | | HIPDCWKLSKTVMLFKKDDP |
| | | | | | | SLAKNWRPIGITSCTYRIFM |
| | | | | | | TLVNKALQMIPMFHAMQKGF |
| | | | | | | VRGATLSEHIAVANEVLCQS |
| | | | | | | TRTQSEMFQTAIDFTNAFGT |
| | | | | | | VPHQLIFDSLEAKKVPDSII |
| | | | | | | NLLKDLYKGARTAIYTRHAH |
| | | | | | | SEIVPVRRGVIQGCPLSPIL |
| | | | | | | FNCCLDPLLYAVQRRHFEDG |
| | | | | | | YRFQDKAGQYSIAIQAYADD |
| | | | | | | VLVISPTHEGMQRILNTVDE |
| | | | | | | FQKIAKLKVAPQKCVTLAKT |
| | | | | | | STAIQPFRIGPDEIPIKTSM |
| | | | | | | DNITYLGIPISGTKTSRFAA |
| | | | | | | ATGILEKVKAQIRVVFASHL |
| | | | | | | ALSQKIIALRVFILPQLDFY |
| | | | | | | MFHNVFRVNDLKATDQMIRG |
| | | | | | | LIDKEAPTSNIPVSFFYMPK |
| | | | | | | NKGGFGLVKLELRQPQLVLT |
| | | | | | | KFARLWLSQQAETKAFFHTM |
| | | | | | | AQEEKSFRKVVEDQENGFLG |
| | | | | | | IKMENGKIVQKNERSKRTNC |
| | | | | | | FITQAAKAADKLEVRFKEWD |
| | | | | | | KGGIQVRGVGENATDWYRSK |
| | | | | | | HIGQISPLIGRVIQQRQYEE |
| | | | | | | FKKDETHSHTFCEPAALAES |
| | | | | | | HDIMKRPQAVPNNLYSAAIA |
| | | | | | | LRTNTAPTPANMHFHNPEVL |
| | | | | | | ANCPLCGCQSCTLFHTLNMC |
| | | | | | | RNRFSLYKWRHNIICDDIYQ |
| | | | | | | FIHDHYPGVTIKCSARITSD |
| | | | | | | GYQTTGPELDDTVKDLLPDL |
| | | | | | | VVYDEANKMIKIIEVTCPYG |
| | | | | | | TDNNVGNSLDAAYDKKVNKY |
| | | | | | | KSLAEQTERLFNWTTTLSII |
| | | | | | | VVSSLGVIPLRTKLDALRIS |
| | | | | | | PADHIQLLKRLSMHAIAASA |
| | | | | | | CIVFEKVPEFFGMRCRPLPG |
| | | | | | | RVTAPNAAIPPNNNENNNDT |
| | | | | | | DHGQENQQATSEEQPTNNGN |
| | | | | | | AQEDNGQGEQINNSTEQTIS |
| | | | | | | VDQIIEEDAENNAIEQALDQ |
| | | | | | | PDEDEFLN |
| | | | | | | (SEQ ID NO: 1417) |
| NeSL | NeSL- | — | Caenor | GACTCGCCTTGGGGAAGGTW | TAAACCGGCTCCTCTGGGAG | MRYHXSNXPAXRTSDNXWRS |
| | 2_CBre | | habditis | TTTCAGGGGKSAATTGCCGM | GAGGTATGTCAGAGGACATT | IXKDVRRPDPSTIEEKSRYN |
| | | | brenneri | AGGCAAGGCAGCCCCCSMMT | CTCCGTGGGCGGATGGGAGG | RSIGIPDSLKXRSSAVRSXS |
| | | | | AGCTTACAAAGTAAGTACMC | AGTAGGGTAACGACCCGTCA | SXPPSGPQDVRLXNSPSLDD |
| | | | | ATTTTCATTTCTTGTGAATT | TTCTGGATGCCTAAACCACC | RRRLVDCETTLGSYREWTDK |
| | | | | CTTTAAACATATTTTTCTTG | ACAATCTGTCAAGGCAAAGT | PMMGKMTYAAVTKRAPPRPQ |
| | | | | TTTTTTGATTTCTTTTTTCT | GCCCCAAAAGCACACGCGTG | TGGARLSTNLLADEMEIKYR |
| | | | | CTACCTTCCCCCAATTCTTC | GATCGGTTTGGATGCCGACT | DTNDIRLVIDLPNPHLIKCP |
| | | | | CCCTCATCTTGTGTATACAT | GAGCCAGAGGGCAAAGTCGA | LCKSCISARGRGANALKYMK |
| | | | | CCCCCTCCTCCAACCAATCA | AGGCCGGTAGGCTCCCGGCG | RHIADAHHLNADFVYKCSRC |
| | | | | ATACATTGACCTCTCTCTTC | GGTTGTCCGTCATAGTCAGT | QEHEPENVCGAKWIVNHLKR |
| | | | | TGTCAAAAAATCAATACTAG | GGTGCGCCTACACCCAACTG | VHGYTLEDAVSTAKPSTRQQ |
| | | | | TATATTGTCCCTTGTATAGT | CTATGACACACAAGGACAAC | IANAFNDSAPFIDARKTSDV |
| | | | | ATTATTTGACGTCGTCTTTG | CCAAAATAAATAAGCCAAGG | PEKKSREAGLEKFLAPTKSE |
| | | | | TATTAGGAGTAGGTAACAAW | CGGCGTTAGCTTCGAGCTAA | DTREKTPPSTRKSSESSEAS |
| | | | | CTGTGTATGGCTTCAAAAAG | CAAGCTCCCCGAGAGGATGG | IQSTIQETLSESSDTLTVQE |
| | | | | CATGCACAAACWCCTGTCAA | TTGCCACAGGGCACCATCCT | IINISSEDEMDEEPPKRRVN |
| | | | | AAAGTAWTTCCCATCMTGTG | GGGGAACGACCCGATCTTTC | VWALIHENGKDAWIDSDLMV |
| | | | | AATAGCTCAACGACWKGAAG | GGATGCCCAACCACCGCCAA | IFLESRARGYESCSIIDPLN |
| | | | | MCCAATGAT | TCTGTCAGGCAACGTGCCCC | FICTDMSYLTTIVRRRMEEG |
| | | | | (SEQ ID NO: 1173) | AAAAGCACACGTGCGGAGCG | YKKIIFPLCANDHWTLVTIT |
| | | | | | GTTGGATGCCGACTGAGCCA | GSTATFYDPMGNEPTETVKK |
| | | | | | GAGGGCAAAGTCGTAGGCCG | MIDELDLEMQLAPSNSPRQR |
| | | | | | GTAGGCTCCCGGCGGGTTCT | DSWNCGVFVMKMAEAYIKDT |
| | | | | | CCGTCGTAGTCAGTGGTGTG | QWDLTDVDTDVKTFRRSLLT |
| | | | | | CCTACACCTAACTGCTATGA | ELKAKFNIFAEDIQTYRPPS |
| | | | | | CAAGCGTATAGGAGGCCCGG | RKALTRNSQSPVVVCHKCSR |
| | | | | | AAAAACAAGCCAAGGCGGCG | PATPIQDVSRMEVEEAPVLV |
| | | | | | TTAGCTGAGAGCTAACAAGC | PTPEEPPQEWTFVGKNRKRG |
| | | | | | TTCTCGTGGATGGGTGCCAG | VTSRTPNTSPEAKRPAFPPV |
| | | | | | AGGGCACCATCCTGGTGGGT | PLKPSANRWHFPEEETEKME |
| | | | | | GGATGGGGGGAGCTTGGGAA | VSSADEVKNSTPPKPPKIPN |
| | | | | | CGTCCCGATCCTTCGGATGC | LLAMKIASPVPLKRGNPSKK |
| | | | | | CCAGACCACCGCAATCTGTC | HGKGHMMNTARKGPTKKEMP |
| | | | | | AAGGCACCGTGCTCCAAAAG | KGEPANLIVKIRSWFDEQLK |
| | | | | | CACACGCGCGGGTTGGTTTG | MYKDEGSNLQRLTWLSDSLT |
| | | | | | GATGCCGACTGAGCCAGAGG | AAIGKAFNGNKYIVDQIIKR |
| | | | | | GCAAAGTCGTAGGCCGGTAG | NPPPLVEKGAMSTQTSRKRD |
| | | | | | GCTCCCGGCGGGCTCTCCGT | EFKPRERMAQEPNEPLRIQY |
| | | | | | CATAGTCAGTGGTGTGCCTT | AKNRQKTFFKIIGKQSEQCT |
| | | | | | CACCCAACTGCTATGACATG | INIETVEQHFRKTLKAPVVS |
| | | | | | CGTACAGGAGGCCCGGAAAA | ENAIKTVCGSIKKVLMPKTI |
| | | | | | ATAAGCCAAGGCGGCGTTAG | EDPISSVEVKSILTKVKDTS |
| | | | | | CATAGGGCTAACAAGCTTCT | PGTDGVKYSNLRWFDPEGER |
| | | | | | CGTGGATGGGTGCCAGAGGG | LAKLFEECRKHREIPSHWKE |
| | | | | | CACCATCCTGGTGGGTGGAT | AETILLPKDCSDEEKKKPEN |
| | | | | | GGGGGGAGCTTGGGAACGTC | WRPIALMATIYKLYSAVWSR |
| | | | | | CCGATCGTTCGGATGCCCAA | RISGVQGVISPCQRGFQSLD |
| | | | | | CCACCGCAATCTGCCAGGCA | GCNESIGILRMCIDTASVLN |
| | | | | | ACGTGCTTCGGAWGGTCATT | RNLSCSWLDLTNAFGSVPHE |
| | | | | | GGTTCTAGACTTGTAATAGA | LIRRSLESFGYPQSVIQIVT |
| | | | | | CCATTGGCCGGAAGAGCACA | DMYKGATMKVKTADQKTQSI |
| | | | | | CGCGCGGTTGGTTGGATGCC | KIEAGVKQGDPISPTLFNIC |
| | | | | | GACCGAGCCTAGAGGGTGCA | LEGIIRMHQMREKGYDCVGH |
| | | | | | AACCTGAAGGGCGAGGTCGA | KVRCLAFADDLAILTNNKDE |
| | | | | | AGGCCGTGAGGCTCCCGGCG | MQEVIDKLDADCRSVSLIFK |
| | | | | | GGAAACTCCGTCATAGTTAG | PRKCASLTIVRGAVDKYAKI |
| | | | | | TGGTGTGCCTACACCCGACG | RINGDAIRTMADRDTYRYLG |
| | | | | | ACTATGACACATAGGAGGAA | VKTGVGGRASETEALIQVVK |
| | | | | | TCCTGATCTGATATGATCAT | ELQKVHETDLAPHQKLDILK |
| | | | | | GTATATAGGGAGGGCGAAGG | TFLLPRLQHLYRNATPKLSE |
| | | | | | TAAATAGTCAGKGTCAAAGT | LREFENVVMKSVKRYHNIPI |
| | | | | | CCACGTGGCAGCTACTCCCC | KGSPVEYVQIPVKKGGLGVL |
| | | | | | AGCATAGTAGTGATGCGAGT | SPRLTCLITFLTSTLCKLWS |
| | | | | | GGAWCCAACTTTGACACTGA | DDPFISSIHKDALSRITVKA |
| | | | | | TGTTCCCTGAGCCTGACCCA | MGLTTQSATIKETCEYLNTR |
| | | | | | TCTGCACAAATCCAACAGTG | KAVTKGGYSLFCRMNESLRT |
| | | | | | TATGATGGCCCACACACTGA | LSVIQGAPLKSMEFIPVNNE |
| | | | | | GGACGAGTATCACTTGTGAT | IGIAVQATKDSEIKVFTKAD |
| | | | | | ACTCAGAGGTGTCCCCCATG | SLKLMSKLKDLVRSAMLKRF |
| | | | | | ATCAACCAATATCACAGCTA | LEEKSVKSRVTQVLQHHPQS |
| | | | | | GCGGACCTACCGTGAGGTAG | NRFVRDGRNCSIAAQRFVHP |
| | | | | | ACCCCCGCCGCTGTAGCAGG | ARLNLLSCNANTYDVNHPKG |
| | | | | | CTCGCCTC | CRRCQADFESQQHILQNCHY |
| | | | | | (SEQ ID NO: 1296) | SLAGGITQRHDRVMNRILQE |
| | | | | | | IGNGRKAHYKIMVDMETGAT |
| | | | | | | RERPDIIMEERDGPEVLLAD |
| | | | | | | VTVPYENGVQAVERAWDKKI |
| | | | | | | EKYKHFLDYYRKIGKKATIL |
| | | | | | | PLVVGSLGTYWPDTSHSLKM |
| | | | | | | LGLSDGQIRNVIPEICQIAL |
| | | | | | | ESSKNIYWKHILGDSYKTVE |
| | | | | | | GLFCQRNNKEVRFEGKGEKH |
| | | | | | | HVSQRFQPLKCEKVRTMKST |
| | | | | | | KEEGRSRSNAKKGPNWRRSK |
| | | | | | | SESDGRSVSKGRYWRDPSNK |
| | | | | | | PPHSKMTQSALAKR |
| | | | | | | (SEQ ID NO: 1418) |
| NeSL | NeSL- | — | Caenor | CCAACTCTCATCGTATTAAC | TGAATACCGTCAGATAAGCC | MTNVYLKPVNDNQTNKTGDN |
| | 2_CRem | | habditis | CTACGGTATTCACTCCTAGT | CCCAACATAAAAATAAAAGT | SRNTMSNSQCEMTWKPVART |
| | | | remanei | GAGTGTAATAAAGGTTAATT | CGGCGTTAGCTAACCACTAA | YAQAASTNPADDKTVTVLGC |
| | | | | ACGTTTTCTCTTGCMAGAGA | ACCGGCTCCTCATTGGGGGA | KYNLLKLGNTPQTSKRSPPK |
| | | | | AAAAGAAAATTCGAATCCTT | GAGTATCATTCCGGTGCTCT | PSRGGARISSVYTLTDELEI |
| | | | | TTTGTGTAACTCACAAACTG | CCGTTTGGGCGGTAGGGAGG | THREEGKITFAIDLPNKNNI |
| | | | | ACAGAGACCTATCGAATTTC | AGTTGGGTAGCGACCCGGAA | LCPLCRECTQTRGRGSSFTK |
| | | | | CTTTGTTTCGTATATAGGAA | GTATGGATGCCCAACCACCG | HMKLHVKEKHQLDATFIYKC |
| | | | | TAGTCACTCTGGACCACGAA | CAATCTGATCTGGCATTGTG | SMCNEYEPEKKCGTKWIQTH |
| | | | | GTGGACAGTTGTCGGCGGAC | TTTCGGATGGTCTCTGTCTC | LQKVHNYKYDESAIVVPVPP |
| | | | | TTCCAGAGTGGAGAGAAAAG | TAGATCTGAAATAGAGCTCT | NTRQQIANELNNAAPFVDIR |
| | | | | GTGTGAAGAGAGGAGGTCTA | GGCCTGAAGAACACACGCGC | KPKAAAVEEKKTENGALLKF |
| | | | | GAAACACTTCGGCTGTCTAG | GGACCGGTTGGATGCCGACT | LTKSNKDDQVKSPSXDIPDA |
| | | | | GACCAGTTCCTGAGTGGAAA | CGATCTGGAGGGTGCAAACC | ESPEKETQALTIDPKGNNSP |
| | | | | GAGGAAGGTCTAGAAACACT | TGAAAGGGAAAGTTGAAGGC | SKSSIRSSQSSASSVCQEIQ |
| | | | | TCGGCTGTCTAGGACCAGTT | CGTGAGGCTCCTGGCGGGAA | EIITLSEDEDPKGARPKPGI |
| | | | | CGTGAGATCTCTCGTGGAGA | ACTCCGTCAT | NVWSUNETGKDAYIDTDIMM |
| | | | | GTTGAAAACAGTCAGCTGAG | AGTCAGTGGTGTGCCAACAC | AFLKMRVENCDSVNIIDPLN |
| | | | | GCTACTGTATTTCTTGATAG | CCGACGACTATGACATAGTT | YQFPARVDLVPUQRNLEDGK |
| | | | | CCCCGCCCCCAATCCCCCTC | GGAGGAATCCTGATCTGATA | KRWFPICADEHWTLLTISNG |
| | | | | CCCCCCCCCTCGACAGATTT | ATAATCATTGTTCATATAAG | IAAFYDPTGSRMSSYIEELV |
| | | | | TTCTGTTTGACCTCCTGGAA | GGAGGGGGATGGTAAATACC | NELGLIIPKEQDEQPRQRDS |
| | | | | TTTGCGAGGAGTGCGCGAGA | CAGGGTCCGAAACCATCAAA | YNCGVFVMKMAEAFIQDTEW |
| | | | | ATTTTCGAATTCTTCGCGCG | GCAGCTACTGACCAGCATAG | EMEEVEEDVKNFRRNLLEEL |
| | | | | TTTTCTCGAAATTTTCCAGA | TAGTGATGAACACATAGACC | KPNYEIFAEKIKYYNSPGKS |
| | | | | AGATTCGAGCGGAGAATCTT | CTGGGGTTCCCTGAACTCGA | FAQSRPTSRSSQCAVCPTCS |
| | | | | CGAGAAAGTGAGCTGAATTT | CCCATCTGCACAAACCCACT | RSATPMMDVGNMEVDPVPQQ |
| | | | | CGCGCGAATTTTCCGCGATT | TTGTACAAATGAACCAAACT | QETPKSREPEQDEGWKVVGK |
| | | | | TTCAAATTATCGATTTTTGT | GATGAAGAGTTTAATGATTT | ARKRGWTERSPNISPEAKRQ |
| | | | | CGGAAAATTTATTTTCTGGC | CTTACATCACAGCTAGCGGA | FTGPEIKWSPGKFHPLVGET |
| | | | | AAAATTTGATTGAGTTCACG | CCTACCGTGAGGTAGACTCC | EEMEVTCDSPPTKEPTTEPK |
| | | | | CGGGAGAGAAGGAATTGTTG | CGCCGCTGTAGCAGGCTCGC | VTPSLPAMKIASPEVTKKQT |
| | | | | GAAAAGGGTATTGATTTTTG | CATTG | SKKKGKYGKKKQXTKKAQPP |
| | | | | TGGCGGAGGAAACTCCCACT | (SEQ ID NO: 1297) | KGEPTKKAQPKGEPAKLIEQ |
| | | | | GAATCAATAACTCTCAAAGG | | VRTWFDKQMKSYQEQGSNIQ |
| | | | | AGAACTCATCGAACAACCTC | | TLTWIADSLTAAIFKANSGN |
| | | | | GGGTGACCTGAATCTTGGGC | | KYLVDKITARCPPPLLNEGE |
| | | | | GAAATTTTCGCATTGACACA | | MATQTSRRTEAVKPKDRFVK |
| | | | | AGATAAMACAAATTACTGTK | | ESNEPLRIQYAKNRAKTFNV |
| | | | | GAAAATAAATCAGAACAAAC | | IIGKHSARCEIDINVVENHF |
| | | | | TGTCAAAAAGAGAGACAAAA | | RQTLKAQPVTEEALNTVCSG |
| | | | | AGTATTGATTAACAACATC | | IKKAKVDPSIEGPISSGEVK |
| | | | | (SEQ ID NO: 1174) | | AILAKIKDTSPGTDGVKYSD |
| | | | | | | LKWFDPEGERLALLFDECRQ |
| | | | | | | HGKIPSHWKEAETVLLPKDC |
| | | | | | | TEEERKKPENWRPISLMATV |
| | | | | | | YKLYSSVWNRRISSVKGVIS |
| | | | | | | DCQRGFQAIDGCNESIGILR |
| | | | | | | MCIDTATVINRNLSCSWLDL |
| | | | | | | TNAFGSVPHELIRRSLAAFG |
| | | | | | | YPESVINIISDMYNGSSMRV |
| | | | | | | KTAEQKTQNIMIEAGVKQGD |
| | | | | | | PISPTLFNICLEGIIRRHQT |
| | | | | | | RKTGYNCVGNDVRCLAFADD |
| | | | | | | LAILTNNQDEMQDVLNQLDK |
| | | | | | | DCRSVALIFKPKKCASLTIK |
| | | | | | | KGSVDQYARIKIHGMPIRTM |
| | | | | | | SDGDTYKYLGVQTGNGGRAS |
| | | | | | | ESESLTQIAAELQMVHDTDL |
| | | | | | | APNQKLDVLKAFILPRLQHM |
| | | | | | | YRNATPKLTELKEFENTVMK |
| | | | | | | SVKMYHNIPIKGSPLEYVQI |
| | | | | | | PVKNGGLGVMSPRFTCLITF |
| | | | | | | LASTLFKLWSDDEYISSIHK |
| | | | | | | KALSRITAKVMGLKTQKATL |
| | | | | | | QEQCEYLNTKKAITKGGYSL |
| | | | | | | FSRMNEAIRTLSVNLGAPLK |
| | | | | | | SMQFIPENGEIALEVQASEN |
| | | | | | | SQIKVFSKADSMKLVTKLKD |
| | | | | | | LVKSAMLKNFLENKKVKSKV |
| | | | | | | VQVLQHHPQSNKFVNDGKNX |
| | | | | | | SISSQKFVHPARLSQLVCNG |
| | | | | | | NSYSKDLPKNCRWCGYECES |
| | | | | | | QAHILQHCTYSLSSGITQRF |
| | | | | | | IDRVLNRILXEVIKGRKNND |
| | | | | | | YYDIMVDTEPGPTRERPDII |
| | | | | | | MIQKDGPEVLLADVTVPYEN |
| | | | | | | GWAIEAAWDWKMEKYSHFID |
| | | | | | | YFARLGKRAVILPLWGSLGT |
| | | | | | | YWPDTSNSLRMLGLSDGQIR |
| | | | | | | NLIPDISMIALESSKQIYWR |
| | | | | | | HIFGDSYRIVSDLYCRKDQQ |
| | | | | | | EIRFGDEPMENVQVSDRFQP |
| | | | | | | FKTREREKKSEEEKKRRSKS |
| | | | | | | KKGKTWRGSKKQTDSRQSGK |
| | | | | | | SNQNQGFQRSVGQGVSR |
| | | | | | | (SEQ ID NO: 1419) |
| NeSL | NeSL- | chrUn | Caenor | CCCTTTTCTATCGTATTAAC | TAACATGCCTTGGAAGGCAC | MTKTEWSWRHRSRSRSVGIV |
| | 4_CRem | | habditis | TACGATAACCGCTCATTTGA | CACGCCAAAAGTCCTGGCAA | VKIDTSDYANVRVHVAADLS |
| | | | remanei | GTGTAAAAAAGGTTCCCCCC | CTGATTTGAATAATGTATAA | NEDGHTSHNNGIILPIPMKP |
| | | | | TCCTCGCCTGCCTTACCCAC | AAGTAACTGGAACCAAATGC | SVDRFCQIQYPPRGYYVPHP |
| | | | | GCATCTCTGCCTCTGGGAAG | CCGATAGGTAGGGCGGGAGA | QSQKGHDAKPSRHWNEEAQP |
| | | | | GCGGAGGGTCAACTTGCGGG | AAATGACCTAGAAAACACAA | PYYHNNNHGRRGRSAKPSGR |
| | | | | TCTGTGGATTTCCTTTCCTA | AGTCCCAAGCCCCCGGATTC | RPPRKPILQEESLAAHPQIP |
| | | | | TCCACCGCCCATATTCTCTG | GAAAGACCTATAGGAAGTCA | GDTASAVPLYSDVVNNENKS |
| | | | | TCGAAAGCCTACCTAGATCA | GTGAATAGAGAGAAATATCA | QGKPPQGSHRRSGRPGTKPS |
| | | | | GCCGGGAGTTTTTCCTATCC | AACAAATCTCACCCATTCAC | VPVGEAEQETNSRPIAPEPI |
| | | | | CATTCAGGCGATCGCTCAAG | AAGGACTTACTGGTCGAGTA | VKFKHDKHGWTTVQGSHSSG |
| | | | | GCTGTTTTATCGACACTCCT | GAAAACAAGCCAAAACATCA | RPVPKPSVPVVSEANRFQLL |
| | | | | TCTTGACAAGTATTTATTTC | AGCACGACGCAAAAAGGGGT | QEGDFPPLTTSESSQEEIKV |
| | | | | TTGACAAATTCTATTTTTCC | AACTTTGGGCAACTAATTAA | PNYQRIVSPIPLPSEEDSKL |
| | | | | TTTTATCGATTTTCTCTTAT | CGGATACCTCCGTGTATCAG | PTKSNYRAPKGRKSRNYKKP |
| | | | | TTATCGATTCTTGTGAAAAT | GCAAAGCCGCCACCAACAGC | QQQNPKKYQQRLPYQPKVNN |
| | | | | (SEQ ID NO: 1175) | AAATTACTGCCCGATAGGTA | APTDRMAPEQLKGGGGKTAH |
| | | | | | GGGCGTGAGAAAATGACCTA | NDIEEMEIEEDTDEKIIQVK |
| | | | | | CAACCTCCAAGACCCGAGCC | RIKIVNKLTPHHFVCMMTYP |
| | | | | | CACGGAATCGAAAGACCTAT | TDNIYRCFVKGCTATSQGGW |
| | | | | | AGGAAGTCAGTGAATTGATG | GAEDLKYLTVHIRQEHKIKV |
| | | | | | GAAATACAAAACCAAATTTC | EWTYECGICGDLSGGAGKHI |
| | | | | | TTCCATTCACAAGGACTTAC | SKWIKPHMRKKHNRDAPTNF |
| | | | | | TGGTCGAGTAGAGCACAAGC | KMGSRSSGKPKITELLEESA |
| | | | | | CAAAATATCAAGTATGACGC | PSCSNPRRKTLNQKKTAIIT |
| | | | | | AAAAATGGGTAACCTTGGGC | QVTPEKLKTGYQTRSVTKAL |
| | | | | | ATCCAATCAACGGATACCTC | SVLKESRQKELEVLREEEKA |
| | | | | | TGCGTATCAGGCAAAGTCGC | NAKQKSKLHPFFTKAPHIDG |
| | | | | | CACCAAACTGTACTACTCCG | VKPTVRRELSKMITPGGEHK |
| | | | | | AAAAAACCAAGAAACATGAT | GTKIPMVHTKRGLIQKINRK |
| | | | | | TTTCCCACTCCGTTAAAGCA | AKKAKPMHLDESTIIEASQL |
| | | | | | TCTCAACCAAGCTAAAGCGG | DVITIDDDDEDDNMTPMRRR |
| | | | | | TAAGGTTATCATGTCAAAAG | FNTWCLDHETTQEAWLTDDV |
| | | | | | GTGTAGCTACAGCAACCTAA | INWYLKDLCFGNEQYMLVDP |
| | | | | | AGCCCGAAAGGTAGGGCCGT | LVWLIYKMGGMAGVEQRFKS |
| | | | | | ATAAAAAGACCTACACCCTC | KKTCLFPICEADHWILLVFD |
| | | | | | CAAGACCTAAACCCACGAAC | ETNLCYANSLGSQPNGQVKN |
| | | | | | TCGAACGACCTACAGGAAGT | FIQQLNRKLCSFEKEVPLQK |
| | | | | | CCGTGAATGGAGAGAAATAT | DSVNCGVHVCLIAKSIVNGQ |
| | | | | | CTCACCAAATCTCTTCCATT | FWYDDSDVRTFRTNAKAALK |
| | | | | | CACAAAGGCTAACTGGTCAA | AQGYELFSEAPKQIENPDSS |
| | | | | | GTAGAGCACAAGCTAAGCCT | HREDIKENSMEMCSESLMIV |
| | | | | | CCAAGCACGAAGTGATATGG | ATPQRSEAPMELVDTEPSDL |
| | | | | | GTAATTTAGGCAACCAATCA | ESPKSDRVVYEDCITALSDV |
| | | | | | ACGGATACCTCCGTGTATCA | SEPRMTPEKSETPEVPVVEE |
| | | | | | GGCAAAGTCGCCACAAACAC | RDLDWPKLESPKSDRVVYED |
| | | | | | TGTACTACTCCGTTACTCCC | CITDLSDVSEQRMTPEKCET |
| | | | | | AAACACATGGATCTCCTTCT | PEAPLVVECVELERLPKDLP |
| | | | | | CTCACCAAAAAGCTTTATAA | VTDRSTVVAIPEAVKLEEKS |
| | | | | | CCAAGCTAACGGTGGAAAGG | EVVIPRLMELSYTVPPEPSP |
| | | | | | ACATCATGTCACGAGGAGTA | VVEYTQPYTHTHTKPKVKAT |
| | | | | | GCTACAGTAACCTCTCTCTT | CQMGKKRKVPTGKPDELIQI |
| | | | | | GAGACTGCAAAGTCGAGGAT | VRQWFEKEFNDYVTEGRNFQ |
| | | | | | GGATTGGGAAGGCCGCGAGG | RLEWLTNLLTAAIQKASAGD |
| | | | | | CAAAAGGCGGGTAACTCGGC | EETIEKIRKRCPPPEVRENE |
| | | | | | CAGACGCTAGTGATCTTCGG | MSTQTSQRQKPTTTNQKKRS |
| | | | | | ATCCGACAGCCCTGGCCTTA | RNTTQSDTQANTYWRNRAKT |
| | | | | | GAGGAACCCTGGGATAAGGA | YNQIIGQDFKQCDIPIAILE |
| | | | | | GCACGACGGGAAGGATGTTC | EFYKKTTSVTNVPQETLVKV |
| | | | | | CGCAAGGATTTCCCTTCCCA | TSRLPRLDIGKWIEDPFTEQ |
| | | | | | TTAGTCAGGGCTGGCAGTTG | EVFGALKKTKDTAPGTDGLR |
| | | | | | GTAATATAGCCTTTCTACAC | YYHLQWFDPDCKMLSSIYNE |
| | | | | | ACCACCGTCTTGCACCCACT | CQHHLKIPAQWKEAETILLF |
| | | | | | AAACCAGTGGGATATGCGGG | KSGDESKPDNWRPISLMPTI |
| | | | | | TGGACTCAATGTAGAAAGGT | YKLYSSLWNRRIRTVKGIMS |
| | | | | | GTTCCCACTGCCTGACTCGC | KCQRGFQEREGCNESIGILR |
| | | | | | CAACTTTATATGTCTTGTCA | SAIDVAKGKRSHLSVAWLDL |
| | | | | | ACATAATGGCCCCTCACTAT | TNAFGSVPHELIESTLSAYG |
| | | | | | AAACTCCCTAGCAACTGGTG | FPEMVVHIVKDMYKDASIRV |
| | | | | | GTCCGGCGAAGCCGGTTCTT | KNRTEKSEQIMIKSGVKQGD |
| | | | | | GCCACTATTGCGCCCCAGGC | PISPTLFNMCLETVIRRHLK |
| | | | | | TCGCC | ESSGHKCIDTRIKLLAFADD |
| | | | | | (SEQ ID NO: 1298) | MAVLAESKEQLQKELTEMDE |
| | | | | | | DCTPLNLIFKPAKCASLIIE |
| | | | | | | FGKVRTHEQIMLKREPIRNL |
| | | | | | | NDDGTYKYLGVHTGADARTS |
| | | | | | | EEELIISVTKEVDLVNRSAL |
| | | | | | | TPPQKLDCLKTFTLPKMTYM |
| | | | | | | YANAIPKLTELSAFANMVMR |
| | | | | | | GVKIIHYIPVRGSPLEYIQI |
| | | | | | | PTGKGGLGVPCPRITALITF |
| | | | | | | LVSTMKKLWSDDEYIRKLYN |
| | | | | | | SYLKKVVEAETGIVEVSTKD |
| | | | | | | LAEYLSNKVPSRKHEFGYNC |
| | | | | | | YSRIREVCNGLALNQAAPLY |
| | | | | | | KLEFIEQDNELAVVVQPTEE |
| | | | | | | SKERIFTKDHVKKLQSLLKA |
| | | | | | | SVNDALLHRFLTTKPVKSEV |
| | | | | | | VQVLQQHPQSNSFVRMGGKV |
| | | | | | | SISVHVWIHRSRLNQLTCNY |
| | | | | | | NIFDPKQPKNCRRCGYKNET |
| | | | | | | QWHILQDCTYGWAKLIRERH |
| | | | | | | DAVHHKVVTMICAGAKKNWG |
| | | | | | | RKIDQELPGFTSLRPDICLT |
| | | | | | | SPDGKEVIFADVCVPYSRTR |
| | | | | | | NIEFAWKEKIRKYTEGYSHL |
| | | | | | | VAQGIKVTVLPIAIGSLGTW |
| | | | | | | WTPTNESLYQLGISKSDIRS |
| | | | | | | AIPLLCSTVMEYSKNAYWNH |
| | | | | | | IYGNSYTSVPLRYGHQKPDG |
| | | | | | | DDWKKELSCEPVLALQQ |
| | | | | | | (SEQ ID NO: 1420) |
| NeSL | NeSL- | — | Schmidtea | TTAAATCATTTTTAAATGTG | TGAGTGTGCTACGAGGCAGC | MNVDLDATIKSIGMNTKETT |
| | 4_SM | | mediterranea | TTTGAATATCTTAAATTATC | GCTGGTAATTGCATCGGCGT | YPNSQLRVETTPCTSTTIMH |
| | | | | AAATCATATTAATATCAATG | TGCAGATTTGTGTACGATAG | ASCNTTSTISYSPLPSAVSL |
| | | | | CTAAAAAAAAATCGTGCKCA | ATAAAAACCAATAGTAATAA | PESPASSITITTTDDNCDII |
| | | | | TCAGGCGCACGAAAATAATG | ATGCTGAGCCTAGCTCGCAT | ETPYPLPQTNGDLSEILKDI |
| | | | | GACACAACTCGTCGACCTGC | ATCTAAGCCGAAAGGCAGCA | EANKDTTMSNKVLDCDSDSG |
| | | | | TGTCGACTCACAGAGAACCT | TATATATGAGACAATTTAAA | DDRDMIIENDRESDMDLFSQ |
| | | | | CAATTTGGAAGAATGGGAAG | AAAAAA | SLLNTNQSDERREKNLTENA |
| | | | | CCTATAATGCTACAATTCCG | (SEQ ID NO: 1299) | PTEITTEKSYFDIISKASDN |
| | | | | CCAACCCCTATTTGAATGAC | | TTSKKLLNVKNELTAGLPPM |
| | | | | AGATAGTCAAATATCAAAAA | | PPVTNTAKFIRNVRPEDIAD |
| | | | | ATATACAAACTGCTGTCAAG | | PTLYRLDSRGKLGCRTQYKK |
| | | | | CGTGACTCACTTCCTTCCAA | | PGCGDIAVYDYEAIVEHAAF |
| | | | | TCGAAAAATAGGAAKATGTA | | IHTIPFNEQNNVDCQPCHPK |
| | | | | AGAAACATGAAAGTCAAGCT | | KGKDVHTIVLIKYADIFNHI |
| | | | | GAAAAACCAATAATATGTCC | | EAHSHVVQTAITDNMKTYLR |
| | | | | TAAAATAAAACAATTTGAAA | | LTKENXFYCSYRNNKKKNKC |
| | | | | ATATGCAAAAAATACCTATA | | KKAFNLESNMMDITEHMKTH |
| | | | | AAATCACAGCCGAATAAATT | | TGYSFDXNLNILCYCGIWKP |
| | | | | CCCATCCGTTCTAAGCAGAA | | FTELIAHIKTEHLQEYINSI |
| | | | | ACCGCTACGAACTACTGCAA | | PNKENIHNTTTIVSPLNFAG |
| | | | | GAATCGGATCAAGTATATTA | | ILASGETQNIPDEEIIKPRD |
| | | | | ATTTCCCCCCMGGGGGAAAT | | LPENLAFNRNIENELSWSQH |
| | | | | TAATATACTTGTTAKAAAAT | | LVKAYIFSYAVKTSTIFINP |
| | | | | TAATTTTTTAATAAAAATAA | | YTCNALIQCNYKTFFETFPF |
| | | | | ATAAATCGAATAAATATAAA | | KDFAKWNEIVLPIHNNTSSW |
| | | | | ATAAAAATAAATCAAATTAA | | SFFFLNKKKRVAMIIDPTAD |
| | | | | ACTTTTATTAACAATAAAAT | | DSHTLHFELATDILRTILNV |
| | | | | CGCAGTAAGTAAATTTCCAC | | QNIFEDLNFPLTEVEYPVCH |
| | | | | TGTTATTAAATTTAAAACAA | | EANLSAFXVCHFLKCLMSDL |
| | | | | AATTCCTTTAAAAATGCCTC | | PIDIPDIDHMKETMRPIIRK |
| | | | | TCTTTTTCAGTAATAACACC | | YNCAKFPESDVRNYRVLIED |
| | | | | TTTTCTTGCTTTTATTACTA | | LIYQLNLDTITCEEILCEIE |
| | | | | TTTCTTGTGTACTGTACAAA | | RINGRLNPKRYFKESKPKTD |
| | | | | TCGAGCACAGTTATTGCAAA | | IIHLQKKKSAELLCVKRLKF |
| | | | | TAGGACATAGAAATTCCTTT | | QISQKTEIGKIWENDDVDHR |
| | | | | TTAAGTAAATTTAAATCCAT | | PPMARFLKTFASQDCPVSNT |
| | | | | GAGAAATAAAATAAAATCCT | | SSINLPYYMDTDTDXCTDCE |
| | | | | TTTGATTCAAAGTTTCTATG | | NLSHIMKNLDSSAPGMDLIT |
| | | | | TTGCTTTCTAATAGAATGGT | | GGDWKKISPKHELITAICNC |
| | | | | GTAAGCATTAATGGGTCTTG | | ILRNKVCPEKWKLFRTVLIL |
| | | | | ATTTTTATAAATTAAATATA | | KPGKMSESFRANSWRPLAIM |
| | | | | TTTAATCTATTAAATTAATA | | DTAYRIFTTLLNNRLLQWIR |
| | | | | TGTTTTTATTAATTATTAAT | | NGNLISPNQKAIGIPDGCAE |
| | | | | TTTTATAGTGGGGGGAAATT | | HNATLHFAIDRAKRCKTELH |
| | | | | AATATACTTGATCCCAAGAA | | IVWLDIADXFGSLPHDLIWY |
| | | | | TCAACTGATGATGAAGAATA | | TLANMGLKNETLTLIKELYK |
| | | | | TGTTATTTCAAAATACATAC | | DVKTIFDCQGTLSEPVPITK |
| | | | | AAGAAGCTGGAAAAAACAAA | | GVKQGCPLSMTLFCLSIDYI |
| | | | | TCAATCGCTACA | | LKSILTNYPFLLHDLNISIL |
| | | | | (SEQ ID NO: 1176) | | AYADDLVLLSDSYLEIKKSL |
| | | | | | | ESTVELAAFANLKFKPSKSG |
| | | | | | | YLSINNVNSDILKLHLYNEE |
| | | | | | | IPTISENNKYRYLGVDFSYK |
| | | | | | | RNQDVDGRLGSALALTRSLF |
| | | | | | | KSYLHPAQKLNAYKTFIHSK |
| | | | | | | LIFSLRNCVIGHRILDCDRN |
| | | | | | | RVTQGREKQLGFDQEIKALL |
| | | | | | | KTMIGDKFQAXNNYFPYTHC |
| | | | | | | KLGGLGITSAIDEYLIQSIT |
| | | | | | | GITRLFHSSNLSFRKMLITE |
| | | | | | | LAHSRGGKNFEAGLKWLNCE |
| | | | | | | VNKAFPNTSFFVKFQKSALA |
| | | | | | | LKRKFCICVNLKFVEDNFSL |
| | | | | | | EMTYKKRTSYVNHQNLSTLS |
| | | | | | | KELHDFVGLYYAEQXCQMRV |
| | | | | | | QGHIATAIGDSITAKYLIAS |
| | | | | | | DILNDAQYYFLVRARNNLLN |
| | | | | | | LNYNAYRLKYNIGTKCRLCH |
| | | | | | | LDEETQAHXFNHCRAKPNAR |
| | | | | | | RVKHENVLVSIVAFLEKIGF |
| | | | | | | EIDVEKSPKYISIPTKLKPD |
| | | | | | | MVIRSKRNKDIHVLDLKVPY |
| | | | | | | DSGEGFEKAREDNYVKYKDL |
| | | | | | | AIEIGKAFNQKATISAVVIG |
| | | | | | | CLGTWDKKNNAALSKIGLTK |
| | | | | | | TEIISLARIACPNAVIACYH |
| | | | | | | IYREHVSFTKSAMALPFSLA |
| | | | | | | (SEQ ID NO: 1421) |
| NeSL | R5 | AY216701 | Girardia | GTAGGTAACTATGACTGCAA | TGATCCGTGTGTTTGTGTCG | TTGRNLGQWSCYSRSIQQSN |
| | | | tigrina | AATAATAATTCTACACCTAT | TATGATTGTTTCCGTGTGTG | YSFKLSSTEVGELVEQSPAP |
| | | | | TGTTGATAACTCATCTCGTG | TCTATATTTTTCTTTTTTAT | LQSPQFSNNYNNLNINNNLY |
| | | | | CGCAAACGGAGCATGTTATT | ACTTTCAATTACCTCGTTGT | YSLNTFNQSNNLCCLVNIEF |
| | | | | TCTAATCATTTCGTCACACA | AATGTTATAACTTCATATGG | FPTQHLLGDIVNSGCINYMN |
| | | | | GGATTCTTCTAATTCTGATA | AATATATGTAATTTAGTTTA | NYNNFDNINLYINSNVLSYN |
| | | | | GTAATATTATAGATAGAGAT | GTTTAGTTAGTTTAGTTTAG | NYNHSFLASPYTTNITEHAD |
| | | | | AGGAACCTTGTTGATTTAGA | TTTAGTTTAGTTTAGTTAGT | INMHVQEVNMQQDNNTQHAI |
| | | | | TGCGTCAATAACTTCTCCTA | TTAGTTAGTTTAGTTAGT | TQQVSLQATSLQHTLDEMIV |
| | | | | CTATTATACAGCCAGAGGAT | (SEQ ID NO: 1300) | QFNTAVRLKKKHKVAKIFRG |
| | | | | AGTAAGATATCTGAGGATGA | | HNHRKDLPTLPAREQYKTKP |
| | | | | GGACTTCATCTTAGTCAATA | | KLAIREVLHRKTTATSSPSE |
| | | | | GGAAAAAGAGCAAAAATAAG | | NAIKAFFSSYSRPAELFTGQ |
| | | | | AAAAAATCTAAGAAAACAAC | | ELLESSWFPVHPEDDFEFRI |
| | | | | TGAAAATAAAAATGAAATTC | | PGRDQIAKYIKFASKSAAGL |
| | | | | CTATTCAAAAGAGTAAAGAT | | DWITYEDIKLGDPSGEILQP |
| | | | | AAGAAAAAGAAGTCTAAAAT | | IFEYIVQNNICPSEGKASRT |
| | | | | TAATACCGAAAAACTAACTG | | IMIPKPGKSDYSDPSSWRPI |
| | | | | AAAATATTACTACTTCTGAA | | TITSAVYRLLMKYLTWELYN |
| | | | | ATACCACTTGAAATTGCTCC | | WILLNQMLSRSQKSLGKFEG |
| | | | | TTCCATACCTTTACCTTCAG | | CHDHNAMLNMLIQDVRRQTN |
| | | | | CAAGTACCTCGGGTTCTCAA | | PSNPINKNKRLYIVFLDFTN |
| | | | | CAACCGGCCAATCCTCCAGA | | AFGSVPLDTLMYVPQRFGLG |
| | | | | AGACGCTACTCTAAGTGATA | | TSALTLIKNLYLDNYTNVTC |
| | | | | CGGATCTCTTCCTTACACAG | | GESKIENVKLNKGVKQGCPL |
| | | | | GATGATCCCGATAGTCTTAT | | SMLLFNIFINIIIRAIEAMP |
| | | | | TCTTTCTGGAAGTACTCAAC | | DVHGYPLGDMDIRILAYADD |
| | | | | CAACCTTTGTTGACCTCAAC | | IALISDSHKDLQEMVYKAEY |
| | | | | CCTTCACAGCAATCGGAACT | | IGRILGLLFNPSKCALMDIP |
| | | | | TCCTTCAAATACTGACAGCC | | HDKKRTPPILVNGEMIKCVG |
| | | | | AAAGATTTGAGGCGGGTGAA | | KADPYKYLGTFRSWFRKLDI |
| | | | | ACACCCAAAATCATAACTTC | | KELLQMMMDETKLITESNLH |
| | | | | TTACAGGGATGACCTTTTCT | | PHQKIHAYETFIHSQLPFHL |
| | | | | ACTCTACAGTCCTTCACTAC | | RHSRIPFSDFITNRKTNKTT |
| | | | | AACTCAGATACAGGTTACGG | | NNSNDSEKSIQKAYDPESGQ |
| | | | | TATAAGTGTTGACAATGGGG | | LFLNTFALPSGCAKDFFYIT |
| | | | | AGCAGAGGTTTCGAATTCTT | | KDAGGPQLTSGLDEYLIQSI |
| | | | | GCTAGGAATCTTGTCAGGAA | | MYIFRLLGSEDPTLNSAIKH |
| | | | | AACCAAGGATAAGTTCCCCT | | DLISHLNLKGFVNINFSQAI |
| | | | | CTTTATATGCTGGACAAGTA | | SIFNSNFTDRTDHFSHLSRT |
| | | | | ATTAGACACACAGTCTTCTT | | EWARLQLARKKLKSTLAIQT |
| | | | | CAATCACTTCAACCAGGCAT | | NVCLINGHLVLTLSLENNVL |
| | | | | ACTACGCCAATAATATAACT | | LIDSKEKGDVKKIHASLMGF |
| | | | | GATAGTAAAGGTAATCTAAT | | LRLAHLIRLQKHGWSKLLFS |
| | | | | TGAGTTTTCTGATGATAAGC | | ATTHHEILNKRILNGHVPYK |
| | | | | CTTTTCAAAGTATACCGACT | | IWYFIHRARLGLLPTKLFSV |
| | | | | GACCCAAAAACTGAACTAGA | | SNLCRKCGGKKETMSHALVN |
| | | | | GCAAATTAGGAGAGAGAGAC | | CPMMQTLINERHDALEISLV |
| | | | | AACATCTAGTTGATAGAGCT | | QILSSKFQGTVIRQKTYVNE |
| | | | | CTTAGACATAATCAGTTACG | | LRPDITMESDTQYYLVEVKC |
| | | | | GGAAACTTATATTTTAAATA | | PFDTKMSFELRTQQTTDKYN |
| | | | | AACTTAATAATAATAATGGG | | IIIEILEDVHPGKEVRLVTF |
| | | | | GGGGGTGGCGAACATTTGAA | | IVGTLGSWGPQNSDFLRDLG |
| | | | | AAGGAAAAAGATCAAAGTCA | | FSKDEIDQVKTRLMLQNINS |
| | | | | ATACGGATGATGTCTCCAGC | | SCEQWKRFVQYAPTITPGPI |
| | | | | AATGATGGAGACAGAAAACA | | PDAESEDDQGTSDNGPTAAT |
| | | | | TAG | | VQGPVIGDEEEELQIYDSGL |
| | | | | (SEQ ID NO: 1177) | | DESSDDEPDPDDAELLFTID |
| | | | | | | IEQYLNSVITD |
| | | | | | | (SEQ ID NO: 1422) |
| NeSL | Utopia- | — | Chrysemys | GTTTAATTCCTTCTGATGGA | TAACCGAGACCGCCGACCAG | MESPAXIFEKIDAALXIYSA |
| | 1B_CPB | | picta | CATCTGCAACACCCGTCCTG | GGAAATAACCCACTTCCTTC | AAXLXXNSLSLSPXXAXXSX |
| | | | bellii | AAG | CCTGACGAACCAAGGGACGC | XAAPASSTPQKTQXKPIPXT |
| | | | | (SEQ ID NO: 1178) | ACCCCACCCATGTACTTATT | TLGASRKXRTTXKDEXIXXW |
| | | | | | CGCTACACCGATACTGACTT | XKKAPVDTSXGRXSTRRTAL |
| | | | | | GGACTCCTTATACATTCCAT | RDLTSRSXNIXXALQEEDPR |
| | | | | | GGGTGGCGTACCCGAGCCCA | RTPPXSRDQDAERRPAAPEK |
| | | | | | CTTATCCACTGACACTTTAA | AATRGAPPTIQDQDADRCPA |
| | | | | | AAACTCTTGCACCCCAATCT | GRDATGGAPRRPRTRMLXAA |
| | | | | | GGGTCTATGCCGGTTATGCG | PLGRMPPEEPPPTTRDQDAD |
| | | | | | ATATGTATGTATCTCTTCAT | RRPAAPERDAPEGTTSSTPD |
| | | | | | CCTTGCAACCGATACCTGTA | PETTYHPPVRRRAAPRGTHS |
| | | | | | ATCCCTCATAACCCAAGCCT | XAXDLDAARCPSGQRDIVAS |
| | | | | | GACCCCAGATGTACAGTACC | ESSTPPGATSPPQASLPDXE |
| | | | | | TTCCCTCTTAACTCGTGTAT | ESPAESAGTTEVRPTEGEAG |
| | | | | | ATTTAATTTTAAACATTAAC | EDDCIYLQYPXPTGLLLCPF |
| | | | | | TTTAATAAAATTTTTAAA | CLPXHGVQTLGALSKHVRKA |
| | | | | | (SEQ ID NO: 1301) | HNKRIAFRCSRCDAPFETQK |
| | | | | | | KCKXHXATCKGPLTTAKVNP |
| | | | | | | TDTLRVPTPTPTDGPASAPQ |
| | | | | | | PASPEPQXVRGDQPPTEGSA |
| | | | | | | TPASRTDDATKRTSPASRIP |
| | | | | | | TLDPAVRGITATSQVSDLTR |
| | | | | | | CLSDLIKTIRHNTDTRRXSA |
| | | | | | | PPQVTSCRPAVGATSTAPQA |
| | | | | | | ARRDPANGGASRSPQIPRPD |
| | | | | | | PAPGRPNTSSKVTQRDSDRQ |
| | | | | | | KPHAPPRTPQPDTTRRRTRT |
| | | | | | | IPSASKHDRAPTKPNTGVSR |
| | | | | | | TPLPPGRSSAASETPRAAPP |
| | | | | | | PPHQDPRLKTHLNTAPQSEG |
| | | | | | | QQGHRLSPQHLNPRRQRSRR |
| | | | | | | NDGREQRVATPWQSAWMEEL |
| | | | | | | AKAEDFETFDTLMDRLTAEL |
| | | | | | | SAEITARRREPQEASRATRR |
| | | | | | | FPAPTRNNTAREGRRGDVGR |
| | | | | | | RYDPAAASRIQKLYRTNRTK |
| | | | | | | AMREILDGTSSYCAIQPERL |
| | | | | | | YSYFKDVFDHEAQTNLQRPE |
| | | | | | | CLLPLPRINLTEDLERDFSP |
| | | | | | | QEVQARLMRTKNTAPGKDGI |
| | | | | | | RYHLLKKRDPGCLVLAAIFT |
| | | | | | | KCKQFHRVPRSWKKSMTVLI |
| | | | | | | HKKGERDDPGNWRPISLCST |
| | | | | | | IYKLYASCLAARITDWSVCG |
| | | | | | | GAVSSVQKGFMSCEGCYEHN |
| | | | | | | FLLQTAIQEARRSKRQCAVA |
| | | | | | | WLDLTNAFGSIPHHHIFATL |
| | | | | | | GEFGMPETFIQILRDLYKDC |
| | | | | | | TTTIRATDGETDAIPIRRGV |
| | | | | | | KQGCPLSPIIFNLAMEPLIR |
| | | | | | | AISSGPTGFDLHGKKISILA |
| | | | | | | YADDLALVADSSESLQQMLD |
| | | | | | | VTSQAAEWMGLRFNPKKCAS |
| | | | | | | LHVDGGARALVRPSRFLIQG |
| | | | | | | EPMASLEEGEVYQHLGTPTG |
| | | | | | | VRVRQTPEDTIAEILRDAAQ |
| | | | | | | IDSSLLAPWQKINALNTFLI |
| | | | | | | PRISFVLRGSAVAKVPLNKA |
| | | | | | | DSTIRQLVKKWLYLPQRAST |
| | | | | | | DIIYISHRQGGANVPRMGDL |
| | | | | | | CDVAVMTHAFRLLTCPDPTV |
| | | | | | | RSIAQEAVRDVVRKRIARAP |
| | | | | | | SEQDIATYLSGSLEAEFGRE |
| | | | | | | GGDLSSLWSRARNASRRLGK |
| | | | | | | RIGCCWKWCEERRELGILVP |
| | | | | | | RIKTPDHTIVTPTARAMLER |
| | | | | | | TLKDAIRCHYAENLKRKPDQ |
| | | | | | | GKVFEVSSKWDASNHFLPGG |
| | | | | | | SFTRFADWRFVHRARLNCVP |
| | | | | | | LNGAIRHGNRDKRCRKCGYA |
| | | | | | | NETLPHVLCGCKQHSGAWRH |
| | | | | | | RHNAIQNRLVKAIPPSLGKI |
| | | | | | | TLDSAIPGTDSRLRPDIVVT |
| | | | | | | DAEKKKVLMVDVTVPFENRS |
| | | | | | | PAFHEARARKALKYTPLAET |
| | | | | | | LRAQGYEVQIHALIVGALGS |
| | | | | | | WDPHNEPVLRACGVGRRYAR |
| | | | | | | LMRQLMVSDTIRWSRDIYTE |
| | | | | | | HITGHRQYHTE |
| | | | | | | (SEQ ID NO: 1423) |
| NeSL | Utopia- | — | Acanthamoeba | CCCGTCAAGGGTGCTCCACG | TAACAACCATGTATGGTGAA | MAAKSVACPHDGCANKYASE |
| | 1_ACa | | castellanii | AGATCCCTGTCGCTAGCCGA | CCACACCTCTCTCGATCTTG | ASLRRHIKNKHATDEEGDET |
| | | | | CCGGTTTTACCACCCCACCC | TATTCTGTGATTGGACATCA | SHSCPHCHRPFSTARGLSVH |
| | | | | CGCCCGGACAACCACGGACC | GAGTTCCTGCGAAGGGATAC | IGKSHRQAPPEPTRPPPAPA |
| | | | | CTGCTCCGCAGCAGGACCCC | ACTCTGCCAATCTCGTGGGT | PADPGLDPDPGPTVTPPSRD |
| | | | | ACGCACG | TGTAATAAATCCACACCTTC | DEDREEPDDDPVEIADLSCP |
| | | | | (SEQ ID NO: 1179) | AACA | HCAQALPSAHGLANHLRACK |
| | | | | | (SEQ ID NO: 1302) | DHRVPAPGAPRSGPPSSRYW |
| | | | | | | TAVEHHRYVEAMARFADHPD |
| | | | | | | LLARAAAHIGTRTYKQVDSH |
| | | | | | | RTKVIAAEREGRPVRTLDPT |
| | | | | | | MDWRMRPYCASTTARWLAEQ |
| | | | | | | GRSPVAPRSPCPEPHAPPPA |
| | | | | | | AALLYIPATPPAPTPRAPVA |
| | | | | | | PPKLAPPAESTVPATPDGNP |
| | | | | | | EAPAPPFSAPGPPTPKALPP |
| | | | | | | PPPSRRNLRPHLVPKDAWQG |
| | | | | | | VADAVAPAASRLLRTPLAHL |
| | | | | | | STEQWATFEAALAGLEATLH |
| | | | | | | HAARSAEAVPTRCASRARED |
| | | | | | | AERQLREARKTREIFGKAAA |
| | | | | | | LYAAGKDPTATIERIPPEVR |
| | | | | | | LHLPTPGSAEWPARAAAARR |
| | | | | | | VIRRAVARADRLRKRMGILD |
| | | | | | | SDRDLQRLFNANQKKAVRQI |
| | | | | | | LAPSTKAPRCQLDPAAVEEA |
| | | | | | | YIQTLAKPPPIDPSPPWKNS |
| | | | | | | VQWPRPPTAADDGGSPFSVA |
| | | | | | | EVRAQLRRLPNGSAPGIDGI |
| | | | | | | PYEAYKRTKLDATLAHVFEV |
| | | | | | | VRLNARLPARWDVARTVLLY |
| | | | | | | KKGDPNDTGNWRPISLQVTI |
| | | | | | | YKIFTAALSKRLISWAGKHN |
| | | | | | | TFSASQKGFLPAEGCHEHAF |
| | | | | | | VLRSVLDDARRHKQNVYLAW |
| | | | | | | YDLRNAFGSVSHDLIAWCAA |
| | | | | | | MLGLPRYLRDAIGAIYRHSA |
| | | | | | | LFVQVGDQETTGVIPMRCGV |
| | | | | | | KQGCPLSPLLFNLCVEPALR |
| | | | | | | CLRRTTGYKFYGTSITVEGQ |
| | | | | | | AYADDLLTAAPSAYHAARQV |
| | | | | | | ATIEEWANWAGVSFVVQALS |
| | | | | | | LDAPAGKCAALAINFEGGLM |
| | | | | | | HSIDPALKVQGAAIPAMSRN |
| | | | | | | NVYRYLGVHVGLTDALGQAN |
| | | | | | | ELLEKASRDARTICASGLEP |
| | | | | | | WQKVVAIKTFILSRLPFFFH |
| | | | | | | NGKIQRGRCQQFDRELRENL |
| | | | | | | RAALRLPVCTTNAFFHSRVA |
| | | | | | | SGGLGILPIAEEQQVYLAAH |
| | | | | | | VFKLLTSPDLSIRAIARHQL |
| | | | | | | AEVTHARHTTPVQDGEASPF |
| | | | | | | FGWLMRGQEVASTTPSGDVS |
| | | | | | | SIWFAAAGAYSRMGWSVRDA |
| | | | | | | LHPTLTVGPGVQFEGRFORA |
| | | | | | | NVIPALRASAFSRHAVEWSA |
| | | | | | | LRTQGRAAAYQHAVHPATHH |
| | | | | | | WVHNSAGLTTKEYRFAIKCR |
| | | | | | | LGLLPTRAAPHHRNGPTACR |
| | | | | | | ACSYARETANHVLGHCPATK |
| | | | | | | AEVIARHNRICRALAQAAEA |
| | | | | | | SWTSVLEDVPIPGVDSPLRP |
| | | | | | | DIYCSRPGQCAIIEVAVSYE |
| | | | | | | DAFNASMEGRAKQKTDKYAG |
| | | | | | | LAATVEEQLRLQTRHAAFVV |
| | | | | | | GFSGVVLPASVTATATSLDL |
| | | | | | | PPKTWNVLLKRCVAASIKGS |
| | | | | | | YTAWRRFRRSTP |
| | | | | | | (SEQ ID NO: 1424) |
| NeSL | Utopia- | — | Acromyrmex | GGTGCACAACGGATGCATCA | TAAATTATTTTGTCTTTGTC | VCSVRGCRREDSRRFYKFKF |
| | 1_AEc | | echinatior | TACGTGTACCGGAGCATACG | TTGGCCCCCCCTTTTTAAAC | PLNFVKVPKTIVIGSAFQKS |
| | | | | GGCTGTCACGGCGGCTGCAT | CAAGCAGGAGAGAGTGGCCC | SVSARSQNHSRSTRVPKTRQ |
| | | | | GCGCGATCTAGCTCGGAGAT | AATGCCCAACTATTATATAT | PRTSNTIGRYTAASANNYLT |
| | | | | TTTATTTATTTATTTATTAA | TAACTATTTACTGTGATATT | VIITGNYTVFAQWICYRECT |
| | | | | TTTATTTATTTATTCATCGA | TATTATTTGACTGTTGGGCG | WLLSKFVNFFLTIIGYFFQL |
| | | | | GTGTGAGTGTTCGCGTTTTG | GGCCCCTCTCTGCTGGTTTT | RLVVIYEGPVILDTFSNCGS |
| | | | | CCGAGAAGCGATTTTCGTTA | ATTTATATATATTTTTTACT | SLFMRGQXSKALLVRLNRSA |
| | | | | AGTGATACGCGCCGCGTTCA | CGCGTACTTTTTGTACTACT | LAMADPQVHYIDYPLPPRVK |
| | | | | TAGGTTAG | CTATTTTTCTTTTTATTTTA | CVKCFGAEGAGKVKGEYSDP |
| | | | | (SEQ ID NO: 1180) | GCTATGCTATTTTTATCTCT | PHLAKHLKKCHPGDTLNYKC |
| | | | | | TTCTTTGTCTCTATTTTCTT | SICDLRGTGKYPLRDVKAHY |
| | | | | | TCTTTTTTTCTTTCCTTTTC | AECHVSPAVDAAGPSTRGSL |
| | | | | | TTTTCTTTCTTTTATTCTTC | GECSGAGQPTASRAAKATTR |
| | | | | | TTTTATTTATCTTTTTTTCT | LAETVGGTDKRRAATSGSRQ |
| | | | | | TTTCTGTTGTGGGGCCCTGA | LTLPFAATPSPSTAAGEARA |
| | | | | | CCGTCCGAGTGTGAATGCCG | PRSXSTTPTSRSPSYAAVTA |
| | | | | | CGAAAAACAATATTATGTTT | GPPSMRSTTTSTTARSKTVA |
| | | | | | TATACGAGTGTGCATGTGCG | KGAAPNTTTTTTARRSGEAA |
| | | | | | TGATATATTTATCTATTTTA | ATRKPPTTATVSKPRVLSVE |
| | | | | | TTTTATTTATTTATTATAAT | TVRLPVDDIQRAGVQNAAKP |
| | | | | | TTATTGCCGCGCGCGCTCCT | ARAPSRPPQRTSPEAGGPRT |
| | | | | | CCGGGACTTTTATTCGTTGA | TGAKEKCGEGAYKKLPANSG |
| | | | | | CAATACTGTGATATTTTTCT | NPISTRTRRATSVPVEKSEG |
| | | | | | GCKCAGGCTGGGGGGGCTTG | TARRERVSPHPPPKGIDIIL |
| | | | | | CCCCCCAGCCCCTTAGTTTT | SSTSEEEGTPYQPGGVGRLR |
| | | | | | AATTGCCTATGCGGGGGGGG | LRRKKVTGPPPKMTPREGVV |
| | | | | | CTTTTGTCCCCCGCAAATGT | TRARRSTSAPVEKSALDARL |
| | | | | | ATATATATATATATTTAGCG | TALDRTSSRATGNPTSQIAG |
| | | | | | CGCGGCTTAGCCGCTTTTGT | GLYTSRGQPERTPPARLPSL |
| | | | | | TTGTATTACCCCAGAGGGGA | SPTTRGSPSGSLGEIRTPIS |
| | | | | | ATTGTCCCTCTGGGGAAAAA | PATSLPATLTTCTVTTTTCG |
| | | | | | AAATGATTGGAAAAATAAAG | SPITSTGFTGGVGRLITPPS |
| | | | | | TGAGCTAA | LPQTNILPTIGEEGTSPCVA |
| | | | | | (SEQ ID NO: 1303) | VVTTHPRPTGEDAPCEAPQP |
| | | | | | | VSDHQRQSIGEPRRDTDTHL |
| | | | | | | ACDVATGNAHHLHGDDDHLW |
| | | | | | | KPHNIHGLHRWRGEADNTXE |
| | | | | | | PPPNEHPPDHRGGRNVTVRG |
| | | | | | | GRHHPSLGGRSTSPLILPRP |
| | | | | | | TTPEPERGQEERRLEGAAQP |
| | | | | | | PTTPVVEGDNQWDGQWTVSV |
| | | | | | | RRRARRQQLNDTSPSNSESP |
| | | | | | | PTAGPSRSPRIAPLSALIAA |
| | | | | | | STSRHETSLNLNCTNGNICM |
| | | | | | | DRTPPRNILPVXAERRRETS |
| | | | | | | PQDRVEGDIGYGAGKVSAEH |
| | | | | | | PSAPVNVRGVMSRGRATASS |
| | | | | | | IVPPRANRGEGGRQHHSRRR |
| | | | | | | PDAPVGQPSRDHPAPATVAR |
| | | | | | | QRRRERVAARDALLDRAKDV |
| | | | | | | ATIADLEAFAASVAAFFGED |
| | | | | | | ASATGAAARARDRSVRSREA |
| | | | | | | GARRGVKGGERPEREGAGRP |
| | | | | | | GSAPADPGASGEARGDWVRE |
| | | | | | | AKRLQALYRANRRKAVREVL |
| | | | | | | QGPADQCQVPKRQVQEYFER |
| | | | | | | LYSGGEDLAGAGVEAERPDP |
| | | | | | | SSPREVSAVLGPLAEREVDR |
| | | | | | | RLRRMNNSAPGPDGVSYRDL |
| | | | | | | RGADRGARLLTALYNICLRL |
| | | | | | | EAVPASWKTSNTVLIHKKGD |
| | | | | | | RGMLENWRPLALGDTVPKLF |
| | | | | | | AALLADRLTDWAVTRGKLCS |
| | | | | | | AQKGFLRDEGCYEHNFVLQE |
| | | | | | | VLTHAKRSKRQAVVAWLDLS |
| | | | | | | NAFGSIPHATIRRALIRSAV |
| | | | | | | PRGLIAIWDSMYDGCTTRVR |
| | | | | | | TAEGHTAPIPIRSGVRQGCP |
| | | | | | | LSPIIFNLAIDSVVRVAAEX |
| | | | | | | NDGYSLHGNTWSALAYADDI |
| | | | | | | ALLAQTPEGMERMLASVEAE |
| | | | | | | AASVGLRFNPAKCATLHVGA |
| | | | | | | GNGGRVLPTSFQIQGETINP |
| | | | | | | LAQGESYTHLGVPTGFSVDQ |
| | | | | | | TPYAAVGDIVSDLRAVDRSL |
| | | | | | | LAPWQKIEMLGTFILSRLDF |
| | | | | | | LLRGARVFKGPLTAVDLNIR |
| | | | | | | RHVKSWLNLPQRASAEGVYM |
| | | | | | | PPRWGGCGLLPLSDLADVLT |
| | | | | | | VAHAYRMLTVRDGAVRELAW |
| | | | | | | ESLRGVVGRRIGHAPSCEDI |
| | | | | | | ASFLSGSLDGRMRGGGEASL |
| | | | | | | WSSARNAALRQSERLSLRWR |
| | | | | | | WVEATEEMTLECRGPRGAAI |
| | | | | | | KIPPEARGQVVNRLRSAVAE |
| | | | | | | HYASRLLSKPDQGKVFEVSS |
| | | | | | | RSRVSNHFIRGGSFTRFADW |
| | | | | | | RFIHKARLDVLPLNGARRWE |
| | | | | | | ANDKRCRRCGEVSETLPHVL |
| | | | | | | CHCGIHSAAIQLRHDAVLHR |
| | | | | | | LWKATRLPGVVRVNQRVEGV |
| | | | | | | SDELGALRPDLVVRHEPSKS |
| | | | | | | VVICDVTVPFENRWTAFEDA |
| | | | | | | RARKIAKYSPLAEELQRRGY |
| | | | | | | RVVVTAFVVGALGSWDPRNE |
| | | | | | | AVLRLLRVGNQYAAMMRRLI |
| | | | | | | VSDTIRWSRDIYVEHVSGTR |
| | | | | | | QYLAPSRPSGDLATPPRAVR |
| | | | | | | RRWLAEERSAQDAARRGSDS |
| | | | | | | VSVA |
| | | | | | | (SEQ ID NO: 1425) |
| NeSL | Utopia- | — | Alligator | TGCTGGAAAGACGGAGAACC | TGAACCCCCCCTCTGCACCA | CHHAGLRPGTPNRTRRPDQT |
| | 1_AMi | | mississippiensis | GCTTCCTTTTTCCCTGCGCC | GATGGACCTTCACTTCGAGA | APLPDPRGHPMPPNRRGSRS |
| | | | | TGGCCTGGTATTGCAGTACC | GGATTCTTCAGCAATGGACG | RPEEPSRREPPXPRACQGLR |
| | | | | TCCAGGATTAGCGCCAACTA | ACCCCGCTCCACCCGAAGAG | VWSPPQQRMPTPWQTLWLEE |
| | | | | GTCCGGCAGACTGTCGGAAT | GACCCCCGCGATGAGACTCT | LSRATTFKAFEASVARLTEE |
| | | | | ACAGCAATAGAAAGWGAGCT | ATATGGACTGAGACACTTTT | LSAAARPGQPRGGNNRPATR |
| | | | | GACTAGCAGCTTGCTTTCCT | TCTTCGAACCACTTCCTCCA | RDHRLQPQRRPRRQRYDPAA |
| | | | | TCCTCCGGTGCAGCATGGGT | CCATTGCGGACCATTGTAAC | ASRIQKLYRANRPKAVREIL |
| | | | | TCTCGTCAGTCMTGACGGGC | GGGTTTGTGTGTATCTATCT | EGPSAFCQVPRETLFNYFSR |
| | | | | TAGGGAAGGCGGTGCTGCCA | TCTTTCTCTCTCAGCGTCGC | VFNPPAEAAAPRPATVEALT |
| | | | | GTACGTCCGAAAGAGTGCCG | GAACCCCCTCCCTCCCCTTC | PVPPAEGFEDAFTPQEVEAR |
| | | | | GTTGCGCAAGCGACCGCGCC | CCCTCCCCCTCCCCCCCACC | LKRTRDTAPGRDGIRYSLLK |
| | | | | ACTCAGGTGAGTAGCCAAGG | CCCGGGCTTAGTTGGCTAAC | KRDPGCLVLSVLFNRCREFR |
| | | | | GTCTTACAGTTCACCGGACC | ATTGTATCTCCTGTAACCTA | RTPTTWKRAMTVLIHKKGDP |
| | | | | CGAWAACGCGAAAACCCCAA | GTTGCGTTCCCCTCCTCACC | TDPGNWRPIALCSTVAKLYA |
| | | | | CTCGGGCTAGTAGCCGAAGA | CCCATCCCTCTATTGTTAGT | SCLAARITDWAVTGGAVSRS |
| | | | | CCTGGGTCCCCCCCMGGTCA | CCCTCGCTCGGGCGCTCTGT | QKGFMSTEGCYEHNFTLQMA |
| | | | | GAGTAGGCGAACGCCWGKGC | ATTTCCCTACCGGCTTTGTC | LDNARRTRKQCAVAWLDISN |
| | | | | TCAGAGGACGGAACGCGGAA | ATCTTTTTTGGATTCACAAT | AFGSVPHRHIFGTLRELGLP |
| | | | | AACACCCCCAGGTCCCAAGG | CCTAAACATCTACTAATAAA | DGVIDLVRELYHGCTTTVRA |
| | | | | ACGCCCTGATCCACTGACAA | AGTCAATC | TDGETAEIPIRSGVRQGCPL |
| | | | | GAACGCTCGAGGCACGCCAG | (SEQ ID NO: 1304) | SPIIFNLAMEPLLRAVAGGP |
| | | | | GAGACCCCCAGCTAGGGTGG | | GGLDLYGQKLSVLAYADDLV |
| | | | | ACCGCCGACTGCAGGTCCGG | | LLAPDATQLQQMLDVTSEAA |
| | | | | AGGACCCTCCCAGGAGGGTG | | RWMGLRFNVAKCASLHIDGR |
| | | | | GACCAGCGAACCCAAGTTGG | | QKSRVLDSTLTIQGQAMRHL |
| | | | | CGACGAACCCTGACGCACCC | | RDGEAYCHLGTPTGHRAKQT |
| | | | | CCCACGATGTCAGGACCCCG | | PEETINGIVQDAHKLDSSLL |
| | | | | ACAGGCGGCGGTGGACCACT | | APWQKIDAVNTFLIPRVAFV |
| | | | | GACCATCGACCGACCCCCAG | | LRGSAVPKTPLKKADAEIRR |
| | | | | AGGCAGAGAGACTCTCAGAG | | LLKKWLHLPLRASNEVLHIP |
| | | | | CCCGGAACCCCGGCTGACGA | | YRQGGANVPRMGDLCDIAVV |
| | | | | GAGCCGCCTCCCGGCGGAGG | | THAFRLLTCPDXTVSIIAAS |
| | | | | ACCCCGGAGCCTGAGGATGC | | ALEETARKRIGRQPTRRDLA |
| | | | | CCCCCGGATGACGGCGGAGC | | TFLSGSLEGEFSRDGGDFAS |
| | | | | GCCCCGAGCGACAGCGGACC | | LWSRARNATRRLGKRIGCAW |
| | | | | CCTCCGGACCCCCACGGCCC | | TWTEERRELGVSLQPAPHAD |
| | | | | CTCGGTGACGATGGCGGGCC | | RVTVTPRTRTFLERFLKDAV |
| | | | | CCGAACGACGACGACCCCCG | | RNKYAGDLRAKPDQGKVFDV |
| | | | | GACCCCGGCGGTCCCGAGGA | | TSKWDSSNHFMPSGSFTRFA |
| | | | | CGCCCCCCCCGAGGGTCTCC | | DWRFLHRARLNCLPLNGAVR |
| | | | | CCACGCTGGTGGAGGAGCCC | | FGHRDKRCRRCGYVAETLPH |
| | | | | CGGACCCCCCCGACACCGGA | | VLCSCKPHARAWQLCHNAVQ |
| | | | | CCCCCCCACGGACGACCCAG | | DRLVRAIPAAAGEISVNRTV |
| | | | | GCGAAGGCGTAGACATGACA | | PGCESQMRPDIVITNEEAKK |
| | | | | GCACTCACGTTCCTCCCCTT | | VVIVDVTIPFENRRQAFTDA |
| | | | | CCCCCTCCCGGCGAAGCTGT | | RARKREKYAPLADILRGRGY |
| | | | | TCTGCCCGACCTGCCACCCG | | DVTVDALIVGTLGAWDPSNE |
| | | | | CCAAGACAGTACAGGTCGCA | | SVLHACRVSRRYAKLMRCLM |
| | | | | CGGCGACATGAACAAGCACC | | VSDTIRWSRDIYVEHITGHR |
| | | | | TACGGCGCTTCCACCAGCTG | | QYTDPTRRTAAGPDPEGTA |
| | | | | CGCCTAGCCTTCTACTGCGC | | (SEQ ID NO: 1426) |
| | | | | CCTCTGCGGCACCGAGTACG | | |
| | | | | AGGCCCTGAAGCTCCTGAAG | | |
| | | | | AACCACCAGAAGGGATGCGA | | |
| | | | | GGGCCACGGAGCCGAGAGGA | | |
| | | | | GACCCGGCACGCTGGTGAGG | | |
| | | | | TCCGCTGCCCCGGCCCGCCG | | |
| | | | | GACCCAGGCCGCGGTGCGAA | | |
| | | | | GGCCCGCCAGACTGGCCACC | | |
| | | | | CCGCCGACAACCCCACCGGA | | |
| | | | | CCAGACCTCCAGGGACCACC | | |
| | | | | CGACGGAGAGACCTGCCCCA | | |
| | | | | GTGA | | |
| | | | | (SEQ ID NO: 1181) | | |
| NeSL | Utopia- | — | Chelonia | CTCTTCTTATGAATACTTGC | TGAGCCGGTACGACATCGTG | MTTKKVLGASTTLQTSSTKG |
| | 1_CMy | | mydas | AACACCTGCACTGAAGATGG | CATCAACTATGAGAAAGGGA | KNSGCSKDPLRDAVPGRSWI |
| | | | | ATTCTCCGGCTGCTATTTTT | CTGAGAGACTTTTTCCATTG | LRPACRDITTRRNIPPAPQQ |
| | | | | GAAAAACTGATGCTGCTTTG | GACCATATGAACTGGAACCA | QQPPMESPPTLQLQDALRRP |
| | | | | AAGGTGTATTCTGCTGCTGC | TAAACTCACTGAACATTAAA | SPTPAAAQVADAGGALAALH |
| | | | | TACCTTGGAAGGAAATTCTC | TCTCACCAAATGAGGGTAAA | TIKRGISVDWTSISPKXXQR |
| | | | | TCTCTGCTCCTGAGACATCC | TCCATCCTCATCATCGTATC | XTSASPDACPASETTQRDXR |
| | | | | CCAGCTGCACCGTGTACCAC | CACTCATTATACTCCACACC | XLLDARPAGPLDPTRPHQDE |
| | | | | CACCACCACTGCTGCTGCTC | TGAACATAGCCATTATATGA | PASDTADAAGTPLLQGNEDT |
| | | | | CACAGAAGGTTTCTCGGACA | ACAACATACCCCCATATCTC | IYLQYPLAADMLICPICSPP |
| | | | | (SEQ ID NO: 1182) | AATGTCTGTACTTTGACCCG | QSFHLLGVVTRHLKRCHSKR |
| | | | | | TTAACCTTTTACCCCCAATC | VAFSCALCSLPFETQKQCKM |
| | | | | | GGGGATATTGCAGATTATGT | HQVACRKCLKGTTQSPAPAP |
| | | | | | ATTCCTTACGCCACCCGATC | SPPAARRPAAPEPQRRKXTS |
| | | | | | CTAAACCGAATTTCGCACCC | QAAVKKPAPVARPAERDAAI |
| | | | | | CTTGATAATCTGTACCTTAT | EKVPAASGNITQVLASRRPV |
| | | | | | TCCCTGATAACCAGAAACTT | SPSHVAKXISMLRRLSAASP |
| | | | | | CTATGCTTAAACTCTGTACC | PVQHVPVPRRISAPPRIAAR |
| | | | | | GTTTTTTTTTATTTCAACAT | DPVAGRASAAPQTALRTPAA |
| | | | | | CATCTTAATAAAATTATTAA | GGASTTPQTALRTPTAGGAS |
| | | | | | A | AMPQTTLPXPRRPDWRNQPR |
| | | | | | (SEQ ID NO: 1305) | SHSKAPGLHRQTDQHGPQVH |
| | | | | | | SAGHCLREISRSSSNRLGSS |
| | | | | | | HSAAATHRRTGGVPATPEPD |
| | | | | | | RVSPTTSNAXIPPEIPPQHP |
| | | | | | | TEGNPDPRDRRQADHTAGSE |
| | | | | | | PAPDEVEDXEGQRPMVRAAT |
| | | | | | | PWQTAWTEELQAAASFDDFD |
| | | | | | | LLVDRLTRELSAEIAPRRSS |
| | | | | | | NQENAPPAHRTPAPNHNTTT |
| | | | | | | RGARSRDASRRYDPAAASRI |
| | | | | | | QKLYRANRSKAMREILDGPS |
| | | | | | | PYCTIPSERLYSYFKDVFDR |
| | | | | | | IARNDAQRPECLRPLPRVDE |
| | | | | | | AGVLETDXTPKEVMARLSKT |
| | | | | | | KNTAPGKDGIPYSLLKKRDP |
| | | | | | | GCLVLATLFNQCKRFCRTPS |
| | | | | | | SWKKAMTVLVYKKGERDDPS |
| | | | | | | NWRPISLCSTMYKLYASCLA |
| | | | | | | SRITEWSVSGGAISSIQKGF |
| | | | | | | MSCEGCYEHNFVLQTTIETA |
| | | | | | | RRARRQCAVAWLDLANAFGS |
| | | | | | | MPHHHIFATLQEFGMPENFL |
| | | | | | | RVIREVYEGCSTTIRSVEGE |
| | | | | | | TAEIPIRSGVKQGCPLSPII |
| | | | | | | FNLAMEPLLRAISNGTDGFN |
| | | | | | | LHGERVSVLAYADDLVLTAD |
| | | | | | | DPESLQGMLDATSRAADWMG |
| | | | | | | LRFNAKKCATLHIDGSKRDS |
| | | | | | | VQTTGFQIQGEPVIPLAEGQ |
| | | | | | | AYQHLGTPTGFRVRQTPEDT |
| | | | | | | IQEILQDAAKIDASLLAPWQ |
| | | | | | | KINALNTFLIPRISFVLRGS |
| | | | | | | AVAKVPLNKADKIVRQLVKK |
| | | | | | | WLFLPQRASNELVYIAHRHG |
| | | | | | | GANVPRMGDLCDIAVITHAF |
| | | | | | | RLLTCPDAMVRNIAANALHD |
| | | | | | | ATKKRIGRAPSNQDIATFLS |
| | | | | | | GSLDGEFGRDGRDIASLWSR |
| | | | | | | ARNATRRLGKRIGCRWEWCE |
| | | | | | | ERQELGVLVPQIRSNDNTIV |
| | | | | | | TPSARGMLERTLKAAIHSLY |
| | | | | | | VETLKRKPDQGKAFELTSKW |
| | | | | | | DASQPLPRRGRLHPFRRLAV |
| | | | | | | HPPCPAQLRPAQRSRPPREP |
| | | | | | | RQALQEVRLLQRDPAPRPVQ |
| | | | | | | LQAPLQSLAAAPQCHPEPPG |
| | | | | | | ESHRTAPGGGRRELRHPRYP |
| | | | | | | ASGTPANHFLAGGGFTRFAD |
| | | | | | | WRFIHRARLNCVPLNGAVRH |
| | | | | | | GNRDKRCRKCGYSNETLPHV |
| | | | | | | LCSCKPHSRAWQLRHNAIQN |
| | | | | | | RLVKAIAPRLGEVAVNCAIP |
| | | | | | | GTDSQLRPDVVVTDEAQKKI |
| | | | | | | ILVDVTVSFENRTPAFREAR |
| | | | | | | ARKLEKYAPLADTLRAKGYE |
| | | | | | | VQMDALIVGALGAWDPCNER |
| | | | | | | VLRTCGIGRRYARLMRRLMV |
| | | | | | | SDTIRWSRDIYIEHITGHRQ |
| | | | | | | YQEV |
| | | | | | | (SEQ ID NO: 1427) |
| NeSL | Utopia- | — | Chrysemys | TTTTTTCTGATGCTTGACTG | TGAGCCAGAGTGACATCGTT | MTQDQDADCCPAGKDATRGA |
| | 1_CPB | | picta | CAAACACCCATCCAGAAGAT | CTCCCACTACGAGAAAGGGA | PPMTQDQDADRCPAAPERDA |
| | | | bellii | GGAATCTCCTGCAGCCATTT | CCAAGTGACCTTCTCCGTTG | PEGTTSSTPDPKTTYHPAVR |
| | | | | TTGAAAAAATTGATGCTGCT | GATCATATGAACTGGAACCA | RRAARRGMHLRAQDLDAARC |
| | | | | TTAAAGATATACTCCATTCT | TAAACTCCCTGAACATTAAA | PSGQRDNVASESSAPPRATS |
| | | | | CCTWKTTTGKAAGAAAACTC | TCTCACCAAATGAGGGTCAA | PPQASLPDPEESPGESAGTT |
| | | | | TTTTTCAGCTTCAGCTATTC | TCCATCCTCATCATCATATC | EIRPTEGEAGEEDRIYLQYP |
| | | | | TGTCATCGGCTGCTGCTGTT | CACTCATTATAMTCCACACC | LPTGLLLCPFCLPVHGVQTL |
| | | | | CCTGCTTCCCAGAAAGCTCA | CGAACACAGCCACTCTATGA | AALSKHVRKTYNKRIAFRCS |
| | | | | GCMAAAACCTATCCTGAAGA | ACTTCATACCCTCATATCTC | RCDLPFETQKKCKFHQATCR |
| | | | | CCWCCCTTGGTGCCTCACGG | AATGTCTGTACTTTGACCCA | GPPTTAKVNPTDILRVPTLT |
| | | | | AAGACCCGGASCACCTGCAA | TCAACCTTTTACCCCCAATC | PTDDLASAPQPASPESQQIR |
| | | | | GAACCAAAACATTAGGAGCT | GGGGATATTGCAGATTATGT | GDQPPTEGSVTPASRTDDAT |
| | | | | GGCTGAAGAAACCCCCCGTG | ATTCCTCATGCCACCTGATC | KRTSPVSRIPTLDPAVRGTT |
| | | | | GATACCTCWGCAGGGAGACC | TTAAACCAAACTTTGCACCC | ATSQVNNLTRRLSDLIKTIR |
| | | | | TGGSTCCAGMAGGACAKCTC | TCGATAATCTGTATGTTATT | HNTDTRRCSAPPQVTSCRPA |
| | | | | TTCGGGACCTCMCATCSAGG | CCCTGATAACCAGAAACTTC | VGATSIVPQAARRDPANGGA |
| | | | | AGCAAGAATATCTCAACAGC | TATGCTCAAACTCTGTTCAC | SRSPQIPQPDPAPGRPNTSS |
| | | | | TCTTCAGGAGGGGGACCCCC | TATTTTTTTTAACATCATCT | KVTQRASDRQKPHAPPRTHQ |
| | | | | GGAGAACCCTGCCCGCTTCC | TAATAAAATTTTTAAATCTG | PDAARRRTRTIPSASKHDRA |
| | | | | CAGAACCAGGATGCTGATCG | TT | PTKPSTGASRTPLPPGRSSA |
| | | | | CCGCCCCACCGGGAAGGATG | (SEQ ID NO: 1306) | ASETPRAALPTTPGPPPQDP |
| | | | | CCACCGCAGGAGCCCCCCCA | | PEHRSTVRGTTRPQTVPAAP |
| | | | | (SEQ ID NO: 1183) | | EPAETTQQEERRPRARVATP |
| | | | | | | WQSAWMEELAKAEDFENFDT |
| | | | | | | LMDRLTAELSAEITARRREP |
| | | | | | | QEAARATRRFPAPSRNNTAR |
| | | | | | | EGRRGDVGRRYDPAAASRIQ |
| | | | | | | KLYRMNRTKAMREILDGTSS |
| | | | | | | YCAIQPERLYSYFKDVFDHE |
| | | | | | | AQTNLRRPECLSPLPRIDLT |
| | | | | | | EDLERDFSPQEVQARLSRTK |
| | | | | | | NTAPGKDGIRYPLLKKRDPG |
| | | | | | | CLVLAAIFNKCKQFHRVPRS |
| | | | | | | WKKSMTVLIHKKGXRDDPGN |
| | | | | | | WRPISLCSTIYKLYASCLAA |
| | | | | | | RITDWSVCGGAVSSVQKGFM |
| | | | | | | SCEGCYEHNFLLQTAIQEAR |
| | | | | | | RSKRQCAVAWLDLTNAFGSI |
| | | | | | | PHHHIFATLGEFGMPETFIQ |
| | | | | | | ILRDLYKDCTTTIRATDGET |
| | | | | | | DAIPIRRGVKQGCPLSPIIF |
| | | | | | | NLAMEPLIRAISSGPTGFDL |
| | | | | | | HGKKLSILAYADDLVLTADD |
| | | | | | | PESLQGMLDATSRATDWMGL |
| | | | | | | RFNAKKCATLHIDGSKRDSV |
| | | | | | | QTTGFQIQGEPVIPLAEGQA |
| | | | | | | YQHLGTPTGFRVRQTPEDTI |
| | | | | | | QEILQDAAKIDASLLAPWQK |
| | | | | | | INALNTFLIPRISFTLRGSA |
| | | | | | | VAKVPLNKADKIIRKLVKKW |
| | | | | | | LFLPQRASNELVYIAHRHGG |
| | | | | | | ANVPRMGDLCDVAVITHAFR |
| | | | | | | LLTCPDATVRNIAANALRDA |
| | | | | | | TEKRIGRAPSNQDIATFLSG |
| | | | | | | SLDGEFGRDGRDIASLWSRT |
| | | | | | | RNATRRLGKRIGCRWEWCEE |
| | | | | | | RQELGIRVPQIRSDDNTIVT |
| | | | | | | PTARGLLERTLKAAIRSLYV |
| | | | | | | ETLKRKPDQGKAFELTSKWD |
| | | | | | | ASNHFLDGGGFTRFADWRFI |
| | | | | | | HRARLNCVPLNGAVRHGNRD |
| | | | | | | KRCRKCGYPNETLPHVLCSC |
| | | | | | | KPHSRAWQLRHNAIQNRLVK |
| | | | | | | AIAPRLGEISVNCTIAGTDS |
| | | | | | | QLRPDVVVTDEAQKKIILVD |
| | | | | | | VTVSFENRTPAFREARARKL |
| | | | | | | EKYAPLADTLRAKGYEVQMD |
| | | | | | | ALIVGALGAWDPCNERVLRT |
| | | | | | | CGIGRRYARLMRRLMVSDAI |
| | | | | | | RWSRDIYIEHITGHRQYQEA |
| | | | | | | (SEQ ID NO: 1428) |
| NeSL | Utopia- | — | Drosophila | AAAGTGTAGTTCTTTTCTGT | TAAAAAATTAAAATGCCTTA | YAPGYEAAQSPCGREPPRDH |
| | 1_DYak | | yakuba | TTTAGTGTAGTGGGAAGTCT | AAAATAAATAAATATATCAA | HRRPRDACGSSHSPEPCLTT |
| | | | | GTTTCTTTTTATTATGTTTT | AATTTAAAAAAAAAAACGAG | PRLLPETVSAEPCDDESQRT |
| | | | | TTACGAAAAAGTCCTGGTCT | GAACAAATAAACACAAATTC | RYASPHKQARTLHDAEPRDA |
| | | | | TTGAAATTCATTGTCTAAAT | TGAAAGATTTATATAATTTA | SREHAPSCAEPRCHRCQWTH |
| | | | | TTTAAATAAAATTATAAAAT | AAAWATAAATCGAAAATAAA | WKDCCPHSTNTTDGPEGTDR |
| | | | | TTAAAAAGAAAATTAATTAA | TGTTGAAAACAAAAAAAAAA | CADTITSPATAACPQRSPCP |
| | | | | AGAAGCGATGAAATATCTCT | TAATAATAATAATAAAAACA | LGSSNGCDETAPEKRQPAAD |
| | | | | GAAATTCAATCAATCAATTA | CAATAACACTCACCCGGCCT | LVHTAPFAVLVRAGPFADLV |
| | | | | ATCATGGCGTCTCAGCGAGT | GCCCCAGAGGCAGGTAAACA | RAGPFADHHQDDDPLPHRSG |
| | | | | GCACGTATTTGCCTACCCCT | TTTACTGGCCATATGGCTTT | SLGPLCSKQKDPRKTHQHRH |
| | | | | TCGTGGGACCATTCCGGTGC | TTTTTTAA | SGQAGNQTHTDIPRAAPSRR |
| | | | | TCCGTATGCATGGATGCGTC | (SEQ ID NO: 1307) | AAICLMANAAATREDLLRAA |
| | | | | CGGGATGCATCCCACTAGGT | | TSLSEMAAANQPTRSPTGGG |
| | | | | CGCTGGGCGAATACGGCACA | | EPTSQGRRGPQALADAAKRI |
| | | | | TACGCTGCGGCATATCAGCA | | QQIYRTNIPRAMRKVLRTLL |
| | | | | CATAACCCGGCGCCACCCAC | | TAVFSACLRTGHVPDLCKKS |
| | | | | AAGTGGTTATTACATACCGT | | RTVLIHKKGDRTDLSNWRPL |
| | | | | TGCCGGGTCTGTGGCGCTGA | | SMGDTIPKLFAAVMADRLTA |
| | | | | (SEQ ID NO: 1184) | | FLTNGGRLSEEQKGFLQHEG |
| | | | | | | CHEHNFVLGQVLEESRRQGK |
| | | | | | | DLVMGWLDLSNAFGSIPHAT |
| | | | | | | IMDAVAGMGIPSRIRTIIHQ |
| | | | | | | LATGAATTAKTIDGMSEEIP |
| | | | | | | IEAGVRQGCPASPILFNIAI |
| | | | | | | ERVLRKIKTVNAGYLLYGSR |
| | | | | | | ISPLAYADDLVLIASSPEEM |
| | | | | | | RSLLRAADDAAIEAGLHFNP |
| | | | | | | KKCATLHLTGKKSSRRAVQT |
| | | | | | | GFLVRGTPIPAMTEGDAYEY |
| | | | | | | LGIPLGLKKNQTPRAAMEAI |
| | | | | | | VGDIAKIDDSLLAPWQKIDA |
| | | | | | | ARTFVAPKLDFVLRSGATLR |
| | | | | | | APLRHLDTVIKKHIKKWLYL |
| | | | | | | PQRASAEVVYTPLKKGGAGI |
| | | | | | | LPSSILADVLTIAQAHRMVS |
| | | | | | | CPGEVVSRIASEGLREAVKR |
| | | | | | | KINREPSGDEMAHFLSGSTL |
| | | | | | | SGETASFGDAGFWSRVRMAT |
| | | | | | | KRQAVHLGVRWAWRGGELLV |
| | | | | | | ESRGQRNRPVATDSNSRSQL |
| | | | | | | IQRLRCAAQDEFLTILINKP |
| | | | | | | DQGKVAKLSTLTPVSNAFIR |
| | | | | | | DGSFTRFADWRFIHRARLGV |
| | | | | | | LPLNGAIRWGSGDKRCRVCG |
| | | | | | | YQLESVPHVLCHCMHHSNAM |
| | | | | | | QQRHNAVMDRLAKAGSRLGT |
| | | | | | | PRVNCRVEGVAEDMAALRPD |
| | | | | | | LVWRDERSRKIVIVDVTVPF |
| | | | | | | ENGAEAFDNARGEKEEKYRP |
| | | | | | | LAEALRAMGYQVKLEAFIVG |
| | | | | | | ALGSWDPKNERVLKTLGVSR |
| | | | | | | FYAGLMRRLMVADTIRWSRD |
| | | | | | | IYVEHVSGIRQFTLPSGAPS |
| | | | | | | N |
| | | | | | | (SEQ ID NO: 1429) |
| NeSL | Utopia- | — | Gavialis | CGCTGGAAAGACGGAGAACC | TGAACCGCCCCCCCTCCGCG | MSGPRQAAADPRPSTDPRRQ |
| | 1_Gav | | gangeticus | GCTTCTTTTTCCTGCGCCCG | CCAGACGGACCTTCACTTCA | RDSQSPEPRLTRAASRRRTP |
| | | | | GCCTGGTATTGCACTTCCTC | CTCCGAGAGGATTCTTCGAC | DPEDAPRTTAEHPERRRTPP |
| | | | | CAGGACCAGCGCCAACCTAG | CACGGACGACCCCGCTCCAC | DPRGPSATTAGPERRRPPDP |
| | | | | TCCGGCAGACTGCCGGAATA | CCGAAGAGGACCCCCGCGAT | GGPEDDPPEGLPTLVEEPRT |
| | | | | ATAGCCTCAGAAAGAGAGCT | GAGACTCTATACGGACTGAG | PPTPDPPDGRPRRGCRRGSA |
| | | | | GGCTAGCAGCCCTCTTTTCT | GCACTTCCTTCGAACCACTT | HVPPLPPPCEAAVPDLPPAK |
| | | | | TTCCTCCGGTGCAGCGTGGG | CCTCCACCATTGCGGACCAT | AVQVAQRHEQTPTALPPAAP |
| | | | | TTCTTGTCAGTCCTGATGGG | TGTAACGGGTTTGTGTGTAT | SVLLLPLRHRVRGPEAPEEP |
| | | | | CTAGGGAAGGCGGTGCCGCC | CTATCTCCTTTCTCTCTCAG | PQGMPGPRGREETRHAGEVR |
| | | | | AGTACGTCCGAAAGAGCGCC | CGTCGCGAACCCCCTCCCCC | RPTTRAAARRPARPAAPPAT |
| | | | | GGTTGCGCGAGCGACCGCGC | ACCCCCCACCCCCGGGCTTA | PPDQTSGDRPTERPAPATPP |
| | | | | CGCTCAGGCGAGTAGCCCAA | GTTGGCTAACATTGTATCTC | RRSAPRDPRPDVTPRPDGPP |
| | | | | GGGTCTTACGGTTCGCCGGA | CTGTAACCTAGTCGCGTTCC | PGPPGPPDAPDPPRIPEPPG |
| | | | | CCCGATAACGCGAAAGCCCC | CCTCCTCACCCCCATCCCTC | EPEPPGALQLPSVPGSPGAE |
| | | | | GACTCGGGCCAGTAGCCGAA | TATTGTTAGTCCCTCGCTCG | TSAQQRMPTPRQALWLEELS |
| | | | | GACCNTGGGCCTCCCTCCCC | GGCGATCTGTATTTCCCTAT | RATAFEAFEASVARLTEELS |
| | | | | AGGTCGGAGTAGGCGAACGC | CGGCTTTGTCATCTTTTTTC | AAARPGQPRRGADNGPTTRR |
| | | | | CCGTGCTCGGAGGACGGAAC | TGGATTCCCGATCCTAAACA | DHRPQPQRRPRRQRYDPAAA |
| | | | | GTGGACAAAACACCCCCAGG | TTTACTAATAAAAGTCAATC | SRIQKLYRANRPKAAREILE |
| | | | | TCCCAATGACGCCCTGATCC | TGTTCTTT | GPSAFCQVPRETLFNYFSRV |
| | | | | ACTGACAAGAACGCTCGAGG | (SEQ ID NO: 1308) | FNPPAEAAAPRPATVEALTP |
| | | | | CACNCCAGGAGACCCCCAGC | | VPPAEGFEEAFTPREVEARL |
| | | | | TAGGGCAGACCGCCGACCAC | | KRTRDTAPGRDGIRYGLLKK |
| | | | | GGGTCGCGGAGGACCCTCCC | | RDPGCLVLSVLFNRCREFRR |
| | | | | AGGAGGGTGGACCAGCGAAC | | TPAAWKRAMTVLIHKKGDPT |
| | | | | CCGAGTCGGCGACGAACCCC | | DPGNWRPIALCSTVAKLYAS |
| | | | | GACGCACCCCCCCCGCG | | CLAARITDWAVTGGAVSRSQ |
| | | | | (SEQ ID NO: 1185) | | KGFMSTEGCYEHNFTLQMAL |
| | | | | | | DNARRTRKQCAVAWLDISNA |
| | | | | | | FGSVPHRRIFGTLRELGLPD |
| | | | | | | GVIDLVRELYHGCTTTVRAT |
| | | | | | | DGETAEIPIRSGVRQGCPLS |
| | | | | | | PIIFNLAMEPLLRAVAGGPG |
| | | | | | | GLDLYGQKLSVLAYADDLVL |
| | | | | | | LAPDATQLQQMLDVTSEAAR |
| | | | | | | WMGLRFNVAKCASLHIDGRQ |
| | | | | | | KSRVLDSTLTIQGQAMRHLR |
| | | | | | | DGEAYCHLGTPTGHRAKQTP |
| | | | | | | EETINGIVQDAHKLDSSLLA |
| | | | | | | PWQKIDAANTFLIPRVAFVL |
| | | | | | | RGSAVPKTPLKKADAEIRRL |
| | | | | | | LKKWLHLPLRASNEVLHIPY |
| | | | | | | RQGGANVPRMGDLCDIAVVT |
| | | | | | | HAFRLLTCPDATVSIIAASA |
| | | | | | | LEETARKRIARQPTGRDLAT |
| | | | | | | FLSGSLEGEFGRDGGDFASL |
| | | | | | | WSRARNATRRLGKRIGCAWT |
| | | | | | | WTEECRELGVSLQPAPHADR |
| | | | | | | VTVTPRTRTFLERFLKDAVR |
| | | | | | | NKYAGDLRAKPDQGKVFDVT |
| | | | | | | SKWDASNHFMPSGSFTRFAD |
| | | | | | | WRFLHRARLNCLPLNGAVRF |
| | | | | | | GHRDKRCRRCGYAAETLPHV |
| | | | | | | LCSCKPHARAWQLRHNAVQD |
| | | | | | | RLVRAIPAAAGEISVNRTVP |
| | | | | | | GCESQMRPDIVITNEEAKKV |
| | | | | | | VIVDVTIPFENRRQAFTDAR |
| | | | | | | ARKREKYAPLADTLRGRGYD |
| | | | | | | VTVDALIVGTLGAWDPSNES |
| | | | | | | VLRACRVSRRYAKLMRCLMV |
| | | | | | | SDTIRWSRDIYVEHITGHRQ |
| | | | | | | YSDPTRRAAAGPDPEGTA |
| | | | | | | (SEQ ID NO: 1430) |
| NeSL | Utopia- | AGCV0 | Lytechinus | ATCTACTATC | TGAATAGCATTTATATTGTG | MSCPREGSDHLGPDPETPAL |
| | 1_LV | 1358106 | variegatus | (SEQ ID NO: 1186) | TTCCAAACAACATACTCATT | HQGSDIRVTSSRLRGSRGKS |
| | | | | | ATTATATCTAAACATTTTTT | SRQPSSRHQVPASEASATAQ |
| | | | | | TTTCTGTTCCTGACAATCTA | QTAANECQVCGSSFATSSGL |
| | | | | | CGTAAAGTCTGCTAACCAAC | RRHMARLHRAASADPEGAAP |
| | | | | | TGGCATGATGAAATAAGATA | ASITEIFDYPLPSRWKCSAC |
| | | | | | AAATCCCCTTACACATTAAT | SENFFNQQTLKRHQTRHHPA |
| | | | | | TTCTTGTCACATCATAATGC | TTFAYAFRCSSCRSEFDSAR |
| | | | | | TTTGTCAAAGCAATGTCCTA | RAANHWQVHKKERSQLSGTE |
| | | | | | CATAATATCTCGATGTCACC | PQASSQARVSMAHSPPPLPN |
| | | | | | CCAATTAATTTTACATCCTT | TSWAELASNPAEIPSFVWES |
| | | | | | CGGTAACCTTTATACCGTTG | PPKNRPSVEEFGSSLPTDVT |
| | | | | | GATCAACATATATGATTTGT | MMSQSPPPQVQSSPVPALTP |
| | | | | | AAAACTGTTATTTCTGAGTT | LSPAATASSSPPGAARQLTP |
| | | | | | TTTTCTATGCTAATAAA | PTQTNTPVTQRARLQPEADV |
| | | | | | (SEQ ID NO: 1309) | VPELPPSVTEHPVSDAQHWV |
| | | | | | | DAVSSASDWSEFEAVCDQFV |
| | | | | | | IHAVAVSRPNLARPQQQDRQ |
| | | | | | | RSGDHPPRQQRGQHRPTFDV |
| | | | | | | REASRIQKLYRTSKKRAIRH |
| | | | | | | ILKEKSPSFSGSESDVLDFF |
| | | | | | | REVYSAKEVDEEAVGKLASS |
| | | | | | | LFDVPQGDDSATSLSLPTSA |
| | | | | | | KEIGARLSRMTNSAPGKDRL |
| | | | | | | EYRHIRRADGSFSISEAIFN |
| | | | | | | KCLAEGRIPAPWKTASTILL |
| | | | | | | HKAGPTDDPANFRPIALQSC |
| | | | | | | LYKLFMAVLADRLTKWACEN |
| | | | | | | QYLSPEQKSARPCEGCFEHS |
| | | | | | | FLLSAALKDCRRNQKTICIG |
| | | | | | | WLDLRNAFGSIPHPVIKIVL |
| | | | | | | SSLGVPDSLVTLLMDAYNGA |
| | | | | | | STSFTLTGGQTDTVPIRSGV |
| | | | | | | KQGCPMSPILFNLAIELIIR |
| | | | | | | AVKKNASDNHLGVTVQGKNL |
| | | | | | | SILAYADDLVLLSRDTEGLQ |
| | | | | | | SLLQVAGSSASTLQMQFKPQ |
| | | | | | | KCATLTLDCKRGTNVRQSAH |
| | | | | | | HIQGAAIPSLTEEERYRYLG |
| | | | | | | VPIGLPRLTSLQESSRKLSS |
| | | | | | | DIETISSSLLAPWQKLDAIK |
| | | | | | | TFVIPILQYTLRATEYLKSD |
| | | | | | | LKPLRAAIIKHVKKICHLPV |
| | | | | | | RSSNAFVFASRPSGGLAFVD |
| | | | | | | PGVDADILVVTQAVRTLASD |
| | | | | | | DDTVRAVALGQLTSVVHRTV |
| | | | | | | HSAPSDDCIDKFLSGSSEGP |
| | | | | | | LANSGNSGQASSLWSRTRAA |
| | | | | | | SRRLKIRIVGASSGDIKVES |
| | | | | | | GGRAIPSKKVTAGLRSDHHN |
| | | | | | | EMSEKLRSLPDQGKVARALS |
| | | | | | | LDSFANATSWLTSGSFIRFC |
| | | | | | | DWRFIHRARLNCLPTNAAVR |
| | | | | | | RWKQNANTKCRRCDHQLETL |
| | | | | | | PHIINNCRPNMVPIRRRHNS |
| | | | | | | IQERLVKAIHYGDIYQDQHV |
| | | | | | | PGDPNPRERPDITVVEGNKV |
| | | | | | | TIVDITIPFDNGPDALSTAA |
| | | | | | | NAKVMKYDTLRQELASRGMD |
| | | | | | | VEVHAFVIGSLGSWHGDNER |
| | | | | | | VLGRLGISRRYRTLMRRLCC |
| | | | | | | IDAIKGSRDIYIEHVTGHRQ |
| | | | | | | Y |
| | | | | | | (SEQ ID NO: 1431) |
| NeSL | Utopia- | — | Nasonia | CCATTCCTTCGTACGGGTTT | TAGTGGGGCCATAACACCTA | SGXTGREVKCITVNVLMEQQ |
| | 1_NVit | | vitripennis | TCGTGCCGGCATAGCCGGGT | GGCCCCACAGTGTGGCGATG | PHTKAIREGDFIVILLPQSD |
| | | | | GGGAGACTCGCGCGGGGGAG | TCCATGTGTGTCGTCCTTAC | DETLCCPLCVGRGRYSGKTR |
| | | | | GTCATATCTCACCACCATCC | TTATTTATTTATTTGTCCTG | VECLNRHVKEVHPDLTTTFR |
| | | | | TCGAGCTTTTTGCTGCACCT | TCGAGCTGTTTAATCTATTC | CWGCGFAAPGDKKYPRKIVT |
| | | | | GA | ATATGTATGTGTTGTGTGTG | QHCATCVPEVSSAPSGRVDG |
| | | | | (SEQ ID NO: 1187) | TCGTCCCTCGTAGCAGTTTT | ERRVNTRRRLGIAAATEASP |
| | | | | | ATTCCGTCCAACCAGAGGTC | VRRTRRNGLASPPVEQNISQ |
| | | | | | GACCAATATTAAAATAAGCA | SAAPPEPARVPQHPEIVALG |
| | | | | | TGGCTTGAAGCAGGCCAAGC | ESADDEVFRSPVNSPPRDWR |
| | | | | | GCCGTGTTCTAACCCCGTTT | AAAPQQAASSSPXAVPGITA |
| | | | | | TAGGGGAAGTTACTTAACCT | ATPSNTTRTGNGSAXSILAE |
| | | | | | AAAAATACAACTTTTCC | HPIPAPPPTNTTEANGRADI |
| | | | | | (SEQ ID NO: 1310) | PRSGRAPPPGXQAARRRAPT |
| | | | | | | TEQRRIVGLLEAATGREQLE |
| | | | | | | EATTQAMLFLARLTGRRPEP |
| | | | | | | RNAIRPGXRQRHPAQGDVQA |
| | | | | | | QAPDRIXEAKKLQRLYRTSK |
| | | | | | | KRAVQKILAGPXMNCQIDKN |
| | | | | | | TITAHFVELAARRDGGEDWP |
| | | | | | | DVFDREEPTAASGEALCTPI |
| | | | | | | TREEVFRRLKGRNNTSPGPD |
| | | | | | | GITYRDLAKAXPGAHVLAAL |
| | | | | | | YNXIWRIEATPALWGVSNTT |
| | | | | | | LIYKKGDAMDISNWRPISLG |
| | | | | | | DTVPKLFAAILADRIKRWAV |
| | | | | | | ANGRYSASQKGFLEFEGCYE |
| | | | | | | HNFVLQEAIREAKGGRKELV |
| | | | | | | VAWLDLASAFTSVPHSSILQ |
| | | | | | | ALEGHGLPSKARNIISSLYT |
| | | | | | | GMTTRFHTAEGPTDPILIQS |
| | | | | | | GVRQGCPLSPDVFNLTLEVV |
| | | | | | | LREIQRTGEGYTIEGRRISH |
| | | | | | | LAYADDVAILADSPAGMRRL |
| | | | | | | LFAAERGARAVGLTFNPAKC |
| | | | | | | ATLHIAGRGEEAVRPTEFSV |
| | | | | | | QGTPVRALASGEAYEHLGIP |
| | | | | | | TGYQVRQTPINTLRDLLADI |
| | | | | | | GSIDRSLLAXWQKLDAVGTF |
| | | | | | | LLPRLDFTMQGAHIDKGFLT |
| | | | | | | EADKIIKKAAKSWLSLPQRA |
| | | | | | | SAELVFLPPSQGGGGLLTVA |
| | | | | | | HSYKMLYSSDVTVSTIAGST |
| | | | | | | LRRTVSERLKKRASNIDIAR |
| | | | | | | FLSGDLDLPRSTSPSTFWTK |
| | | | | | | VRSAALRIKTKLGLRWSWCQ |
| | | | | | | GGEVLLMACGDPRAPGTRVS |
| | | | | | | PQTKHLVTTSLRRCLNRHYA |
| | | | | | | ESLLAKKDQGKVFEVTRRSG |
| | | | | | | QSNHFLRSGSFTRFCDWRFI |
| | | | | | | HRARLDVLPLNAAKRWQRGM |
| | | | | | | DKRCRRCGSDLETLPHVLSH |
| | | | | | | CGPHSAARQKRHNNIQDRLV |
| | | | | | | KAASRCPGTISVNQTVVGVR |
| | | | | | | GPDAALRPDIVVRDDVNRRV |
| | | | | | | TIVDVAVPFENRLEAFDGVR |
| | | | | | | EAKIAKYTPLARQLTDSGYT |
| | | | | | | VTVEAFVVGALGAWDPRNER |
| | | | | | | VLSLLSISRYYAILMRRLMV |
| | | | | | | SDTIRWSRDIYVEHVSGIRQ |
| | | | | | | YRE |
| | | | | | | (SEQ ID NO: 1432) |
| NeSL | Utopia- | — | Phytophthora | GCCCGCCGGTGGAGTAGCCA | TAGACGGCACAGTTCTGGCC | MVVSRITARLEATPAPRWDP |
| | 1_PCa | | capsici | TGTTGGCCACCACCGCCCAA | CACGTAGGCCGAAAGGGCCC | PLPRRVIASRIADRLVPATA |
| | | | | GTCTCCGCCGCAGCTGCGAC | CACCCATGTAGGGAACCGCC | PCRSALNAAFPSPSRDTVTE |
| | | | | TGCTGCTGCTCATCGAGTCG | CTCGGGAAATCCATTCCGGT | SFTQEDRQLEPLTRHVDEET |
| | | | | CAGTAGTCGCAGCTGCACAA | GTTCGACTGAAGAGATGCTC | KDSELPGRAPTVLDEESKDN |
| | | | | GCACCACCTCCTGCCGGACG | CTTCGCCTTGACGGAGGTAC | DATAGEWLLRFDGACRANPG |
| | | | | CGCCGCCGTGGAGCACCACG | ATCTCGACAGTCGAACTTCA | PGGAGAVLFNPSGAASWTCS |
| | | | | CGCGCGCTGAGCCGTACCAA | ACTCGCAACATATCCGATAC | HFMPGATETNNTAEYTAFLL |
| | | | | GACCAAGGNTTCCAGGCTCG | AGTTACAAACCACAGTTAGA | GARAAADHGATLLRVQGDSQ |
| | | | | CGCGCGCGTGGMGCTCCCAG | TATCAGATAGGAACCTTCCT | LVLRQVKGIYGAKSTRLRRL |
| | | | | CCAGCGACGCGTTCAGCAGC | TTAGGAAGCTAACGGGTACA | RDAVRAELARVGQFSLHHID |
| | | | | AGGGTCGGCTGCGGCAGCTC | CTGGATGGTAAATACACATA | RQDNAHADRLANRALDMKST |
| | | | | GACGCTGCACGGGGACGGCA | CATTTC | LVECATHPGRNACTTTLTTS |
| | | | | GCGACGGCAGGCACCAAGAC | (SEQ ID NO: 1311) | AAAESPASPPPVGARDTPMA |
| | | | | CACGACGACCAAGCCGTCGC | | DAGEERLADVDDGEVYAAMR |
| | | | | TGCCGTCCCCATGGACGTCG | | LGPGEVPERRPRLRLRQLSD |
| | | | | ACCAAGGTGCTCGGTGGCCG | | EELEAASEMVERLGAALSAK |
| | | | | ACAGCGGATCAMCACCCGCT | | ITDAEDWASAEGYITALPYM |
| | | | | GTCGCCGCCACCGGAGCTCC | | LYDKLQSYSQAPRGPQQPVL |
| | | | | GAGTCGGCGGCAAGCGCCGC | | TRSPRGDDRPASSEPNASST |
| | | | | CGCCTGAACGACGGCGACGA | | TGGVASEHQPRRRRRRGRRK |
| | | | | CGAAGACATCCGCGAGCTGG | | GRRQRRNPRRSGREGATGGH |
| | | | | CCGAGCTTCTGCTGCCCGAC | | QQHKKHKPRPPRETQHHREH |
| | | | | GAGGAGGAGGCCGACGACCA | | RLDEALDELHALERTDPHNR |
| | | | | CAAACCAGCGCCCAGGTTAC | | PAIAKARRRVGRIRSAINQQ |
| | | | | CCGCGACCAGCGCTCATCCG | | LLRHKFDTDEKACVDGILST |
| | | | | GCCTCCGTCCTCGCTGTGTA | | ARAERAARAATPSPPASGAP |
| | | | | CGCGCACAACGCGCAGCGCT | | TTTVSAPGAIVTNDDGTCPI |
| | | | | TCAACTGCACGTTGTGCGTG | | PSDKLWRHFDAVNTPRLDFD |
| | | | | TACACGGCTGCCAGCTTCGC | | AEAPGSAAFRAAMDHLPAAT |
| | | | | TGCTCTTACGCGACACAGGG | | RLLDLLKEAPSTDEIETQLQ |
| | | | | ACTCTCGGCACCGGCGCGTG | | HVKASSSPGLDGVGYDVYKR |
| | | | | ACCTTCCTGGACAGGTTCTC | | FTIQLLPVLRAAFRCCWLYK |
| | | | | GGCGGGTTGCGCGTGCGGCA | | KVPQSWKLGVVRLLHKKGPR |
| | | | | AACCTTTTGCCTCGAGGCTG | | EDPANWRPICLQQAIYKLYT |
| | | | | GCCGCAGCAAGACACGCACA | | GILARRLTRWMDANDRHAPG |
| | | | | AACGTGCGCCAGCCTCAGCA | | QKGFRAVNGCGEHNFLAATL |
| | | | | CCACACTGGTCGCGGTTTCG | | IDNARRKHRPLYEVWYDFRN |
| | | | | ACGACAGGAGGAGCATCAAG | | AFGSVPFALLWDSLQRLGVP |
| | | | | CCACACTGTCGTCGGAGCCA | | PDYVDMCKGLYNQASFVVGN |
| | | | | ACACCACCGTCGCCACGGCG | | AVDGSTAPVEQRVGVFQGCP |
| | | | | GTCACCGCCGAACCCCCCCT | | LSPQLFNAAISPLLYALRRL |
| | | | | GCTCCACCATCAAGCCTCGG | | PDTGVQLSSVDRPGASAYAD |
| | | | | AACTCACTGTGCCCCCCCCC | | DLKIFSGTKAGITQQHELVA |
| | | | | ACGTGTGAGTTCCCCCGACG | | TFLRWTGMQANPAKCRSMGV |
| | | | | TCGATGTGCAGCTGCACAGT | | RRNTNGAVEADNVHLELDDT |
| | | | | CCGCCACAGGAAGATCAGCA | | PIPSMTHMQSYTYLGIGDGF |
| | | | | CGAGGACGCCACCCANCACC | | DHVRRRVELAPKLKTLKHDV |
| | | | | CGGAGAGCACGCAACACCAA | | TALVESGLAPWQVVKAVKVY |
| | | | | CCTCCTGAGGCAACCCGCTG | | LYPRVEYALRHLRPDDQHLE |
| | | | | GGGTTCGCCGCTCGCGCCCA | | SFDLHLRRGLRHLLRLPKNA |
| | | | | CGCTCGTTGCCTCCAGGATT | | TNEFFYAPVSRGGLGLLPLV |
| | | | | GCTCAGCGACTCGGCGAGCT | | ELHAALQIAHGWQTLHSPDP |
| | | | | GGAACCTCCACGCTGGGGCC | | AIRRVAREQLYQIADARHRL |
| | | | | CACCATTACCCCGCGCG | | DKDHWPHRREELCELLLNGE |
| | | | | (SEQ ID NO: 1188) | | LGTSAHAPPKRRNGDIGSLW |
| | | | | | | VDVRKNLKTFGLKVATAPAN |
| | | | | | | QETGVPAQPLQLRVPHHAEW |
| | | | | | | LDHGNVLRHVKLHIKNLHWQ |
| | | | | | | TWCALSDQGKTARVHGGVGS |
| | | | | | | AFLTRPRGMWESDYRFAVAA |
| | | | | | | RLNVVDTVNTLSRRRLRAHD |
| | | | | | | RCRYPACRWKETLAHVLNHC |
| | | | | | | PGTMDAVRGRHDDALKEIEH |
| | | | | | | TLRASSGDRRELRVNQTVPG |
| | | | | | | LPGPPLRPDIQVYNHDKRTV |
| | | | | | | AVVDLAVAFDEQPSEDPESS |
| | | | | | | GLAKAVQIKKAKYAGIKEHL |
| | | | | | | ENQGWKVHLSAIVYGSLGSV |
| | | | | | | AASNHKVYTEHLGLLKRDAK |
| | | | | | | RLDRQLSSACIQSSRRIWNF |
| | | | | | | HCAKHRARQHEHQAPPSQAT |
| | | | | | | RGRRVTETGGNPSRTDRR |
| | | | | | | (SEQ ID NO: 1433) |
| NeSL | Utopia- | — | Phytophthora | AGCTCGGCCTCGCGGCTGCC | TAAGCTGGTCATCATGACCG | MLADPAALAAGLARAPPPPS |
| | 1_PI | | infestans | TTCCCAGGCGCCGCCGACTT | ACAGGGCACTACCCAGGTAG | APQDPSPAFPAGPAGQNPRA |
| | | | | CGCGCTCTGGCGCGGCCCAC | GGAACCGCCCTTAAAAAACC | AAPARVEVHTVVAPPGRAGG |
| | | | | ACGCCGCCGCCGAGCCTCCA | CAGGAAGACACAAACACCCT | MLPDPGLVEEPIQATYAHDA |
| | | | | AGCGCGCCCGTTGGCTTTCG | CCACTTAGTGACATACATAT | AQFECALCPYVAESMAVLVQ |
| | | | | CAGACGCAGGGCTCGCGGCG | TTTAGCCTAGATTTCAGTTA | HRRSAHRGTRFKDIFTSGCQ |
| | | | | ACGGCCCTCGCCAGCCCCCA | CGGAGAGGTTACTAACTGGT | CSLVFYARIVAASHAVACAR |
| | | | | AGACCCCCCCTACGATGTGG | AAATACGAACACATATTCTG | RNQRAVPPAPTPVAPTRPEA |
| | | | | CACCACCCGGCAGGGCGGCC | TTCTAATCAGTGTGAAAACT | TPQPTGYLAAAMTAAAAAAS |
| | | | | GGCAGGCTGCCCGACTCGGT | GGTTTTCGCCTTTTGGCGGA | SDTVVAAATNMQSAVPAAAK |
| | | | | ATCGCCGGGTGCTACACTCT | CTTTTTCACTCGCATTTTTG | TTGLQLVPPELEPALPQRAS |
| | | | | CAGCCGCCACAGCTCGGGCC | GGCAATCGTCTGCGGCTAGC | CHAGKRRRLNADEAVTPCTP |
| | | | | TTGGCGGTCCGCCATTGGCC | TTGCTAGCGGCGGACGAGCG | TARVSPQTEVAMAPHDAPQD |
| | | | | CTTGGAGCTCGACAGCGACA | GTCTCCGGGGGCGTTCACCT | DTVLQREAAEPQPDPAATPG |
| | | | | GCAGCGACGACGAGGACGCT | TTCCCCCGCGAGGCCAACTA | AQVQRVEDTTAAQDDTVQQD |
| | | | | CAAGACCCCCACGCCGCCGC | CACCGATCTTCTCTACACTT | HDADTAQVSPPRRTPTRWGP |
| | | | | CCCAGAACCCCCAGAAGACG | TTCTAATTCGCCTCCGTCTT | RPSSTQEPSPMTGEPAATLA |
| | | | | TCGCGAGTGTGCTTGCCCCA | CGGTCTTCGGTTGTCGGGCT | ARRPLTPAATGTRATRWGPC |
| | | | | CCCGGCAGGGCAGGCAGC | TTTTTCTTTTTGACCAATCA | HRAIGAAAIARLVTGLSTEP |
| | | | | (SEQ ID NO: 1189) | GAGCGCGCCATGCGCCTCTT | AQPQRRQPPPPQEPPSQPEP |
| | | | | | CTGGCCAATCAGAGACCGGG | LAAAATAAADIAATVAADIA |
| | | | | | CCCTGTCCTCGGACAGCGAG | AAAANAAMDVDGGPAADETW |
| | | | | | GCCTCCACGGCCAGCCAATC | LLRFDGACRRNPGPGGAGAA |
| | | | | | GAGTCTCGGCAGCGACGCGT | LFAPSGAVVWTCSHYMPSRS |
| | | | | | CTTTCTATAGCGCAGCTGAC | ETNNTAEYTALLLGVQSAVH |
| | | | | | GAGGCCGATCTGGCGGCCCC | HGASHLEVEGDSSLVIAQVK |
| | | | | | CGATTGGTCCGACTTTCGGC | GTFACRNARLRQLRNRVRHA |
| | | | | | CAATCAGCGACGACGAGGGG | LRSVDTHKLRHIDRQANAHA |
| | | | | | GCAGGGGTTTACACTTTTGC | DRLANRALDQRRTSSECGTH |
| | | | | | CCCCGTTTCGACTTCAACTT | GSCMDSCLAVPTALAAQETP |
| | | | | | CAGGCCAAAATGGCGATTTG | PAAPPSTSATPAEGNAMDDI |
| | | | | | GACCCTCCACGCGCCGTGCC | AAEIAARDEGETFPVLPIGP |
| | | | | | ACTGCTCGGCACCGGCGGCG | GSAPERQPRLRLRQLSDEER |
| | | | | | ATTCAGCGGGTGCAACTTCG | DAAADALQELADTMASKIED |
| | | | | | GGCACGTGTGCAACACATGC | ADSWTSGEGYISSIPERIRE |
| | | | | | AGCGCCCATTGCACGCCAAG | VLQPYATAPPQPGRSRRQQR |
| | | | | | CGGCATCGCGGGACGACGCC | RRPPRVTRNQREHRLDEALD |
| | | | | | TCGGCCGCCCAAGCGCAGCC | DMAATQQATPRDQRAVRRAR |
| | | | | | CCGCCCTTCCAGCACGACCT | RRVGRVRASMAQQELRHEFA |
| | | | | | CGCGCCGTTTGGCGGATCGC | KDESKCVAKILKTASTETAA |
| | | | | | CATCAAGACGTGCGAGAGCC | EDEHPETCPIDAATLHAHFT |
| | | | | | AGGCGGGGTCGGGCAAAATA | GVNAPRTDFDYDATSGREFR |
| | | | | | TACTTACTCTAAGTATGCCC | AAMSDLPPATVEIDAFDAEL |
| | | | | | GAATCCCTGCCCTCTCAGGC | TIDEVEDQLTRAAKTSSPGH |
| | | | | | TGAACGCGGCCCCATACTTG | DGIDYGIYSRFAAQLVPLLH |
| | | | | | ATCTAAGTATGGGAGGATCC | AVFQFCWRHRRVPRLWKVGI |
| | | | | | CTGGCCTCTCAGGCTGTACG | VRLIHKKGDPRQPTNWRPIC |
| | | | | | CGAGACCC | LQPTIYKLYSGLLAHRLSRW |
| | | | | | (SEQ ID NO: 1312) | LEGNDRLPMAQKGFRAFNGC |
| | | | | | | HEHNFMATTLLDQTRRQHRK |
| | | | | | | LYQVWYDLRNAFGSLPQQLM |
| | | | | | | WRVLRHLGVDSGFIDRCRDI |
| | | | | | | YRDSAFVVANAADGATDPVR |
| | | | | | | QEVGVYQGCPLSPLLFVAAL |
| | | | | | | VPLVRRLEKLDGVGVPLADG |
| | | | | | | VRPCTTAYADDLKVFSDSAA |
| | | | | | | GIRKCHDTVAGFLAWTGLRA |
| | | | | | | NPGKCASLAVTTNARGNPTR |
| | | | | | | DSSMRLEVHDAAITTLSLHE |
| | | | | | | SYRYLGVGDGYDHVRHRLQL |
| | | | | | | EPKLKQLKREAVALLTSGLA |
| | | | | | | PWQVVRALKVYVYPKVEYAL |
| | | | | | | RHLRPLQSQLQAFDRVVSKG |
| | | | | | | LRHLLSLPRSATSEVLYAPT |
| | | | | | | SSGGLGLQPLVELHRALQLA |
| | | | | | | HAWQMLHSKDPAIQAVARAQ |
| | | | | | | ACQVVRKRYRLQEDHWRGRD |
| | | | | | | DELVRSFLNSELAASPHAEV |
| | | | | | | LRRNGDIASLWSDVQRWLRI |
| | | | | | | YHLRFEHCDETEAHGPLSFR |
| | | | | | | VPHHNKWLTHKTVLRHVKLH |
| | | | | | | LKIRHQTRWKGMVDQGKTVR |
| | | | | | | VHGGVGAKFMTTGAGLSDDD |
| | | | | | | YRFGVKGRLNQVDTNSVLKR |
| | | | | | | KRLRAHTTCRDPTCSSAETL |
| | | | | | | AHVLNHCESNMDAIRQRHDD |
| | | | | | | ALEQIGSKIRGALDRAKSPT |
| | | | | | | ELRLNQTVPEYTGAALRPDI |
| | | | | | | VLRNVAAKTMVIADLAVTFE |
| | | | | | | DQAARARHSSLQLSHDHKTL |
| | | | | | | KYQPIVAELQHKGWRVQTAA |
| | | | | | | IVYGTLGSVQPSNFKAYTEK |
| | | | | | | FKLHKREARQLDLQLSSHCI |
| | | | | | | RASHRIWGWHCRQHRDRQRS |
| | | | | | | GTASRASRGSGGAPRRTSQA |
| | | | | | | PARR |
| | | | | | | (SEQ ID NO: 1434) |
| NeSL | Utopia- | — | Patiria | CTGATGTGGATACCTTGGAA | GATTAGCGAACACTAATATC | MCLKSFSSTSGLRRHMARLH |
| | 1_PMi | | miniata | TTACTCAACCGTGTCGGAGT | CTGCCMTAGACGTGATTGCT | RQPSPDASTPSTMTEVFPYP |
| | | | | CTTTTGTCTTTTGCGCCCAA | AATCCGCAAACCAACCGGAT | LPKVWPCVVCRENFYHNQTL |
| | | | | CACCTCATGGATACCATGCT | CTACAGCCTGAACACTGAAC | KRHQKNFHPNVDLTTVYQCS |
| | | | | TGTCGCTGGAGCGACGTTAC | TTTAATCTTCACCCATGTCA | VCGQEFVTGRKASFHFKVHR |
| | | | | AAGCGTGAGGGCGCCCTCCA | CATCTGGACACTAGGTTTTT | RMSASAIPTPSAMPSSPMDL |
| | | | | TGCCGGACAGCTGGTCTGTG | GCTCTGTTTGTGTTTTCCTG | IRGLVGEPLPPSPARTPPPL |
| | | | | CC | CCTTTWCMTTGGAWCTTTCG | ARYISPAPRSSFSPPWNPSP |
| | | | | (SEQ ID NO: 1190) | CMCTGGAATTTATTTGTCGC | PPRSPTPLPRPLTPPPRSPS |
| | | | | | TTGGATTATTTTTTTTCTCA | PPPRSPTPPPPVTLTTAPVT |
| | | | | | CAATTTGGATCTATTTTCGT | EPAVPVALTTAQVTEPSAPA |
| | | | | | TTGTTCACTTCGAACTCTAG | VHTAAPVTLSNAPVTEPATP |
| | | | | | CTGCCCTTTCTTCGGACACT | ATDPATPVTRLHSPVTHISC |
| | | | | | GAACTTTAATCTTCGCCATG | SISFTASHAPYSCAAPTSPS |
| | | | | | GCTGTCAGTCGCCGGTTCAC | VYACSPRRRQCSSTIAAVCN |
| | | | | | TTGCTGCGGTGGGATCCTGT | SEASSGNPCLLALPVHRHHL |
| | | | | | TGTGATAATCCCCGTGCATT | PDTSPQRPGLLFHHPGIPPH |
| | | | | | GCCCATGGATTTATTTCCGC | RPGRPPHCHGHSLHRHDHRA |
| | | | | | CTTAGTTGTTCCTAACCTTG | RRPGRQHHLPRSPSPPPRSP |
| | | | | | GATTTATTGCTGTGGGTGAT | SPPSRSPSPPPRSPSPPPRP |
| | | | | | GCCCGGGTTTTGTTTACATC | STPPPRSPSPTPRSPSPPPR |
| | | | | | GGGATCCCGCTGCGGCTCGG | PPILPPRSPDSTHRSLTSHA |
| | | | | | TGTTCCATGCGACTGGCAGC | RSPSRPATPPIPVQPRHLRP |
| | | | | | CCCTTTGTTTACTCTSGACT | STPAHPGVDNAVPPSQQSAI |
| | | | | | CTATTCATTGTTGTATTTCT | DVWLAELSRSADFESFEDVC |
| | | | | | TCCACACTGGCCAGTGATCA | DRFVEFAAAEGRNNGRPARP |
| | | | | | CACTGCTGTGTTTCCCGGGA | AHQPPRDRGNQGPRPQRPPR |
| | | | | | AGATATCCTCTGCGGTTTTC | PHRPGLGPEFDAQEASRLQK |
| | | | | | ACGCTCTGGGTGTCTCCCCG | LYRTSKKRAIRTILTGSDVR |
| | | | | | GGCAACGCACTGGTTGCTTG | YSGYRGPHPALMSDTAATEV |
| | | | | | CTGCGCCATCACCCTTTTCG | LTSGFLSLEVFSAREVDTDT |
| | | | | | TTTATATTCATTTTCAGTCT | IATDTSLLFPNSAQARESGQ |
| | | | | | GCCGTTATCTTGGCCAGCGC | DLLRPVTQREVSLRLGRMSN |
| | | | | | TCATTCTTTTGTGATGGCCG | SAPGKDRLEYRHIRQVDGAF |
| | | | | | TGGACTGACCCTCTGCGGTT | RVTLEIFNRCLRESRVPSSW |
| | | | | | TTCTGCGGTCASCACTCTCG | KTATTVLIHKKGDATDPANF |
| | | | | | GTGAATGCTGTGCCACCATT | RPIALQSCLYKLLMAILSDR |
| | | | | | TTTCATTTGTTTACTTTTTC | VTTWALDNDLISSSQKSARP |
| | | | | | AGCTACAATTATCCTGGCCA | GEGCYEHTFLLSTVVKDARR |
| | | | | | GCTTTCACTCTTTTGTGATG | NQKNMYAAWLDLQNAFGSIP |
| | | | | | GCCGTGGACGGACCCTCTGC | HDAMFTVLTSIGAPEGLVSL |
| | | | | | TGGTTTTCACGCTCCGGGTT | VRDVYTDASTDFVTPTGRTA |
| | | | | | TGTCTGCGGTCAGCACCCTT | AVPIHSGVKQGCPISPVLFN |
| | | | | | GGTGAGTGCTGGTCGTTTGT | LTLELIIRAVNASATRDRSA |
| | | | | | TTGCTCATTTTGCTTAGTTC | PVVHGQAVPILAYADDLVIL |
| | | | | | ACCATTATCTTTMTTCTCTT | SRSSDGLQSLLTTASIMATK |
| | | | | | TTGTWTGGTTTTCCTAGCGG | IQLKFKPAKCASLSLECRRG |
| | | | | | TTGTCTGGGAGTTGAGCTGC | TKVRPLEFNVQDKIIPALTE |
| | | | | | AGTTGTCTGGTCTTGGTTTT | EQHYRYLGVPIGLYRTDDSL |
| | | | | | ACCCCCATTTGTTTTCTTTT | ETLVAKMTDDIQRIDSSLLA |
| | | | | | AACGCGGGGCGTATTGCCTT | PWQKLDAIRTFVQPCLAYTL |
| | | | | | GACCGGCCGTCTCAGCTTTT | RAGDCAKKHLKRLRGQLVKT |
| | | | | | CTCCTAGAGCAACCTTCCGT | ARKVCNLPTRATTNYIFADR |
| | | | | | TCATCCAACTTTTAGTTTTC | RAGGLGFIDPNVDADIQIIT |
| | | | | | TCAGTTCTTGGCCATTCCGG | QAVRMLSSPDDITRAIATGQ |
| | | | | | TTGGTTAATTTTTATTTATA | LSSVVHRTIHRAPTQEETDE |
| | | | | | CTTAATTTTATGTTTACATT | FLSASMEGDFANSGNSGQAS |
| | | | | | TTCTGGTTGGAGACCATTTT | SLWSRARAAARRLKVTISGS |
| | | | | | AGCTTGTTTTAATAGCTTTT | LSGSVITKSTENREMAAKSI |
| | | | | | CTTCTTTAATTAATACCCTC | TTALRAQSRAHYTHRLLSLP |
| | | | | | TGCCATTGAGGGTTTTTATT | DQGKVGQSLNQDQYMNSSSW |
| | | | | | ACTATTAATTTTGTTTACTC | MSSGSYILFCDWRFIHRARL |
| | | | | | TTTGTAACTTGTTTGATTGA | NTLPTNATAQRWKPNTSPAC |
| | | | | | ATATTTTAATAAACCAC | RRCQHPQETLPHILNHCPPN |
| | | | | | (SEQ ID NO: 1313) | MVPIRRRHNLVQQRIVSAVR |
| | | | | | | HGRVFVDQHVPEDPNPRERP |
| | | | | | | DITVVEGDKVTIIDVCCPFD |
| | | | | | | NGRDALMTAAAAKETKYADL |
| | | | | | | KQALVAAGKDVEVFGFAVGS |
| | | | | | | LGSWLPSNERALRRLGIAKR |
| | | | | | | FRTLMRKLLRIDAIKGSRDV |
| | | | | | | YIEHMCGHRQYT |
| | | | | | | (SEQ ID NO: 1435) |
| NeSL | Utopia- | — | Phytophthora | AGACGAGCAACGCGCTGGGG | TGAAGCTGCACAAGCGCGAG | MDVDGGPAMPEPWVLRFDGA |
| | 1_PS | | sojae | CCCAAGACCTGGCACGAACG | GCTCGACAGCTGGACCTTCA | CRRNPGPGGAGAALFKPCGT |
| | | | | ACACTGCCCAGGCTGTGAAC | GCTGTCGAGCCACTGCATCC | VAWTCSHYMPNSSETNNTAE |
| | | | | GACGAGCACGCTGCTAACCC | GCGCCAGCCACCGCACCTGG | YTALLLGVQSAVHHGASHLE |
| | | | | GGCAGCGCACCGGCCTCTGG | GGCTGGTACTGCCGGCGCCA | IEGDSHLVVAQVKGTFACRN |
| | | | | GCTCCGCTGCACCGGTTACC | CCGCGAAGGACAACGGAGCG | PRLRQLRNRVRHALRAVTSL |
| | | | | GGTGCAACACGGTGGGGTCC | GCAACGCCTCGCGAGCGCCG | TLKHIDRKANAHADRLANRA |
| | | | | ACGTCACGGCGCGATCGGGG | CGTGGGTCTGGGGGGGGCCC | LDLKRSLAECGEHQGAMESC |
| | | | | CAGCGGCTGTAGCTCGCCTG | GCGGCGCACATCGCAGGCTC | LHMNPAAQRQREQPAPPARP |
| | | | | CTCACAGGCCTACCCACGGC | GGGCACGGCGGTAAGCTGGT | ACAPTRAESASDHDEDIDAE |
| | | | | ACCAGCACCAGCTACGCGCC | CATTTGACCAACAGGGCACT | IAARDGGEAFPTLPIGPGTA |
| | | | | GGCCTGCTTCGGCTCGGCGC | ACCCAGGTAGGGAACCGCCC | PARQPRLRLRQLTEDEQEAA |
| | | | | TGCCCAGACCCGCCCGCTCC | TTCAAAAACCCAGGAAGACA | ASALQAMAEELACKIEDADS |
| | | | | CCCCGCGGCCACGACGACAG | CAAACACCCTCCCTTTAGTG | WTSGDGYISAIPSRIRQLLQ |
| | | | | CCCCCGATGCG | ACATGCATATTTTAGCCTAC | PFTAAQPHPRPPLQQQRQRP |
| | | | | (SEQ ID NO: 1191) | ATTTCAGTTACGGAGAGGTT | PRVTRTQREHRLDEALDEMA |
| | | | | | ACTAACTGGTAAACACGAAC | AVQQERPTSRSAVRRARRRV |
| | | | | | ACACAT | GRIRASMRQQQLRHDFARNE |
| | | | | | (SEQ ID NO: 1314) | SKCVEDILRAASAETAAEEH |
| | | | | | | PETCPIDSGTLHEHFTAVNS |
| | | | | | | PRINFLPDEACGALFREAMA |
| | | | | | | DVGTPQERRSALTDELTMDE |
| | | | | | | VEDQLMQAATNSSPGHDGVG |
| | | | | | | YDIYKKFAAQLVPLLHAAFQ |
| | | | | | | SCWRHHRVPALWKVGFVRLI |
| | | | | | | HKKGDPNDPANWRPICLQTA |
| | | | | | | IYKLYSGLLARRLSAYLEAN |
| | | | | | | GLLLMAQKGFRAYNGCHEHN |
| | | | | | | FVATTLLDQTRRMRRRLYQV |
| | | | | | | WYDLRNAFGSVHQDMLWYVL |
| | | | | | | RLLGVERAFVERCDDIYEDS |
| | | | | | | YFVVGNAADGATEPVRQEVG |
| | | | | | | VYQGCPLSPLLFIAALVPLL |
| | | | | | | RALEKLDGVGVALADGVRPC |
| | | | | | | TTAYADDLKVFSDSAAGITR |
| | | | | | | CHAVVEKFLEWTVLOANPGK |
| | | | | | | CAFLAVTRNARGNPAHDKDM |
| | | | | | | KLSLHDEEVSSIKLHDSYRY |
| | | | | | | LGVGDGFDHVRHRLQLEPKL |
| | | | | | | QQIKREAVALMQSGLAPWQV |
| | | | | | | VKALKTYVYPKVEYALRHLR |
| | | | | | | PLQSQLQGFDRVVAKGLRHL |
| | | | | | | LRLPRSATNEVLYAPTSSGG |
| | | | | | | LGLQPLVEMHRALQIAHAWQ |
| | | | | | | MLHSKDPAIREVARAQVWQV |
| | | | | | | ARKRHRLREEHWRERDDELV |
| | | | | | | RCFLNSELAASPHAEALRRH |
| | | | | | | GDIGSLWSDVQRWLRIYHLS |
| | | | | | | LVVQDDRNGLDPLGLRVPHH |
| | | | | | | AKWLDHKSVLRHVKLHLKIR |
| | | | | | | HQTRWKGLADQGKTVRAHGG |
| | | | | | | VGAKFMSTWAGLSDDDYRFG |
| | | | | | | VKARLNQIDTNAVLKRKRLR |
| | | | | | | SHKTCRDPTCSSAETLAHVL |
| | | | | | | NHCESNMDAIRQRHDDALEQ |
| | | | | | | IGSKIRNALKRGKSTAELRL |
| | | | | | | NQTVPEYTGAALRPDIVLRI |
| | | | | | | VAAKKMVIADLAVTFEEHAA |
| | | | | | | GARHSSLQLSHDHKTLKYQP |
| | | | | | | IVAELQLKGWQVQTAAIVYG |
| | | | | | | SLGSVQPSNSTPTRKS |
| | | | | | | (SEQ ID NO: 1436) |
| NeSL | Utopia- | ADOS01001 | Pythium | GCGGTGTACGCGCACAACGC | TGATGCGGGTCATATTGACC | MGTQSARERGAPSAPHSHTL |
| | 1_PU | 321 | ultimum | CGCGCTCTTCGAGTGCACGT | GAAAGGGCACCATCCACGTA | GPRTPPRPPACSKHGELESA |
| | | | | TGTGCGCGCACACCGCGCGG | GGACACCGCCCTCAAAAACC | AGGRDGQCSDGAERERDAER |
| | | | | GATCTCGCCGCGCTCCAGCA | CAGTTCAGTTTATTGACACC | DIRANERDCNGDGDGDDADS |
| | | | | GCATCGGCGCTCCGCGCACC | CTCCACTTAGTGACATGCAT | DSDDRNDARRRSRRPRATAT |
| | | | | GCAGCGTCCGCTTTGTGGAT | ATTCAAACCGATACATATTC | TTTSAPTTTTTTTTSATTSA |
| | | | | CACTTCCACAGCGGATGCGC | GTTAGGAGAGGTTACTAACT | TTPATDSSPWVLRFDGACRR |
| | | | | GTGCGGCGTGAGCTTCCACT | GGTAATATATCACCATTTC | NPGPGGAGAALFEPGGAVVW |
| | | | | CGCGTGCGGCGGCAACCAAG | (SEQ ID NO: 1315) | TVSHYLPGSETNNTAEYSAM |
| | | | | CACGCGCGCGAATGTCCAGA | | LLGVRSAIHHGATRLRVEGD |
| | | | | GAGCGCGTTCTCGGTCGCCG | | SHLALSQVRGTFACTNRRLR |
| | | | | CCGCCGCGCGCACTGCAGCG | | KLRNRVQAALRELGDYRLVH |
| | | | | GCCAACACCGCAGGTATGTC | | IDRQANAHADRLANRALDLR |
| | | | | TCTCGGCGCCGACGAACGCG | | KTKVDCGPHATTTDACVQPA |
| | | | | ACCACCTCGCGTCCGTCGGC | | EILAPTARLSSSSSSSSSSS |
| | | | | GCCTTGCATGATGTTGCATC | | SDEPMPGLEEPAADDETDAD |
| | | | | CCCCGCTTTTGGCAACATTT | | AEADIAMRDGGEIFPTLQIG |
| | | | | TGCCGGTTGCGTTTGCGACC | | PGSAPAQQPRLRLRQLSDDE |
| | | | | GCGGCAGACGCATCAAGCGC | | SEAAARTLEHFANDMASKIA |
| | | | | CACCGTGATCGCAGACGCAG | | DADDWRSGEGYISAIPVRLR |
| | | | | CCATGCAGCACAGTGCTGTG | | ELLAPYAVPIRSPPRNASSR |
| | | | | CCCTCTGCTGCCGCCCAATC | | PPRPQSRPPRPPRVTRHQRE |
| | | | | CCCTCGGCGTGCGCACGTCC | | HRLDEALDDLAAAQRSTSTD |
| | | | | CCCCCGTGCCGCGCGCCACC | | QRSIRNARRRVGRIRTAQAQ |
| | | | | ACGACACCATCCGCGCTGCG | | SDLRSQFATNERACVESILR |
| | | | | GATTGGTGGCAAACGCCGCC | | AAKPDGTEPQASAGTCPIDR |
| | | | | GCCTGAACGACGACGGCGAC | | ATLHAHFAGVNTPRERFDFD |
| | | | | AACGAAAACAGCGACGGCCG | | DALGADFRAALDVLPPPDQA |
| | | | | CGACGCCGACATCGAGATGC | | ADAFADELSLGEVEDQLDRV |
| | | | | GCGCCGACGACACCGACGCA | | VASSSPGLDGVGYDVFKRFR |
| | | | | CCAGCGCCGACCAACCCCGC | | LQLLPLLHAAYQCCWRHRRV |
| | | | | GACCAGTGCGGCTGCAACGC | | PATWKVGLVRLLHKKGDRAE |
| | | | | CCGCGCGCACAGCACCAGCA | | PNNWRPICLQQAIYKVYSGL |
| | | | | CCAACGGATGCCGCGACCGC | | LARRLSRWLEANERFTTAQK |
| | | | | GCGCCGCCGCCACACGCG | | GFREFNGCHEHNFVASSLLD |
| | | | | (SEQ ID NO: 1192) | | QTRRLHRKLYAVWYDLRNAF |
| | | | | | | GSMPQPLMWRVLARLGVDTA |
| | | | | | | FLQRCEDIYADSFFVVGNAA |
| | | | | | | DGATDPVRQEVGVYQGCPLS |
| | | | | | | PLLFISALIPLLRALQRLPG |
| | | | | | | VGVPLADGVRPCTTAYADDL |
| | | | | | | KVFSDSAAGIQQCHGTVARF |
| | | | | | | LRWTGLRANASKCALLPVTT |
| | | | | | | TARGNPAIDDTLQLELHGDA |
| | | | | | | IARLTLQSSYAYLGVGDGFD |
| | | | | | | HVQHRVQLAPKLAELKRDAV |
| | | | | | | ALLRSGLAPWQVLKAIKVYL |
| | | | | | | YPRIEYALRHLRPLQSQLEG |
| | | | | | | FDRAVAKGFRHLLRLPANAT |
| | | | | | | NELLYAPVSSGGLGLLPLVE |
| | | | | | | LHKALQIAHGWQMLHSKDAA |
| | | | | | | VQAIARAQVRQVVQKRYTLD |
| | | | | | | ADHWQGRDDELVQLFLNSEL |
| | | | | | | AASPHATIKRRNGDIGSLWS |
| | | | | | | DVQRHLKTLQLRLETREPTA |
| | | | | | | DAPDSPNGLLHLRVPHHRKW |
| | | | | | | LSHKTVLRHMKLHIRLCHKH |
| | | | | | | KWQSMSDQGRTVRAHGQAGS |
| | | | | | | HFVSRGVGLWDADYRFALQA |
| | | | | | | RLNQLDTNSTLKRRRQRTNA |
| | | | | | | TCRAPNCSRTETLAHVLNHC |
| | | | | | | ETNMDVIRQRHDGALEQIGA |
| | | | | | | AINAAIKGRRTDTEVRLNQT |
| | | | | | | VPEFNGPAWRPDIQVRDARS |
| | | | | | | KTMVIADLAITFEDQPNDQS |
| | | | | | | ASSSLQHSREHKIAKYQPIA |
| | | | | | | AALERQGWRVHTSAIVYGSL |
| | | | | | | RSVHPSNFTVYTELLGLLKR |
| | | | | | | DARRLNTTLSCHCIRSSRRV |
| | | | | | | WNWHCGQHRARQHQRCQEGR |
| | | | | | | AHGSGGNQRAEGGTATT |
| | | | | | | (SEQ ID NO: 1437) |
| NeSL | Utopia- | — | Strigamia | GGAGTGTTCTTTTCGGAGAC | TGATGGGAGAGTGAGGAATC | MATVRLKYPYPPEGILCGPC |
| | 1_SM | | maritima | GCCGCCTACTTTAGAGGAGA | TTCTCCACTGTGCAAAACCA | AANTNAPQTRPYSDKSGLAK |
| | | | | GAATCCCCACGGGCATCCTC | TACAGTCAGAAGATGCTAAC | HLKLYHKATLWECRHCGHEE |
| | | | | ATTTGATCTGATCCATCGAG | TACTAGTTTGATACCCTGTG | SDLRKMKKHISTNHPVAAAA |
| | | | | TATCTGCGAATAGTCGGCGC | CCCCCTGCAATGTCCCGCGT | APTVPPRLGPTAPPPPRVIL |
| | | | | ACTCCTTTTGCCATGATCCC | GTCGTACCCAAGCCCGGCTG | RPRFIPRPRTPSPSSSSSSA |
| | | | | GGGGGTCTCATGGTAAAAAG | GCATTGAGACACATTAGGCT | SSPASSRRSVSLPPASPPVS |
| | | | | GTTTGTGGCACGGCTTAGTT | CTCGCTCCCCCGTATACTCT | SASSPAARSGRNSPDSQGTA |
| | | | | GACGCCCCTCTTCCACGTCA | CATAATTTCGTGTACGCTAA | PVTPIGTVRNSPAGSPALSY |
| | | | | CTCGGCCTGCATCGATCGAC | TCCTACCCTACCCCTCCCTT | STASPIASTITTPRHLSPAS |
| | | | | TGCTCTCTCCTCTTCCTCCC | TGACCACTCACCCAACCATG | PALSAGPGSLGASPPVSPTA |
| | | | | TCCCTCCTCTTCACGCTCTC | TGTATAGCTGTGCTGGTGAT | ATVPPAPPATVPAVMAATVP |
| | | | | TTCACGTGACCCCTTCCCAT | CCCGGGGCGGTTATTCACTG | FVAATTVPSVGSSTVPQRPA |
| | | | | CCCGCCCCTCGGCTTTTGGC | GTTATCATATCATTCTAAAA | GPRRPPPFPIDDWIGRIARV |
| | | | | AAAGATCTGTGTGTCCTCCA | TGATCTTTGATCTCTCAATT | SSLPELDAVSRLLEDEWKRR |
| | | | | AAGCACCCATCTACCATTTG | AACAACTAACTTATTTCTGT | PPDPNARPASLHPTRRPPPP |
| | | | | CTCGAGTTGCGATTGGTCGA | TTGTTTCATTGTTTCACCTC | STRPRPCHGTGGTSVSLAAL |
| | | | | AGCTGCCACGCCACTCGTCT | GTAAGAGGAAGTTCATTGTG | TSSCIREDHRGSLPLLCTSG |
| | | | | ACTCTGCCTCTCTGACCCCT | CGATAAATCAA | WDSPWPLSPSPSSHCPSSNP |
| | | | | TCCCCCCTCTCTCCCTCTGC | (SEQ ID NO: 1316) | CPSSSTPPSSLLGPPRHSHL |
| | | | | CGCCCTCGCCTCTCGGGTCC | | TWRGSGSTTPSHRHCSRARY |
| | | | | CTTCCCATCTCCCTCCTCCC | | HHLLWRLPYPSSPRLPYPPS |
| | | | | ATCCACGTGCTCCCTCCTCT | | ALARYPSVPPALDDPLPSLS |
| | | | | CGTCACGTGATCGTTGCGGC | | TIGSEGSPECHLCRNWTPSQ |
| | | | | TCGAC | | GCSRMKWSRDAPLTPTPDPP |
| | | | | (SEQ ID NO: 1193) | | HSIRHAALPLHLLALVPAMG |
| | | | | | | PAELQSLWRRSRPRAFAKIT |
| | | | | | | EGASPFCALPVGTVHGHFLQ |
| | | | | | | VHQATAHLPTPVPLPPLRPP |
| | | | | | | RSSDPLVTPISPGEVLDRLR |
| | | | | | | RATDTAPGPDTIIYSEWRAI |
| | | | | | | DPTGRLLSSLFQKVQTFGAP |
| | | | | | | TRWKESTTTLIHKGGDHTAM |
| | | | | | | SSWRPIALLSTVAKIYGSIL |
| | | | | | | SHRLTTWAVQNGRLSLSQKG |
| | | | | | | FLPFRGCLDQNYLVQSCLQD |
| | | | | | | ARRNKKTLSLAFLDLKNAFG |
| | | | | | | SIPHLTIRHSLEWLGLAPSS |
| | | | | | | IDILEASFLGSSTRVRTETG |
| | | | | | | LTPPISLDTGWQGAPLSPIL |
| | | | | | | FNLAIEPLLRTVPSAHSGFS |
| | | | | | | LHGHWSWAYADDLAILAPST |
| | | | | | | PALQSQLDAISGMADWAGLS |
| | | | | | | FNPAKCATVTLTGKDNSRDT |
| | | | | | | LSLQGSPVPSISDGDAYKHL |
| | | | | | | GVPTGTTTFPSGTDAIKKMT |
| | | | | | | TDLQAIDHSDLAPAQKLDAL |
| | | | | | | RTFIMPQLSFHLSHGSVPKA |
| | | | | | | PLTQLDKKIKRAAKHWLFLP |
| | | | | | | QRASNEILYMSHLHGGQSLL |
| | | | | | | PLSVLADIGQVTHAVALLQS |
| | | | | | | RDPAVADLALRTCREVASKR |
| | | | | | | AKKTVNGPELAQYLSGSTDG |
| | | | | | | IYCTPTSDIPSLWTTARAAT |
| | | | | | | RRLSSTLPLTWTSPLPSGVP |
| | | | | | | FLSINGSPLSPFRVQSTLTN |
| | | | | | | AIRHNHLSTLIAKRDQGNSY |
| | | | | | | RTSHDPDPSNYWVKGGDFLR |
| | | | | | | FCDWRFIHRARLNLLPVNGA |
| | | | | | | RRWDANSIKTCRRCGAPNET |
| | | | | | | LAHVLNVCPVGLPEMKKRHD |
| | | | | | | AIHARIKKALRPSPHTWHHD |
| | | | | | | RTVPGCGPLRPDILRISERD |
| | | | | | | KSVAIVDIHVPFDNGTDAVE |
| | | | | | | RAHETKRAKYELIRRHYEHQ |
| | | | | | | GYRVTFDSLVVTALGRLWRG |
| | | | | | | SEAALQALQISSQYSKLLRK |
| | | | | | | LLVADAIHGSRNVYAHHMTG |
| | | | | | | MVM |
| | | | | | | (SEQ ID NO: 1438) |
| NeSL | Utopia- | AAGJ0 | Strongy | AAGGCTCAAACCAGGCTGCC | TGACGAAATGTTCAATATAT | MSHSITEVFDYPLPSRWKCT |
| | 1_SP | 21405 | locentrotus | AACCAAGCTGCCAGCTTAGG | GACATTCTAATGTTCATGTA | VCLENFFNQQTLKRHQARHH |
| | | 37 | purpuratus | CACCAACCAAGCTGCCAGTC | TTTTTTGTTTGCTTGACAAA | QTTSFLYVFRCSACQAEFDS |
| | | | | CAGGCTCCAACCAGGCTGCC | GCTAGATGAATATATTCCCT | ARKASNHWQSHKRKPILSQP |
| | | | | CACCAATCTGCCAGCTTAGG | GTCCTACTACATACATCTCG | AVNEIPSSGLDPSPPRSRPP |
| | | | | CTCCAACCAAGCTGCCCACC | ATGTGCCCTTGCTAGACGAT | VEVIGSSFPDDVSMLSEPST |
| | | | | TAGCTGCCAGCTTAGGCACC | CCATTGGTAACCATGATATC | PSTSLQMDPEVVHPPSRSIS |
| | | | | AACCAAGCTGCCAGCCGAGG | AATGGATTAACACATGATCT | FSPMHLSPTQPASPIQIGVE |
| | | | | ATCCAACCAGGCTGCCCACC | GTAAACAATATATGATTTAC | VSFNSSSSLQMDPEVVQPPS |
| | | | | TAGCTGCCAGCTTAGGCTCC | ACAATGTATTTATTGTTTCA | PSISFSPMHLSPTQPASPIQ |
| | | | | AACCAAGCCGCCAGCCCAGG | ATAAATCTGTTCTTTTCACT | IGVEVSFNSSGSLQMDPEVV |
| | | | | CTCCAACCAGGTTGCCACCC | TTAATACATGAAACATGACT | QPPSPSISFSPMHLSPTQPV |
| | | | | GAAAGTCTGCCAGTTTAGGC | GTGCCTTCTCCAACTGGAGA | SPIQIGIEVSFTSSSPLQMD |
| | | | | ACCAACCAAGCTGCCAGCCG | CCTACATAATTTGTTAAAAT | PEVVQPPSPSMSYSPMHLSL |
| | | | | AGGCTCCAACCAGGCTGCCA | GATATAAATATTTCGAAGAT | TQPDSPIPVDIDVIPAAEVP |
| | | | | CTCGAGGCTCCAACCAGGCT | GAAATTATTATTAATAA | LPDIEIPPSPDRHPAAEVPL |
| | | | | TTCACCCGAAGCATTACCCA | (SEQ ID NO: 1317) | PDIEIPPSPDRHPVAEVPLP |
| | | | | GGCTGCCCGTTTAGGCACAA | | DIEIPPSPDRHPQSPPRPVM |
| | | | | ACCAGGCTGCCAGCCGAGGC | | MEQPVHTPPPADTQQANGPQ |
| | | | | TCCAACCAAGCAACCAGCCC | | HWVTVLANATNWEDFGRVCV |
| | | | | AGGTTCCAATCAAGCTGCCA | | EFANHAVEAARSRQDAPQVR |
| | | | | GCCGAGGCTCCAAGTAAGCT | | PAAQRQPRRPTRPRQPTFDV |
| | | | | GCCAGCCGAGGCTCCAACCA | | REASRLQKLYKRSKKRAVRH |
| | | | | GGCTGCCACTCGAGGCTCCA | | ILRDDAPSFSGSNEQLLDYF |
| | | | | ACCAGGCTTTCACCCGAAGC | | KEIYAPPEIDENRAQQLAES |
| | | | | ATTACCCAGGCTGCCCGTTT | | LFTDLEEAKESAAALMSPIS |
| | | | | AGGCACAAACCAAGCTGCCA | | QQEISTRLSRMSNSAPGKDR |
| | | | | GCCGAGGCTCCAACCAAGCA | | LEYRHIRQADGACRVTHIMF |
| | | | | ACCAGCCCAGGTTCCAATCA | | NRCLQEHRIPSAWKEATTIL |
| | | | | AGCTGCCAGCCGAGGCTCCA | | IHKSGTTDDPANFRPIALQS |
| | | | | ACCAAGCTGCCAGCCGAGGC | | CLYKLFMGILSDRMTQWACN |
| | | | | TCCAACCAGGCTGCCCACCA | | HNLLSPEQKSARPCEGCHEH |
| | | | | AGCTGCCAACTTAGGCTCCA | | TFLLSSVIKDTKRNQKTANI |
| | | | | ACCAAGCTGCCAGCCCAGGC | | AWLDLRNAFGSIPHQAIHAV |
| | | | | TCCAACCAGGTTGCCACCCG | | LTTIGAPVSLVMLLKDTYTG |
| | | | | AATCTCTGCCAGTTTAGGCA | | ASTSFLSTSGETDPIQIQSG |
| | | | | CCAACCAAGCTGCCAGCCTA | | VKQGCPMSAILFNLTIELII |
| | | | | GGCTCCAACCAGGCTGCCAC | | RAVKKKATDDGLGLVVHGQR |
| | | | | TCGAGGCTCCAACCAGGCTT | | LSIMAYADDLVLMSKTPEGL |
| | | | | TCACCCGAAGCATCACCCAG | | DAILSVASEQAETLRLAFKP |
| | | | | GCTGCCCTTTTAGGCACAAA | | TKCASLSLSCRHGTSVLPRE |
| | | | | TCAAGCTGCCAGCCGAGGCT | | YTVQGHLMPALDEEEQYRYL |
| | | | | CCAACCAAGCAACCAGCCCA | | GVPFGLPRFTNLKDLIGKLK |
| | | | | GGTTCCAATGAAGCTACCAG | | GNIETIASSLLAPWQKLDAI |
| | | | | CCGAGGCTCCAACCAAGCTG | | KTFVQPGLSFVLRAADYLKS |
| | | | | TCAGCCGAGGCTCCAACCAG | | DLRSLKSAITTNVKKICQLP |
| | | | | GCTGCCCACCAAGCTGCCAG | | LRAANAYIFAAKESGGLAFI |
| | | | | CTTAGGTACCAACCAAGCTG | | DPNVDADIQVITQAVRVLSS |
| | | | | CCAGCCCAGGCTCCAACCAG | | DDEVVQTIATSQLKSVVHRT |
| | | | | GTTGCCACCCGAAACTCTGC | | IHAVPTEEDIDNYLSGSNEG |
| | | | | CAGTTTAGGCACCAACCAAG | | LLANSGNSGQASSLWSRTRS |
| | | | | CTGCCAGCCGAGGCTCCAAC | | AARRLHLTLRATTSGTVVVN |
| | | | | CAGGCTGCCACTCGAGGCTC | | QQADIDHTRDILPASITRGL |
| | | | | CAACCAGGCTTTCACCCCAA | | RLIQRTTNAEKLKSLPDQGK |
| | | | | GCATCAACCAGGCTGCCCGT | | VARSLSNDPFANGSSWHATG |
| | | | | TTAGGCACAAACCAAGCTGC | | KFIRFCDWRFIHRARLNCLP |
| | | | | CAGCCGAGGCTCCAACCAGG | | TNVATKRWKANANGKNGHQQ |
| | | | | CCTCCAACCAAGCTACCAGC | | ETLPHVLNHCLPNMVPIRRR |
| | | | | CGAAGCTCTGCCAGATTAGG | | HDNIQQRLVTAIRHGDVFVN |
| | | | | CACCAACCAAGCTGCCACCG | | QHVPGDPNPRERPDITVIEG |
| | | | | TTAGAGGCCCAGAGCCCACC | | NKVTVIDISVPFDNGPNACT |
| | | | | AATCCCATAACGTGTGAGAT | | TAAQAKVEKYSALRQALRDM |
| | | | | ATGTGAAGCTTCCTTCCACA | | GRDVEVHGFIVGALGTWHQG |
| | | | | CCTCCGCCGGTCTCCGTCGC | | NERALGRLGVSRWYRTLMRK |
| | | | | CACACGGCCAGGCTTCATCG | | LCCIDAIQASRDIWVEHVTG |
| | | | | CACCACTGCTGAACACACTG | | HRQYE |
| | | | | ACGACAGC | | (SEQ ID NO: 1439) |
| | | | | (SEQ ID NO: 1194) | | |
| NeSL | Utopia- | — | Trichinella | TTTCTGGTATGAATCCCAAG | TGATCCGTCCCGAACCAACG | MCSAKTPALKSGRRRGKEVN |
| | 1_TSP | | spiralis | CGGATTCGTTACGAAATTTG | GAACCACATTGCCGCATGAC | YEGQIVRVERRRGSRSSTSA |
| | | | | CATAAGTTTTTGAAAAAATA | TTCGATTTCGCTTTTGCTCT | TDLGTRMVTRGRKKLMEASV |
| | | | | GGCATTTGGTCGAGTGCTCG | TTTTGTATTTAATTTTGCTA | REAGHHGGESASTVDVDVVE |
| | | | | CACCACCATTTGTCGCGGGT | TTAACAATTCAGTTTGTTAA | SKKITGKTARRNRRAPSGDG |
| | | | | CGTCCTGATATTGCACTACA | CTGTTTTGTATTCATTTGAA | KRRESCGAECGQAVCGNAVA |
| | | | | TTCAGGAACGGCCTATTCCC | GATCCAAATAAAAC | DRSEASSPRTPNVSKSGRDK |
| | | | | TTCGGGGAATTGTGTTTTAG | (SEQ ID NO: 1318) | CGQPTIKASTPSPPKRKPTT |
| | | | | GAATTGGAATCGGTTTGGTT | | SSSPRTPCLSKRGARSKIPS |
| | | | | ACGATCGGTCGAGTGGTTCG | | TPDTPSTSGGSGKQRVLVSP |
| | | | | TGAGATCGAGTGACAGCCGG | | LLRTEKLPDLEVLQRTEEQV |
| | | | | GTGGCAGCGACA | | TVRATFPIAQAVVCPLGCEK |
| | | | | (SEQ ID NO: 1195) | | PYTAVRPDGQFAHQTLTRHF |
| | | | | | | MRVHNCHSVQWHYRCRNCNT |
| | | | | | | DFLPADHRYPLRVVNTHVRS |
| | | | | | | CVSRWEITRKLGESEDLHGV |
| | | | | | | RCDLCDYVGVSKRAVGLHRR |
| | | | | | | RHANENIMQNTGTAAQIEAL |
| | | | | | | SKQVGEIRVAGDYSQFKFGK |
| | | | | | | RVRQYVAPTQRRDGLDEEEV |
| | | | | | | HEAEEEEVPAESRTILGEPS |
| | | | | | | TATAIGAEEISATGPVRADT |
| | | | | | | AAQQMICRIGQWCVWPQDYH |
| | | | | | | SIPAPQCWTDTLMDLMIEQI |
| | | | | | | VLQRYPDGAGVSVMSCSAVS |
| | | | | | | AAIHHEISAEFAAQVMSSHD |
| | | | | | | ASLYCIIPVNVRNHWQMIVL |
| | | | | | | DVAERVVHYYCSLREHNTVV |
| | | | | | | LSSLLSLVELSGKHTGCTSW |
| | | | | | | KIETHDGAPVQTNAFDCGPF |
| | | | | | | SCLFLKHLLHGIDMNFGDRE |
| | | | | | | SAALRTDLKFMIDAVSTPVV |
| | | | | | | PATDKLKKKPDGSATQLTQF |
| | | | | | | QQKFLSASDNWQSPDVDLQA |
| | | | | | | VYDEVVESIVSGHNEPSSRN |
| | | | | | | TSRLQKKSPGKGGKGQVRRR |
| | | | | | | SAVTRDPAWLKSASAVQKAF |
| | | | | | | NSAPARTVNAILRRPNACPS |
| | | | | | | FTATQVADHYFNLRPAVTSL |
| | | | | | | APEVIDILPPPATDHSMLVA |
| | | | | | | ELSESEVWEKMQKAPNSAPG |
| | | | | | | ADRITIRMVRMADPGAMILT |
| | | | | | | RFYRACLLRKWVPLQWKQSV |
| | | | | | | CKLLYKDGDKERLANWRPIA |
| | | | | | | LEPVLQRVLSAVVASRVTNW |
| | | | | | | ARANGLISLEAQKGFQPADG |
| | | | | | | TSEHNFVMEVAIQEARRTNA |
| | | | | | | QLAISWLDISNAFGTVSHQL |
| | | | | | | LFSLLERYGLDPTFTSFIQN |
| | | | | | | LYKDATIVVKGANGTHVTAR |
| | | | | | | WSVGVRQGDPCSGILFCLFV |
| | | | | | | EPLLRSVLPSLPCEAETTAV |
| | | | | | | NVLGQPITALAYADDIALFA |
| | | | | | | PSIGVMQQQLCKIQGMASAM |
| | | | | | | GFRFNPKKCASLYLNRAVVN |
| | | | | | | AATFTISGEEIPALVHGDTF |
| | | | | | | RYLGVAAGLGKPQTPFSLLR |
| | | | | | | ENLREAELIFRSKLAPWQKM |
| | | | | | | DAYRTYVLPRLTFQLMIAKF |
| | | | | | | NNIKQSAGQYDRAILRLVKR |
| | | | | | | CFQLPVETSTDFIRAPRQCG |
| | | | | | | GLGVPSLRELYATAKVSRAL |
| | | | | | | KMLWSPCRVVSSLAASQLQR |
| | | | | | | VASAYFAKRLRDVEAADLST |
| | | | | | | FMNAARSTPLDRSGYPTCLW |
| | | | | | | MDARKQMSYLTKVAGVDCYF |
| | | | | | | LVGEAGTSFFIRNGLGQTVS |
| | | | | | | VLSPLRKNKVMSVLGGAIQT |
| | | | | | | RHLDAWLQCKRQGKTASCIV |
| | | | | | | LDRSSSRFITTGRYTSFAAM |
| | | | | | | RFALPARLDLLPCRARSSMR |
| | | | | | | SYQNCRRCGYDRETLPHILQ |
| | | | | | | HCRQFSAPAYQARHDAVQGR |
| | | | | | | LETVMRRRFPNLRVNRALPE |
| | | | | | | IGSNKRPDLVVVDEEKRLVI |
| | | | | | | LLDIAIVFENTAAAFVDART |
| | | | | | | RKWAHYEKEILAYRLRGYSV |
| | | | | | | TYDAIVVGALGTWDPKNDAI |
| | | | | | | LKRIGVVSQRYLRLMKVLVV |
| | | | | | | SEMLEHSSRIYRKHLGLRDL |
| | | | | | | LPDTGTKRRPVGTTETDPPG |
| | | | | | | GDLRQKKRNTISARASGGKC |
| | | | | | | LERRFTSPVGTPSQRGELQC |
| | | | | | | QPCPGPRRPALAGIAPNPPS |
| | | | | | | LQPRKPPPRQHQKPVTKSTA |
| | | | | | | H |
| | | | | | | (SEQ ID NO: 1440) |
| NeSL | Utopia- | — | Chelonia | GGCAGAAACTGCACSTTCTA | TGAGCTGGAGTGCCGATGAG | MLQLRLPTPQTLRLLHPSQL |
| | 2_CMy | | mydas | GAAGACTCACTGCCTATCCT | AAGCGCAGTCGGGAAAGTAA | PQSHSTKRWSNIYEERARAP |
| | | | | GAGGAAGACTACCGCTTTGG | CTGAAATACTTTCCTCATGG | KDTTIERVSAASKIPKLDPA |
| | | | | AGATGGATTCTACTGCCGCT | ATTGTATTTTCTAAATGGAC | KRRIGAPLQLMQGNSISRQL |
| | | | | GCTTCAAAAGAAAATCTTCA | AACCTACCTAATTCTCAATT | SASSQYVQHNAWRRVSAPPH |
| | | | | TGCTGCTTCGGAGGCTCCAG | ACTGAGGGACAATCTCCACT | TGNFTGSCRRKLALPHRPPS |
| | | | | GACAGASTGAGAAGATGATC | CATTGATATATTTTGCTT | ETQPAESYLHCWTTQRDPTL |
| | | | | GCTCCCTCGCCGATTCCACA | TCCACAACCAAATCTC | ADQHGLQDHPTGLPPEGSHC |
| | | | | GAAACCTTCAACTGCCGCTC | TGTACAACTTTTCATGAGTG | IKDPRQNSSTEGQRRSGNSQ |
| | | | | GGACCGCTGCTGCTCCACGG | ATGTACCCGAGTACTTGGAT | ARRIPKRASTAASKTVLPKR |
| | | | | AGCGCCCATCGGGGAACAGC | TCTAATATCTAAACTGTATT | TSAALKSVREDTALVLEDPA |
| | | | | CTCTAAGAGACCCTCAGCGC | GTTAAATCTATTCACCTAAA | KWSSQHREGXRQQANPTAVF |
| | | | | TTCCAGGACATCGCAGATGA | TTTGGGTTATTGCTGATTAT | QPEPAEIEQQPXVRAATPWQ |
| | | | | GCAGCATCGATTGGAAAAGC | GTACTCTATGTATCATATGA | AAWMEELARTASFXDFDLLV |
| | | | | AGCGCCTCCCTGAAGAAAAC | CTTTTAAAAACAAACTTTGT | DRLTKDLSAEIVSGRKGTQE |
| | | | | CCGTGGAGATGCTGCTGCAG | ATTTGTGGATAATCTAAGCA | NTPTAHRQNQNNMREARRRN |
| | | | | GGAWATCTTGCACCTCGAGG | CTATACCCAGATGTACAGAC | ISRCYDPAAASRIQKLYRSN |
| | | | | ACGGCCTCCCAGGACATCGC | ACTCTTTTCCCAACCTATGT | RPKAMREILDGPSSYCAIPS |
| | | | | AGCCAGGACAAACATCATCT | ATTATATTTTTTTAACATTA | ERLFLYFKGVFDRVAQNDMQ |
| | | | | CGCCTGCTCTTCAGGASAAG | GCTTTAATAAAATTTTTAAA | RPECLXPXPRVDYAEDXEQD |
| | | | | GATGCCMSAAGAACTTMTCC | (SEQ ID NO: 1319) | FTSWEVEARLTKTKNTAPGK |
| | | | | CACCTCCTCMACTGCCCAGG | | DGIRYNFLKKRDPGCLVLTA |
| | | | | ATCCTSATGCTGGTCGTCGT | | IFNKCKQFRRTPSSWKKSMM |
| | | | | CCTGCTGTGCTGGAAGMKAC | | VLVYKKGKQDNPNTRRPISL |
| | | | | CCCAACTGGCGAGACCTCAG | | CSTMYKLYASCLAARITDWS |
| | | | | AAACCACCCAGMWGGACCKC | | VNGGAISSIQKGFMSCKGCY |
| | | | | AACATCTCACTAGATGCCTG | | EHNFVLQTAIHMARRAWRQC |
| | | | | CCCAGCCGAACCTCTCCATG | | AIAWLDLANAFGSMPHQHIF |
| | | | | CWACTCTCCCAGAGCAACSA | | DMLREFGMPENFLQLVRELY |
| | | | | GAACCATCCAGMGAATCCGC | | EGCTTTICSMEGETPEIPIR |
| | | | | TGATATGACTGAAGCCMATC | | SGVKQGCPLSPIVFNLAMEP |
| | | | | CAACAGAGGGAGAAGGAAAG | | LIRAISSGLGGFDLYDNRVN |
| | | | | GAGAATGACTGCATCTATCT | | ILAYADDLVLIADNPESLQQ |
| | | | | CCAGTATCCCCTCCCTACGG | | MLDITSQAANWMGLRFNARK |
| | | | | ACACGCTCCTCTKCCCCTTC | | CASLHIDGSRRDSVQATSFQ |
| | | | | CGCTATCCGAGGGTTCCAGT | | IQGEPMIFLEDGQAYQHLGT |
| | | | | ACATTGGCAGTCTCAGCAMA | | PTGFRVQQTPEDTIAEILRD |
| | | | | CACCTCAAGAGAATCCATAS | | VARIDSSLLAPWQKINALNT |
| | | | | CAAGCGGATCACCTTCCGGT | | FLIPRISFVLRGSAMVKVPL |
| | | | | GTGCCCTCTSCGACCTGCCT | | NKADNTIRQLVKKWMFLPQR |
| | | | | TTCGAGACGCAGATGAAATG | | ASNELVYISHRQGGANVPRM |
| | | | | TAAGTCTCATCAAGTCACCT | | GDLCDVAVITHAFRLLTCPD |
| | | | | GCAAAGGACATCTCGAACTG | | AMVRNIAESALQDAVKKRIA |
| | | | | GAAGAGTCCAACTTTACCAG | | RTPSNQDVATYLSGSLEGEF |
| | | | | TCTATGTTGCCGCCACCCCA | | GRDGGDFASLWTRARNATRR |
| | | | | TCTCTGCTCCGAAAGCAGAA | | LEKRIGCHWTWCEERQELGV |
| | | | | ACACCAC | | LVPQVKNTDHTIITPRARTM |
| | | | | (SEQ ID NO: 1196) | | LERTLKDAIRCQYVENLKRK |
| | | | | | | PDQGKAFEVTCKWDASNHFL |
| | | | | | | PGGSFTRFADWRFIHRARLN |
| | | | | | | CVPLNGAVRHGNRDKRCRKC |
| | | | | | | GYANETLPHVLCSCKPHSRA |
| | | | | | | WQLRHNAIQDRLARAIPPPV |
| | | | | | | GKVAVNSAIPGTDSQLRPDI |
| | | | | | | VITNEDRKKIIMVDVTVPFE |
| | | | | | | NRTPAFHDARARKVEKYAPL |
| | | | | | | AETLRAKGYQVQTHALIVGA |
| | | | | | | LGAWDPSNERVLRECGIGQR |
| | | | | | | YARLMRQLMVSDAIRWSRDI |
| | | | | | | YIEHITGHRQYQEG |
| | | | | | | (SEQ ID NO: 1441) |
| NeSL | Utopia- | — | Phytophthora | ACCGCCCAAGTCTCCACCGC | TAAGCTGGTCATTTGACCGA | MQDMEEELLLDVEMETETTE |
| | 2_PCa | | capsici | AGCTGCGACTGCTGCTGCTC | CAGGGCACTACCCAGGTAGG | PQTSTAXDATTTTDRPTRWG |
| | | | | ATCGAGCCGCAGTAGTCGCA | GAACCGCCCTTCAGAAACCC | PHPRAVAAAAIAQLVTGEXA |
| | | | | GCTGTACAAGCACCACCTCC | AGGAAGACACAAACACCCTC | XPALPSRQDRRPAPRSHAPT |
| | | | | TACCGGACGCGCCGTCGTGG | CCTTTAGTGACATACATATT | RSRWGPRHQAVGAAAIASLA |
| | | | | AGCACCACGCGCGCGCTGAG | TTAGGCTACATTTCAGTTAC | TGLPASAAPVSRATKHGEGR |
| | | | | CCGCNTCAAGACCAAGAATT | GGAGAGGTTACTAACTGGTA | RRLQTRWGPRVSIPRAARRP |
| | | | | CCAGGCTCGCGCGCGCGTGG | AATAAAAAGCACTTT | GSRWGPPRAAGASGQLPASA |
| | | | | CGCTTCAAGATGGCGACGCG | (SEQ ID NO: 1320) | SGATGOLPEHVEAITTTPRV |
| | | | | ACCAGCAGGAGTGGCCGCTC | | ASDADEGPTPPDPWILRFDG |
| | | | | TACTGACGGCGGAGACGAGG | | ACRRNPGPGGAGAALFKPSG |
| | | | | CCAAGACCGAGGACAGCGAC | | AVVWTCSHYMPSSNETNNTA |
| | | | | GCGGACGCAGCCAAGCGCCA | | EYTALLLGVQSAVHHGATRL |
| | | | | AGCCGCTCAAGCAGCACCGA | | DIEGDSSLVIAQVKGTFACR |
| | | | | GACCCCATACCCMGGACACC | | NAKLRQLRNRVRHALRSVEK |
| | | | | GCGCCGTACGACGGCCACAG | | YTLRHIDRKANAHADRLANR |
| | | | | GGACTCGGTGCTGGCTGTGT | | ALDRRSSSSECEPHGSCMER |
| | | | | ACGCACACAACGCACCTGCA | | CCGTDTTPAVQGPTPQAAAA |
| | | | | TTCACCTGCGCGTTGTGTGT | | VPVQVWPQWQRQTMVAWTTS |
| | | | | GTACACAGCACGCAACTTCG | | HGGRCRDCSTRCGRSLPSLA |
| | | | | CCGAGCTGACCAAGCATCGC | | HRPRLSPRRQPRLRLRQLSD |
| | | | | CATGCAGCGCATCGTCACAC | | EERDXAADALQELSDVMASK |
| | | | | CCGCTTCGTGGATCACTTCC | | IVDADSWDTGEGYISSIPER |
| | | | | ACAGCGGGTGCACGTGTGGC | | IREVLQPYTTRPPRPGHQQQ |
| | | | | ATCGGCTTCCAGTCGCGCGC | | QRRRPPRVTRNQREHRLDEA |
| | | | | GGCAGCTACGCGACACGCTC | | LDDMQATQQAAPRDQRAIHR |
| | | | | AAGCCTGTGCAGACAGCACA | | ARRRVGRVRASMAKQELRQA |
| | | | | CACGCCACCGTAGCTGCCTC | | FAKDESKCVSKILAGASAET |
| | | | | GCGCGACCCGGCMNCCASTG | | AAEEHVDECPIDAATLHAHF |
| | | | | CSSCCSGNGCCGGMAGCGAS | | TGTNAPRTDFDYDAACGQEF |
| | | | | GAGGAGGACCNCGCACCCCC | | RGALDSMQPPTVATDAFEEE |
| | | | | CGGTCCTCTSSTCGCGGCAG | | LTIDEVEDQLTRAAKTSSPG |
| | | | | CATCTGCAGCTGCAGCAGCC | | HDGIGYDIYSRFAAQLVPLL |
| | | | | GCATCAAGCGCCACTCCAGC | | HAAYQFCWLHRRVPALWKLG |
| | | | | TGCAGATACTGCCACCACGC | | IVRLIHKKGDPMQPTNWRPI |
| | | | | AGAGCGCCGTGCCCATCGCT | | CLQPAIYKIYSGLLARRLSR |
| | | | | ACTCCTGGGCCCCAGTACGC | | WMEQNQRLPMAQKGFRAFNG |
| | | | | CCCCCACGTGCTGGAGCCAC | | CHEHNFVATTLLDQTRRSHR |
| | | | | CTCCAGAGCTCCGAGTTTCC | | RLYQVWYDLRNAFGSLPQQL |
| | | | | GGCAAACGCCGMCGCCTCAA | | MWSVLRHLGVDASFIARCKN |
| | | | | CACGCCGATCGACCTGCAGC | | IYQDSAFVVANAVDGATDPV |
| | | | | CGCTGGACGTGGACGCGCTG | | RQEVGVYQGCPLSPLLFISA |
| | | | | (SEQ ID NO: 1197) | | LVPLIRRLEKLDGVGVPLAE |
| | | | | | | GVRPCATAYADDIKVFSDSA |
| | | | | | | AGIRKCHDAVTRFLEWTGLR |
| | | | | | | ANPGKCASLAVTTNARGNPV |
| | | | | | | RDDGVHLELQGEVIAPLSLH |
| | | | | | | DSYRYLGVGDGFDHVRHRLQ |
| | | | | | | LEPKLQQIKREAVALMQSGL |
| | | | | | | AGWQVVKALKTFVYPKVEYA |
| | | | | | | LRHLRPLQSQLQGFDRAVVR |
| | | | | | | GLRHLLRLPQSATTEFFYTP |
| | | | | | | TSGGGLGLQSLVEMHQALQV |
| | | | | | | AHAWQMLHSKDAAVVAVAKE |
| | | | | | | QVCQVARKRYRLQEEHWRGR |
| | | | | | | GDELVRLFLNSELAASPFAD |
| | | | | | | CLRRNGDIGSLWTDVQRTLR |
| | | | | | | LHHLSLTAQDDRDGQDPLAL |
| | | | | | | RVPHHTKWLDHKTVLRHVKL |
| | | | | | | HMKIRHQTRWKGLVDQGKTV |
| | | | | | | RVHGGLGAKFVSTGAGLSDD |
| | | | | | | AYRFGVKARLNQVDTNAVLK |
| | | | | | | RKRLRSSKTCRDPTCSSAET |
| | | | | | | LAHALNHCASNMDAIRQRHD |
| | | | | | | DALEQIGSKIRGALERAKST |
| | | | | | | TELRLNQTVPEYTGAALRPD |
| | | | | | | IVLRNVAAKKMVIADLAVTF |
| | | | | | | EDHAAGARHSSLQLSHDHKT |
| | | | | | | LKYQPIVAELRVQGWQVQTA |
| | | | | | | AIVYGSLGSVQPSNFKTYTE |
| | | | | | | KLKLHKREARQLDLQLSSHC |
| | | | | | | IQASHRIWGWHCRRHREGQR |
| | | | | | | SGNTSRASRGSGGTPRRTSQ |
| | | | | | | VRARR |
| | | | | | | (SEQ ID NO: 1442) |
| NeSL | Utopia- | — | Phytophthora | GCTCGGCCTCGCGGCTGCCT | TAGGCGGAAACCAGGCCCAA | MLADPAALAAGLARAPPPPS |
| | 2_PI | | infestans | TCCCAGGCGCCGCCGACTTC | GACGGCCGACAGGGCCCCAC | APQDPSPAFPAGPAGQNPRA |
| | | | | GCGCTCTGGCGCGGCCCACA | CCAGGTAGGGAACCGCCCTA | AAPARVEVHTVVAPPGRAGG |
| | | | | CGCCGCCGCCGAGCCTCCAA | GAAACCCATTTCGGTGGTCG | MLPDPGLVDSSPAAATAATP |
| | | | | GCGCGCCCGTTGGCTTCCGC | ACTCGAAGGCCTTACCTATT | APVAATATTARAAARVAVEH |
| | | | | AGACGCAGGGCTCGCGGCGA | TTTTCCTTAGACATTCAATT | HAHAEPNQEHLPMARVLVEP |
| | | | | CGGCCCTCGCCAGCCCCCAA | AGGTAGCGACCAAATTACAA | MQVDECSSCDRSTLTADDGS |
| | | | | GACCCCCCCTACGATGTGGC | ATTTGGTAACGAGTAAGCCA | GDDVAAPSSMLSNDVAAPMD |
| | | | | ACCACCCGGCAGGGCGGCCG | AATGGTAATACACAAAACTT | VDSGTSCPPTLQQPLQRPRA |
| | | | | GCAGGCTGCCCGACTCGGTA | TTCTGTTCTAATCAGTGTGA | LHVGSKRRRLDADDGEEAHQ |
| | | | | TCGCCGGGTGCTACACTCTC | AAACTGGTTTTCGCCTTTTG | LQEEEEAGIHAPALRLSAAS |
| | | | | AGCCGCCACAGCTCGGGCCT | GCGGACTTTTTCACTCGCAT | AQPASVLAVYTHNASRFDCT |
| | | | | TGGCGGTCCGCCATTGGCCC | TTTTGGGCAATCGTCTGCGG | LCAYTAGSFASLLTHRNSRH |
| | | | | TTGGAGCTCGACAGCGACAG | CTAGCTTGCTAGCGGCGGAC | RRTAFLDRFSAGCACGVPFA |
| | | | | CAGCGACGACGAGGACGCTC | GAGCGGTCTCCGGGGGCGTT | SRLAAARHAQACASLSSAPS |
| | | | | AAGACCCCCACGCCGCCGCC | CACCTTTCCCCCGCGAGGCC | AEASSAAGTSSPTADGADST |
| | | | | CCAGGACCCCCCGCAGACGT | AACTACACCGATCTTCTCTA | VSAVAHAEPGLPHHNDTELT |
| | | | | CGCGAGTGTGCTTGCCCCAC | CACTTTTCTAATTCGCCTCC | ASPPLVSSSDVEVQATKTEA |
| | | | | CCGGCAAGGCAGGCAGC | GTCTTCGGTCTTCGGCTGTC | TDNRWGAPLPRVLVASRIAG |
| | | | | (SEQ ID NO: 1198) | GGATTTTTTTCTTTTTGACC | RLAQVPPPRWGPPLPRTTIA |
| | | | | | AATCAGAGCGCGCCATGCGA | ARIATRLAATPAPRWDPPLP |
| | | | | | CTCTTCTGGCCAATCAGAGA | RSLVVSRIAARLLPALPDAP |
| | | | | | CCGGGCCCTGTCCTCGGACA | ACEEEAKDSDTMDWAPTWTN |
| | | | | | GCGAGGCCTCCACGGCCAGC | EETKESEPHDEAPGQVDEET |
| | | | | | CAATCAAGTCTCGGCAGCGA | IDDADGEWLLRFDGACRANP |
| | | | | | CGCGTCTTTCTATAGCGCAG | GPGGAGAALFKPSGPVVWTC |
| | | | | | CTGACGAGGCCGATCTGGCG | SHYDPSTTATNNTAEYTALL |
| | | | | | GCCCCCGATTGGTCCGACTT | LGARAAADHGVTKLRIEGDS |
| | | | | | TCGGCCAATCAGCGACGACG | TLVIQQVRGIFATRSTRLRA |
| | | | | | AGGGGGCAGGGGTTTACACT | LRNKVKLELARVGSFSLHHI |
| | | | | | TTTGCCCCCGTTTCGACTTC | DRQANGHADRLANAGLDRRR |
| | | | | | AACTTCAGGCCAAAATGGCG | TKLECSVHPDGRGCTNTSVA |
| | | | | | ATTTCGACCCTCCACGCGCC | TAAPTAPAAPLPSARPPAST |
| | | | | | GTGCCACTGCTCGGCACCGG | AAPSPDDDHSDQGDIDDGEV |
| | | | | | CGGCGATTCAGCGGGTGCAA | YAAMCISPDAVPHRRPRLRL |
| | | | | | CTTCGGGCACGTGTGCAACA | RRLTDEESEEAGNVVERLAA |
| | | | | | CATGCAGCGCCCATTGCACG | SLAAKIADAPDWETAEGYIT |
| | | | | | CCAAGCGGCATCGCGGGACG | ALPYALYDKLQPYSQSQHQP |
| | | | | | ACGCCTCGGCCGCTCAAGCG | PRQQQQQQRQRPRQQQQTRQ |
| | | | | | CAGCCCCGCCCTTCCAGCAC | RRQRRCKRGGGSQHRQRKTR |
| | | | | | GACCTCGCGCCGTTTGGCGG | RRRPPRVTRHHREHRIDEAL |
| | | | | | ATCGCCATCAAGACGTGCGA | DDLHALESRRPQDRTAISKA |
| | | | | | GAGCCAGGCGGGGTCGGGCA | RRRVGRIRSALDQHQLRHRF |
| | | | | | AAATATACTTACTCTAAGTA | DTDEKACVDGILAAARDKDR |
| | | | | | TGCCCGAATCCCTGCCCTCT | AASVTTTAQTAAPPHSAPAS |
| | | | | | CAGGCTGAACGCGGCCCCAT | APSSAVDDGICPIPGDLLHA |
| | | | | | ACTTGATCTAAGTATGGGAG | FFTDVNTPRTEFDADSPIGA |
| | | | | | GGATCCCTGGCCTCTCAGGC | RFREALAQLPAAIAATELLM |
| | | | | | TGTACGCGAGACCCGTACGG | EPPSPDEVEDQLQRVRGTSS |
| | | | | | CCGAATCCCCTGGCCTCTCA | PGLDGVGYDVYKTFTQQLLP |
| | | | | | GCCTGTACGCGGGGC | ALHAAFSRCWTDQRVPQSWK |
| | | | | | (SEQ ID NO: 1321) | LGVVRLLFKKGDRQDPANWR |
| | | | | | | PICLQQAVYKLYAGILAHRF |
| | | | | | | TRWLDANTRHADAQKGFRAV |
| | | | | | | NGCGEHNFLAATLTDNARRR |
| | | | | | | RRELHVVWYDIKNAFGSVPH |
| | | | | | | ELLWEVLRRMGVPAQFIACC |
| | | | | | | QGIYDAAAFTVGNAADGTTA |
| | | | | | | PIQLRLGVFQGCPLSPHLFT |
| | | | | | | AVISPLLHALKRLPGTGVQL |
| | | | | | | SAVDRPGASAYADDLKVFSD |
| | | | | | | TKDGITRQHQLVTDFLRWTG |
| | | | | | | MVANPSKCSTMSVQRDNRGV |
| | | | | | | LKTANLTLQLDGAQIPALGM |
| | | | | | | TEAYAYLGIGDGFDHVRRRV |
| | | | | | | ELAPKLRELKADTTALMQSG |
| | | | | | | LAPWQVVKALKVYIYPRVEY |
| | | | | | | ALRHLRPFQQQLQGFDRHLA |
| | | | | | | RGLRHLLRLPTSATTEFLYA |
| | | | | | | PTSRGGLGLLPLTEVHGALQ |
| | | | | | | IAHAWQTLHSPDPAIRRIAR |
| | | | | | | VQLRQVADARHRLDAEHWKE |
| | | | | | | RGEELCERLLNSQLGTSAHA |
| | | | | | | PPKRRNCDIGSLWVDVQRHL |
| | | | | | | RSLGLQLQTAPADTHTGAPA |
| | | | | | | QPLQLRVPHHDKWLTHKDVL |
| | | | | | | RHVKLHIKNNHWHRWTSMRD |
| | | | | | | QGKTARAHGGEGSGFLTQPR |
| | | | | | | GMWEADYRFAVAGRLNQVDT |
| | | | | | | YSVLKRRRLRSHDRCRQPGC |
| | | | | | | HRAETLAHVLNHCPGTMDAV |
| | | | | | | RGRHDGALKRIERELHASAT |
| | | | | | | DRRDRVELRVNQTVPSLAGP |
| | | | | | | ALRPDLQLYNHTKKTVAVVD |
| | | | | | | LAVAFEEQASDDASSSALSL |
| | | | | | | IASHKRAKYDRIKRHLERQG |
| | | | | | | WKVHLSALVYGSLGAVASGN |
| | | | | | | YQVYTTHLGLLKRDAKRLDR |
| | | | | | | QLSVECIQSSRRIWNLHCSQ |
| | | | | | | HRTRQHQARPSQGPRGSRAT |
| | | | | | | ETGGTPSQTSRR |
| | | | | | | (SEQ ID NO: 1443) |
| NeSL | Utopia- | — | Phytophthora | TCAAGCCCCGCCGCCAAGCC | TGAGCACCTTGGGTTGCTCA | MSGDVVSSDGSSRTTDASGD |
| | 2_PR | | ramorum | CAGCTGCGGCTGTTGCCGCC | AGCGTGATGCGAAGCGGCTG | GDDGAGSSDAAGDVGVVAMD |
| | | | | CCTCCAGCAGCAGCAGTCGC | GACCGGCAGCTCTCGGTGGC | VDQGARRQQPPWQRVGGKRR |
| | | | | AGCTGAACCTACAGCCCCTC | GTGCATCCAGTCCAGCCGCC | RLNDVDDEDTRELAELLLEE |
| | | | | CTGCTGATCGCGCCGCCGTG | GCATCTGGAACCTGCACTGC | EDEAGDHAPAPRLSAASARP |
| | | | | GAGCCCCGCGCGCGCGCCGA | AGCCAGCACCGCGCGCGCCA | ASVLSVYAHNAQRFQCTLCT |
| | | | | GCCGCCCCAAGAACAAGCAC | GCACCAAGCACCAGGGGGAA | YTAASFASLKRHRDSRHRRT |
| | | | | CCCCAGCTAGCGCGCGCGTG | GTCGGGCGGCGGAGACCGGG | AFLDRFSAGCACGAPFASRL |
| | | | | GAGCCC | GGGACTCCGCCGCGCACCGG | AAANHAHACASLNRTLSVAA |
| | | | | (SEQ ID NO: 1199) | CCGCCGCTAGACGGCACACA | TPAAGELSPTAGAANATVKA |
| | | | | | GGCCCACAGCGGCCGACAGG | ATVTPDSPRQDPPELAASPP |
| | | | | | GCCACACCCAGGTAGGGAAC | LASSPDVAVQAADMQAPTRW |
| | | | | | CGCCCTCAAACCCCGCCGGT | DPPLPRTLVATRVASRLTDL |
| | | | | | ACATTATGGTCCGACACCTA | TPPRWGPPLPRATVVSRIAA |
| | | | | | TGAGGTGCAACCTGTACACA | RLEAAPTPRWGPPLPRVVVA |
| | | | | | AGTTACACACCACATAGCGA | SRIAERLAPPELAADDETKD |
| | | | | | CTACCAGGTATTTACTACCT | GEEDQSFTEPVAAARSXGGE |
| | | | | | GGAAGCCAAGGATTAACCGG | DANGEWLLRFDGACRANPGP |
| | | | | | TCGGTAATACACATAACTTT | GGAGAALFKPSGPVVWTCSH |
| | | | | | (SEQ ID NO: 1322) | YMPSSSETNNTAEYTALLLG |
| | | | | | | MRAAADHGATRVHVEGDSTL |
| | | | | | | VIQQVRGIFATRSTRLRGLR |
| | | | | | | KSVKAEMARMEHVTLHHIDR |
| | | | | | | QANGHADRLANAALDRRKTK |
| | | | | | | LECGLHPDGQGCSSTAATTA |
| | | | | | | VPSVVPDRPPSSTAAAPTPS |
| | | | | | | AEPDETEQGDIDDGEVYAAM |
| | | | | | | CIGPDSIPERRPRLRLRQLS |
| | | | | | | ETEEEEAGAIVERLAATLAG |
| | | | | | | KITDASDWATAEGYITALPY |
| | | | | | | TLYDKLQPFAQHRHQPRPQH |
| | | | | | | RQQPQRDPPLGTHDGDHGQP |
| | | | | | | STSRSRRRRRRAKDRLRRRP |
| | | | | | | PRITRHHREHRLDEALDDLR |
| | | | | | | AVEHASPHDRPAVARARRRV |
| | | | | | | GRVNSAIAQQQLRHKFDKDE |
| | | | | | | KACVDGILAAARASRGLATP |
| | | | | | | SASASRHPPPVPSTAADDGS |
| | | | | | | CPIPSDELHAFFTAVNTPAG |
| | | | | | | TFEPMAPVGAPFRSAVAHLP |
| | | | | | | AATSQPELLSDAPTTDDIED |
| | | | | | | QLQRARGSSSPGLDGVGYDI |
| | | | | | | YKAFAAQLLPALHAAFACCW |
| | | | | | | RHKQVPQSWKVGVVRLLFKK |
| | | | | | | GERTEPANWRPICLQQAIYK |
| | | | | | | LYAGVLARRLTRWLDANGRH |
| | | | | | | ADTQKGFRAMNGCGEHNFLA |
| | | | | | | ATLVDQARRKRRELHVVWYD |
| | | | | | | FANAFGSVPHDLLWEALERQ |
| | | | | | | GVPSPFIACCRGLYADAVFT |
| | | | | | | VGNAADGTTAPIALRVGVFQ |
| | | | | | | GCPLSPHLFTAAIAPLLHAL |
| | | | | | | KRLPDTGVQLSRVDCLGASA |
| | | | | | | YADDLKIFSGTEGGTKRQHA |
| | | | | | | LVADFLRWTGMRANPAKCCT |
| | | | | | | MSVQRDTRGVLKACNLGLQL |
| | | | | | | DGAPIPALTMSASYAYLGIG |
| | | | | | | DGFDHVRRRIELAPKLQELK |
| | | | | | | HDATALLQSGLAPWQVVKAV |
| | | | | | | KVYLYPRVEYALRHLRPFHQ |
| | | | | | | QLEGFDRHLVRGLRHLLRLP |
| | | | | | | ANATTAFFYAPVSRGGLGLL |
| | | | | | | PLTELHAALQVAHGWQMLNS |
| | | | | | | KDPAIRRIARVQLRQIADAR |
| | | | | | | HRIDAQAWQDREEELAQLLL |
| | | | | | | NSQLGASTGAPPKRRNGDIG |
| | | | | | | SLWVDVQRHLRHLSLKLETA |
| | | | | | | PACAETGTAAAMLQLRVPHH |
| | | | | | | DKWLDHKTVLRHVKLHYKNK |
| | | | | | | HWARWAAMXDQGKTARTHGG |
| | | | | | | AGSGFLTRPRGMWEADYRFA |
| | | | | | | VAARLNQLDTHSVLKRRRLR |
| | | | | | | XHDRCRQPGCTQGGDAGARA |
| | | | | | | QPLRRHHGRGPRPPRRRPQA |
| | | | | | | HRARAARVVAGRPGPRRAPG |
| | | | | | | QPDGAVARRPRATARPPAVQ |
| | | | | | | PHQEDGGGGRPGRGVRGAGE |
| | | | | | | RRPGELGAGTHRRTQAREVC |
| | | | | | | RRQATPRAPRVEGPPLGARV |
| | | | | | | RLARRGAGRQPQGAY |
| | | | | | | (SEQ ID NO: 1444) |
| NeSL | Utopia- | — | Pythium | TGACTGGTGTTTGATCACGA | TAAGCGGGGGGTCCAGACCC | MDYDDSEFFDAICIPDEDAD |
| | 2_PU | | ultimum | TCAATGAGGTGATTAACATG | CACAAGAGAGAAGCAGGAAT | VLDDGDEGDEGGNDDESSEP |
| | | | | AGCCGGAGCAGGCCCCTTAC | CATGGTCCGCATGGACCAGT | LPLAITNAPSAPLHATMLCG |
| | | | | ACGCTGGTGCTGTAATGGTT | AGGGCACGCTCCACAAAGGT | TVTQPWLLRFDGACRRNPGP |
| | | | | CAGGAATGCTCTTATGAGTA | TATCGCCCTCAAACCCATCA | AGAGATLTRPNGIILWTHYR |
| | | | | ACTCCACAGTATAATTTTTG | CACGAAGGATCTAAAAAGAA | YIPDKTATNNVAEYEALLDG |
| | | | | TTAGCGGGGGTGAGCGCGTG | AGCAACAATCGAAATAGTAA | LRCAAHHGVKHLRIEGDSNL |
| | | | | CGCCGCCCCCACCTTTCTCT | ATAGTAAATAGCTTAGAAAG | VIEQVKGIFACSTSLRPRRD |
| | | | | TTTCGTTTGTATTTGGTTCC | GTCAACATGCGAAATGCATG | QVREILRHFETYSFRHIDRA |
| | | | | TCTGGAGCGACTTCCGTGGC | AGGAACGTAAGATGGTAATA | LNRQADRLANQALDLLKTVS |
| | | | | TTTTGTCGCGCGCTATCGCG | CATTTTTATA | VCALSQTRVQDDTGAAHGCW |
| | | | | CCCGGCATGAGGATCGTCGC | (SEQ ID NO: 1323) | HWTPPDASPTDDASTSILTQ |
| | | | | TCCTGACGCCATGTGCGCCA | | DVPVPMDIDDYDPDEPMNAA |
| | | | | GTATATCGGAGCCCCGTGCT | | DDPVSINAEREGGTVYPVLR |
| | | | | CCGCTTGGGTGTGTGTTCCG | | LGPNVVPERQKRLQIPWLPP |
| | | | | CCACGACGCCACGCGATTTG | | REMQKLEKKIEVLGETFASR |
| | | | | CGTGCACGGCATGCGCTGGC | | IRDAPDWFSAEGYITALTSE |
| | | | | GACTTCCGCTCAGTGCGCGA | | LATLIRQSTAATTGPNAARP |
| | | | | ACTCGCGGTGCATCGTCGAC | | CERTISKEKRRARRTTPLQR |
| | | | | GTGCGCACCGGTCTCTGGCC | | ALAEAKHELQIIQPDASRKS |
| | | | | TTCCAGGACTGGTATGAGTC | | VRKAARRVKRISQAQQRHDL |
| | | | | GTCGTGCGCGTGCAGAGCGC | | RRLFSTNERRCVEKILRDPP |
| | | | | TCTTCACCGCCCGTCTCGAC | | VGPSSTSSSLPATDDDRCTI |
| | | | | GCGTTCGTTCATTCGAGCCG | | DPADLFAYFQTQATAPTNFD |
| | | | | TTGCGACCACAATGCGAACC | | FDDEGGELFRSVLDELPRAD |
| | | | | AATCAGCGAACGCCGTCCCC | | QEVHLLEDEITRDEIEDQLS |
| | | | | TCGTCCGCCGCCTCGACAAC | | RISKSTAPGLDGITNAVYVR |
| | | | | GAGAGCGGACGCGGATGCGA | | FKLQLLDALQAAFNACWRYN |
| | | | | CGGCCCCCCCTCCCGCTATC | | RVPSMWKAAFVRLIYKKGNR |
| | | | | TCTCTTCCGCGGACGGGCTT | | AVPSNWRPICLQQTVYKLYT |
| | | | | CCCCCGCCCCTGTCCTAGTT | | AILASRLQRWMDANARFTMS |
| | | | | GCGCCGCTCTCCTTCTGGAT | | QKGFRAFNGCHEHNFVATCL |
| | | | | GCGGCAACTTGGACGACCCA | | HDQTRRLRKKLAIVWYDLRN |
| | | | | CGTGCACGCG | | AFGSLPHEYLWRVLARLGMP |
| | | | | TGCGCTGCCGCCAGTGCGAC | | PQFVARVRQLYADASFTVES |
| | | | | GGCGTTGATCCAGCGTCATC | | RDGTTDPVQLERGVYQGCPL |
| | | | | TACACGCCGTTCCTCCCGTA | | SPYLFIAALIPLVRALHKLK |
| | | | | TCGACAGCAACCGATCTCAA | | DQHGIVLAPGVTDCVSAYAD |
| | | | | CGGCGATGATAGCCAACCTC | | DIKIFARSGTGAKALHEIVV |
| | | | | CAGACCCGCGTGCCAACATC | | RFLSWTNMAANPAKCALMVT |
| | | | | CAACAGCTTCCAGCCATCCA | | DGARGGDDTDASMTLSIEGE |
| | | | | TTCGACAACGACAACGACAA | | TIPRLTGKEGYVYLGVEDGL |
| | | | | CGACAACGACGACGACCCGC | | AHERRATCLRDSLKAASADV |
| | | | | TGCTCGACGACGTGCTC | | VRLLRSDLAPWQIVRAIKSH |
| | | | | (SEQ ID NO: 1200) | | VLSRFDYVLRHLRPFLSLFD |
| | | | | | | GFDKMLVRGIKRLCQLPQTA |
| | | | | | | TSEFLFSPTSAGGLGFLPLK |
| | | | | | | ELFAALQIVHALQMLHSKDA |
| | | | | | | NVRAIARHQALQVVRKRYAL |
| | | | | | | QSDHWSDREEELLEEFFNGT |
| | | | | | | LERSPFALAKKVSGDIASLW |
| | | | | | | TDVRVNLTKYGLKFGEAHGR |
| | | | | | | RLQPLVSHTDKQLAPQQWAS |
| | | | | | | AIKTHMRLRHLKRWTTLVDQ |
| | | | | | | GKTARMHERIGSAFLTRPSG |
| | | | | | | VYDASYAFAVRARLNQVDTR |
| | | | | | | SALKRKRIVNNSRCRVSGCS |
| | | | | | | ELETLAHVLNHCRFGSDSIR |
| | | | | | | ARHAETLLLIKTTMERELTR |
| | | | | | | PGRQHQRLLVDATVPEARDP |
| | | | | | | VPSNDAAESNIGAMAPSISH |
| | | | | | | LRPDIQLYDNKTMEAVIIDL |
| | | | | | | AVAFEDQSTDDAASSSSFAR |
| | | | | | | VKGVKTKKYEVIKQFLEYKG |
| | | | | | | YTVHVAALVYGSLGSVDTGN |
| | | | | | | FAVYTERLGLRKGAVRRLEC |
| | | | | | | SLSARHINFAHRMWRRHAIA |
| | | | | | | HTTGLRLIGTNSVQQQGVQR |
| | | | | | | APAEKQQHQRPVQRPSRAQA |
| | | | | | | PRDQPSQQQQSQQSFQQQSQ |
| | | | | | | QSQQSQQSQQSQQSRQRHAP |
| | | | | | | TPTPVPVPVPVPVSTPTLTP |
| | | | | | | TPTPTRRPKPAPSSTQPQQG |
| | | | | | | APAQRRQQREQKKQPACRRR |
| | | | | | | HATAVRETPPAAPTAARTAT |
| | | | | | | PTARPTATTRSTSTTRSTAT |
| | | | | | | ATSTTRSSAPTSRPSAPRPR |
| | | | | | | SSAPRPRSSAPTTRSAAPTT |
| | | | | | | RSAAPTAIATTSVYKSRRTT |
| | | | | | | NAISGATTRRSASSKRAPMQ |
| | | | | | | PRTALTPTQQQQRQ |
| | | | | | | (SEQ ID NO: 1445) |
| NeSL | Utopia- | — | Phytophthora | GTACGGCCGAATCCCTGGCC | TAGACGGCAAAGTTCTGGCC | MPRSLASEPVHSSASRLPSQ |
| | 3_PI | | infesta | TCTCAGCCTGTACGCGGGGC | CGCGTAGGCCGAAAGGGCCC | APPTSRSGAAHTPPPSLQAR |
| | | | | TATACTTGGTCTAAGT | CGCCCAGGTAGGGTAACGCC | PLASADAGLAATALASPQDP |
| | | | | (SEQ ID NO: 1201) | CTCGGGAAAACCATTCTGGT | PYDVAPPGRAAGRLPDSVSP |
| | | | | | GTTTGGCTGTTTTTCAACAG | GATLSAATARALAVRHWPLE |
| | | | | | TCGAACTTCAACTCGGAGCA | LDSDSSDDEDAQDPHAAAPG |
| | | | | | TATCAGATACACTTACTCAC | PPADVASVLAPPGRAGSMLA |
| | | | | | ACATTTAGATATCAGATAGG | DPAALAAGLARAPPPPSAPQ |
| | | | | | GAACCTTTATTAGGGAGATA | DPSPALPAGPAGQNPRAAAP |
| | | | | | ACGGGTACACCGGATGGTAA | ARVEVHTVVAPPGRAGGMLP |
| | | | | | ATATACAAAACCTTCTCTGT | DPGLVDSSPAAATAATPAPV |
| | | | | | TCTAATCAGTGTGAAAACTG | AATATTARVAVEHHAHAEPN |
| | | | | | GTTTTCGCCTTTTGGCGGAC | QEHLPMARVLVEPMQVDECS |
| | | | | | TTTTTCACTCGCATTTTTGG | SCDRSTLTADDGSGDDVAAP |
| | | | | | GCAATCGTCTGCGGCTAGCT | SSMLSNDVAAPMDVDSGTSC |
| | | | | | TGCTAGCGGCGGACGAGCGG | PPTLQQPLQRPRALHVGSKR |
| | | | | | TCTCCGGGGGCGTTCACCTT | RRLNADDGEEAHQLQEEEEA |
| | | | | | TCCCCCGCGAGGCCAACTAC | GIHAPALRLSAASAQPASVL |
| | | | | | ACCGATCTTCTCTACACTTT | AVYTHNASRFDCTLCAYTAG |
| | | | | | TCTAATTCGCCTCCGTCTTC | SFASLKTHRNSRHRRTAFLD |
| | | | | | GGTCTTCGGTTGTCGGGCTT | RFSAGCACGVPFASRLAAAR |
| | | | | | TTTTCTTTTTGACCAATCAG | HAQACASLSSAPLAEASSAA |
| | | | | | AGCGCGCCATGCGACTCTTC | GASSHTVDGADSTVSAAGHA |
| | | | | | TGGCCAATCAGAGACCGGGC | EPDLPRHNATELTASPPLVS |
| | | | | | CCTGTCCTCGGACAGCGAGG | STDVEVQATETEATENRWGT |
| | | | | | CCTCCACGGCCAGCCAATCA | PLPRVLVASRIAGRLAQVPP |
| | | | | | AGTCTCGGCAGCGACGCGTC | PRWGPPLPRTTIAGRIATRL |
| | | | | | TTTCTATAGCGCAGCTGACG | AATPAPRWSPPLPRSLVASR |
| | | | | | AGGCCGATCTGGCGGCCCCC | IAGRLLPALPDAPACEDEAK |
| | | | | | GATTGGTCCGACTTTCGGCC | DSDEMDWEASEPHVEAPGPV |
| | | | | | AATCAGCGACGACGAGGGGG | DEETIDDADGEWLLRFDGAC |
| | | | | | CAGGGGTTTACACTTTTGCC | RANPGPGGAGAALFKPSGPV |
| | | | | | CCCGTTTCGGCTTCAACTTC | VWTCSHYDPSTTATNNTAEY |
| | | | | | AGGCCAAAATGGCGATTTGG | TALLLGARAAADHGVTKLRV |
| | | | | | ACCCTCCACGCGCCGTGCCA | EGDSTLVIQQVRGIFATRST |
| | | | | | CTGCTCGGCACCGGCGGCGA | RLRALRNKVKLELARVGSFS |
| | | | | | TTCAGCGGGTGCAACTTCGG | LHHIDRQANGHADRLANAGL |
| | | | | | GCACGTGTGCAACACATGCA | DRRRTQLECSVHPDGRGCTN |
| | | | | | GCGCCCATTGCACGCCAAGC | TSVATAAPTASAAPSTPTRP |
| | | | | | GGCATCGCGGGACGACGCCT | PATTAAPFHSDQGHIDEDDE |
| | | | | | CGGCCGCTCAAGCGCAGCCC | RRADIDDGEIYAPMTLGPDE |
| | | | | | CGCCCTTCCAGCACGACCTC | VPARRPRLRLRQLSDEELEA |
| | | | | | GCGCCGTTTGGCGGATCGCC | AGAIVERLSASLSAKITDAE |
| | | | | | ATCAAGACGTGCGAGAGCCA | DWGTAEGYITALPHLLYDKL |
| | | | | | GGCGGGGTCGGGCAAAATAT | LPYSRTAPRHQRPPRPSRNQ |
| | | | | | ACTTACTCTAAGTATGCCCG | QDHPQPRRDQPQRNVDEQQH |
| | | | | | AATCCCTGCCCTCTCAGGCT | AESQQGEDQRQQQPPTRRRR |
| | | | | | GTACGCGGCCCCATACTTGA | RRGKRRGRRQRRHPRQPGQS |
| | | | | | CCTAAGTATGGGAGGATCCC | TRASQQSRQRRPRPPRVTRH |
| | | | | | TGGCCTCTCAGGCTGTACGC | HREHRIDEALDELHTLERAR |
| | | | | | GRGGACCAAGTACAGCCGAA | PQDRSAIDKARRRVGRVRGA |
| | | | | | TCCCTGGCCTCTCAGCCTGT | INQHLLRHRFDTDEKACVAD |
| | | | | | ACGCGGGGCTATACTTGGTC | ILEKAHAARAARTAQAAGAA |
| | | | | | TAAGTATGCCCCGGTCGCTG | TSTGGAATAPTQQAATSALG |
| | | | | | GCCTCTGAGCCCGTACGC | DADDGTCPILADELWQYFTG |
| | | | | | (SEQ ID NO: 1324) | TNTPRWEFNPATPVGEAFRT |
| | | | | | | AMARLPPATRLRELLTEAPT |
| | | | | | | ADEIETQLQHVRGSSSPGLD |
| | | | | | | GIGYDVYQRFAQQLLPVLTA |
| | | | | | | SFKRCWTAKMVPQSWQVGVV |
| | | | | | | RLLYKKGAHDDPANWRPICL |
| | | | | | | QQAIYKLYTGVLARRLVRWL |
| | | | | | | DVNDRHAPGQKGFRAVNGCG |
| | | | | | | EHNFLAATLIDQARRKRRSL |
| | | | | | | YEVWYDFRNAFGSVPFQLLW |
| | | | | | | DSLQRLGAPADFIDMCKGLY |
| | | | | | | HQAAFVIGNAADGPTAAIRQ |
| | | | | | | QVGVFQGCPLSPQLFNVAIS |
| | | | | | | PLLFALRRLPETGVQLSGDD |
| | | | | | | RVGVSAYADDLKTFSSTKAG |
| | | | | | | ATKQHELVAAFLAWTGMKAN |
| | | | | | | AAKCSSMGVRRNSNGATEAD |
| | | | | | | NLDLALDGTPIPSMTHMQSY |
| | | | | | | TYLGIGDGFDHVHRRIELAP |
| | | | | | | KLKTLKQDTTALLESGLAPW |
| | | | | | | QVVKAVKVYLYPRVEYALRH |
| | | | | | | LRPEDQLLESFDLHLRAGLR |
| | | | | | | HLLRLPKNANNDFFYSPVSR |
| | | | | | | GGLGLLPLVELHAALQIAHG |
| | | | | | | WQMLNSTDPATRRIAREQLH |
| | | | | | | QIADARHRLDKAHWKERGDE |
| | | | | | | LCQLFLNLDLGTSAHAPPKR |
| | | | | | | RNCDIGSLWVDVRKNLQAFG |
| | | | | | | LKLETAPADAESGTPALPLQ |
| | | | | | | LRVPHHEKWLTHRDVLRHVK |
| | | | | | | QHLKNKHWRAWCAFQDQGRT |
| | | | | | | ARAHGGVGSSFITRPRGMWE |
| | | | | | | SDYRFAVAARLNMVDTSATL |
| | | | | | | ARRRLRAHDRCRYPGCRWKE |
| | | | | | | SLEHVLNHCPGTMDAVRGRH |
| | | | | | | DGVLREIEHALRAPSGARRE |
| | | | | | | LRVNQTVPGLPGPALRPDIQ |
| | | | | | | VYNHDQRTVAVVDLAVAFDR |
| | | | | | | QDRDDPETSGLAKAAAEKKA |
| | | | | | | KYTGIQRHLERQGWKVHLSA |
| | | | | | | LVYGSLGSVAPNNYKVYTEH |
| | | | | | | LGLLKRDAKRLDRTLSVACI |
| | | | | | | QSSRRIWNLHCAKHRARQHQ |
| | | | | | | TPSQSRGRRVTETGGAPSRT |
| | | | | | | DRR |
| | | | | | | (SEQ ID NO: 1446) |
| NeSL | Utopia- | — | Phytophthora | TGCGCGGCAGACCAAGACGC | TAGACGGCAACACTCTGGCC | MQDQVDAEQQARNRWGPPLP |
| | 3_PR | | ramorum | GCAGCCAACAACAGACCGTG | CGCGTCGGCCGAAAGGGCCC | RPLVASRVAARLGEVPPPRW |
| | | | | CAGCGTGCGGGTGGAAAGCG | CACCCACGTAGGGAACCGCC | GPPLPRGVVVSRIAARLEAV |
| | | | | CCGCCGCCTGAACGCTGGTG | CTCGGGAAACCCAGTCTGGT | PVPRGGPPLPRSFVATRIAD |
| | | | | ACGATGAAGACCAGCGAGAG | GTTCGGCCAAGAAATGCACC | RLAPPSPDLSLLDEEMKESE |
| | | | | CTGGCCGAGCTCCTGCTCGT | ACCACCACGGCGGAGGTGCA | PPDPTHHSADEDSTDAETAD |
| | | | | GGACGAGGACAAGGCTGGCG | TTTCGACAGTCGAACTTCAA | AVMEPAFVSDPPTATPREWR |
| | | | | CCGAACACCCCGCGCTCAGG | CCCGCCACATATCGGATATA | LQFDGACRGGPNPGGAGALL |
| | | | | CTGCCCACGGCCAGCGCTCA | GTTACAGCTCTAGTTAGACA | YNPEGAVVWTGSHYMPGAKE |
| | | | | TCCGGCCTCCGTCCTCTCCG | TCGGATAGGAACTTCTTAGA | TNNSAEYTALLIGARAAADH |
| | | | | TGTACGCGCACGCTGCAACT | AAATTAACGGGTATACCGGA | GARQLRIEGDSLLVIRQVKG |
| | | | | CGCTTCGACTGCACGCTGTG | TGGTAAATAAAATAAAAACT | LYATKSTRLRQLRNAVRHEL |
| | | | | CACGTACACGGCTGCCAGCC | TC | ARVGQHSLHHIDRQGNAFAD |
| | | | | TCGCTTCGCTCAAGCGCCAC | (SEQ ID NO: 1325) | RLANRALDLKSDKVECKEHP |
| | | | | CGCTCGTCTCGGCACCGACG | | VAGACTTCMGSPSAGPPATP |
| | | | | CACGGCCTTCCTCGACAAGT | | PPTTADIEMADAGSDDELRA |
| | | | | TCTTGGCGGGCTGCGCGTGC | | DIDDGEVYAPMRLEPGVIPT |
| | | | | GGCACGCCCTTCGCATCGAG | | RRSRLRLRQLTDDEMEAAGE |
| | | | | GTTGGCCGCAGCCAGACACG | | VVERLSAGLSAKIADADDWE |
| | | | | CGCAAGCGTGCGCCAACCTC | | TAEGYITALPYMLYDKLQQY |
| | | | | TGCACCACCTCGGCGACGAC | | TQVRHGTARSPAPHPQRRDV |
| | | | | TTCGACGGCAGCAAAGGCAT | | QGQVETHREPRHETIGQPDQ |
| | | | | CAAGCCCCACTGCTGCCGGA | | PGEPSPTRRRRRGKRKGRRQ |
| | | | | GGCAGACCCACCGTCCGTGC | | RRHPRRTNCGGGGRQQRKQR |
| | | | | AGTGGTCACCGCCGCGCCCG | | HPRPPRGTRHHREHRIDEAI |
| | | | | ACCTGCCCCGCCAGTATCCC | | DELHALERARPQARPAIAKA |
| | | | | TCGGAGCTCGTTGCGTCCCC | | RRRVGRIRSAIDQQLLRHRF |
| | | | | CCCGCAGCCGAGCTCCACCA | | DTAEKECVDGILAAARTARD |
| | | | | ACGTTGCA | | ARTTVRAAAATGTTATPETA |
| | | | | (SEQ ID NO: 1202) | | VTSGTEQQDDNGTCPIPSEV |
| | | | | | | LWRHFDSVNTPQRDFDPEAP |
| | | | | | | EGAAFRSAMARLPAATRFME |
| | | | | | | LLKEEPSTDGIEVQLQHASS |
| | | | | | | TSSPGLDGVGYDVYKRFASQ |
| | | | | | | LLPVLKAAFKCCWTHKQVPQ |
| | | | | | | SWKLGVVRLLYKKGDREDPA |
| | | | | | | NWRPICLQQAIYKIYTGVLA |
| | | | | | | RRLTRWQDANDRHAPGQKGF |
| | | | | | | RPVNGCGEHNFLAAMLIDHA |
| | | | | | | RRKHRPLYEVWYDFRNAFGS |
| | | | | | | VPLGLLWDALERTGVPAEYI |
| | | | | | | AAVQGLYDHAAFMVGNAVDG |
| | | | | | | STAPILQRVGVFQGCPLSPP |
| | | | | | | LFSAAISPLLHALQLLPSSG |
| | | | | | | VQLSGDDRPGVSAYADDLKT |
| | | | | | | FSGTKAGVTEQHELVAMFLR |
| | | | | | | WTGMADGFDHVRRRVALAPK |
| | | | | | | LKLLKQDATALMESGLAPWQ |
| | | | | | | VVKAVKGYLYPRVEYALRHL |
| | | | | | | RPDDQLLESFDLHLRRGLRH |
| | | | | | | LLRLPKSANNDFVYAPVSRG |
| | | | | | | GLGFLPLVELHAALQIAHGW |
| | | | | | | QMINSPDPAIRRIAREQLHQ |
| | | | | | | VADARHRLDKDHWKQRGDEL |
| | | | | | | CELLLNGELGTSAHAPPKRR |
| | | | | | | NGDIGSLWVDVRKNLKAFGL |
| | | | | | | KLATAPADPESGAPAKPLQL |
| | | | | | | CVPHHAEWLDHRNVLRHVKQ |
| | | | | | | HMKNKRWRAWCSHVDQGRTA |
| | | | | | | RAHGGVGSGFLTRPRGMWES |
| | | | | | | DYRFAVAARLNMLDTVNVLA |
| | | | | | | RRRLRAHDRCRHPGCRWKET |
| | | | | | | LAHVLNHCPGTMDSIRGRHD |
| | | | | | | DALKEIERTLHASSGDRQGR |
| | | | | | | TELRTNQTVPGLAGPALRPD |
| | | | | | | LQVYNHDQRTVAVVDLAIAF |
| | | | | | | DEQPRDDPESSGLAKAAAEK |
| | | | | | | KAKYAGIKRHLERQGWKVHL |
| | | | | | | SALVYGSLGSVAPSNYKVYT |
| | | | | | | EHLGLLKRDAKRLDRQLSVA |
| | | | | | | CIQSSRRIWNLHCAQHRARQ |
| | | | | | | HQDQPAPRGRRVTETGGTPS |
| | | | | | | RTDRR |
| | | | | | | (SEQ ID NO: 1447) |
| NeSL | Utopia- | AATU0 | Phytophthora | AGCTCGGCCTCGCGGCTGCC | TAAACGGGTCACTTGACCGA | MLADPAALAAGLARAPPPPS |
| | 4_PI | 10012 | infestans | TTCCCAGGCGCCGCCGACTT | CAGGGCACCACCCAGGTAGG | APQDPSPAFPAGPAGQNPRA |
| | | 81.1 | | CGCGCTCTGGCGCGGCCCAC | GAACCGCCCTTTAAAACCCA | AAPARVEVHTVVAPPGRAGG |
| | | | | ACGCCGCCGCCGAGCCTCCA | GGAAGACACAAACACCCTCC | MLPDPGLVEEPIQATYAHDA |
| | | | | AGCGCGCCCGTTGGCTTTCG | ACATAGTGACATACATATTT | AQFECALCPYVAESMAVLVQ |
| | | | | CAGACGCAGGGCTCGCGGCG | TAGCCTAGATTTCAGTTACG | HRRSAHRGTRFKDIFTSGCQ |
| | | | | ACGGCCCTCGCCAGCCCCCA | GAGAGGTTACTAACTGGTAC | CSLVFYARIVAASHAVACAR |
| | | | | AGACCCCCCCTACGATGTGG | ATAAAATTACACATTCTGTT | RNQRAVPPAPTPVAPTRPEA |
| | | | | CACCACCCGGCAGGGCGGCC | CTAATCAGTGTGAAAACTGG | TPQPTGYLAAAMTAAAAAAS |
| | | | | GGCAGGCTGCCCGACTCGGT | TTTTCGCCTTTTGGCGGACT | SDTVVAAATNMQSAVPAAAK |
| | | | | ATCGCCGGGTGCTACACTCT | TTTTCACTCGCATTTTTGGG | TTGLQLVPPELEPALPQRAS |
| | | | | CAGCCGCTACAGCTCGGGCC | CAATCGTCTGCGGCTAGCTT | CHAGKRRRLNADEAVTPCTP |
| | | | | TTGGCGGTCCGCTATTGGCC | GCTAGCGGCGGACGAGCGGT | TARVSPQTEVAMAPHDAPQD |
| | | | | CTTGGAGCTCGACGGCGACA | CTCCGGGGGCGTACACCTTT | DTVLQREAAEPQPDPAATQG |
| | | | | GCAGCGACGACGAGGACGCT | CCCCCGCGAGGCCAACTACA | AQVQRVEDTTAAQDDTVQQD |
| | | | | CAAGACCCCCACGCCGCCGC | CCGATCTTCTCTACACTTTT | HDADTAQVSPPRRTPTRWGP |
| | | | | CCCAGAACCCCCAGAAGACG | CTAATTCGCCTTCGTCTTCG | RPSSTQEPSPMTGEPAATLA |
| | | | | TCGCGAGTGTGCTTGCCCCA | GTCTTCGGCTGTCGGATTTT | ARRPLTPAATGTRATRWGPC |
| | | | | CCCGGCAGGGCAGGCAGC | TTTCTTTTTGACCAATCAGA | HRAIGAAAIARLVTGLPTEP |
| | | | | (SEQ ID NO: 1203) | GTGCGCCATGCGACTCTTCT | AQPQRRQPPPPQEPPLQPEP |
| | | | | | GGCCAATCAGAGACCGGGCC | QAAAATVAADIAATVAADIA |
| | | | | | CTGTCCTCGGACAGCGAGGC | AAAANAAMDVDGGPAADETW |
| | | | | | CTCCACGGCCAGCCAATCAA | LLRFDGACRRNPGPGGAGAA |
| | | | | | GTCTCGGCAGCGACGCGTCT | LFAPSGAVVWTCSHFMPSRS |
| | | | | | TTCTATAGCGCAGCTGACGA | ETNNTAEYTALLLGAQSAVH |
| | | | | | GGCCGATCTGGCGGCCCCCG | HGAKRLNIEGDSHLILSQVR |
| | | | | | ATTGGTCCGACTTTCGGCCA | GAFACNNKRLRSLRNRVQAS |
| | | | | | ATCAGCGACGACGAGGGGGC | LRQLDWYRLQHIDRKANQHA |
| | | | | | AGGAGTTTACACTTTTGCCC | DRLANRALDLRRTVTECGPH |
| | | | | | CCGTTTCGACATCAACTTCA | AETRNRCFQTPQPLVEPGET |
| | | | | | GGCCAAAATGGCGATTTCGA | HCVPGSDEVLAANTAMEDAT |
| | | | | | CCCTCCACGCGCCGTGCCAC | AVPTEDDEAEVAARDGGEVF |
| | | | | | TGCTCGGCACCGGCGGCGAT | PTIAIGPDSAPAKQPRLRLK |
| | | | | | TCAGCGGGTGCAACTTCGGG | KLDEDDFDAAAAAVTRVSEE |
| | | | | | CACGTGTGCAACACATGCAG | LASKIVDAGDWTSGEGYISA |
| | | | | | CGCCCATTGCACGCCAAGCG | IPERLRAALRPFALPTQPAR |
| | | | | | GCATCGCGGGACGACGCCTC | PQPREPRMQQPPRRPPRVTR |
| | | | | | GGCCGCTCAAGCGCAGCCCC | DHLEHRLDEALDTMENVQRS |
| | | | | | GCCCTTCCAGCACGACCTCG | TPQNQKAVRRARRRVGRLRS |
| | | | | | CGCCGTTTGGCGGATCGCCA | AMDRTRLRKKFATHERECVA |
| | | | | | TCAAGACGTGCGAGAGCCAG | EILRRASTEEAANPSQEKCP |
| | | | | | GCGGGGTCGGGCAAAATATA | IDRATLHEYFTATSTORTPF |
| | | | | | CTTACTCTAAGTATGCCCGA | DYDSAKGTEFRTFLEVMSTP |
| | | | | | ATCCCTGCCCTCTCAGGCTG | SHETSALTAEPTLDEIEDQL |
| | | | | | TACGCGGCCCCATACTTGAT | AHVKAGSSPGHDGVGYDVYR |
| | | | | | CTAAGTATGGGAGGATCCCT | RFQVQLLPLLHAAFRFCWRH |
| | | | | | GGCCTCTCAGGCTGTACGCG | RRVPALWKVGFVRLLHKKGD |
| | | | | | AGACCCGTACGGCCGAATCC | PQQPNNWRPICLQTAIYKLY |
| | | | | | CTGGCTTCTCAGCCTGTACG | SGLLARRLSKFLEANELLPM |
| | | | | | CGGGGCTATACTTGGTCTAA | AQKGFRAFNGCHEHNFVATT |
| | | | | | GTATGCCCCGGTCGCTGGCC | LLDQTRRMHRRLYQVWYDLR |
| | | | | | TCTGAGCCCGTACACA | NAFGSLPQQLMWGVLRQLGV |
| | | | | | (SEQ ID NO: 1326) | TEEFVARCSGIYEDSYFVVG |
| | | | | | | NASDGATEPVRQEVGVYQGC |
| | | | | | | PLSPLLFITALVPLLRALEN |
| | | | | | | QDGVGVPLADGVRPCATAYA |
| | | | | | | DDIKVFCDSATGIQRCHALV |
| | | | | | | TRFLEWTGLQANPAKCAFLP |
| | | | | | | VTRSQHSNPTRDRDIELRIH |
| | | | | | | GEAIATLGLQESYRYLGVGD |
| | | | | | | GFDHVRHRLQLEPKLKQIKR |
| | | | | | | EAVALLHSELVPWQILKALK |
| | | | | | | VYIYPKVEYALRHLRPLKSQ |
| | | | | | | LQGFDSAIVRGLRHLLRLPE |
| | | | | | | NSHDGLFFSPTSAGGLGLLS |
| | | | | | | LVELHEALQVAHAWQMLHSK |
| | | | | | | DPAIRAIARTQVGQVARKRF |
| | | | | | | KLVEEHWRGREDDLAQRFLN |
| | | | | | | TELAASPHATETRRNGDIGS |
| | | | | | | LWNDVRDTLQTLGLKFAAGD |
| | | | | | | EEEAPGLLQLRVPHHTKWLS |
| | | | | | | HSTVLRHVKLHMKLRRMDTW |
| | | | | | | KSKVSQGTTVREHGGVGSRF |
| | | | | | | ITAGAGLSDAEYRFAIAPRA |
| | | | | | | HLIDTNSTLKRRRLRANDTC |
| | | | | | | RAPGCSYTEPPAHILNKCSP |
| | | | | | | NMDAIRKRHDDALERIADAL |
| | | | | | | RRKVEKSGGRLEVAINKTVP |
| | | | | | | EYDGAALRPDIVLRNTETKR |
| | | | | | | AIIADLAITHENQPTDATTS |
| | | | | | | SALQQSRDNKITKYQTVAAA |
| | | | | | | MMRAGWRVRVTGIVYGSLGS |
| | | | | | | VLPSNFKVYTELLALLKRDA |
| | | | | | | RRLNRQLSSHCIRASARIWS |
| | | | | | | AHCRRHRERQRSGNASRASR |
| | | | | | | GSGGAPRRTSQASARR |
| | | | | | | (SEQ ID NO: 1448) |
| NeSL | Utopia- | — | Phytophthora | CCAGGAATCACCCCCGCCGC | TAGACGGCACACAGGCCCAC | MSGDVVSSDGSSRTTDASGD |
| | 4_PR | | ramorum | CCCCAAGCGCTCCGCCGCCG | AGCGGCCGACAGGGCCACAC | GDDGAGSSDAAGDVGVVAMD |
| | | | | AGCCCAGCTGCGGCTGCTGC | CCAGGTAGGGAACCGCCTTC | VDQGARRQQPPWQRVGGKRR |
| | | | | CGCCCCACTGGTGACGGCAG | AAACCCGGCCGGTACATTAT | RLNDVDDEDTRELAELLLEE |
| | | | | TCGCAGCTGCCCCTGCCACC | GGTCCGACACCTATGAGGTG | EDEAGDHAPAPRLSAASARP |
| | | | | TCTCCTGTTGGCCGCGCCGC | CAACCGGTACACAAGTTACA | ASVLSVYAHNAQRFQCTLCT |
| | | | | CGTGGAGCCCCGCGCGCGCG | CACCACATAGCGACTACCAG | YTAASFASLKRHRDSRHRRT |
| | | | | CCGAGCCGCCCCAAGAACAA | GTATTTACTACCTGGAAGCC | AFLDRFSAGCACGVPFASRL |
| | | | | GCACCCCCAGCTAGCGCGCG | AAGGATTAACCGGTCGGTAA | AAANHAHACDSLNRTFSVAA |
| | | | | CGTGGAGCCC | TACACATAACTTT | APAAGELSPTAGAANATVKA |
| | | | | (SEQ ID NO: 1204) | (SEQ ID NO: 1327) | ATVTPDSPRQDPPKLAATPP |
| | | | | | | LASSALVVDPDHAEQQARER |
| | | | | | | WGPPLPRTLVAGRVAARLSE |
| | | | | | | VPAPRWGPPLPRGVVAFRIG |
| | | | | | | HRVLPPEMTSDEETKDDSSV |
| | | | | | | QDGDRQDYPVAAMDVDSGMS |
| | | | | | | GEWLLRFDGACRANPGPGGA |
| | | | | | | GAALSQPDGSVVWTCSHYMP |
| | | | | | | SSSETNNTAEYTALLLGTRA |
| | | | | | | AADHGTTTLRVEGDSTLVIQ |
| | | | | | | QVRGIFATRSVTLRHLRDQV |
| | | | | | | KLELARVGRFSLHHIDRQAN |
| | | | | | | AHADRLANRALDLRRTVSEC |
| | | | | | | GVHPDGNGCTPTAIDDRPLA |
| | | | | | | PTQQPPDAPPPPPAADIEME |
| | | | | | | DPDDEDLADIDDGEVYAAMR |
| | | | | | | VGPNATPQRRRRGRSGTAKK |
| | | | | | | HRRQRPPRVTRHHREHRLDE |
| | | | | | | ALDDLHAVERSTPSDRTTVR |
| | | | | | | RARRRVGRVNSAIEQQRLRH |
| | | | | | | RFDTDEKACVTDILAKACAT |
| | | | | | | REAARTTASGGDPPAGPATP |
| | | | | | | AAGSADDGTCPILGEELWRF |
| | | | | | | FDSVNTPRQEFAPDAPVGAA |
| | | | | | | FRSALARLPAATSCKELLTA |
| | | | | | | APSAGEVEDQLQHVRGASSP |
| | | | | | | GLDGVGYDVYQHFAAQLLPA |
| | | | | | | LTAAFKACWTAKRVPQSWKL |
| | | | | | | GVVRLLHKKGAREDPANWRP |
| | | | | | | ICLQQAIYKLYTGLLARRLV |
| | | | | | | RWLDANDRHAPGQKGFRAVN |
| | | | | | | GCGEHNFLAATLVDQARRKR |
| | | | | | | RTLFEVWYDFRNAFGSVPFA |
| | | | | | | LLWDALARLGVPDDYVTMCK |
| | | | | | | GLYESAAFVVGNAIDGTTDP |
| | | | | | | IALRVGVFQGCPLSPQLFNA |
| | | | | | | AISPLLFALQRLPATGVQLS |
| | | | | | | GDDCPGASAYADDLKIFSGT |
| | | | | | | EDGIKRQHALVADFLRWTGM |
| | | | | | | AANPNKCCTMSVQRDGRGVL |
| | | | | | | KTDDLQLDLAGTPIPALSMS |
| | | | | | | ASYTYLGIGDGFDHVRRRVE |
| | | | | | | LAPALKQLKDDATTLLQSGL |
| | | | | | | APWQVVKAVKTYLYPRVEYA |
| | | | | | | LRHLRPFQQQLEGFDRHLAR |
| | | | | | | GLRHLLRLPGNATAECFYAP |
| | | | | | | VSRGGLGLLPLTELHAALQV |
| | | | | | | AHGWQLLNSKDPAIRRIARV |
| | | | | | | QLRQIADARHRIDSRAWEGR |
| | | | | | | DEELCELLLNSQLGTSPDAP |
| | | | | | | PKRRNGDIGSLWVDVQRHLR |
| | | | | | | TLGLKFATAPACADAGSAAT |
| | | | | | | TLQLRVPHHDKWLDHRTVLR |
| | | | | | | HVKLHVKHRHWSKWAAMRDQ |
| | | | | | | GKTARAHGGAGSGFLTRPRG |
| | | | | | | MWEADYRFAVAARLNQLDTH |
| | | | | | | SVLKRRRLRAHDHCRQPGCS |
| | | | | | | RAETLAHVLNHCAGTMDAVR |
| | | | | | | GRHDDALKHIERALHASSPG |
| | | | | | | GQDRVELRVNQTVPSLAGPA |
| | | | | | | LRPDLQLYNHTKKMVAVVDL |
| | | | | | | AVAFEEQASDDPESSALARI |
| | | | | | | AAHKRAKYAGVKRHLERQGW |
| | | | | | | KVHLSALVYGSLGAVPAGNH |
| | | | | | | KVLTEHLGLLKRDAKRLDRQ |
| | | | | | | LSVACIQSSRRIWNLHCSQH |
| | | | | | | RARQHQAPGGSRAAETGGTP |
| | | | | | | PRTGRR |
| | | | | | | (SEQ ID NO: 1449) |
| NeSL | Utopia- | — | Phytophthora | CTCAAGCCTAGCAGCGGCTA | TGACGCACCGTGACATAGTG | MARVLVEPMQVDECSSCDRS |
| | 5_PI | | infestans | CCGCAGCTACTCCAGCTCCG | CGGCACGTGAAGATGCACAT | TLTADDGSGDDVAAPSSLNS |
| | | | | GTAGCTGCTACTGCTACAAC | GAAGCTCCGACACTGGGCCA | NDVAAPMDVDSGTDCPPALQ |
| | | | | TGCTCGCGCTGCTGCTCGCG | AGTGGGCGGCCATGCGCGAC | QPPQRPRALHVGSKRRRLDA |
| | | | | TCGCCGTGGAGCACCACGCG | CAAGGCAAGACAGCTCGTGC | DDEEEARQLQEEEEAGIHAP |
| | | | | CACGCTGAACCGAACCAAGA | ACATGGTGGGGTTGGTAGTG | ALRLSAASAQPASVLAVYTH |
| | | | | ACATCTACCG | GCTTCCTCACACGGCCGCGA | NASRFDCTLYAYTAGSFASL |
| | | | | (SEQ ID NO: 1205) | GGCCTGTGGGAAGCCGACTA | KTHRNSRHRRTAFLDRFSAG |
| | | | | | CCGGTTCGCGGTGGCCGGCC | CACGVPFASRLAAARHAQAC |
| | | | | | GCTTAAACCAGGTAGACACG | ASLSSAPLAEASSAAGASSH |
| | | | | | CACAGTGTCCTCAAGCGCCG | TVDEADSTVSAAGHTEPDLP |
| | | | | | GCGCCTCCGAGCACATGACA | RHNATELTASPPLVSSPDVE |
| | | | | | GGTGCAGACACCCAGGATGC | VQAPETEATENRWGTPLPRV |
| | | | | | ACGCGCTCCGAGACGCTGGC | LVASRIAGRLAQVPPPRWGP |
| | | | | | GCATGTGCTTAACCACTGCG | PLPRTTIAGRIATRLAATPA |
| | | | | | ACGGAACCATGGACGCAGTC | PRWDPPLPRSLVVSRIAARL |
| | | | | | CGTGGCCGGCCATGACGCCG | LPALPDAPACEEEAKDSDTM |
| | | | | | CACTCAAGATTATTGAGCGT | DWAPTWTNEETKDSEPHDEA |
| | | | | | GCGCTCCTCGCATCGTCGGC | PGQVDEETIDDADGEWLLRF |
| | | | | | CGACCAGCAGGACCGTGCTG | DGACRANPGPGGAGAALFKP |
| | | | | | AGCTCCGCGTGAACCAGACC | SGPVVWTCSHYDPSTTATNN |
| | | | | | GTGCCGTCACTCGCCGGCCC | TAEYTALLLGARAAADHGVT |
| | | | | | CGCGCTACGGCCCGACCTTC | KLRVEGDSTLVIQQVRGIFA |
| | | | | | AGCTCTACAACCACACCAAG | TRSTRLRALRNKVKLELARV |
| | | | | | AAGACGGTGGCGGTGGTCGA | GSFSLHHIDRQANGHADRLA |
| | | | | | CCTGGCCGTGGCGTTGAGGA | NAGLDRRRTKLECSVHPDGR |
| | | | | | GCAGGCGAGTGACGACGCGA | GCTNTSVATAAPTAPAAPLP |
| | | | | | GTAGCTCGGCACTGTCCCGG | PARPPATTAAPSHDDDHSVQ |
| | | | | | ATCGCCAACCACAAGCGAGC | GDIDDGEVYAAMCIGPDAVP |
| | | | | | CAAGTACGACCACATCAAGC | HRRPRLRLRHLTDEESEEAG |
| | | | | | TACACCTCGAGCGCCAAGGA | DVVERLAASLAAKIADAPDW |
| | | | | | TGGAAGGTACACCTCTCGGC | ETAEGYITALPYALYDKLQP |
| | | | | | ACTCGTGTACGGGTCGCTTG | YSQAQPQPPSQQQQQQQQRP |
| | | | | | GGGCGGTCGCTAGTGGCAAC | RQQQQTRQRRQRRGKRGGGS |
| | | | | | TACCAGGTGTACACCACACA | QRRQRKTRRRRPPRVTRHHR |
| | | | | | CCTGGGGCTACTCAAGCGCG | EHRIDEALDDLHAIESRRPQ |
| | | | | | ATGCAAAGCGGCTGGACCGG | DRTAISKARRRVGRIRSALD |
| | | | | | CAGCTGTCTGCCTAATGCAT | QHQLRHRFDTDEKVCVDAIL |
| | | | | | CCAGTCCAGCCGCCGCATCT | AGARASQGATTAPPSATTDP |
| | | | | | AGAATCTACACTGCAGCCAG | PAPMDDSRCPIPGDDLWRFF |
| | | | | | CACCGGACTCGCCAACACCA | DSVNTPRRSFDAEAPDGAAF |
| | | | | | GGCGAGGCCCAGCCAAGGAC | REAMACLPAATRAQELLTEA |
| | | | | | CAAGAGGCAGCCGGGCGACG | PTVDEVEDQIQHARASSSPG |
| | | | | | GAGACCGGGGGGACTCCGTC | LDGVGYDIYKQFAAHLLPAL |
| | | | | | CCAGACAAGCCGCCGCTAGG | HTAFVCCWNHKRVPQSWKLG |
| | | | | | CGGAAACCAGGCCCAAGACG | VVRLLHKKGDRQDPANWRPI |
| | | | | | GCCGACAGGGCCCCACCCAG | CLQQTIYKLYAGILSRRFVR |
| | | | | | GTAGGGAACCGCCCTAGAAA | WLDANARHAEAQKGFRAMNG |
| | | | | | CCCATTTCGGTGGTCGACTC | CGEHNFLAATLVDHARRKRK |
| | | | | | GCAAGCCTTACCTATATTTT | ELHVVWYDLANAFGSVPHDL |
| | | | | | AGACGTAGCGACCAAATTAC | LWETLARQGVPPTFVDCCRG |
| | | | | | AAATTTGGTAACGAGTAAGC | IYSDAAFTIGNAADGTTAPI |
| | | | | | CAAATGGTAATACACAAAAC | RLRVGVFQGCPLSPHLFTAA |
| | | | | | TTT | IAPLLHALKRLPVTGVQLTG |
| | | | | | (SEQ ID NO: 1328) | VDRPGAAAYADDLKTFSSSV |
| | | | | | | DGIKRQHELVATFLRWTGMA |
| | | | | | | ANLSKCSAMSVQRDSRGVLK |
| | | | | | | TGDLCLKLNDAEIPALSMTA |
| | | | | | | SYAYLGIGDGFDHVRRRLEL |
| | | | | | | APMMKQLKHDATALMQSGLA |
| | | | | | | SWQVVKAVKVYLYPRIEYAL |
| | | | | | | RHLRPFKQQLEAFDEHLRRG |
| | | | | | | LRHLLRLPTNATSAFFSAPT |
| | | | | | | SRGGLGLLPLTELHAALQIA |
| | | | | | | HGWQILNSPDGATQRIAREQ |
| | | | | | | LREIPDARHRLDTAHWRNRD |
| | | | | | | AELCELLLNSQLGQSSHAPP |
| | | | | | | KRRNCDIGSLWIDIRRQLGT |
| | | | | | | LGLKFETAPGRRSHQPARPA |
| | | | | | | IAAFACRTTTSG |
| | | | | | | (SEQ ID NO: 1450) |
| NeSL | Utopia- | — | Phytophthora | CCAGGCATCACCCCCGCCGC | TGATGCCCGCCAACTACAAG | MSGDWSSDGSSRTTDVSGDG |
| | 5_PR | | ramorum | CCCCAAGCGCTCCGCCGCCG | GTGCTTACTGAGCACCTTGG | DDGADGAGSSDAAGDVGVVA |
| | | | | AGCGCAGCTGCGGCTGCTGC | GCTGCTCAAGCGTGATGCGA | MDVDQGARRQRPPWQRVGGK |
| | | | | CGCCCCACTGGTGACGGCAG | AGCGGCTGGACCGGCAGCTG | RRRLNDVDDEDTRELAELLL |
| | | | | TCGCAGCTGCCCCTGCCACC | TCGGTGGCGTGCATCCAGTC | EEEDEVGAQAPALRLFAASA |
| | | | | TCTCCTGTTGGCCGCGCCGC | CAGCCGCCGCATCTGGAACC | HPASVLSVYAHNAQRFVCTL |
| | | | | CGTGGAGCCCCGCGCGCGCG | TGCACTGCGCGCAGCATCGA | CAYTAASFASLKRHRDSRHR |
| | | | | CCGAGCCGCCCCAAGAACAA | GCACGGCAGCACCAGGGCCA | RVSFVDKFSAGCACGTPFGS |
| | | | | GCACCCCCAGCTAGCGCGCG | AGCGCCAAGGGGCAGTCGGG | RLAAARHAQACASLSIPRTV |
| | | | | CGCGGAGCCC | CGGCGGAGACCGGGGGGACT | TAPAAAGDLSPTATGANATA |
| | | | | (SEQ ID NO: 1206) | CCGCCACAGAGCGGCCGCCG | SAAATSPDLPRPASPELAAS |
| | | | | | CTAAGCGGACATCGGGCCCG | PPQTSPFDVAIQADAAEQTA |
| | | | | | TAGCGGCCGACAGGGCCACA | WTRWDPPLTRAAVAARVASR |
| | | | | | CCCATGTAGGGAACCGCCCT | LAWPAPRWGPPLSRTLVASR |
| | | | | | CTAAACCCGCCCGGTACATT | IAARLDAQTSRWGPPLPPAM |
| | | | | | ATGGTCCGACACCTATGAGG | VASRIASRLAAMPAPRWGPP |
| | | | | | TGCAACCGGTACACAAGTTA | LLRTVIASRIADRLLPPELA |
| | | | | | CACACCACATAGCGACTACC | ADEETKDDDVHMDNAASVDV |
| | | | | | AGGTATTTACTACCTGGAAG | DEESEVADVVMTDHDGEWLL |
| | | | | | CCAAGGATTAACCGGTCGGT | RFDGACRANPGPGGAGAALF |
| | | | | | AATACACATAACTTT | KPSGPWWACSRYMPSSSATN |
| | | | | | (SEQ ID NO: 1329) | NTAEYTALLLGARAAADHGA |
| | | | | | | THLRVEGDSTLVIQQVRGIF |
| | | | | | | AARSTRMRALRNQVQSELAR |
| | | | | | | VGSFSLHHIDRQDNAHADRL |
| | | | | | | ANRALDLRRTVIECGIHCDG |
| | | | | | | VGCTATTTEVQSSSAPEIPT |
| | | | | | | RPVADDHDEHEWDVVDVCGV |
| | | | | | | CGVCGDRGTCGVCDVSGDI |
| | | | | | | DDGEVYAAMRTGPDAVPARR |
| | | | | | | PRLRLRKLTDEEQEEAGTLA |
| | | | | | | ERLGATLAAKIADARDWESA |
| | | | | | | EGYITALPYLLYDKLLPYSQ |
| | | | | | | GPARSLPVRQHQRQQQQPDG |
| | | | | | | QFQRPTQSRSAARRQRRQRH |
| | | | | | | RARRRPPRVTRHHREHRLDE |
| | | | | | | ALDDLHAVERATPSDRRSIR |
| | | | | | | RARRRVGRVNSAVEQQRLRH |
| | | | | | | HFDTNEKGCVEILLAKARAQ |
| | | | | | | RSTTVARTAVGEPNSGAAED |
| | | | | | | DGTCPIPSERLHRHFTEVNT |
| | | | | | | PGSSFDAMAPVGAPFRAALA |
| | | | | | | HLPAATEASELLTEAPTPDE |
| | | | | | | IEDQLQRAKGTTSPGLDGVG |
| | | | | | | YDVYKAFSTQLLPVLHAAFQ |
| | | | | | | CCWQHHRVPQSRKQGIVRLL |
| | | | | | | YKKGPREDPANWRPICLQQV |
| | | | | | | IYKTYAGVLARRFTRWLAAN |
| | | | | | | GRHADAQKGFRTVNGCGEHN |
| | | | | | | FLASTLIDHARRSRRELHMV |
| | | | | | | WYDLKNAFGSVPQELLWEVL |
| | | | | | | QRMGVPPAFVEVCQGLYQDA |
| | | | | | | AFTVGNAADGPTDLVRQLVG |
| | | | | | | VFQGCPLSPHLFTAAISPLL |
| | | | | | | HALDRLKDTGVRLSADDRPG |
| | | | | | | ASAYADDLKIFSGTADGVKR |
| | | | | | | QHALVADFLRWTGMVANPNK |
| | | | | | | CCTMSVQRDGRGVLKACDLE |
| | | | | | | LQLDGARIPSLIMNASYAYL |
| | | | | | | GTGDGFDHVRRRIELVPALM |
| | | | | | | QLKDDATALLQSGLAPCQVV |
| | | | | | | KAVKTYLFPRVEYALRHLRP |
| | | | | | | FQQQLEGFNRHLVCGLRHLL |
| | | | | | | RLPVSATTSFFFVPVSRGGL |
| | | | | | | GLLPLTELHAAPADRRPAPP |
| | | | | | | PRPRPLEGAGGENMRAADQL |
| | | | | | | AARDVGPRPTQAPQRRHRLV |
| | | | | | | VGRRPAPPPRTRPQARDRAG |
| | | | | | | VRGDRHRGGDAAASRAAPRE |
| | | | | | | VAGPPHGPAAGEAAHEEQAL |
| | | | | | | AAVGRDEGPRQDRPHPWWCR |
| | | | | | | ERLPHAASRPMGDRLPLCSG |
| | | | | | | GSAQPAGHAQRAEAPAPPRA |
| | | | | | | RPVSTAGLLPCRDTGTRAES |
| | | | | | | LRRHHGRGPRPPRRCAQDHR |
| | | | | | | ARAHRVVRAARTAPSSGSTR |
| | | | | | | PCPRSPAPRCGPTSSSSTTP |
| | | | | | | RRRWRWSTWPWRSRSRRATT |
| | | | | | | PRALRWRASPRTSEPSTPAS |
| | | | | | | SGTSSAKGGRSTSRRSCTAR |
| | | | | | | WAR |
| | | | | | | (SEQ ID NO: 1451) |
| NeSL | YURECi | — | Ciona | ATCAACCCACTACTACACCC | TAGCCAAAAGATTTGGTGTT | MATSSSSVSSGNVQTEVRCV |
| | | | intestinalis | TCTACAAAGAACCCACTACA | CTTGGCGAGCTGCAGTCCCG | YHGKGDLLLECPVAHCPSIH |
| | | | | GCAAGATCTTGGCGACCAAC | GCAGAGTAGGCGAGATCGTG | PTVATITKHLKKHHTPQFEQ |
| | | | | TACACCTGCAGCCTCCCGTC | AGCTCTACACCGCTTCACGA | ITTKNLTITYTCSQCSFSTT |
| | | | | GACTCTTCACCACCTGCGCA | TTTGACGAGTTCTTCTTGAG | GLTQHHISKHYKTCKGVGAV |
| | | | | CCTCCCTCCGACTCCAAGCG | TCGATCCCCAACGGCAACGC | QEGNKGRFCCPACGTRWALL |
| | | | | GCAGACAGTGGCACCACCAG | ACTCCAAATTTAACGACCGC | CKARHHFNNVHFEYDTPPIA |
| | | | | CACTCCAAGGGTCCACAGCC | ATGGCGACGCCACTGATCTC | AFSGTPYKLKKRKFTIINKA |
| | | | | AGAAGAGTGCACCCCCCACT | CCAGTCATCCGTGCTCCGAG | LTYSCPLPLNQLLCPLWSCS |
| | | | | GCTAGGAAGAGCTAGGCCAT | GGCACTTAAGGGGAACCGAT | LTILNKPLSSVQQETAHGDG |
| | | | | TGCCCGCTGTGGGCCTTGTG | TCACTGATGCTGCAAGTTGG | SQGQSYVPTQLRQVLRARCH |
| | | | | CTGGCTGTCTGCCGCTGATT | CGGGGGCGCACTCACCAATG | CGNPPIGKGHWASCQGKRPL |
| | | | | GGCACGTTAGGGAGTGTGCG | GAAGATGAGGGAGCCCAACG | SSPKGGRSSPTPPANLTLHF |
| | | | | CTGAGCACGATAGGGAGGCT | ATGCCCCGAACTACCGCACC | LNYLPFQLPSQSSSPQSSTL |
| | | | | GCTGAAGCCGAAGAACCCGC | GTCCCCAGCACCGTGTCCTT | DPTACKARVPIPSFLRGDCE |
| | | | | GCCGGGGACTTTAGGACTTT | GTGAGTAATTATTTTCACTA | VTFFIIPSVNFYRPYLSYPL |
| | | | | AACTAAAATCTGTAACACTA | ATCCAGGGACGGGGCCATGA | RMFWRNRTSSGHCSLHRWRG |
| | | | | AAATTGGAATACTGGATTAC | ACTGAACTATGTCTGCACGC | FVRERLVPHPRSKSPARTPL |
| | | | | TATTGGATTACTACTGGACA | TGCCCCGCCTAGCCTCGGCC | EFLCEFRLAGVFPDPGKVAS |
| | | | | ATAACCTGATCTACAACAAC | ACAAATAAATAGTCAAGCCG | LRPVPAPLTLCLSPPVAGPM |
| | | | | CAATTGGATTACAGAACCAA | GGGCGTACTACCAATTGATT | ISCEDHSAPPSVRSSSPIPN |
| | | | | ATTACAATCTCAACTACAAA | CGGATTTGGCGGGGCCCATC | SPASVSSVEAHLSDLLDKVS |
| | | | | CAAAAAGTGAGTCCCCGGCC | ACGCGCCTCCGCCCCCACAC | SGELRPLSPTLPSSGFFGPL |
| | | | | GGGTTTCTATATTACCCAAT | ACAAAAACACTTTTAAACTC | LPPTPPPRPTPSAEKASPSG |
| | | | | TACTGTTTTTACAATTTTAA | TTCGGTTCCCCAACCACTAC | LSYLPCREVKIASIARPSPA |
| | | | | AATTTTATAGTATTTTACTA | AACAAAGCGAGCGGCCCCTC | SQRVGCDADRTGPSLNPNYQ |
| | | | | ATTTTTCCGCCCCGCTAGCA | TTAGATCCAATTTTAAAATT | QTSPPSTPSFSPIVRPPKFP |
| | | | | CTTAAATTGGCACCCCCCCC | TTAAATCAGTGCACTCAACT | RSGAKVNSKSKPPGVRPRRA |
| | | | | CCCCSTCCAAAAAAAAATAG | TTTTTACGTGTTGTGTTTTI | KPIEPGTESASPVDVDTISS |
| | | | | ATAACCCTCCACCACCTAAA | IGTATTTTTTCCCACAGATT | SVQEPCTPENRTPEFFYERK |
| | | | | CCCCGGTCACCCCCTCAGAA | TTGTATTTTTATATTATATT | WLVSILNIHEREGSNFFQFN |
| | | | | CTAATTGGAACCCGGATCTT | TTATATACACAACACTAITT | RDLEYWTQLLSGSQKGGRAK |
| | | | | TTCCCTCTATCAAATTTCCG | TIATACACTACCTTGCACTG | RASYNRGAANQAMKNRDSGR |
| | | | | GTTCAGTTTGGCTTAATTAC | TCCCACITTTTGTAATTATC | KDFDPRPVAGHSSGGGTELG |
| | | | | CTAAAACCCGTCTTTATTTT | ACCTTTTACCTTTTATGCCG | SRPRYPKGARLRADFWRDMK |
| | | | | ATCCCTTTATTGCCCCTTAA | CTCGCTGAGCTCCTTGCACG | GTVRKLLDGSNGERRCGIPL |
| | | | | ACCAAATTATTCAAATTGAA | GATGACCAGACAAACTTTTA | DIIERKFRQVSMPGWIDHRR |
| | | | | ATCCGGCCAAATTGCCTTGC | TAAAATTATAACATTGTTTT | YAAGASPSLVTQAETDVAIT |
| | | | | TGAACCACCATTTTTGTTTT | AATTGTCGCGGGGTATCAGT | SEEVEAVLSGLNVQSAPGSD |
| | | | | TCTTATAAAAGTAAATTTTT | GGCGCCCCCTTGCGGCCGTG | GLSYRFWKGLDPSGRLLSCL |
| | | | | CAACAACCCAAAATCATAAA | AAAGCCCTTTTCACCTTAAT | FEIVRRHGRIPGAWPTCSVI |
| | | | | ATTAAAACTGTTATCTGATT | TCGCCCCTTAGTCCAAATTT | LLCKDAQGDVQDVGNWRPIT |
| | | | | AGTCTAAATTCTGTTATTGA | TTCCCCATTGCCTGTAAAAG | ICRTLYKLYAAVIARRIQTW |
| | | | | CAAAAACCTCCATACCAACC | TGCGTTGCCGTCGACTCGAA | AKQGGVLSRLQKGFMPVEGV |
| | | | | TTAATCTTATCATTATCTTC | CTCGTCCTTTTTACCGCCTC | FEHVFMLDTVLSDAKLRRKN |
| | | | | ACCCAGACTGCTCAATCTAG | TCTGTTACTGAACTATGACC | LLAVFLDVRNAFGSVRHECL |
| | | | | TTCTTTTTTCAATCAATAAG | AGCTTGGCTGTTGAAGTCGG | LKVLRHFDAPHYLVELVRDI |
| | | | | GAGGTGTTTTCTTTGGTCTG | CTTTAATTCGCCGGCTTCAC | YTGATCRVRSSVGETGDIPC |
| | | | | TTGTTTTATAGTTTACCGTT | ATTATATTTTTTTGTTGGGT | DRGVRQGYPLSGILFNLVTE |
| | | | | ATAATAGTCTGTTGTCCTAT | AATCTGTTTTTTTTCATATA | VLIPGLSAGNDGYRMACLGG |
| | | | | AGTTTTCCGTGGTGTATTTC | TAAAACCATTCGGCTTAAAA | KLTQVLAYADDLVWTENRDQ |
| | | | | TGGTCTACTATAGTTGGTGC | TCACCAATCCCCATCATCCA | MLRQLGVCEEFGRWAGLAFN |
| | | | | CTCTAAAACATTATTATACC | CCCTGGTCACCCATTGAAAC | QRKCGLIGWRTLRGGRRVAL |
| | | | | GAAGAGTGCTAGCGATTTCT | ATCTCTTTTTAGTCAATTAT | EDPLLLNGVEIPLLRPGEHY |
| | | | | ATTATTAACTCACCCACCAG | TTTTTCAGATTACCCCTCCC | KYLGAMTGVMSVPRTGSQLI |
| | | | | TACTGCTGTGCATCCACGCA | AAATTGTCATATAGTTTAAC | KDFRARLQRLFTSFLTPHQK |
| | | | | GCACCACGCCTGCCATCACG | ACCCCGTTTGCCAAGTTGGT | LIALKRFLLPSLSFHLRVRP |
| | | | | TACAGTGCGCTTGCTGCCTT | CTTTTCCCCATCCCCTTCTG | IARSELIALDRRVRECLRVA |
| | | | | GTGTTTTGTTTTGCAGACAC | TCCTTCCGGTAATCCCATAA | FRLTKPSCQAVFHTPTDMDG |
| | | | | CACTGGACGATAG | CATTTTATTCTTTAATTCGG | LGVPSVCSESSILTIAQGFK |
| | | | | (SEQ ID NO: 1207) | CCCCATAAATAGTGTAATCT | VLTSPDGTVSATASARVKLY |
| | | | | | TAAGACGAAGTCCCCAGAGG | AAKFGGLTEAGPSDWARYLS |
| | | | | | CCCGGTCCCCCCCTTCTTTG | GDDVNGNSTRKPGANLPSGL |
| | | | | | TCATGGACCGGGCCAGCCCC | WTRVRCASRQLGAVWRVCPE |
| | | | | | CCTGTTACCACAACAACCCA | NGITVRVRNSVITSRDRRKL |
| | | | | | CCATTTTATTCTTTCTTTCT | IRSFHDCSNQQWKEQWMQHP |
| | | | | | TTTTATTAGTATTTATTTAT | NQEKTAAAHMAYADANRWVK |
| | | | | | ATTGCCGCCCAACTGTCGTG | QPSVMEPHTYFFALRARLNL |
| | | | | | TCGTGGCGCAGGGGGGTTCC | LPTRVSRAIYSRDQHPDILC |
| | | | | | CTCTGTCGGCCCAGTGGACG | RRCGASVESLPHVLNHCPPN |
| | | | | | ACCGTCTAAAAAACAGGCAC | MSIILGRHNLVLQEVLNAVD |
| | | | | | AGGCAGCAGGCACTTATCAC | KTQFKEISVDRTVPEHMSET |
| | | | | | CCGGTACCTCCGGGTACCGG | GEALRPDIVARRNDGSWVVD |
| | | | | | AGGCTGGTTTTCAGCGCACT | VACPFDQKANFDEAAKRKLL |
| | | | | | GTACGTGATGGCCAATTTTA | KYDKLCCNIAASTGKPVECH |
| | | | | | TTCATTGCATTTTATCCGCG | SIWGSLGSLAEGLSTSLRAL |
| | | | | | TCGTGGTGTTTGCGTGGATG | GITDFARSKLVACHQG |
| | | | | | CATTAATAAAAGATGAAATT | (SEQ ID NO: 1452) |
| | | | | | CC | |
| | | | | | (SEQ ID NO: 1330) | |
| R2 | PERER | BN000 | Schistosoma | ATCTCACGTTTTAATTTATT | TAACGGCTGAACGAATAGCC | MPVSTGAETDITSSLPIPAS |
| | E-9 | 800 | mansoni | TTTGAACTACTGCAGTCTGA | CCCTTCACTCTTAGACATTC | SIVSPNYTLPDSSSTCLICF |
| | | | | GTGCTTCTAACGACCCGAAG | CCCCACTGTTGTTGCTTATC | AIFPTHNILLSHATAIHHIS |
| | | | | GCTCAGAAACTACCCACTTC | TTCATGCTCTTGTGTTAATT | CPPTPVQDGSQQMSCVLCAA |
| | | | | TTGAACTGCTACTTTTTGCT | GACTGCTCTCTTCTGGGTTG | AFSSNRGLTQHIRHRHISEY |
| | | | | GTTTATCCACAACAACAGTT | ACGTCTGATTGTCTCTCTCT | NELIRQRIAVQPTSRIWSPF |
| | | | | GTGATTCTATTCTCCANATA | CTTTCCATATTGCTTGCTCT | DDASLLSIANHEAHRFPTKN |
| | | | | TTCCTTGTGCTTTTGTCAAC | GCCCGCTTACTTCCAATAGT | DLCQHISTILTRRTAEAVKR |
| | | | | ATTATTCTATACCAACTGTA | TGTCATATTATGTCTTTGTT | RLLHLQWSRSPTAITTSSNN |
| | | | | CCACCTACTTCTTCATCTCA | TACTTGCCATGTCTAACGAC | HTITDIPNTEARYIFPVDLD |
| | | | | CGTTTTAATTCTGGTCTTAT | AATTACTTTATCTACCTTAG | EHPPLSDATTPNASTHPLPE |
| | | | | TTTCTCATCATTAGTCACGG | TTTGTCCTCTTGGTTTCGAT | LLVILTPLPSPTRLQNISES |
| | | | | AGAGGGCCTATGAACGGTCC | TGCCTTCATATGTTCATGGC | QTSHESNKNSMHTPPTYACD |
| | | | | GTGACGCGAAATTCTATCCG | GGAATCTGATGTTTATAATG | PDETLGATPSSTIPSCFHSY |
| | | | | CGATTTCGACCTCTCCTGCT | ACTATTCCTATTACCACCAC | QDPLAEQRGKLLRASASLLQ |
| | | | | AGTGGTCCCCGAAGTACGGT | TACAACTACTATTATTATTT | SSCTRIRSSSLLAFLQNEST |
| | | | | TCCTCTGGCCTGTCAGTTGT | TCATTACTATTAACATTATT | LMDEEHVSTFLNSHAEFVFP |
| | | | | GTTAAAACTATATAATAACG | ATAAACATTATTACTATTAT | RTWTPSRPKHPSHAPANVSR |
| | | | | (SEQ ID NO: 1208) | TATTATTACTATTATTACTT | KKRRKIEYAHIQRLFHHRPK |
| | | | | | CTACAATTAATATTATGGCT | DASNTVLDGRWRNPYVANHS |
| | | | | | ACTCCTCTCAGCACACCAAT | MIPDFDCFWTTVFTKTNSPD |
| | | | | | AAAATATCAATCAAACATCT | SREITPIIPMTPSLIDPILP |
| | | | | | CAATTATATCCACCTATTAA | SDVTWALKEMHGTAGGIDRL |
| | | | | | ACTCTCTCTATTTCCCCTGA | TSYDLMRFGKNGLAGYLNML |
| | | | | | GTTATAAACTTACAATTCAG | LALAYLPTNLSTARVTFVPK |
| | | | | | TCTAACCGAATATCTCTCTT | SSSPVSPEDFRPISVAPVAT |
| | | | | | TTACAAATCTTAAGTATGTA | RCLHKILAKRWMPLFPQERL |
| | | | | | ATTTTGTGCCAAACCCATTT | QFAFLNRDGCFEAVNLLHSV |
| | | | | | GGGTCTGTACAATTTGATAC | IRHVHTRHTGASFALLDISR |
| | | | | | TTAAAAATAAATGTTATTAG | AFDTVSHDSIIRAAKRYGAP |
| | | | | | CC | ELLCRYLNNYYRRSTSCVNR |
| | | | | | (SEQ ID NO: 1331) | TELHPTCGVKQGDPLSPLLF |
| | | | | | | IMVLDEVLEGLDPMTHLTVD |
| | | | | | | GESLNYIAYADDLVVFAPNA |
| | | | | | | ELLQRKLDRISILLHEAGWS |
| | | | | | | VNPEKSRTLDLISGGHSKIT |
| | | | | | | ALSQTEFTIAGMRIPPLSAA |
| | | | | | | DTFDYLGIKFNFKGRCPVAH |
| | | | | | | IDLLNNYLTEISCAPLKPQQ |
| | | | | | | RMKILKDNLLPRLLYPLTLG |
| | | | | | | IVHLKTLKSMDRNIHTAIRK |
| | | | | | | WLRLPSDTPLAYFHSPVAAG |
| | | | | | | GLGILHLSSSVPFHRRKRLE |
| | | | | | | TLLSSPNRLLHKLPTSPTLA |
| | | | | | | SYSHLSQLPVRIGHETVTSR |
| | | | | | | EEASNSWVRRLHSSCDGKGL |
| | | | | | | LLAPLSTESHAWLRYPQSIF |
| | | | | | | PSVYINAVKLRGGLLSTKVR |
| | | | | | | RSRGGRVTNGLNCRGGCAHH |
| | | | | | | ETIHHILQHCALTHDIRCKR |
| | | | | | | HNELCNLVAKKLRRQKIHFL |
| | | | | | | QEPCIPLEKTYCKPDFIIIR |
| | | | | | | DSIAYVLDVTVSDDGNTHAS |
| | | | | | | RLLKISKYGNERTVASIKRF |
| | | | | | | LTSSGYIITSVRQTPVVLTF |
| | | | | | | RGILDRASSQSLRRLCFSSR |
| | | | | | | DLGDLCLSAIQGSIKIYNTY |
| | | | | | | MRGT |
| | | | | | | (SEQ ID NO: 1453) |
| R2 | R2- | — | Bombus | TCAATAGTTACTCGGGGGCA | TGAAAACACGATAACGATTA | IAKFDNNTNSASDAAPLSPG |
| | 1_BTe | | terrestris | GGCGGGATATTGGTCTTGCC | TGAATCAAAATAAGAAAGTA | GAVADLSASEGTTDNDQAMS |
| | | | | TTGCCCAAGTCACACTCCTA | AACATCCCAGAAATTGTCTA | PAMSLXTVPLVGNRVACPXC |
| | | | | CCTCCTCGTGGTACCGCCGG | CGTCTTATTTGTTATCTATT | EKREANLFFLNLSDLDRHLT |
| | | | | TAACACGCGCACGTCCACAT | TATTTGTTTA | QHHPDAPIXWSCIDCAKCFP |
| | | | | CAGCGAGGGGCGTACTCCCC | (SEQ ID NO: 1332) | KLHGARCHIPKCGGASSQAR |
| | | | | CGGATGTGGCGGCGCGTGGC | | TGEFQCEACPMSFGSRRGLS |
| | | | | TAAACGGAGTGTGGCGACGA | | THERHAHPAVRNIKRRGADP |
| | | | | AGGAGCGAAAGACTAACAAC | | PEENTKSWKVEXVARLKGLW |
| | | | | TATAACGGTCTTCCGTAACG | | EIFKDHKYPNKEISKFLTTK |
| | | | | GCTACTTGGAGCCGTGAATA | | TVDXXKYQRKKLNLIGXESP |
| | | | | ATGGAGCCTATATTAAACCC | | QEATSLATEGGCDLVSSGNA |
| | | | | TGGAACTCGTTCCTTCGTTC | | SFGSPVGRNENEEELIHEWK |
| | | | | TGTTGACGACTGGAACGGCA | | LSLKNEINKPTEVPPILKEV |
| | | | | AAGGACATGATTTGGATAAC | | YNRLMLIWEEHQDDRDSLTE |
| | | | | AATTGGAAACTTAATATCGA | | SLDHFIRTALYELINKINKN |
| | | | | ATTCACAATTAA | | QTDLKTKRAAKTKSPKNNRN |
| | | | | (SEQ ID NO: 1209) | | SRKRFSYARCQELFHECPRR |
| | | | | | | LADAVVNNDQAYLEPARQPP |
| | | | | | | GSEEVRGLYEKLWGQVGSTY |
| | | | | | | VPAPVTRVPKLSLSEIFPPI |
| | | | | | | AAEDVGERIGKIRKKAAAGP |
| | | | | | | DGLQRDHLTIPGLPIIMAKI |
| | | | | | | YNILVYCSYFPSAWKENRTT |
| | | | | | | LIPKINKPCSLVENWRPITI |
| | | | | | | SPILGRIFSSIIDGRIRRGT |
| | | | | | | VLNMRQKGFTSENGCKINIE |
| | | | | | | LLNSALNYSKRNSGGIFTIV |
| | | | | | | DISKVFDTVPHAALKPCLAK |
| | | | | | | KGVPALIVDLIDEMYKNVKT |
| | | | | | | TIKTKDGGVEIMIRRGVKQG |
| | | | | | | DPLSPLLFNLCLEPLLEEIE |
| | | | | | | EQASGINVSEHRKVSVLAFA |
| | | | | | | DDIVLLGADAREAQHQINVL |
| | | | | | | TDYLQSLMMNLSIEKCQTFE |
| | | | | | | VVAKKDTWFIKEPGLKIGNQ |
| | | | | | | IMPTVDPDEAFKYLGAKIGP |
| | | | | | | WKGVHCGVIVPELLSVVKRV |
| | | | | | | RKLSLKPGQKVELLTKYIFP |
| | | | | | | RYIYHLLVSPPSDTVLKLLD |
| | | | | | | SEVRQEVKTILHLVPSTATG |
| | | | | | | FFYTPKACGGIGIPRFEHII |
| | | | | | | KLGTLKSAIKIANSIDPAVA |
| | | | | | | GLIDDAAIKKLKQTANSLRI |
| | | | | | | NWPASLEDIEKARKRLRKEH |
| | | | | | | ISQWADLKCQGQGVPDFIKN |
| | | | | | | KTGNLWLEDHSLLKPSRLID |
| | | | | | | ALRLRTNTFGTRSVLARADK |
| | | | | | | NIDVTCRRCRAQPETLGHIL |
| | | | | | | GLCQHTKGLRIKRHDEVKSL |
| | | | | | | LEGRLKSKKNNEVFVEPTIK |
| | | | | | | AGGSLFKPDLVIKNGERVLV |
| | | | | | | VDVTVRYENKNYLALAEKEK |
| | | | | | | IEKYRPCLRALKEIFNAKGG |
| | | | | | | EILPVVLGSRGTITPNTEKV |
| | | | | | | LKRLGIANNDIKTILLNVLR |
| | | | | | | SSIELCNIFIDD |
| | | | | | | (SEQ ID NO: 1454) |
| R2 | R2- | — | Crocodylus | AGGCGTCTCCTTTAAGGGCA | TGAATCCCACTCTGGGGACC | VPPGAEARGRYHHPRXEXAR |
| | 1_Crp | | porosus | ACGGTCTGGTTACGCGGTCG | CCCAAAAATTAGAAAAACCC | QGEPPSXRVFLVXLPDSNPP |
| | | | | CAGCAGKCTTGCKCCAGGTA | AAAACAGTTGTGTTTAAGTG | CPICGDHVXXXSVLALHCVE |
| | | | | CCTCCWCGTGGTTCCCGCCG | TGTTCTTGTTTGTCCCTTTG | GHXWAXVQYQCTHCGILCHI |
| | | | | GGTGCCGMAGMCCCAGGSCT | GCTTCACCTCCAAGTTGCGA | PRCQGRVXEXTGKDXXCPEC |
| | | | | GTCGGTAGCTCGATCCTGGC | TCCCCCATCTCCCCTGCGCT | PASFDEKAGLSQHKRHTVTX |
| | | | | ACAGTAMGGCCAGGGGAGTK | GTCTTTCTGAATGACCAGTG | SXERVAGXLLRAXLRHGCWS |
| | | | | CTTCCTTGCTGCWGGTGCCC | GTGTTGAGGCTGGTGTGACC | VEEEETLTRLDAMFXGARNI |
| | | | | CACAAGCGTKTGGCAGSMCM | TCGGTCACCTCCAAGGCCAA | NQLIAAEXVSKMXKQISDKW |
| | | | | CCTGCTTCWTCGCAAMAATM | GTGCCCTGGCCCCGAGTAGG | RXLXLXPEQTTXGGXAESAS |
| | | | | ASAGKGTSMTCAGTAGTCGG | ACCAGGTGGCCCAGCTTGCT | VVXXESMTPEMEAQSPAXPP |
| | | | | CCCCGCCGCTAGCCAAAACT | GGGCACCCGTCACCGCCCAG | GKIRKIFTGQDGHAGGXAWE |
| | | | | GTTCGCCACSCAGTTACAGA | GGCAAATGGAAGGGATCTAT | NQEDFHWTRWARRWLKRGQX |
| | | | | TGGTGCCTGTGCTGACCKGK | CCTGACCACTACCAGGCTAA | LSDKVQEVLGXWVEGQPRIX |
| | | | | KGCCCCGTGGGCTCGGWGGT | GTGTGGTGCTGCCTAGCCTG | AWVDXVSLDVLTLFLGVPPG |
| | | | | GCAGGGGWGGCCGGCCCATG | CCGTAAGGTCAAGCGCCCTG | PQRAPSKKGPXEGGKPTSWM |
| | | | | GCTGGGCCAGACSTGGGCCK | CTGCCGCTCGGGTAKCAGTC | NKRAIKWGTFLRYQHLFGAN |
| | | | | TGGAGCCCGCTCCCAMCCCA | CTCGTTCACTCGTCCCTCCT | RKLLAAXILDGAXRNQXTLL |
| | | | | GAGTTCCCCCTCAAMGCCGC | AGTACCCTCCGCMTCTGCGC | LEEVXQXYXGKWEAEPPFEG |
| | | | | CAGGKCAGMAMCAKCCGGGG | TTCTGCTATCCACTGTGGCC | LGRFGXXRDVDSFAFEALIT |
| | | | | AGKGMCACGGCCCCGGCCGT | GGWGATGCCGAGGWTGSWMC | XEEAVKHMMXMAXXSAPGPD |
| | | | | GA | AWCCTCGACACCTCCAGGGC | KLTLRDLRRADPEGDALAEL |
| | | | | (SEQ ID NO: 1210) | CAAGCGCCTTGGCCMCAGGT | FSLWXITGVVPDRLKEXQXV |
| | | | | | AGGACCTGGCACCTGCCCAG | LIPKAVDFEKLRQLGNWRPI |
| | | | | | GGGGCCAGACACTGCCTGCG | TIXSIVLQLXSRVLTARLTA |
| | | | | | GCAAGGGAAAGGGAGCCGTC | ACPIXPHQQGFISAPXCAEN |
| | | | | | CCTGACCGTTACCGGGCTTG | LKXPELIXRKVKXDRRPLGV |
| | | | | | ATGGTGCTGGCTAGCCCGCC | AFVDXARAFDSVSHDXISWV |
| | | | | | GTATGTCAAGCACTCCACAG | LKAKGVDQHIVNLIEDSYQK |
| | | | | | CTGCTCGAGTTCGCTGGCTT | VTMRVQVFSGSTPPISIKXG |
| | | | | | CACCTTCATCCCWCCTAGTG | VKQGDPMSPLLFNIAMDPLI |
| | | | | | CCTTCCGCCTCTGCGCTATT | XKLKTVRQGVKVGSASLTTL |
| | | | | | TTCGTCCCGACTCGTACCTC | AFADGLXLLXDSWEGMQHNI |
| | | | | | CCCACCTCTGCGCTACMGCT | TTSXTPGRACNTTSRHPRGL |
| | | | | | ATCCCTGMAAGGACCAAGTG | LQPHGPTSATXKMXGVLLES |
| | | | | | GGCAGGGGSGTTCGCCCCCC | XMRLLYGEQLRGLEDXRPXX |
| | | | | | GCCCGCAGGAGGCTCGGCGT | HDAXARRADTISGLEXRSLG |
| | | | | | ATCCGTGGCKTCWTGCCTCC | WDXQTRFGYATXLLAREDGD |
| | | | | | ACCGTCTTGTGCCGCTAGAG | CXAQTNAEALCWXSXPFPGC |
| | | | | | GGGTACCTCMGAGACCGGCG | AXRPXYANXGWVASEALDSM |
| | | | | | CAACACGACCTTGACGSTTA | SRRXVKEWFHLPACTDXLLX |
| | | | | | GACAGTAGGGTGMAACAKCC | SRHRDGGLGLLRLARXXLAA |
| | | | | | CTGCTGCAGGCSTGAAGGGC | XVRRPIRVATSSDEVTRKVS |
| | | | | | CAAACGGCTGTGCCATGAGA | YACGISDEVERLXLAXGGDX |
| | | | | | GGGGAACCTTGAAGACCGGG | SNVPRFEDPXAPKSXXVQGP |
| | | | | | SCAGTCAGCCAGTTAGTCAG | HEAAQETPRVVRTQAIPWPS |
| | | | | | TTGGGCGAAACAATCCCAGC | NWRAEEHSKWAQLSCQGERV |
| | | | | | TGCAGGCCCAMMAGGGCTGT | ELFCNDPVSNGWINSRGQLA |
| | | | | | CAGGTGAGGGGGTATCCCCA | ERLWIMALKLRSNIYPTREF |
| | | | | | WCCACCCCCCGCCGCCGACT | LGRGQAGTNIGCRHCTHPRE |
| | | | | | ACGGAGGCAKGAAGTCCCTA | TLGHILGICPAMQEARILRH |
| | | | | | GTGACTTCKGACCCCCACGT | NKLCKILAAEGKNCEWTVYY |
| | | | | | CTTGTGCCGGGAGAGGGGAA | EPHLHNAAGELRKPDLIFVR |
| | | | | | CCTTGAAGATCGGGGCAAGC | DGTALVVDITVWYEGGPATL |
| | | | | | CGCACTTGATAGTTAGCCAG | LSTTAEKATKYLDLNTQIQE |
| | | | | | TCKGGTGAAACAATCCCAGC | LTGAEQVTYFGFPIGARGKW |
| | | | | | TGCGGGTCCGAAAGGGCCGA | HADNWRVLSELGLSNSRKER |
| | | | | | CTWCCAGGCGAGGGGGGCCT | VTRLLSWRALLGSVDMVNIF |
| | | | | | GCGGAAAMCCCCCTCCATGG | VSKHRQENLLDEHCTPAEQV |
| | | | | | TACGGAGKTCTGGCGTCCTM | VSSYAS |
| | | | | | ACCGACWCCTTGCCACCAAC | (SEQ ID NO: 1455) |
| | | | | | GTCTTGTGCCGGGAGAGGGG | |
| | | | | | AACCTTGAAGATCGGGSCAA | |
| | | | | | GCTGCACTTGATGGTTAGTC | |
| | | | | | AGTCGGGTGAAATAATCCCA | |
| | | | | | GCWGCCCCCGCTGTGACTGC | |
| | | | | | TAAGMCWGGTCCCCAAGGGG | |
| | | | | | CATGAGGCATSTGCGCTGAG | |
| | | | | | CCGGSAGGGGTGACACMCGG | |
| | | | | | CGATCGGCGCAGCACAKAST | |
| | | | | | GAAGGGAGGCACTTGCTGAG | |
| | | | | | ACTGCTTCTGAGGCCCCAGA | |
| | | | | | CTTGGGGTGGTGCAGCCTTG | |
| | | | | | TCTGGGGTATGGTACAGCAC | |
| | | | | | CCTACTGCTCCCTTTGGKCA | |
| | | | | | GCAGAATTCGTCCCGACCTC | |
| | | | | | TTACCCACCCGAGTCTGCGC | |
| | | | | | CTTGTTCCGCTATCCTGCAT | |
| | | | | | CTCCGATCCACCTCGCTGTC | |
| | | | | | TCCCCGCTGCGCTGCTTTTC | |
| | | | | | TCTCAAGTGGGTTAAATCTT | |
| | | | | | GTCATGATTACCTCCCACGT | |
| | | | | | TTCCGCTCAAGGGCAATGCC | |
| | | | | | CAAMATGACGGGGATCGCTG | |
| | | | | | GTGCATGGCAGTCATGAGAC | |
| | | | | | CATCCGGACCCTCCGGTGGT | |
| | | | | | CGCTATAGTCATTTTKTGTT | |
| | | | | | GCATGGGGCATSCTGAGTCA | |
| | | | | | CTTAACCGAAAGACTCWAAA | |
| | | | | | TAACTCAAAAGAGGKAMCCT | |
| | | | | | CTGSGGTTCGGTAAA | |
| | | | | | (SEQ ID NO: 1333) | |
| R2 | R2- | — | Drosophila | GAAGCTGGGTCGGATGAGCG | TAGATGTACTAACCTCTAGC | FERRSNSWGYRPLEPRSVGT |
| | 1_DWi | | willistoni | CAGAAGGGGTGTTCTTTGGA | TTTTCTTATACTTTTGCCTG | ESNNNSPRSNITITSATSRP |
| | | | | ACACTGTAATTCATAAGTCG | CTACCTTGGCATTACATCTA | GDQPREAIAVVNLAGEIPCA |
| | | | | TAAGTCTGATCAAGTCGACT | AAAAGGTACAAACATCGCAT | VCGRLFNTRRGLGVHMSHQH |
| | | | | CGAAACCTCCTCGTGGTGTT | TGTCATAAAGAGGTGGTTTT | KDELDTQRQREDVKLRWSEE |
| | | | | TCCTGGGTGCTGTTGAGTTC | AGTACGTAGGCGCTGTGGGA | EAWMMARKEVELEASGNLRF |
| | | | | CTAGTCTCTAGGTTCTTTTC | CTTCATTGTCCCGGTGATGC | PNKKLAEVFTHRSSEAIKCF |
| | | | | AGTAGCTAA | AGTGAATCGTGCATACGAGA | RKRGEYKAKLEQIRGQSTPT |
| | | | | (SEQ ID NO: 1211) | TTGTCCAGTAGTTGGTTGCT | PEALDSITSQPRPSLLERNH |
| | | | | | CGTATCTTTAGAAGATTTCC | QVSSSEAQPINPSEEQSNWE |
| | | | | | TTCCTCGGCGATCAAAAAAA | IMRILQGYRPVECSPRWRAQ |
| | | | | | AAAAAAAAAAAAAAAA | VLQTIVDRAQAVGKETTLQC |
| | | | | | (SEQ ID NO: 1334) | LSNYLLEVFPLPNEPHTIGR |
| | | | | | | SNLRRPRTRRQLRQQEYAQV |
| | | | | | | QRRWDKNTGRCIKSLLDGTD |
| | | | | | | ESVMPNQEIMEPYWKQVMTN |
| | | | | | | PSTCSCDNTRFRMEHSLETV |
| | | | | | | WSAITPRDLRENKLKLSSAP |
| | | | | | | GPDGITPRTARSVPLGIMLR |
| | | | | | | IMNLILWCGKIPFSTRLART |
| | | | | | | IFIPKTVTANRPQDFRPITV |
| | | | | | | PSVLVRQLNAVLASRLASKV |
| | | | | | | NWDPRQRGFLPTDGCADNAT |
| | | | | | | LVDLILREHHKRWKSCYLAT |
| | | | | | | VDVSKAFDSVSHQAIIKTLQ |
| | | | | | | AYGAPTNFVSFIEEQYKGGG |
| | | | | | | TSLNGAGWSSEVFIPARGVK |
| | | | | | | QGDPLSPLLFNLIIDRLLRS |
| | | | | | | YPREIGAKVGNTMTSAAAFA |
| | | | | | | DDLVLFAETPMGLQTLLDTT |
| | | | | | | VGFLASVGLSLNADKCFTVS |
| | | | | | | IKGQAKQKCTVVERRSFCVG |
| | | | | | | ERECPSLKRTEEWKYLGIRF |
| | | | | | | TADGRARYSPADDLGPKLLR |
| | | | | | | LTRAPLKPQQKLFALRTVLI |
| | | | | | | PQLYHQLTLGSVMIGVLRKC |
| | | | | | | DRLVRQFVRRWLDLPLDVPV |
| | | | | | | AYFHAPHTCGGLGIPSIRWI |
| | | | | | | APMLRLKRLSNIKWPHLEQS |
| | | | | | | EVASSFIDDELQRARDRLKA |
| | | | | | | ENVQLCSRPEIDSYFANRLY |
| | | | | | | MSVDGCGLREAGHYGPQHGW |
| | | | | | | VSQPTRLLTGKEYLHGVKLR |
| | | | | | | INALPSKSRTTRGRHELERR |
| | | | | | | CRAGCDAPETTNHILQKCYR |
| | | | | | | THGRRVARHNSVVNAVKRGL |
| | | | | | | ERKGCVVHVEPSLQCDSGLN |
| | | | | | | KPDLVGIRQNHIYVIDVQVV |
| | | | | | | TDGHSLDQAHQRKVERYDRA |
| | | | | | | DIRSQMRRFFGATGEIEFHS |
| | | | | | | VTLNWRGIWSGQSVKRLIAK |
| | | | | | | DLLIAEDTKLISVRAVNGGV |
| | | | | | | TSFKYFMYCAGYTRS |
| | | | | | | (SEQ ID NO: 1456) |
| R2 | R2- | — | Gavialis | AGGCATCTCCTTKAAGGGTA | TGAGAAGTTGCGAGTTCTTA | PAAPRAWGAVEAGPWPGRTR |
| | 1_Gav | | gangeticus | ATGGTCTGGTTACATGGTCA | TGCAAGTTGAATACCACTCT | AVEPAPSPESSPSEAARAAP |
| | | | | TAGCAGGTTTGTGTCAGGTA | KGKGACCCCAAAAAAWWAAA | AGEGHGPGHESPSVQRPEAD |
| | | | | CCTCCCAGTGGTTCCCGCCG | CCCCAAAACAGTTGTGTTTA | TTAPGVSAPTREGEPPSTRV |
| | | | | GGTGSCAMAGCCCCAGGGCT | AGTGTGTTCTTGTTCGTCCC | FLVRLPDSNPPCPICRDHVG |
| | | | | GTCGGTAGCTCGATCCTGGT | TTTGGCTTCACCTCSAAGTT | KPSALALHCVESHAWADVQY |
| | | | | ACAGTACGGCCAAGGGAGTT | GCGATCCCCCCATCTCCCCT | QCTHCKKVSANKHSILCHIP |
| | | | | CTTCCTTGCTGTCGGGTGCC | GCGCTGCCTTTCAGAACGGC | CCQGRVPEWTGKDWACPECP |
| | | | | TCGCAAGCACKTGGCAGCCC | CGGTGGTGTCGAGGCTGGCG | ASFNKKVGLSQHKRHVHPVT |
| | | | | CAATCGCTTCATTGCGAAAA | CGACCTCGGTCACCTCCAAG | RNVERVAGSLSRAGLRPQTR |
| | | | | ACACAAACGTCCTAAGGGGA | GCCAAGTGCCCTGGCCCCGA | RGCWSVEEEETLTCLDAMFR |
| | | | | TGATCAGCTAGTCAGTTCTG | GTAGGACTGAGTGGCCCAGC | GARNINQLIAAEMVTKMPKQ |
| | | | | CCGCTAGCCAAAACTGTTTG | TCGCTGGGCACCCGTCACCA | ISDKRRQLGLCPEQTTLGGD |
| | | | | CCACCCAGTTACAGATAGCG | TCTGGGGCAAATGGAAGGGA | AESTSVVEEESMTPEMETQS |
| | | | | TCTGTGCTGA | TCTGTCCTGACCACTACCAG | PINPPGKIRKILAQRARRWL |
| | | | | (SEQ ID NO: 1212) | GCTAAGTGTGGTGCGGCCTA | KKGQGLSDKVREVLGAWVEG |
| | | | | | GCCTGCCGTAAGGTCAAGCG | QPRIHAWVDSVSLDVLTLFL |
| | | | | | CCCTGCTGCCACTCAGGTAT | GVPSGPQRAPNKKRPKEGGK |
| | | | | | CAGTCCTCGTTCACTTGTCC | PTSWMNKCAVKWGTFLRYQH |
| | | | | | CTCCTAGTACCCTCTGCCTC | LFGANRKLLVAIVLDGADRN |
| | | | | | TGCTCTTTTGCTATCCACTA | QCTLLLEEVFQAYREKWGLE |
| | | | | | TGGCCAGTGATGTTGAGGTT | EVLRAYRGKWEVESSFEGLG |
| | | | | | GGTGCATCCTTGGTCACCTC | RFGVRRDADNFAFKALITPE |
| | | | | | CAGGGCCAAGCGCCTTGGCC | EVVKHMMAMASKSAPGPDKL |
| | | | | | ACAGGTAGGACCTGGCACCT | TLRDLRRADPEGDALAELFS |
| | | | | | GCCCAGGGGGCCAGACACTG | LWLITGTVPDGLKECRSVLI |
| | | | | | CCTGTGGCAAGGGAAAGGGA | PKTVDREKLGQLGNWRPITI |
| | | | | | GCCGTCCCTGACCGTTACCA | GSIVLRLFSRVLTARLAAAC |
| | | | | | GGCTTGAGATGGTGCTGGCT | PINPRQRGFIAAPGCAENLK |
| | | | | | AGCCCACCATATGTCAAGCA | VLELLLRKRKRDRQPLGVVF |
| | | | | | CTCCACAGCTGCTTGAGTTT | VDLARAFDSVSHDHISWVLK |
| | | | | | GTTGGCTTCACCTTCATCCC | AKGVDEHIVNLIEDSYQKVT |
| | | | | | ACCTAGTGTCTTCTGCCTCT | TRVQVFNGVTPPISIKTGVK |
| | | | | | GCACTATTTTCATCCCAACT | QGDPMSPLLFNIAMDPLIAK |
| | | | | | CGTACCTCCCCATCTCTGCG | LETDGQGVKVGSASLTTLAF |
| | | | | | CTCCTGCTATCCCTGCAAGG | ADDLVLLSDSWEGMLKNISI |
| | | | | | ACCAAGTAGGCAGGGGGGTT | LEDFCNLTGLRVQPKKCQGF |
| | | | | | CATCCCCCTACCTGCAGGAG | FLNPTCDSFTVNNCEAWKIA |
| | | | | | ACTCAGCATATCCATGACTT | GREITMLGPGESTRYLGLNV |
| | | | | | CTTGCCTCCACCGTCTTGTG | GPWVGIDKPDLGTQLSSWLE |
| | | | | | GCGCTAGAGGGGTACCTCAG | RIGTAPLKPMQKLSLLVQYA |
| | | | | | AGACCGGCACAACATGACCT | IPRLNYQADYAGIGRVALEA |
| | | | | | TGACGGTTAGACAGTAGGGT | LDSMNRRKVKEWFHLPACTS |
| | | | | | CAAACAACCCTGCTGCAGGC | DGLLHSRHRDGGLGLPRLAK |
| | | | | | CCAAAGGGCCAACAGCTGTG | AIPEAQVRRLIRVATSSDEV |
| | | | | | CCACGAGAGGGGAACCTTGA | TRKVSYACGISDEVERLWLA |
| | | | | | AGACTGGGGCAGTCTGACCA | RGGDMSSVPRFEDPEAPRSP |
| | | | | | TGCTGGTTAGTCAGTTGGGT | GVQGPCEAAQEIPSVVRKLA |
| | | | | | GAAATAATCCCAGCTGCAGG | IPRPSNWRSKKHSKWAQLSC |
| | | | | | CCCAAAAGGGCTGACAGTCA | QGEGMELFCNDPVSNGWNNS |
| | | | | | GGTGAGGGGGTATCTCCATC | RGQLAEHLQIVALKLRSNIY |
| | | | | | TGCTCCCCACTGCCAACTAC | PTREFLGRSQASTNVGCRHC |
| | | | | | GGAGGCATGAAGTCCGTAGT | THPHETLGHILGICPAVQEA |
| | | | | | GACTTCTGACCCCCACGTCT | RIIRHNKLCKILAAEGKKCE |
| | | | | | TGTGCCATGAGAAGGGAACC | WTVYYELQLLNAAGELCKPD |
| | | | | | TTGAAGATTGGGACAAACCG | LIFVRDGTXLVVNVTVGYEG |
| | | | | | CACTTGAAAGTTACTCAGCC | GPAXLLSTAAEKATKYLDXN |
| | | | | | GGGTGAAAATAAGTCCCAGT | AQIQELTGAEQVTYFGFPIG |
| | | | | | TGCGGGCCCCTCGGGGCTGA | ARGKWHADNXRVLSELGLSN |
| | | | | | CAGTCAGGTGAGGAGGGCTG | SRKERVARLLXWRALLGSVD |
| | | | | | CAAAGCCCATCTCCTGACTC | MVNIFASKHRQENLSDXALS |
| | | | | | CAGAGGCCTGGCGTCCTAAC | PS |
| | | | | | CGACTTCTTGCCACCAATGT | (SEQ ID NO: 1457) |
| | | | | | CTTGCGCCAGGAGAGGGCAA | |
| | | | | | CCTTGAAGATCGGGGCAAGC | |
| | | | | | CGCACTTGATAGTTAGCCAG | |
| | | | | | TCGAGTGAAACAATCTCAGC | |
| | | | | | TGCGGGTCCGAAAGGACTGA | |
| | | | | | CTTCCAGGCGAGGGGGGGGC | |
| | | | | | CTGCGGAAAACCCCCTCCAT | |
| | | | | | GGTACGGAGGTCTGGCATCC | |
| | | | | | TAACCGACACCTTGCCACCA | |
| | | | | | ATGTCTTGTGCCAGGAGAGG | |
| | | | | | GGAACCTTGAAGACTGGGGC | |
| | | | | | AAGCCGCAGTTGATGGTTAG | |
| | | | | | TCAGTCGGGTGAAATAATCC | |
| | | | | | CGGCTGCACCCTGCTGTGAC | |
| | | | | | TGCTAAGCCCGGTCCCCAAG | |
| | | | | | GGGCATGAGGCATGTGCGCT | |
| | | | | | GAGACGGGAGGGGTGACATC | |
| | | | | | TGGCGATCAGCACAGCACAG | |
| | | | | | ACTGAAGGGAGGCACTTGCC | |
| | | | | | GAGAATGCTTCTGAGGCCCC | |
| | | | | | AGACTTGGGGTGGTGCAGCT | |
| | | | | | TTGTCTCGTGTATAGTACAG | |
| | | | | | CACCCTACTGCTCCCTTTGG | |
| | | | | | GCAGCAGAATTTGTCCTGAC | |
| | | | | | CTCTTACCCACCCGAGTCTG | |
| | | | | | CGCTTTTGTTCCACCTCGCT | |
| | | | | | GTCTCCCTGCTGTGCTGTTT | |
| | | | | | TTCTCTCAAGTGGGTTAAAT | |
| | | | | | CTCAACATGATTATCTCCCA | |
| | | | | | CGTTTCCGCTCAAGGGCAAT | |
| | | | | | GCCCAACATGACGGAGATCG | |
| | | | | | TTGGTGCATGGTAGTCACGA | |
| | | | | | GACCATCCGGACCCTCCAGT | |
| | | | | | GGTCGCTATAGTCATTTTGT | |
| | | | | | GTTGCATGGGGCATGCTGAG | |
| | | | | | TCACTTAACCGAAAGACTGT | |
| | | | | | AAATAACTCAAAAGAGGTAC | |
| | | | | | CCTCCGGGGTTCGGTAAA | |
| | | | | | (SEQ ID NO: 1335) | |
| R2 | R2- | — | Ixodes | GTTCCAAAGGAAGGCACTCC | TAGTGTGACGGAGTCCTCAA | MQCTSRLADAPRFARVGVEG |
| | 1_IS | | scapularis | TTTGGTTCGTGATGAGATGT | GCCCCCACAAGTGCCTGCCA | EGVGASGNGTDAQLWYGCTG |
| | | | | TCATGGTGCTTGCCTAGCTG | GGTGGCAGGAAAGGGCAACT | CDEAFSSLRGLRIHAAQKKH |
| | | | | GAGAAATCCGACTCACACCT | ACTGGTGAGCGACCCAAGCA | GNQDGLLRLPAGRPRKRRVG |
| | | | | GCACGTGGTCCCTGCCGCCT | AGGCGGAGCCAAGACCAAGC | KSTTAGASDRVTTDPVPAPV |
| | | | | GCCAGTATGCCGAGGAAACG | TGGAGCCAAGAGCAACTCCA | PESPGLLPGLPGPSLPGCSD |
| | | | | GGTGCAACTTAATCCGTGGA | GGAGGCAGGGGTGGATATCA | LPPGVLPGGWSASPGPLSWP |
| | | | | TACTGGTAGCAACGTGAGCA | AGAGCAACCCCAAGGGACAC | PSLDAGPLPGPSRVSPGPSR |
| | | | | ACGGTACGGTCCTTCGCGGA | AGACCACGGGCAACTACTGG | PSPGKPTGPPSLDAGPLPGP |
| | | | | CCACCCTGGGCGTTCGGGTT | TGAGCGCCCAAGACAGGGGT | SRVSPGPSRPSPGKPPGTPE |
| | | | | GCCAGCCCGTTCGCCCGAAA | GGATATTAAGAACAGCCCCA | PLPGSPGGRRGVSPGQPGSR |
| | | | | TATCTTGGCCCTGAAACTAA | CAAAGTGTTACCTATATTAA | TDPSSSAGAGHFVCPQCSRA |
| | | | | AAGAAAA | CAATAAAGTTGAAGCCTCAA | FSSKIGMSQHQKHAHLEEYN |
| | | | | (SEQ ID NO: 1213) | CCACGCATTGCGGGTTAGAT | AGINITRTKARWDPEETYLL |
| | | | | | GGCGTGGCTTGGCCCGCCGC | ARLEATLNPDHKNINQTLHA |
| | | | | | CATGATGAGCTGGAACCCTC | ALPRGSCRTLESIKAHRKQA |
| | | | | | CACCTGGTGGGCCGCACGAG | AYRDLVTSLRSARESSEAQH |
| | | | | | ACCACCGGCTCTTTCTACTA | VPDRPLETPEPQTPANPQRD |
| | | | | | AGGCCGGTCTCCGTGACTGC | SKQAVIEALQSLIGRAPPGS |
| | | | | | GGTTGGGATAAACTCCAAGC | FQGARLWDIARQATRGTNIL |
| | | | | | ACTGAGCGGTAAAAAAAAAA | PLLNSYLRDVFTLPTKPTRK |
| | | | | | AAAAAAAAAAAAAAAAA | KPAVRPARSRRKQKKQEYAR |
| | | | | | (SEQ ID NO: 1336) | TQDLFRKKQSDCARAVLDGP |
| | | | | | | TSSSVPGTGAFLQTWREIMT |
| | | | | | | GPSPALEAPPLPTRGEVDLF |
| | | | | | | FPATAQEIQSAEIAVNSAAG |
| | | | | | | PDGFSARLLKSVPALLLRVM |
| | | | | | | VNLLLLVRRVPAALRDARTT |
| | | | | | | FIPKVPDAVDPSQFRPITVA |
| | | | | | | SVLQRLLHRILAKRALEAIP |
| | | | | | | LNFRQRAFQPVDGCAENIWL |
| | | | | | | LSTALNEARTRRRPLHMASV |
| | | | | | | DLTKAFDRVTTDAILRGARR |
| | | | | | | AGLSGEFIGYLKELYTTSRT |
| | | | | | | LLQFQGESLLVEPTTGVRQG |
| | | | | | | DPLSPILFNLVLDEYLSSLD |
| | | | | | | PDISFVSGDLRLDAMAFADD |
| | | | | | | LIVFASTPAGLQDRLDALVE |
| | | | | | | FFDPRGLRVNVKKSFTLSLQ |
| | | | | | | PGRDKKVKVVCDQIFTIGGT |
| | | | | | | PLPASKVATPWRYLGMTFTP |
| | | | | | | QGSINKGTSEQLDLLLTRTS |
| | | | | | | KAPLKPQQRLVVLRNYLLPR |
| | | | | | | LYHRLVLGPWSAALLLKMDT |
| | | | | | | TIRGAIRRWMDLPHDTPLGF |
| | | | | | | FHAPVTEGGLGINSLRASIP |
| | | | | | | AMVLQRLDGLHFSTHPGAEV |
| | | | | | | AIQLPFLTGLHRRAEAAAQY |
| | | | | | | QGQRLLSKADVHRMWSARLH |
| | | | | | | GSCDGRPLRESKRVPAAHRW |
| | | | | | | AAEGTRLLSGRDFISITKLK |
| | | | | | | INALPTLERTSRGQHKDIQC |
| | | | | | | RAGCQAVESLGHVLQACHRG |
| | | | | | | HRGRIRRHDNIARYVCGRLT |
| | | | | | | QIGWAVKWEPHYSVAGRTLK |
| | | | | | | PDIVAHRGAETVVLDAQVVG |
| | | | | | | TSMRLGFHHAQKKEKYSLPD |
| | | | | | | LLHQVCEGRRDAARVSTITL |
| | | | | | | NFRGVWAPESAQDLKSLGLT |
| | | | | | | DNDLKLLTVRCLQGGAQCFR |
| | | | | | | LHRRMTTVVKATGDEANALP |
| | | | | | | AHSGLPPTQLGGRTLGPSAH |
| | | | | | | NQSARTT |
| | | | | | | (SEQ ID NO: 1458) |
| R2 | R2- | — | Mnemiopsis | TGGGGGCCCCTTGGACTTGC | CCATGCTCTTACCAGGCCAC | MSNTSHSKLNLKMDNKLKTS |
| | 1_MLe | | leidyi | TCCCTGGGGCAGGACACCAG | TTGACGGCGCTACACCGGTC | LETPSGVRADSIITRVRTSS |
| | | | | TGAAAGGAGATCCTCAAGAC | TGTAGGAGGGTATCTCAGCG | NRGEHSNGVTYPRCEQGVAP |
| | | | | AGGACAGAGAGACAGGCACA | ACTTGGACAAAATGGATCTT | LDTHGGICDAPPQVTVPATE |
| | | | | CCAACCCTTCGAACCTGAGG | GACTGCCTGAGGGCGCTTAT | TDKQKKCEYCEFTYLKPRQI |
| | | | | AGACACCCAGATCTGGTTAC | CGAGTGACCCAGAGTAAGCT | GTHMRKRHPQEWNDIKRTKF |
| | | | | CCCATTCCTGTAACCATGGT | GGTAGGAAGAATCTTGCAGT | LSEKRQKRWLDEDFELLCIG |
| | | | | TGCTCTCCGTGCGCTGTTAA | TGAGAGGGCTAGTAGGGCCA | QEEYLVLSSIGKQGKGINQY |
| | | | | GGAAACCCAGCCTAGTACCC | GCCTCTGCTCGTCAACTGTC | IQTKYFPTLSTDAIKSQRKS |
| | | | | TCGGGGAAAGGTTGCGTAGT | CTAGGCGTTAACGTGTGCCT | RRFSEYSEKRSRELQPCNTS |
| | | | | ACTTAGCAGTGTGCGGATCA | CCCTATGAGGTAACCGTGAA | SDPEELPNEAVTENSPLSFD |
| | | | | AACCTCTACCGGTCTCTCTA | GTATTACTTGTTTCCCTGTA | PLDRDVVKKISSKDHGDQIL |
| | | | | GCGATGAAAGTTTCTCCGAC | GAGACCATATAACTAGCTGA | LVQEHLINGRYQEANTLAKA |
| | | | | TGGAACTTGAGGGACTGGCT | GAAACGCCCTGCGGGTTAAT | IFEKLSGKFPNLKTGDHRPG |
| | | | | AGCCCAGCTAGCCTGTAGAG | ATATAGTGACGAGAAAAGTC | KQQTARKVGKKRVRGSGKKL |
| | | | | CAATGCGTATACGATGCCTT | GCTTTATCCTTACATAACAG | SPSKQNRRELYAIVQKQWRT |
| | | | | GGCGACAATGGCGACCGCTG | TGTGATAGTCATCCTTATCA | KKRSKVINQILTGNLNKEQS |
| | | | | CTTAGCAGACGGAGGTTAGT | CAACTGTCCTGGCGAACAAA | YTHTPDQLAQFWSTLFGRVS |
| | | | | GAAAGGGCGACTTGCTGTTC | ATGGCAGAGGGATAGTACTC | PRDDRPINHRRSVIPELDKP |
| | | | | ATAGTCACGTGAGTCGTCTA | GGTCCAACCAGAAGGAAGCC | LSVEEVEAALKGAKDAATGI |
| | | | | GAAACTTATACGCACCCAGA | CACACGATGCCAAACTTGCT | DGVPISHLKHLGSAALTILY |
| | | | | GACTGCACCGATGCTGCCCT | GTAACCCACGTGAGCGGAAA | NGLYVTGSIPDPWKRARTIL |
| | | | | CTGTTCCAGGAGAAGGACAG | ACATCCTCCGAGTATAGTAT | IPKSNPPASPGDYRPISISS |
| | | | | TGGAGGACTAAATCGTAGCG | GATGGAAGGATACAGGATGT | YFYRIYTSAISKRLASAVSL |
| | | | | CGAGCGGTGTT | GGACCGCTCTAGGCGGCGGA | DDRQKGFIKEDGIRDNLSLI |
| | | | | (SEQ ID NO: 1214) | CGGTGTAGACGGCGACCTTA | DTLINETKAGSKSLFMTFMD |
| | | | | | CCATAGCTGCGACTGCTGTG | VKKAFDSVSHYAIARSLEWA |
| | | | | | CGATCCGGAACGGGCCTTTC | GVPDGMRSVIADLYQDCTTD |
| | | | | | TCACTTACCTCAAGCACCGT | ICGRSVKVTRGVKQGDPLSS |
| | | | | | GTCGGATCGCGGGGTGGGCG | TLFNLVIEMVMSNVPERLGI |
| | | | | | CGGGATTCCTGCTGGGAAGT | QFQGHRLFYLAFADDLVLLT |
| | | | | | TGTCTGCACCCAAGTCGTCA | RGPTANQKLVSLVHEQLARV |
| | | | | | GCTAACTGTCGGTCAGTTAC | GLELHPGKCKSIAIMADPKR |
| | | | | | CGCCGTCCTGCATCCCCGAG | KTTFVDQGSSVLIGGEPVSS |
| | | | | | TTGTGACCAGCGTACAGCCA | LGPQEWYKYLGIKLGSGGMP |
| | | | | | TGTACCACGGCACTTCCAGC | QGIYRDQLADLLAKTDSAPL |
| | | | | | ATTCTCTGGTCTAAGAATGT | KPQQRLYILRSHILPKFNHR |
| | | | | | ATCAGCTGGCCCGCCGAAAG | LMFERVTCQTLEGLDKLIRT |
| | | | | | ATAGAGCGACCCCGCCTCTA | HVRKWLKLPKDTPGPAFYAD |
| | | | | | TCACTAGAGTAAGCAGGCAC | KGSGGLGLITLRYRVPLLKL |
| | | | | | GCGAAATATATGCAGGACGC | RRHKKMADSPDPVIRLIPNA |
| | | | | | CTTGGCTCAGTAGCTCTGGT | EPTISLLARWTKMCSLYGKQ |
| | | | | | ACTGAGTATAGCATGGCTGA | YQHKSELSKIIRDKYWTMCD |
| | | | | | ACGCCCCTTTAAGTTCGGTG | GKGLRTEVPPDTAKKTLSLL |
| | | | | | GCCCAGAGACTCTCCGAGAC | FEDRTPLKPGQLIGAIGVRL |
| | | | | | TTCCCAGTCCTGGAGAGGGT | NTLGTPARNNRAKGYSPEAN |
| | | | | | ACACCTTTACCAGAACTTTC | ICDKCPGNRQATLGHISQTC |
| | | | | | TGTGGTCGGTTG | PATHGRRVKRHDKIVNRIAK |
| | | | | | (SEQ ID NO: 1337) | ALKERGSVKNILTEPHLRHD |
| | | | | | | KLPLRKPDLIVHTEKSVEII |
| | | | | | | DVQVVADQGISRHEDEDQQK |
| | | | | | | KIVKYDVDGYKRAAYKMLGI |
| | | | | | | DYGSIPCNVSAFTITWRGNL |
| | | | | | | APHSLKLASRLQFSPVLKYI |
| | | | | | | VADSLVDTWGAFLIWGKTS |
| | | | | | | (SEQ ID NO: 1459) |
| R2 | R2- | — | Petromyzon | CTATTAATGGGATGAAGAAG | TAATTTAAGGTAAAATCGTG | MNERLTDELTTEFILSDMFL |
| | 1_PM | | marinus | GGGGACACGAGTTTGTGTGT | GGATTGTTTTGATGGCAATC | WDYPCTDQNKCYPCNLVFLD |
| | | | | GCATCCAGTTTCCATGGTGC | TGCCTAGTCGCGGCCTTCCA | HRTWSSHMARVHPHANKTYK |
| | | | | ATGCAGGAGTGGTGGTTTAA | TTTTGGGTAGGCAGCAGACC | CRICNRTADSIHKIASHYGR |
| | | | | ATGGCGAGACTCTACAGGGC | CATCTATATAACAAACTACT | TCKSLIGKTNAITTTIDETL |
| | | | | TTCCATGGCTACACGGGATG | TTGCCTTTCATAGGGGTACC | FSCLHCSRGFTTKTGLGVHT |
| | | | | CAAGGCATCAGACATTTTGG | CGACCCTACCAACTTTCGGG | RRTHPTEHEAILQQNTPGRK |
| | | | | CACAGGCAATCCTTTTGGTC | GAAGTAAAAGAAA | VRWGEEEVEIMAHKEAQQKD |
| | | | | TCTACCGCAATCATGTCTTA | (SEQ ID NO: 1338) | EDINMNQLIQNSVMPHRTLE |
| | | | | GACCTCAGTAGCGACCACTA | | AIKGKRRNIKYKELVRTLKE |
| | | | | CAACCACAGTGGTGACTGCT | | TTYKVENQCLVNLVLPTTSE |
| | | | | GTTGAGTGAAGGACGACTGA | | ITTTPSEGDQPAIRAEKEQS |
| | | | | GCGCTGGATAACAACTTTCT | | PTAAEDLQVIINDLKSQNFS |
| | | | | TGCGTGGCCCAACATCGAAG | | HNQALLLLNSHVEKFLNRSK |
| | | | | CAACCACTTCGGAGCTGGCA | | PIKRKDHVNQQEIDENRHRR |
| | | | | CAAGGCAAGAGGGCAGCCCA | | QSKQTKYRRYQYLYHTNKKA |
| | | | | AGGTGTGAATCATCTCAACT | | LLDEITSDRSGPSIYPTEES |
| | | | | TCACTGCAGGAAGAAATGCT | | IRGTFVTLFESNSPPDNIPS |
| | | | | GTGCAAGGATGAGTGTGAAC | | KLKNDQSCIDIVKAITLDEL |
| | | | | GACACCAACGGGATTGTTGC | | IKTLAIMKDKSPGQDNITLS |
| | | | | TGACCAGGAGGTGCCAACCA | | DLRTLPIKYLLDILNIILYI |
| | | | | AATTTGAATGGATTGACTTT | | QDIPQIWKQHRTRLIPKTKE |
| | | | | GGGCCTGGTTTCTCCTGCGT | | ELEKPSNWRPITISSIVIRL |
| | | | | GTATTGCACGGAAAAACAAG | | LHKILSYRLGQQLKLNYRQK |
| | | | | TGGCTACACGTGTGGCCGTC | | AFLPVDGCFENSALLHFIIH |
| | | | | GTGTCCTGGGGTTTCGCAAC | | NARQKHENTQIVSIDLSKAF |
| | | | | ACAACTCCACAAGATCGACA | | DSVSHESIIRALNRFNLSKE |
| | | | | ACTATGAGGATGACAATGTA | | SITYLTNIYKCNLTDIVFGS |
| | | | | CTTAAAGAACAAAGAGACTG | | TIMRNINLKRGVKQGDPLSP |
| | | | | ACGCCAAAGGGGATTTAAAC | | LLFNMIMDELLDNLPTYIGV |
| | | | | CGCCAAATCGTACATTGGGT | | NVGNQKVNSMMFADDLILFA |
| | | | | CTCACTACAATTTTTTTACG | | ETECGMNKLLDITTKFLDDR |
| | | | | TGTATTTATTTTCCTAAGTG | | HLKININKCNSLRFIKYGKQ |
| | | | | TCTGTACTTGCCATTCTTCG | | KTFSVATTSSYFINNEPINP |
| | | | | CTGCTTTTTCTGCATTAATT | | VSYVKGFKYLGIEFDPRGKR |
| | | | | GCATATCGTATGCAAATAAG | | SISCNLLAAMLNKLTRAPLK |
| | | | | CGAATTAACCACCACCGTGC | | PEKKVYLINNNLIPRIIHQL |
| | | | | AACTATATGCAGATGTTACA | | VLGKVTKGLLMSLDSEIRKT |
| | | | | GCTGAGCCCTCTATCATACC | | VKLLLRLPHDTPDSFFYTSV |
| | | | | GGTGTACTAATCTGGTATGG | | SNGGMGIRNLCDSVALSIIN |
| | | | | TGTTGGCATGCTATGCTTGC | | RHNKLITSDDLVIRALSQQS |
| | | | | GTAACGACCTTTGCTGATTG | | YTIATLKQAHIIAGSKFPSK |
| | | | | GTTCAGTCGGCTGATGGTGG | | SLNQNKWSNKLYQTTDGRGL |
| | | | | GTTCAGGCGAAACATTTGTA | | VYCQSQTENNSWITGNHRTI |
| | | | | TATTGGTTTAATCAAACCGA | | KSYNYIDMVKLRINALPTKS |
| | | | | AACACTAAAATTTTGAACAC | | RCNRGTLETKQCRFKCRSIN |
| | | | | AGTTTTCCATTACACCAGTT | | NQISEETLAHILQKCDRSHY |
| | | | | GTATTGCTAGAAGTGCAAAT | | SRIARHDSLVQFLATAAQKL |
| | | | | CGAAGGAGTCAATTTTGACC | | NWEVIKEPTLPSDTNKAKPD |
| | | | | GACGATTAGCTGCCGATGTG | | LILVRDSHVLIVDVAVPWES |
| | | | | CGGTGAAAAAGCTGATCACA | | RSLAHAYDFKVKKYATDKKM |
| | | | | ATAGCATACACTTGGGCCGA | | QAYLKTIYPEKEIRTEALII |
| | | | | CAACCCCGTGTGCTATAAAC | | SARGGWCALNNMVTKKVGLS |
| | | | | GTAAGTCGCGAATTATAAAG | | SAWVKLALIKVMEGSVKIWR |
| | | | | AAAACAAACCGGACGGACTA | | SWSKG |
| | | | | CTCGGTGACGAACTAACATC | | (SEQ ID NO: 1460) |
| | | | | GCTC | | |
| | | | | (SEQ ID NO: 1215) | | |
| R2 | R2- | — | Schmidtea | CAGTGCTATTCGAATGTCAA | GGCCACGCGCGTCGTCCTTG | MKKVLNNETEKLPGSNLTFM |
| | 1_SM | | mediterranea | TGTGAAGAAATTCAACTAAG | TTTGATCACTAGTGGATCAA | CGFCDREFDTARGRGVHESR |
| | | | | CTCTGGTTAACGGCGGGAGT | CCTTCGACTCCCCGGAACTG | GHLVERDAAVQSRVKAVVSK |
| | | | | AACTATGACTCTCTTAAGGA | TGGGAGTGGCGGAAGAAAGG | KYYYSNEEDVALAKMQLXHA |
| | | | | ATTAAGAATTTACCTGCCKT | CCAGAGGATGTCCTGAAACC | DLAKSEXLEAMYLALGKGRT |
| | | | | AKTAAAARTGAAATCMGTTG | ATATATTTATTTATAGAAGT | REAIEQHIRKSLRYKGVLEE |
| | | | | TTCATWGCAAGTGGTATTGT | TTTACTTCATCCTATTTACG | QRKLLETARGNVRQNNVGVP |
| | | | | ACACCTTCCCGCGGTGCTAG | TATTTCAGTATGAAAATGAG | ASNATKNLORFLESLPLGTN |
| | | | | TCGTTTAAAACTAAGTTACA | TAAAGTTCTCGACTCGATGA | RREERLDRIIRSNSIESQRL |
| | | | | AACCACGAGGGGCGTCCTGA | GTTGGGGGCAACCATTGGGG | ELIHYCNDMCQDFVQLDCQX |
| | | | | CGGACTGSAAAAGCATTGAG | GTCCTGAAGAGAGGCTCTCA | NPINAIRRRNPKRLSKKQLK |
| | | | | RGTCMTGAAGAGAGGCTCTT | CTGTAAAAAATCTCTTCGTG | RAKFSALQRLWIRDRKAAAQ |
| | | | | ATTGTACGAATCTCTTCAAC | TCTGTTTATTCCTAGGCACN | LVLKDKLDSLLSNKEDSKDL |
| | | | | GATCGAAGTCTGGACCGATA | TGCTGCATTATGAAGCGGWG | GSYWQQVFERESELDRRPIP |
| | | | | TGAGAACTAATACATTAGTT | AAAGTAAAGTTAGAGCTGAG | QVVENEELNSPVLEKEVEWA |
| | | | | GACAGGTGAAAAATACTGTT | AGATAGGTACTTGCTGCATT | VKNIKKSTAAGPDGLTALAL |
| | | | | GATTACTTAGTTCTCAGTCA | ATGAAGCGGAGAAAGGCCTC | KKIPYSELVKLFNIILLVGF |
| | | | | TGTGGTATATTGCCAGTCAA | GAATAAATAGGGTGTTAGAG | LPDVLKNSRTILIPEVDNPQ |
| | | | | TTACTACATWAATATTAGTG | TTATTGATGGAGAGTATACT | GGGDYRPISINSVLTRTLNK |
| | | | | TGGCTCTCAAAGGAACACGA | AGTAAGCTTAAGCTGCGCCT | ILAKRVSEGDFGINGQKGFK |
| | | | | TTGRTCGGCAGTCCAATGCG | CGCGCGGTGCCCAAAAATAT | SVDGCLENLATVESILADAR |
| | | | | CGACTGGCGGGCTTGTTGTT | ACTTAATGAGAGCAATAACT | MKKNKLAVVFLDMSKAFDSV |
| | | | | TGCATTTGTTACCGGCTACT | CAAGGNGAGTTTAATTCATA | NHESIVRAGEIKGYPKLLMT |
| | | | | TGAAAAGGTTATATATAGCA | TGCGCATGCGGCACCAAGGT | YVKECYNDATTNVAGVTAKF |
| | | | | GACGCTTAAAGCGCGACTGT | GCTGAATGGCATCGATTAAA | NRGVKQGDPLSPALFNNVID |
| | | | | AATTTACATYTCATTGCCCA | CCTCTCCTGTTGTAGAAGCA | LAIERVSGTGIGYNMGGKKY |
| | | | | GTATTTGTCTTTTGTCAGAT | GGTCATAAATGGAGGRGGGC | SVVAYADDLVLFGESREGLQ |
| | | | | TTAGCAAAATTTCATATTTT | AACCACTGAAACTTATGAGC | IALTALLEELKLNGLTPNPA |
| | | | | GTTAATTACCTTAACTGGTT | CAGAAGAAGCTTAACTACAW | KSASLTFERSGPHWFASTDT |
| | | | | AAACGATCCCATAATTGCTT | AAGTTTTAGGCAATTACTGA | VTALGDQIPAMGNIETYKYL |
| | | | | GCAATTATTATAAAGTAATT | ACGGAGTTAACTGTTAGTTA | GIKFNSCGVVKGSLPGIYTK |
| | | | | CAGGTAAAAATTACATATCT | ACACTACCATGTAGTTGTTT | KLELISKAPLKPQQRLAMLT |
| | | | | GGCTGATCCTGCCAGTAGTC | ATAAAGCAAATATCAGGTTT | DFLIPGVLHQAVFGQTNAGD |
| | | | | ATTTTACTTCCGCCGCGCTA | CAGTCTATATACTAAAAGTA | LRSLDKRTRRAVRSWCHLPS |
| | | | | TAAAACAGTTTAAAAACTGA | TTTTTTGATACCGTGGTATA | DTSTAFIHAKAKDGGMGIPS |
| | | | | ATAGGAATCAAAAAGAACAT | TAGGCAACTAGTTAGGAAAT | IRAEVQFGKLDRFGKLPNVK |
| | | | | GGCAAGCGACTATATGTAAC | AGTAACATATGGTGGTGCCT | DERSKVLADNAHIKKKMLEK |
| | | | | TGGGCATTCAACATTCCCTA | GGGGGGATGACGCATTGTCT | LGVGIPIKGVRCKNKLEFYN |
| | | | | TTAGTATCACCAGTCATGGT | CGTCTGTTTTATATAATGGG | KMREELIKSNDGIGLKEASL |
| | | | | GCCATATCTTTKGATAAAGA | TCTTTATGGTACTGAGGAAA | VPSANTWLKLSDLHMSGRTF |
| | | | | TACAGTTTAAAACTGCGATG | CTTATCGACTCGCGAGTACC | VGCLKTRGNLMATVTRTSRG |
| | | | | ATACTAATAGAGATCCTCTT | CGGGAAGTGGATCTGGATGA | GQNPGIELNCKKGCQYQGSL |
| | | | | AGACCTTCGTAAAGAAGTGG | AACCCGTAAACCGATCGATY | NHIVQKCPVVKGLRIKRHDE |
| | | | | GGATTGATGACATTAGCATT | TAGCCTATAAGTACCAGCGA | VVKYVEEITKKAGWSATMEP |
| | | | | GGAAGAATTAAATCTCCAAG | CAGTTAAACCATCTTACGCG | IIPFEGSHRKPDLVLVRGDL |
| | | | | GAAATGGAGTAACTTCAATG | AGGGGTAAAACCTGAGGACC | GKVVDIQIVSDHCGLDEKNS |
| | | | | AAGTCCCACAACCCCGTTGA | GATTATGGTATAACTTCTCA | CKIGKYDNDIIRNYVRGLGP |
| | | | | AGGGCTGGGTTCGAGTATCG | AGATTAGCACAAAATGCGAG | SRVEVAAITLNWRGVWSRDS |
| | | | | AGAGAAAACTCTAAATTCTC | TGCAACTTGAGGAGGAGGAT | FNLIKRLGMTEMDAKIISMR |
| | | | | TTCGGTTMTGTCCAACGGAG | TTGAGTGTTAATTCATAATG | VLASTAKMFKTCKKVLEPVC |
| | | | | GGGACATTACTGTAAAATAT | TACTAATCTAATTAAACTGT | RTKTADCDGYGPEETSARPC |
| | | | | CCTCTAAAAACAACT | GACGGGAATTGCAGCTTCGG | HELNLKESSGT* |
| | | | | (SEQ ID NO: 1216) | CTGTAATTACTTTGAGGCCT | (SEQ ID NO: 1461) |
| | | | | | ATCACGGATTGTAAGGAACA | |
| | | | | | TATTGACACCGTAAGTCTAA | |
| | | | | | CGTGTTCCCGATTTCCAACC | |
| | | | | | AGGTCATATGAAGGGCTGCC | |
| | | | | | CTTGATAAGGCGGATTTGAC | |
| | | | | | CCAATTCTTCATATGAGAGG | |
| | | | | | CTTATTCCAGCCTTCCCGTA | |
| | | | | | GTACCGTGAGGTTTTCCCGC | |
| | | | | | CTCGAACGGAACAATGTTGC | |
| | | | | | AGGGTAATTAAGTACATCGG | |
| | | | | | GCTATATMGCGATATTTAAC | |
| | | | | | GTTTTA | |
| | | | | | (SEQ ID NO: 1339) | |
| R2 | R2- | — | Strongy | TCTCGCGACGCGTTCTTCTG | TAAACCTTGCCTCCCCGGGC | MENSFAWEGTSSAEGRTTVE |
| | 1_SP | | locentrotus | CCTGATGAAGTCACGTCAGG | CCCCCTCAGTGACTAAGACA | DSPSSSDDFVSNVGFKVAKA |
| | | | purpuratus | TAATAGACTTAGAAGGTTGA | ACTTTCACCGTAATAATCAT | DPTVWEEANMSEDNTIIEDP |
| | | | | TGAGCGTTCCTCTCCTGGAC | ATATTTGTATACCATGTATT | PSSSDDFANNVGFKVTRADP |
| | | | | CGGGGGTGAGGATGTGTTCT | AATCTAGGTAACAATTGAAA | TAWEEASTSTETEDLPSSSN |
| | | | | ACTGAATCATCGTTCCGGTT | GTAACATTGAACCGTATTCA | FIDNVETQIDMAGPTAWEDA |
| | | | | GTGAGGTCCGCTGCAAATAG | TACTTTAATGAGTACAATAG | DSNEDNIDEGTPNNINNNLA |
| | | | | GCCTTGGGGTGGTCTACCTC | TGAAGGGAACTGTATATTAC | IVRGRADAYACSCCERNFIS |
| | | | | CGGGTCGCTACTCCTTTTGA | ATACCTCGAGATAGAGGTTT | LKAIGTHLKETHNKKVVFEC |
| | | | | GCTAGTCGATCCAGGTGAGA | TTGTACCTTAAGGGTTCGTG | AKCQHTFVKAHGLACHVPKC |
| | | | | GTCGGGGAAGCCCACTTAGG | AGAATCCATACTGCATAAAG | KEDADTPMLNRLLHGCGECG |
| | | | | TGGGCCAGCTAAGCAGATCA | GGGTTAACTTGTAACTCAAC | LAFNTRRGLSQHERHRHPSA |
| | | | | CCCCCCCAGCACGACAGTGC | CCCAGGGAGACAAGCCGACA | CLSTRRRSRLDGIARKKSLR |
| | | | | GCTGTAATATAGCCTGTTGA | AATTCGGCATTACTATGTGA | NRRDIWTNDEIRLLKQLMIQ |
| | | | | GAGTGCACCCATTTATAA | GGGTCATAAGTGTTAAAGGA | YEHAKKINIKIAEHFNHKNA |
| | | | | GTTATAAAAGTATAAATGGT | CCCATTGTATATAACTTGTA | KQVMHKRRSLREKDMALGAP |
| | | | | TCTTAGCTAACCTATCCAAT | AATGTACAGAGAATTCGAGT | HDAPPPLAEEPIIEVVEGAR |
| | | | | GATTTTTATTGTTATGTATA | TGAGTTCGAAGAATAAACAA | EELEQAPVDVILPDLEALTV |
| | | | | ATACTGACCACTTTAGTCTA | ACAAAAAAGAAAACAAAGAG | NDGRGGGSPVLTEGGESTRD |
| | | | | GTGTCATGTAAGGATCCGAG | AATTCGTTCGTCCATAGAAG | MEENGGTDTRSPSPREERAG |
| | | | | ACAATAGCCTATGTCTCTAG | CGGAAAAAGCGCAAAAAGGC | STPWERGWQPRVDRGRGEYK |
| | | | | TCTAGCAATAACACAAGAGG | GTCCTAACCTCACGGTCTAA | GYGGERGDRHTVSLSQRGES |
| | | | | GATAATCCACCTCCCTACTC | CCCAGAAACATTTAAGGGGG | GVDPLTPGGVVEDYDDSYLE |
| | | | | CAGCCACCACCTTTACCTTT | GAAGGAGCTCATTACTCCAA | DYFPGWDEDEHMHIIGRLDL |
| | | | | CTTATCTTCCATATAGATGC | TCCAAAACCACGTTCCCTAG | SDESEQGEAAVSPRLGSFGD |
| | | | | CAACCAGACGGGTCGATGGG | CCCAAAAGCGCGCTTCAATG | LLEEVNAMEGKDNLSEALAE |
| | | | | CAGTGAGAAACAAGAATGGG | AGGGAGCCGATATTGGAGGA | TLGLVLHEGHRVEYIKEKMN |
| | | | | GATAATTTGGAATTTGACAT | CAGAGTTCATCAAAAGCCAC | INVKQMATEILAHGANKGNP |
| | | | | TCTTTCCTAAAGCAGACCTG | CTGTAAGTAGGCCCATTTCT | KRRKEAVAAKRNPGTRLDRA |
| | | | | AAGGGTTAAGAGTCACAAGC | GCCAAGGACATGCGCAAAAG | QRDNQAKAKAKEKKRIFSET |
| | | | | GGAGTCCGGACTGTCTTTAT | GAAGCAGATTATCAAACCAG | QTQYKKNPHRLVEKLLDGKG |
| | | | | AAACAGACAATATTTTCTTA | TCAAACAAGCACAAACATTG | DERCSVSLEVIQRTYMNRFS |
| | | | | TTTTACCACCTATATGGGGA | GGGGGATGGGATAACCCCGG | RESKEVDIGAYVDPETVEDN |
| | | | | TATTTCCCAACTCGTAATAT | AAAGAGAGGGATCTTTAGAT | QGIVDPISKAEIERAISTTK |
| | | | | AGGGCCCACTGTCAAGTGGC | AGTGGATGGAAGGGGTGGGA | KGSAPGPDGVTYDALKAYGN |
| | | | | TGGTATAAGTTACCCTGTGG | CGTTGAATCCAACCATGCCG | CQLYLLIMYNTWLAMGKVPS |
| | | | | GTAACAAATAAATTCAAACA | TTTTTATGTTCCCGATAAAG | EAKTYRSILIPKGQGDPMDI |
| | | | | AAGA | AAGGATAAGGTCACTCCAGC | NNFRPLTLANVISRLYSKIL |
| | | | | (SEQ ID NO: 1217) | CTGACACACAAAGTGGGGTA | TRRLDGAVSVCPRQRGFTHK |
| | | | | | AAAGAACTCCGCTCGTACGG | ASIEDNTLILRELIMKSKRN |
| | | | | | ACTCCAAATAGAA | KECLAVVLLDLAKAFDTVSH |
| | | | | | (SEQ ID NO: 1340) | DLIIKALRRHRVHEHLISVI |
| | | | | | | MDLYEGGTTSFTTDEGTTCP |
| | | | | | | IAIRSEVKQGDSLSPVLFNL |
| | | | | | | ALDPLLATLEQRGKGVEIGG |
| | | | | | | HTFVSLAYADDTALVSSSHL |
| | | | | | | DMTANLDITVEYLNATGLSL |
| | | | | | | NVRKCQGFLLTPINKSFLVN |
| | | | | | | EAESWVVEREAIPWVEPGDT |
| | | | | | | AKYLGVQVGPWSRPWPSIQP |
| | | | | | | VIKRLTAYCESIDKAALKPR |
| | | | | | | QRIHILTTYIAPRIAFEIAE |
| | | | | | | GGYSTLVDCRGGIQYTRIRE |
| | | | | | | VDMTIRNYVRKWLFLPACLS |
| | | | | | | NSFLYTRRGEGGLGLVSFYD |
| | | | | | | YVPTERMRKLVRVCDSEDPV |
| | | | | | | IAGAAASLGLRERAAKISAQ |
| | | | | | | TGLPVPVKPKGAHNAWRKVQ |
| | | | | | | KKKWKAQPTQGKGVSCYQHR |
| | | | | | | LGNKWLGAPSFLTENDYIWA |
| | | | | | | IKLRTNLVPTREAMGRGIIG |
| | | | | | | RNQVECRHCHTTIETMGHIS |
| | | | | | | GYCQMVLDIRLIRHNRICKA |
| | | | | | | LIKAATATGLRVTEEPRIVG |
| | | | | | | TDGKNYLPDLIFSAGAGEPC |
| | | | | | | YVVDPTVVWDDDPKNLREAW |
| | | | | | | RGKVRKYTPIIPAVEAMLHP |
| | | | | | | SSVQIFGFVCGARGTWCPMN |
| | | | | | | DDIAKIVGLKNSGISRTLQI |
| | | | | | | VLCDTIRMVKAFMAR |
| | | | | | | (SEQ ID NO: 1462) |
| R2 | R2- | AGKD | Salmo | AATCTTTAACCCCGGACTCT | TAGATCCGTTTGTTATGATT | MSGKRIVEMSGCDEKICQNK |
| | 1_SSa | 01072 | salar | TGGGGTTCTTACGACTCTGT | GGAGGGAGCCTGCCGAGTGG | HCLKRRWAWISGPKGETSPP |
| | | 455 | | ATGAGGAACAGTCGAAGAGA | TATGAGCGCTCCAACTATTG | RKRGTCENVSFQDKSHASDP |
| | | | | GGGCGCTACCAATCCAAGTA | AACCCATATGATTCCCGAGG | DPLKAPEAREDAGSVAPQWV |
| | | | | TATGTCCCAAGAGGGCTGGG | CCTGGCCAGACGCCTAGATG | GEIKTPSLTSRDGVSEVVLP |
| | | | | ACAGGGTGGAAGAGTGCACC | CCTGCCACAATTGAACGCAG | PQPVHAEGVSPASDSKDKAT |
| | | | | TCGCGATCTGGGGCAGGGAA | CCCTAGCTTGCTAGGAGATC | KITLLISLPVCDLRCGRCER |
| | | | | GGAATGGAGAGAAGTCGAAG | CATAGGAACTGGCCTATGGG | PLETVGKAVRHFAVAHPTVS |
| | | | | AAGGCTTGTAGAGAAGGGGC | GCGTCATGACGGTTGAAGTT | VVFKCQKCEKSSKNSHSISC |
| | | | | TCTCCTAGATCCTAACCTGT | CCTCCATAGCGTGCTTGGGA | HIPKCKGMTETRTDVEGDHG |
| | | | | ATGACGCCCGTAAAACGGTG | GGGGACGACAATGACGAGTC | CDHCQEKFTTAMGLTQHKRH |
| | | | | ACCCCAGTAGCGAATAAAGG | ATGACGTACCGAGAGAACCC | RHIVQYCKEKEGEMTARRKG |
| | | | | AGGCAGGTGACAATAGAGGG | CAACCCAGGTTGGGGGAGAG | EVEAVKWSEWEESEVARLSD |
| | | | | CAGGGCCGACTTCCCAGGTT | AGCCAGCAAGAGCGGAGATG | GLAGLKMINRRIADSLGTGK |
| | | | | TACATTGTTGTACTTGTCAA | CTTGGTATACCAAGCTAGCA | TAEQVRQKRRRMRPEKVRCD |
| | | | | CATAAAGAGGTGTCTCAATA | GAGAGAGGGTTGAAGAGGAT | KPKEAKDKSNLIKMLSIPSA |
| | | | | GTTTGAATCAACAAGGGAGA | GACTACTGGGCTCAGAGTCA | TPTPQTGLKGFLLGELNGVA |
| | | | | GGAATACCGACCTGCTCCCT | TCTCACCCTAAAAGGCGGTG | TKGEVQIGGVTLSLRGVEQD |
| | | | | TGGGGCGGGGGTACTGGTCT | GGGCATCGGTTGAACACCTA | SALLNTSALELQRLLGGRAG |
| | | | | TAGCCCGGTTCCCCGCAAGT | CCCATACCGGGATGGGAGGT | SANPLSLQRERETTLPSERR |
| | | | | TTCCTTTGCCTGGGATGTGC | GGTAGGCCGAAAAAGAACAG | KTKQGEYRRVQKMFRSNEKK |
| | | | | CTGACTGGCTCCATCCCCTT | GAAGATGGTGGAGTAAGTTG | IAKYILDGNGDGEAASPPLE |
| | | | | TCCCCATTAGGCACGGCTAG | AGAGCGGTTGCTCGGGAAGT | IALAFKSRWEEVETFHGLGQ |
| | | | | ATGACGCACCGATGGGCGGG | TATGTTGTGATAACTCCATT | FYSRGEADGVVFRSLISMSE |
| | | | | TGTGTAGGTCGCTACCGAAG | AAGGCCGGTGGGCATGGTGC | VCENLGAIKNNTAAGPDGIT |
| | | | | GGGACTGGGGGTGTCCGGTG | GGATAATGGAAACTATAAAA | KPALLEWDPTGAKLAAIFSI |
| | | | | AACCAGGACTTCCCAAAATG | ACAATAAAAAGAAAGACCAA | WLTSGTLPGPFKKCRTTLIP |
| | | | | GTCTCACATTTTTAAGCGGC | AAAAATGTTCTGTTATGATG | KTDDPILLTQVAGWRPLTIG |
| | | | | TTGAGTATCGCCCAGTATCC | CCTTACACATGTCTGGGAGA | SVVLRLYSRILTHRLERACP |
| | | | | TCGCGCGGCACTGGGAACCC | CCCCATAAGGGTCTCCCCTT | INPRQRGFISSPGCSENLMI |
| | | | | AGTCAACCGCTCTGTGCCCC | ATACTTCACTGGGAAACCCC | LGGLIKRSWAKGERLAVVLV |
| | | | | GGCGCAGGCGGGGGTTTAAT | ATAAGGGTATCCCCCTATAT | DFARAFDSVSHSHILEILRQ |
| | | | | GTCTCCCCGGCTTCACCGGC | TTACTGGGAGACCCCATAAG | RGLDEHIIGIVGDSYTDVTT |
| | | | | GCTTCGGCGACGACGCAGAG | GGTCTCCCCCTATAGATGTA | TITVSGEQSPPIDMRVGVKQ |
| | | | | GAGCACCCGGAGGCCCCCAT | GAGCGTAAGGGGTCTCCAAA | GDPMSPLLFNLALDPMIDTL |
| | | | | GAACTTAAACCAACCTATCT | GTACCGGCCGATATGGCCTT | ERYGLGYRMGEQQITALAFA |
| | | | | TGAAATATGGCCTCTCGTTC | ATGGCAAACTCTGGTGGTAG | DDLVLVSDSWEGMACNIRIL |
| | | | | GGGTGAAGGGCAGGTGGGAA | GGACAAGGAGGTAAGGGCAG | EEFCRLTGLRIQPRKCHGFL |
| | | | | GAGAGGGCTGCCTCACGATA | TGCCAACCCCTACTTGATCG | IQKIQRARSVNLCKPWIVCG |
| | | | | AACACCTAGTCAATAGCCAG | GGACCATCCAGGGAATGCCA | EELHMVGPEESVSYLGMKVS |
| | | | | TCGGGAAAAATGTGGAATGT | TCCTCCCGCGAAGGTGATGT | PWHGIMEPDPVERLCNWISS |
| | | | | TAGGACAGGGAGGTAAGGGA | GGTGAGGTAAGGGGGGAGCC | IGRSPLKPSQKVRMLNVYAA |
| | | | | GGCGGCTTTTTCGTAAGGCT | CGTCTTCGAGTTTCCCCAAC | PRMTYQADHGGLGPIVLNVL |
| | | | | CCTTCAACCCCTACCTGTAG | CCCTACCCACAGGTGAGAGG | DGMIRKAVKVWLHLPLCTCD |
| | | | | TCCACCTATTGCAGGTGTTG | AGGAGAAGAGGAATCTGTCC | GLLYSRCQDGGLGIVKLACQ |
| | | | | ACAACATGCAAGATGACCTG | CCAACGGGAGGAGGGTGAGG | IPSIQARRVYRLWHSKEAIT |
| | | | | CCTCGTTACGGGTCGCGTAT | TGTAAGGGGGAGACCTTCTA | RVVTRRTVEAEEYRGMWLRA |
| | | | | CATTGCTACAGGTCGTGTGC | GTAGGGTCTTCTCAGTCGCC | GGSEAGLPPLEDREEGAVQC |
| | | | | CGCTTCTAAGAGGATAGTAA | TGACGTCCTGACTGTGGGGT | TDTAGSVKPKNPVIPDWRRA |
| | | | | GGAGAGGTTATAGGGAGGTC | GGATCAGTACCCTACAGGTG | EFLKWQNLTAQGVGVQVFGG |
| | | | | CTGTTAGGGCTTCCTCAACC | AGACCGGTGAGGTAAGGGTG | DKNSNHWMANPETLGSKERH |
| | | | | CCTCTCTATGCGATTCCTTA | TGGCCCTCTTGAGGGCTGCG | YIAGLQLRANVYPTREALSR |
| | | | | CAGGAGTGGATCGAGAAGTC | CCAACCCCTACTCGAGGTAA | GRPDLPKVCRQCLAGTESCA |
| | | | | CCGGACGTAATACACCCTGG | CCTGAGGGAGTGGTGGAATG | HILGQCPAVKDSRIRRHHKL |
| | | | | AGGTAAGGGAGTGGCCTTCT | GCGGCATGTTAGTGCTGGGA | CDLLASEAESAGWTVIREMC |
| | | | | AGTAGGGCTGCTTCAACCCC | CTTGATTGCGAGGGTTTAAT | CRTRAGALRRPDLVFVKTGF |
| | | | | TCTGATGGGAGTGTACCGGG | GAGAGTGGCCTGCTGAGAGC | ALVVDVTVRYEMAYDTLMGA |
| | | | | AACCTCGACTTGTAAGCACA | AACACTTGTGGTGCTTAAAG | AAEKVARYTPITPYVAMTLK |
| | | | | GGTTAGTATGGGAGCAGAAG | CGGGGCGGCCCATGACCACC | ARRVKVFGFPLGARGKWPGS |
| | | | | GGGGAGCCGTAATGGGCTTC | GTGAGATAGGACACTGCACA | NDRLLKAMGVGGGRRKQLAK |
| | | | | TCTTTCACCTGCTTACATAA | GTGCAGCCATGAGGTTCCTG | LFSRRALLYSLDVLRDFYRA |
| | | | | TACCTGTGGTGCATGTATCT | GAGGATGATGCGATGAGGTG | EGETGDLDDESVDDHL |
| | | | | AGGTCTTGGCGGGAGAGTAC | GGGGCCTCATCAGCCCCTCC | (SEQ ID NO: 1463) |
| | | | | TGAGAGACAAGGTTGAGACC | TGGCAGGGCGTCGGCCAGGG | |
| | | | | CCAAGATTGGGTCTCCCTAG | AAACTAAATGTCTCTAGCAT | |
| | | | | CCTCTATAGCTGCGACTCTT | GTCAGTGCAGTGAGGTAAGG | |
| | | | | AGCGGGGATATGGAGTAACA | GGAGAGCACTCTAGTAGGGC | |
| | | | | TGTACCAAGGGAGTGAATAA | TCTTCCAACCCCTACCTGTA | |
| | | | | TAAAGGAATTGACGGGGTAC | GGTCACCTGGTCCAGGTGTC | |
| | | | | AAGTGACTGTTGGCCCGAAT | GATGATGTGAAAACAAGAGC | |
| | | | | CCTAGCCACTTGATGACCAG | TACTTTGGTACCGGTCTGTT | |
| | | | | GGATATATTACAGACTGAGA | GCAAAAAGGGTTCTGCAGAG | |
| | | | | GCGAATCTAGAGACGTGAGA | GACGACGGCTATCCCTATCG | |
| | | | | ATAAAGTGAGAATTGGTTGA | GGAGGGAATAGTCGGTCCCA | |
| | | | | GCGAATACAGAGGAAG | GGTAGTGGAAAATGGGGCTT | |
| | | | | (SEQ ID NO: 1218) | TCCACTGAGCATGAAAATGT | |
| | | | | | GGTAGAGGTTGCGTCCAACC | |
| | | | | | CAATGATTTGCAGCAGAGCT | |
| | | | | | CTTGGACACGAAGTCTGTAT | |
| | | | | | AGTCCCATGCAGGCAGCCAA | |
| | | | | | CCAGAGAATGGTGGCAAGAC | |
| | | | | | CCCAGCTCCGTATGGGAGGG | |
| | | | | | GAGGGCCAAGATATACGGAA | |
| | | | | | CGGCTGCTAAAGCGTTCTGC | |
| | | | | | CGGTGTCAGTCTAATCACAG | |
| | | | | | ACAGCTGTGACGAAACAAAG | |
| | | | | | TATGGGTTCCGACATGCTTG | |
| | | | | | GTCAGCTCTTAGCCGCAAGG | |
| | | | | | CTTAAATCGAACGCAGCCCG | |
| | | | | | CCGAGAGTGAACATTAAACG | |
| | | | | | GGGATGGAATGTGTCTAGCG | |
| | | | | | GTTACGTACTACCAGGGCTC | |
| | | | | | AGGTTCGCCTGAGCCGAGGC | |
| | | | | | TCTACACGTCATGGTGGGAG | |
| | | | | | TTCTCCCCACGCTCGTGAGG | |
| | | | | | GCATGTAGTGGGATGGCATG | |
| | | | | | TGGCGGACCATCAGCTGGCA | |
| | | | | | CTACCAGGCCTCGGGCTTGC | |
| | | | | | CCGAGTGCGGGACCTCACAC | |
| | | | | | ATTGTAGGTGTGCTTGTCCC | |
| | | | | | CCCTACGTTCGAAGACTTGA | |
| | | | | | GGCGGAGAATACTCATAGGC | |
| | | | | | CCCACGGCAAAGGGACACAA | |
| | | | | | CACGGAGGCTTGTGTCCGAC | |
| | | | | | GAGCCGTGGACTCCTATAGA | |
| | | | | | CAGCCCGGGATATCACTGGG | |
| | | | | | CACGCTCATACTGAAGAAAT | |
| | | | | | TCGATGAACCGGGCCTACCG | |
| | | | | | GAGCAAATGCACTCTAATCG | |
| | | | | | CCTTTGTGGGCGACTGTGGC | |
| | | | | | CCCCTCATGCGAGTGAGGAA | |
| | | | | | TATCATAAACTGCAATGGTT | |
| | | | | | CAAAAAGTGATTCCTATGGC | |
| | | | | | TCGTCGGGGAGGGCTGACTG | |
| | | | | | GGGCAAGCAAATGATTGAAA | |
| | | | | | GGGGAAGAACCTTTTTCAAC | |
| | | | | | TGTTTCTTGCCAAGCCCGGT | |
| | | | | | TGATGGTGGCGCTAGTAATT | |
| | | | | | GCGACGGGAAAATGCGGTTT | |
| | | | | | AAGTCTCCGAAGTAGTGCGT | |
| | | | | | AGCACCGGATGTCGACCGGG | |
| | | | | | TGTAAAAGCCCTTCGTAAAG | |
| | | | | | TCCCTGGGGAGGTCAGTCCT | |
| | | | | | GGGGCTACTGATGCGCAGTA | |
| | | | | | TGTAATTCGCAGAATAGGGC | |
| | | | | | CATCGATACCGCCTGCGTGA | |
| | | | | | CTCGACTGGGTTTCCACTTG | |
| | | | | | AGGATATCCGACCGTAGCGT | |
| | | | | | GCACCCTCTTGTAGTTGCGC | |
| | | | | | CGGAAACGGCTGTGTTCCCT | |
| | | | | | CACGTATGTGAGGAAACTCA | |
| | | | | | ACAATGTGAGTGGGTAAACG | |
| | | | | | GCGGGACGAACTATGGCTCT | |
| | | | | | CGT | |
| | | | | | (SEQ ID NO: 1341) | |
| R2 | R2- | — | Tribolium | AGTCATAGAGCCAGAACCTC | TGAAAAGAGTGGCAGTTGTG | MSRRPGKSNEPPVRSRAMGL |
| | 1_TCas | | castaneum | CTCGTGGTCCCGCTGGGCAC | GAGACTTCCTTCGGACGTCG | TTLSGTKTSNSGAQGPSTSA |
| | | | | AGGGATTAATTTTTCTGTGG | GGTCGGATTTTCGGACGCCA | PMQNMAGGFVCDCGRSYALK |
| | | | | CAAATTTGACTGGCTTCAGA | GGGTACCTCCACCGCTGGGT | TSLARHKKECGKNNAECRWC |
| | | | | GAGCGTTTTTCGAAGTGGWC | TCACAAACTAGGCGAACATC | GTRFNTLAGTRQHERKAHFV |
| | | | | TGTGTGACTGCGTTCCCCCC | TGCCGATACCCTCTTTAGGT | QYQSDLAKALPQPESELMEK |
| | | | | TTAGTTGCTATWTCCGCTKM | CATAGGACCACATGTCTCTG | IAIVEARSXNGIFYKEMMAS |
| | | | | GATTAACATCTCACCTCGAC | CACGAGATTAACCCA | TGLTHQQVRSRREKPEYKGF |
| | | | | GTWTAAGATCATT | (SEQ ID NO: 1342) | LERARRSLAQTNIRAGSISP |
| | | | | (SEQ ID NO: 1219) | | ASTXAGSLESASPKAGCSSS |
| | | | | | | ASPGPTTRSRAPTKGVPXRS |
| | | | | | | SNSARIVVEAQVHTRAPPNT |
| | | | | | | GETEVALRESRRTVPRLGXN |
| | | | | | | PSRPCGISPLMAIAIDEDSV |
| | | | | | | LGGLRVQAGPSPTAVHSVEA |
| | | | | | | FPGTSSMTPMETDRVHNKSG |
| | | | | | | IDPILEHNGTRQVRREESST |
| | | | | | | REDPVEQWSPNYPKTPVTMP |
| | | | | | | NITTTADAXXTSYNRTPQTL |
| | | | | | | PGNRRRRSRSLPPVQRKSAS |
| | | | | | | DXLESVDSLGPWAVFLQDQV |
| | | | | | | DAGSLSGNDSLADLVRVALT |
| | | | | | | KSDRGVLNDAVNRYLAQRAE |
| | | | | | | SLRIRKRGSKGKRKSKTGRH |
| | | | | | | YGQTTSGSGQRAALFKKHQD |
| | | | | | | LFLKNRRGLAETILSGKEDF |
| | | | | | | GPRPEPPVTSVEEFYGGIFE |
| | | | | | | SPSPPDNEPFEVRATGVEDP |
| | | | | | | PPLTSPWTKRTLRSPCYWRR |
| | | | | | | RPPPTYITMDEIKAARAGWQ |
| | | | | | | ISAPGSDQIPVAAVKTMSEL |
| | | | | | | ELAILFNIILFRNVQPSAWG |
| | | | | | | VLRTTLVPKDGDLRNPANWR |
| | | | | | | PITISSALQRLLHRVLAARL |
| | | | | | | SKLVSLSSSQRGFTEIDGTL |
| | | | | | | ANALILHEYLQYRRQTGRTY |
| | | | | | | XVVSLDVRKAFDTVSHCSVS |
| | | | | | | RALGRFGIPSVIREYILATF |
| | | | | | | GAQTTIKCGSVTTRPIRMLR |
| | | | | | | GVRQGDPLSPVLFNLVMDEL |
| | | | | | | LEKVNEKYEGGSLOSGERCA |
| | | | | | | IMAFADDLILIADRDQDVPA |
| | | | | | | MFDDVSTFLERRGMSVNPAK |
| | | | | | | CRALIAGAVSGRSVVRTGSS |
| | | | | | | YKIHNTPIPNVDALDAFKYL |
| | | | | | | GLEFGHKGVERPTIHNLSVW |
| | | | | | | LNNLRRAPLKPDQKCLFIRQ |
| | | | | | | YVIPRLLYGMQNPQVTSRVL |
| | | | | | | READRLIRRHLKTYYHLNVH |
| | | | | | | TPDSLIHASVSDGGLGIMEL |
| | | | | | | RKAIPRIFLGRLVKLLNKNK |
| | | | | | | DSVLSSVLQSNRVRTLMGKL |
| | | | | | | STMAGEVPESTFWRNQIASG |
| | | | | | | PLSKGLEQAAEDSASRLWIS |
| | | | | | | EKPSGWSGRDHVRAVQLRTG |
| | | | | | | NLPTKAIPSVPVGQRRCRHG |
| | | | | | | CACDESISHVLQMCPLTHAD |
| | | | | | | RIRRHDEVVKKVARHCTSRG |
| | | | | | | WTVEVEPHIRSRCGRLFKPD |
| | | | | | | LAVHQPGGAIVIADVQVSWD |
| | | | | | | SESLTVPYERKRAKYDVPQF |
| | | | | | | HQAAQHAWPGKALTFAPVIV |
| | | | | | | GARGIWPRINNDRSAALQIP |
| | | | | | | PVVRRACVNSVVKWGSSIHA |
| | | | | | | TFMRSVWANRLNPRPLRA |
| | | | | | | (SEQ ID NO: 1464) |
| R2 | R2- | — | Tinamus | CTGGGGACCGTGGTTACAAC | TAGGGGGCTTGGCATTTCTC | MGSWIVNFVSVATQTGEFPV |
| | 1_TGut | | guttatus | CCGGGCTTAGCTGCAGAGAC | ATTGCCTGCTCCTGAAAGGA | DTARRAPVPVTSYPESECHX |
| | | | | AGTACCTCCCCGTGGTTCCC | TATGGGTCCTGCGTCGCGTG | PLPLTFCNSDVTIWGGVRPE |
| | | | | GCCGGACCCCGTAACATCGG | GTAGGCAGACCCATTCGTCC | PVDCLGDLPEXYDALPGVAG |
| | | | | GTGACTGAATCTGTCTCTGC | GAGTAGGGGGCTTGGCAGTN | PREXVGGSPPGEGVRSPGIA |
| | | | | CCCGGGAGTAGTTCCTCCTT | TCCATTGCCTGTGCCCGAAA | SPSGTAVQHDFGSPILVPGA |
| | | | | GCCCTATTGACCAGCGGTCG | GGACGTGGGTCATCTGGTCT | EAAEVSTPVVKVPQDHPACP |
| | | | | CCGGCTGCTCAATAGTATTC | GTCTGCCTACACCTCTCTAG | CCGTRVVKVTALSEHLRRAH |
| | | | | TAGGCGTGAAATATAGCGAT | ACTTGTAACATCTAGTCTGT | GRKRVLFQCSRCGRMNEKHH |
| | | | | AGTCCTAGTGGTTGTCTTAC | CAACAAGATCAAAATTCTTC | SIACHFPKCRGPPVEEGPLG |
| | | | | TGGGCCATAGCCCCTTGCTT | ACACAGACGACCGAGCTTGC | APEWCCEECGQKFNTKSGLS |
| | | | | CAGGGGTCATTCGCGAAGTC | TCAGTCTTCCTGTACCCGCA | QHKRSVHPLTRNVERIEAAR |
| | | | | TCTCAGGAGAACTGGGGGTG | GAATTTTGCTCTTGCTCTCC | PKGKGKRGAHKGCWTEAEVA |
| | | | | GTGTTCTTCTGGGTATAGCT | TTTGGCTGTGTCCTGGACGT | QLIELEGRFKNQRFINKLIA |
| | | | | AAACCCCCTAGACTGTGTCC | GGGACTATTCCATCTCGTCC | EHLPSKSAKQISDKRRQLAA |
| | | | | GATCC | CAAATGCCGCGTCCAATTAT | ATKTSSPEKRVTSSTSGESS |
| | | | | (SEQ ID NO: 1220) | ACCGGATTTGACAAAGCGGA | PEVEKVEGIKREYRRRVGEW |
| | | | | | CGGCCCGCTTTATAAGCCGG | LCAGSLXDQTSFQKILEDVE |
| | | | | | AAAAGGTGCCTTGTAAAATT | SGSEIVTGPLEELASFARGK |
| | | | | | GCAAGGTTCATTAAATAG | LAAARVRHHRKHPAEAVPAR |
| | | | | | (SEQ ID NO: 1343) | EEQRWMKRRVGRRGLYLRFQ |
| | | | | | | RLFALDRRKLAGIILDDVES |
| | | | | | | IKCPLPMEEVADVFRRRWEE |
| | | | | | | VAPFTGSGSFRSLGKADNGA |
| | | | | | | FKPMISAKEVMKNVXEMSRR |
| | | | | | | SAXGPDGLSLRDLMKIDPQG |
| | | | | | | SRMAELFNLWLLAGRVPDQV |
| | | | | | | KAGRTVLIPKSADPGKIGNI |
| | | | | | | DNWRPITIGSVXLRMFSRIL |
| | | | | | | SARLRRACPINRRQRGFIAA |
| | | | | | | PGCSENLKLLQALIKSAKRD |
| | | | | | | HRTLGVVFVDLAKAFDSVNH |
| | | | | | | QHIFQVLVQKGVDGHIIDIL |
| | | | | | | RDLYTNAGTYLESGSQRSGF |
| | | | | | | IKILRGVKQGDPLSPILFNL |
| | | | | | | ALDPLLCRLEDRGLGYKYGD |
| | | | | | | QQIXSLAFADDLALLSDSWE |
| | | | | | | GMQQSIRVVEEFCQRTGLRV |
| | | | | | | QAPKCHGFLIRPTKESYTIN |
| | | | | | | DCDPWTIADMQLDMIDPGSS |
| | | | | | | EKYLGLGIDPWIGLSRPELS |
| | | | | | | EVLTRWVKNIGGAPLKPLQK |
| | | | | | | VDILRSYALPRLLFIADHAG |
| | | | | | | LSATCLHSLDLSIRSAVKGW |
| | | | | | | LHLPPSTCDAIIYVSYKDGG |
| | | | | | | LGLPRLASLIPNVQARRLVR |
| | | | | | | IAQSEDDVIRSVVLQEGIQE |
| | | | | | | EIRKVWISAGGRPEKVPSVT |
| | | | | | | GEFPVMEAQAADEALSEWER |
| | | | | | | RAPRTIYPIPCKWRKREMEN |
| | | | | | | WTNLKSQGHGIRNFENDRIS |
| | | | | | | NDWLLHYGRIPHRKLITAIQ |
| | | | | | | LRANVYPTREFLARGLGEGA |
| | | | | | | PRGCRHCPAEWESCSHIIGY |
| | | | | | | CPAVQEARIKRHNDICGVLA |
| | | | | | | EEARKLGWVIFIEPHLRDNT |
| | | | | | | NELFKPDLVLVKGSCAKVVD |
| | | | | | | VTIRYESGLTTLSDAAAEKA |
| | | | | | | RKYQHLAGEVRALTSATTVD |
| | | | | | | FLGFPIGARGKWYVGNNGLL |
| | | | | | | SDLGFSTSRVVRIARALSKK |
| | | | | | | ALLSSVDIIHIFASRARQAQ |
| | | | | | | TSE |
| | | | | | | (SEQ ID NO: 1465) |
| R2 | R2- | — | Trichinella | CTCCTGACTAACCTGATTTC | TGAGGTTTTTGTTTTCTTTT | MSNRLANTAAAGGVPEKTSG |
| | 1_TSP | | spiralis | GTCCGTGCGGCGGCGTTTTC | TTCCTTTTACCATTCTTGTT | TLDIPGQPSSSGEKRAISYP |
| | | | | TTTTCGCTCTCCGCTCGTCG | CCATTGTTGTTATTTGCTTT | GPFGCNSCSFTSTTWLSLEL |
| | | | | AAATTTGCTGTAGTTGATTC | AATCCTGTATTTTACCGCCG | HFKSVHNIRDFVFLCSKCKK |
| | | | | GCTTTTCTTTGCGTTTTCTT | GCAATTCCATTGTTATTATT | SWPSINSVASHYPRCKGSVK |
| | | | | CTACTTTCGCAGTTTTTTCT | ACTGTTACTGTTATTATTGT | AAVVPTSLANTCTTCGSSFG |
| | | | | GCATTGCCACG | TACTATTGTTTTTACTTTTA | TFSGLQLHRKRAHPDVFAAS |
| | | | | (SEQ ID NO: 1221) | CTTACTACTGTTATTATACT | CSKKTKARWSNDEFTLLARL |
| | | | | | TTAATTCGTTAACTTACGTT | EAGLDPACKNINQVLAERLM |
| | | | | | ATTGTTACCACTACTTACTT | EYNITRGVEMIKGQRRKDQY |
| | | | | | TGCTCTCTCGCAAACGTTCG | KALVRQLRSNSETQQCVGLA |
| | | | | | TTGTTGTTTCTTTTGGACCA | GSMDSNVPANDTSSSVASEV |
| | | | | | GGTTTAGAGAAATCGCACGC | SITYPEYGAVMSCDLIKEAT |
| | | | | | ACAGCGGAACTGGACCGCTT | GMAIVDINELQSNLRKAFLS |
| | | | | | AAGCCAGAAATAGTAAAGTA | GRKLPMKFHGARETAQKKMA |
| | | | | | ACAA | NPRVAKFKRFQRLFRSNRRK |
| | | | | | (SEQ ID NO: 1344) | LASHIFDKASLEQFGGSIDE |
| | | | | | | ASDHLEKFLSRPRLESDSYS |
| | | | | | | VISGDKSIGVAHPILAEEVE |
| | | | | | | LELKASRPTAVGPDGIALED |
| | | | | | | IKKLNTYDIASLFNLWLKAG |
| | | | | | | DLPASVKASRTIFLPKSDGT |
| | | | | | | TDISNCRPITIASAMYRLFS |
| | | | | | | RIITRRLAARLELNVRQKAF |
| | | | | | | RPEMNGVFENSAILYALIKD |
| | | | | | | AKVRSREICVTTLDLAKAFD |
| | | | | | | TVPHSRILRALRKNNVDPES |
| | | | | | | VDLISKMLTGTTYAEIKGLQ |
| | | | | | | GKLIPIRNGVRQGDPLSPLL |
| | | | | | | FSLFIDEIIGRLQACGPAYD |
| | | | | | | FHGEKICILAFADDLTLVAD |
| | | | | | | SAAGMKILLKAACDFLEESG |
| | | | | | | MSLNAEKCRTLCITRSPRSR |
| | | | | | | KTFVNPAAKFIISDWKTGIS |
| | | | | | | SEIPSLCATDTFRFLGHTFD |
| | | | | | | GEGKIHIDTEEIRSMLKSVK |
| | | | | | | SAPLKPEQKVALIRSHLLPR |
| | | | | | | LQFLFSTAEADSRKAWLIDS |
| | | | | | | IIRGCVKEILHSVKAGMCTD |
| | | | | | | IFYIPSRDGGMGFTSLGEFS |
| | | | | | | LFSRQKALAKMAGSSDPLSK |
| | | | | | | RVAEFFIERWNIARDPKVIE |
| | | | | | | AARRVYQKKRYQRFFQTYQS |
| | | | | | | GGWNEFSGNTIGNAWLTNGR |
| | | | | | | ARGRNFIMAVKFRSNTAATR |
| | | | | | | AENLRGRPGTKECRFCKSAT |
| | | | | | | ETLAHICQRCPANHGLVIQR |
| | | | | | | HDAVVTFLGEVARKEGYQVM |
| | | | | | | IEPKVSTPVGALKPDLLLIK |
| | | | | | | ADTAFIVDVGIAWEGGRPLK |
| | | | | | | LVNKMKCDKYKTAIPAILET |
| | | | | | | FHVGHAETYGVILGSRGCWL |
| | | | | | | KSNDKALASIGLNITRKMKE |
| | | | | | | HLSWLTFEIIFITQISRIYN |
| | | | | | | SFMKK |
| | | | | | | (SEQ ID NO: 1466) |
| R2 | R2- | scaffold_6 | Tetranychus | CTCTCTTATTTTAACATATT | TGATGTATCCCTTCAATATA | MCILGGLTSHSREGGLSRGS |
| | 1_TUr | | urticae | CGATGTACTCGTACATTGAA | TTGTAATCCTCATTCGTCCC | SQLKTVKPQNEEDNGTTQLK |
| | | | | TATGCTTTTATTTTTTTTCA | TATCCTTTCATTTGATAAAA | AGSADSFPRPSGDLNPEEPL |
| | | | | AAGTTTTTTGGGTGCATACC | GAAACTTTGTTGCTCCTTTT | SIDICPVCFROMKSYLGVRV |
| | | | | CCTGGAAAATTCTGAGATGT | AATAGTTGGTCCCTCCTGTC | HMQKMHLEEYNASIPDPVVS |
| | | | | ATAAATCTCCCATCAGCTTT | CCTTTTCTGGAACCTGGTTG | HTRWSDEEAAQLAFTEAKIE |
| | | | | GGCTGAAACGTTGGCTAAGT | TATCGATTATTGAAAGTTGC | VDKLLPRGKGINKFLLELLP |
| | | | | TTTGTAGGTTGTTTGCCCCC | AATAAACGGATTTAA | GRTLESIKSHRKRQSHKDLV |
| | | | | TACTACTTAGTCGCAAATGG | (SEQ ID NO: 1345) | RKYVKEFVDTLAADNDDDTI |
| | | | | TATTTGCTAACAGTTGTTAA | | ICQDNGDIFNDPIVGATDSQ |
| | | | | ATTGTTACATTTACAAGTCC | | SETETVADPAEFKTFIELAD |
| | | | | TATCCAGTGCCTCCTCGTGG | | DPTKPKVVAKLRNLIKDKPK |
| | | | | CGCTACCCGGTAACACTTAG | | SEILGSDILVRILRRTLHGL |
| | | | | AGTAATCTGAGTGGCTAAAC | | PVEDELDQYLEVYFTGKIKQ |
| | | | | TGGAAGGGCGGAAAATGCAA | | RRSKTQTALSKKQIKQRDYG |
| | | | | ACAGGCGGTTGGTAGATGCT | | RLQELYSRSRKRCANEILNP |
| | | | | TCGGCATTTTGCCAAAAATC | | TSMSGGFGHQELSEFWTKTF |
| | | | | CACGGCTTTTTAGCCCAACA | | GPDEQPTLGEVEIIPKENCW |
| | | | | ACATCAGGGTGATGGACCCG | | WDIFSPISSDEIKASYPSIG |
| | | | | CCAGCTTGTGGTCAGGATCC | | KAAGPDNFSAYQLRKVPVWH |
| | | | | CATCCATGAATAAAGCATGG | | LECLYNIFAFYKDIPSRLKD |
| | | | | CTCTGCTTCTGGTGCATCCT | | AKTILIPKKDNAESPGDFRP |
| | | | | CAACGGGATCGGCTTCGGCT | | ITLSSIITRHFHKILATRVN |
| | | | | GGATGTAAGTCTTGCGGAGG | | NFVRFHPMQRGFIQSDGCLE |
| | | | | C | | NTALIQTVIREAKVRRKQVH |
| | | | | (SEQ ID NO: 1222) | | ITFCDVRKAFDSVRYDSIIA |
| | | | | | | AIAKKGAPGSFIMYLSNLYR |
| | | | | | | GNKTTLLTAGGETRITPTRG |
| | | | | | | VRQGDPLSPILFNCVMDQIL |
| | | | | | | TALPSRTGFTLSAGDESVNV |
| | | | | | | NCLAFADDIILISKTKNGHQ |
| | | | | | | ELLDVTQRILKENGLDLNPD |
| | | | | | | KCCSLSLIPHSKTKKIKVVR |
| | | | | | | ADFVVNGVKVRSMSIGDSTC |
| | | | | | | YLGVSINVTGQVAPVKMYQA |
| | | | | | | LCEKLDSAAIKPHQRLYILK |
| | | | | | | HFVITKMFHPLILSTIAAHK |
| | | | | | | IKNLDLISRRYVRKWLHLPH |
| | | | | | | DCGSGMIHAKVSDGGLGVPL |
| | | | | | | LFRTIADLKVRRKEKLQVHE |
| | | | | | | NPIFRILAKLSTVSKELENC |
| | | | | | | KKIASKTTDIQEKTFKEMLA |
| | | | | | | TYDGLSLKEARAVPEVHKWV |
| | | | | | | DSYDKRYKFAGRDFVQVIQA |
| | | | | | | RFNALPTRSRVWRGRGADEK |
| | | | | | | SLRCRAGCNARETLNHVSQS |
| | | | | | | CFRTHRVRTARHDKILDFIC |
| | | | | | | ERLDVVGVKYVREKPISFPG |
| | | | | | | KKLIPDLIVENTDQALVLDL |
| | | | | | | QIVGDNSELPLDERGKNKVI |
| | | | | | | KYNCSEMQELYKRKKKTLAV |
| | | | | | | KALTLHYKGLMAPETSNILR |
| | | | | | | SFGFKSKDLEKMAYMALFGT |
| | | | | | | VAAWGIFNRSTETMRSVANW |
| | | | | | | PRPEEL |
| | | | | | | (SEQ ID NO: 1467) |
| R2 | R2- | — | Drosophila | GAAGCTGGGAAGCTGGGTCG | TAGATGTACTAACCTCTAGT | FERRSNSWGYQNLEPSNVGQ |
| | 2_DWi | | willistoni | GATGAGCGCAGAAGGGGTGT | TTCTCTATACTTTTGCCTGC | DMNTVPRINNTTTTPATSRP |
| | | | | TCTTCGGAGCACTGTAATTC | TACCTTGGCATTACATCTAA | GDQPREAIAVVNLAGEIPCA |
| | | | | ATAAGTCGTAAGTCTGATCA | AAAGGTACAAACATCGCATT | VCGRLFNTRRGFGVHMSHQH |
| | | | | AGTCGACTCGGAACCTCTTC | GGCAAAAAGAGGTGGTTTTA | KDELDTQRQREDVKLRWSEE |
| | | | | GTGGTGTTTCCTGGGTGCTG | GTACATAGGCGCTGTGGGAC | EAWMMARKEVELEASGNLRF |
| | | | | TTGAGTTCCTAGTCTCTAGG | TTCATTGTCCCGATGATGCA | PNKKLAEVFTHRSSEAIKCF |
| | | | | TTCTCTCCAGTAGCTAA | GCGAATCGTGCATACGAGAT | RKRGEYKAKLEQIRGQSTPT |
| | | | | (SEQ ID NO: 1223 | TGTCCAGTAGTTGGTTGCTC | PEALDSITSQPRPSLLERNH |
| | | | | | GTATCTTTAGAAGATTTCCT | QVSSSEAQPINPSEEQSNWE |
| | | | | | TCCTCGGCGATCAAAANAAA | IMRILQGYRPVECSPRWRAQ |
| | | | | | AAAAAAAAAAAAAAA | VLQTIVDRAQAVGKETTLQC |
| | | | | | (SEQ ID NO: 1346) | LSNYLLEVFPLPNEPHTIGR |
| | | | | | | SNLRRPRTRRQLRQQEYAQV |
| | | | | | | QRRWDKNTGRCIKSLLDGTD |
| | | | | | | ESVMPNQEIMEPYWKQVMTN |
| | | | | | | PSTCSCENTRFRMEHSLETV |
| | | | | | | WSAITPRDLRENKLKLSSAP |
| | | | | | | GPDGITPRTARSVPLGIMLR |
| | | | | | | IMNLILWCGKIPFSTRLART |
| | | | | | | IFIPKTVTANRPQDFRPITV |
| | | | | | | PSVLVRQLNAVLASRLASKV |
| | | | | | | NWDPRQRGFLPTDGCADNAT |
| | | | | | | LVDLILREHHKRWKSCYLAT |
| | | | | | | VDVSKAFDLVSHQAIIKTLQ |
| | | | | | | AYGAPTNFVSFIEEQYKGGG |
| | | | | | | TSLNGAGWSSEVFIPARGVK |
| | | | | | | QGDPLSPLLFNLIIDRLLRS |
| | | | | | | YPREIGAKVGNTMTSAAAFA |
| | | | | | | DDLVLFAETPMGQTLLDTTL |
| | | | | | | GFLASVGLSLNADKCFTVSI |
| | | | | | | KGQAKQKCTVVERRSFCVGE |
| | | | | | | RECPSLKRTEEWKYLGIRFT |
| | | | | | | ADGRAQYSPADDLGPKLLRL |
| | | | | | | TRAPLKPQQKLFAHRTVLIP |
| | | | | | | QLYHQLTLGSVMIGVLGKCD |
| | | | | | | RLVRQFVRRWLDLPLDVPVA |
| | | | | | | YFHAPHTCGGLGIPSIRWIA |
| | | | | | | PMLRLKRLSNIKWPHLEQSE |
| | | | | | | VASSFIDDELQRARDRLKAE |
| | | | | | | NVQRCSRPEIDSYFANRLYM |
| | | | | | | SVDGCGLREAGHYGPQHGWV |
| | | | | | | SQPTRLLTGKEYLHGVKLRI |
| | | | | | | NALPSKSRTTRGRHELERRC |
| | | | | | | RAGCDAPETTNHILQKCYRT |
| | | | | | | HGRRVARHNSVVNAVKRGLE |
| | | | | | | RKGCVAHVEPSLQCDSGLNK |
| | | | | | | PDLVGIRQNHIYVIDVQVVT |
| | | | | | | DGHSLDQAHQRKVERYDRAD |
| | | | | | | IRSQMRRFFGVTGEIEFHSV |
| | | | | | | TLNWRGIWSGQSVKRLIAKD |
| | | | | | | LLIAEDTKLISVRAVNGGVT |
| | | | | | | SFKYFMYCAGYTRS |
| | | | | | | (SEQ ID NO: 1468) |
| R2 | R2- | — | Petromyzon | CGGTGCGTTCCCTTGGGTAA | TGAGAATAATGAGGTGCTAA | RPQTKLMTDKLKFSSQLARG |
| | 2_PM | | marinus | GGAACACGAGTCTTAGTGGC | CCTCCCTGGGCCTGACCAAA | LAKQRAMDGARVGDPPITVR |
| | | | | CTTGACCTCCACGTGGTCCC | CCCAGAACACATCACTGGCC | PTETDLCNTEGSWGRRPMKL |
| | | | | GCTGGTAACATCATCTCTTG | AAGATGATTTCCCGCAGCAC | LFVSVSTQTQNEDALWASDV |
| | | | | ATGATGGCTAACAAGGCTAA | GTTGCTTTTCTCTCTCGATA | AKPMASRSALKMTSIPSMTF |
| | | | | TGCACCCATTCCATCTCCTA | CCCGAGAATGTTCTGCGGAA | HNSSLEKEEEMNYDFYEQIK |
| | | | | TCTCGCATGGAGGCCGCTAT | CTACGCAGTCTATGAACAGT | SLVESDDSSDDFTEDDEDVE |
| | | | | GCGTGATTACTAG | CACAGACAACCTCTGATCCA | ESFLDISAEEPVLGKFPIDT |
| | | | | (SEQ ID NO: 1224) | AG | KGTITVVLPSLEYICVICKQ |
| | | | | | (SEQ ID NO: 1347) | HMGKASELVAHFNIKHRDIP |
| | | | | | | LVFKCAKCDKTNSNHRSIAC |
| | | | | | | HAPKCGGIKLTEESLPMVCE |
| | | | | | | CCQARFATLSGLSQHKRHAH |
| | | | | | | PVTRNEERIKDGIKGTSQRG |
| | | | | | | VHRSCWSLKEVEQLALLELQ |
| | | | | | | FQGKKNINKIIAEALGTKTN |
| | | | | | | KQVSDKRRDLSKKTGAPMSD |
| | | | | | | SLHFSSRPLETLSPPPNVTT |
| | | | | | | GTSSILAQAAERLTNENSGT |
| | | | | | | LEKPAMEAIKAWLNGEGQHD |
| | | | | | | ALVETATALMLCPMRLVKNK |
| | | | | | | GKRSKPENDIIKPRILPTRS |
| | | | | | | WMKKRAEKRGSFMKHQKLFF |
| | | | | | | KNRSLLASLVLDGTERHECR |
| | | | | | | IPNADVYRFYCEKWEKVLPF |
| | | | | | | NGLGQFKSSGVANNEYFEPL |
| | | | | | | ISVEEVQTAIRAIKPTSAAG |
| | | | | | | PDGLTRAAICAADPEGRTLT |
| | | | | | | ALFNAWMITGIIPKELKKNR |
| | | | | | | TILIPKVMDDEKLKELGNWR |
| | | | | | | PITIGSMILRLFSRIMTARL |
| | | | | | | ARACPLNPRQRGFIAASGCS |
| | | | | | | ENLKVLQDLMRHAKKLHRPL |
| | | | | | | AVMFIDIAKAFDSVSHAHIL |
| | | | | | | WVLRHKKVDEHVVGIIQNAY |
| | | | | | | DRCTTSFKSNGESTREISIR |
| | | | | | | VGVKQGDPMSPLLFNLAMDP |
| | | | | | | LICTLESHGVGYSIDTDHVT |
| | | | | | | ALAFADDLVLVSESWVGMAA |
| | | | | | | NLAILESFCGLSGLEVQARK |
| | | | | | | CQGFMISPTKDSYTVNNCDP |
| | | | | | | WTIKNKDVHMIQPDESTKYL |
| | | | | | | GLKICPWTGIIRSDLHVQLK |
| | | | | | | TRISKIDEAPLKPTQKVELL |
| | | | | | | NAYALPRLLYPADHSDCKQS |
| | | | | | | TLRVLDQEIIKAVKGWLHLP |
| | | | | | | ASTCDGLLYARARDGGLAIL |
| | | | | | | KLENAIPSVQVRRLQRIANS |
| | | | | | | SDAIARNIASSQGVEEEYRS |
| | | | | | | LWVRAGGDSEAIPTFFLRGS |
| | | | | | | ESKEPVYPRPCDWRKRESRR |
| | | | | | | RCEKPVQGRGIVNFAQDRIS |
| | | | | | | NAWLGPRCGFKQCFFIAALQ |
| | | | | | | LRANIYPTRESINRGRDGAS |
| | | | | | | RSCRKCSARLESLSHILGQC |
| | | | | | | PAVQKFKDCATQTEAEMVPH |
| | | | | | | GPAGNALPGWSLSRTFLVNV |
| | | | | | | PQYKNSRIARRNKISDILAD |
| | | | | | | EAARLGWWVYKEPRFTSEAG |
| | | | | | | ELRKPALVFAKGEEALVIDV |
| | | | | | | TVRFELSRKTSSEAASHQVA |
| | | | | | | YYTPPCDQVKVLTKASNVTF |
| | | | | | | FGFQVGARGKVAP |
| | | | | | | (SEQ ID NO: 1469) |
| R2 | R2- | — | Schmidtea | AGTCATAGGGTGAACTGCAA | TAGAAGGGAAACAAAGGAAA | RKELVTIKNLFEESGATAPA |
| | 2_SMed | | mediterranea | TTCTGACACGATGACCGAGC | AACGAAATGACTGGAAACTA | PVPLEVAVEVHQSSSVPEIT |
| | | | | TGTGTCAGTTTGCAGCTAGT | TGAAGGATATAGCTGAAAGC | DESTTTQEGSYSEPPIHRCE |
| | | | | CGCTAAAGACTCGATCAGTC | CGCAAGGAAGGCTAAGTCCT | NCGREFRTRAGVQQHRRKAH |
| | | | | CGCCAAGTGAGGTGGCCGGG | GAAACCGATCTACATCTTCG | TNEFMEEKEKAAPTKKLRWT |
| | | | | TATCTGCAGCACTAGAGCCA | ATCCCAAGAGGAACTGTGGG | DEEKEILIESEIKIIKEGSL |
| | | | | CTGGTATCAAGAGCAGAGAT | TTAAGCTTGAGCCGACGGAA | KEQHEINKILASRMPGRSQD |
| | | | | ACGCGAGTGGAAGTTGAGTA | AAAGCGAATGCATGTTAGAC | GIAKIRQKQEHKAEIQRRLH |
| | | | | CGACTACCTTCACGGGGTCC | GACGAGGTACAGTCACCTCC | GTVTTNETRGNRTSEITEPI |
| | | | | TCCTGATAACCACAGTGGAC | TCGTGGTATTTGGCGGGCAA | RSLPINTKTWSEDEMKRMLA |
| | | | | TGTGGGAACTAAATGTGTGC | TGCTCACTAAATTAACTGTG | EEVKLRTKNEKDINKKLAEI |
| | | | | TCAGCGTTCCCTACTTTCTC | AGTAGCTGAGAACTGTATGT | FPNRTMGSIKSKRTKDKDYQ |
| | | | | GTAGGGTAAAGGGTATGATA | GTATCATGAAAAAAAAA | DLVKLTMQTISENPDNETDF |
| | | | | ACCCAGAGAATATCCCATGG | (SEQ ID NO: 1348) | NTSNTENNSTDAEKEVKNYL |
| | | | | GAGATATCCATGGAAAAAGC | | NMLLLTINEEEWLTSTLKEA |
| | | | | ACCACGTTAGACAATCCGAT | | ATLALQGKKTEASEKLNEYA |
| | | | | GGTCTAACTCGGCTCCGAGG | | SKTLFPGLKITNQTRKREKK |
| | | | | GGCTAACTATCCCAAAGGGC | | ISKRETRRQEYAEIQKLYKK |
| | | | | TTAA | | NISSAAEKAINGKWSIKPEE |
| | | | | (SEQ ID NO: 1225) | | EYHNNKDLIKAWKPILEAPP |
| | | | | | | FSDCRPIENIKEMDYALMEI |
| | | | | | | STAEIFLAIRAMGKTAPGPD |
| | | | | | | GIKYSKLKKNIQSMAILFNT |
| | | | | | | CLLTSFLPLPLKIARTILIP |
| | | | | | | KQENPGILDYRPLTIASVVT |
| | | | | | | RVFHSILAKKLDNNAQLSQR |
| | | | | | | QKGFRKCDGVAENIVILETI |
| | | | | | | LTNSRSEKRPLCMAFVDLRK |
| | | | | | | AFDSVGHESIIRGAKRVGVP |
| | | | | | | PMLLEYISSSYQNASTNLFG |
| | | | | | | EILNSRRGVRQGDPLSPILF |
| | | | | | | NFVIDEALENLNRNIGYLLK |
| | | | | | | EEKVSCLAFADDIVLIAETK |
| | | | | | | GGLENHIEKLLEKLNGAGLE |
| | | | | | | LNASKCATLMVMKNGKEKST |
| | | | | | | YISTKAIKIKENDIPTMKAT |
| | | | | | | ETYKYLGLOMGFKAREQNAN |
| | | | | | | EVITEGLENITRAPLKPQQR |
| | | | | | | IHILRDFLIPRLIHKLVLGR |
| | | | | | | VAKKSLKRIDQNIRKKVRNW |
| | | | | | | LHLPKDTTAAFIHADAGDGG |
| | | | | | | LGVPALEHTIPLLKRERITN |
| | | | | | | LRKSNDPVTKECLRMEYTKQ |
| | | | | | | VLGKWSRPTKIGETLATNKS |
| | | | | | | QLKEAFRKQMLITLDGKGLK |
| | | | | | | DHHETPTIHKWIRRGENMTG |
| | | | | | | KQFITAVKIRGNLVATKSRN |
| | | | | | | SRGRPEQEKLCEAQCGRPDS |
| | | | | | | LGHILQGCWRTHGMRVERHN |
| | | | | | | NICRRIKAIMKGKESEVVEE |
| | | | | | | PRLQTNEGLRKPDLLICHKG |
| | | | | | | KIIICDAQVVADSSNCSLES |
| | | | | | | ENQRKIDYYKKDSVVSEARK |
| | | | | | | LIGRVDEDIIIMAVTFNWRG |
| | | | | | | AISKTSIRDLDMLLDIKSKE |
| | | | | | | VIKMSRKIIRDNSIMVEMHR |
| | | | | | | NRTEKRR |
| | | | | | | (SEQ ID NO: 1470) |
| R2 | R2- | — | Tribolium | TGGAAGACCCCGCCCATGAG | TGATGCTCCTTTGGTTTTAC | MKSRSFRRIGDCAAGSSRRG |
| | 2_TCas | | castaneum | GCTTGGAGAGTGTGATCCTG | CATCTGTGGGGGCATCGGTC | VRLTGKAGREGRFAASPHLS |
| | | | | ATCACACTTGAAAAGTTATG | CTCACGGTTTCCTCGGGTTT | PRYLAGSVSGNVPSVPPGPG |
| | | | | CTGAGTACGTCGTGAGAGTC | CCTATTGTTTTTCCTAAACC | LGAGAPAFAAGRNADGGPAQ |
| | | | | GGTAACTGTCCCAGGATGGT | CGACAAGGAGCCCTTTGGCC | NPCPYCARSFTTANGRGLHI |
| | | | | CTGGGATAGGCTAAACCTCA | CTCCTCCTTAAACACCTCTC | RRAHPDEANNAIDIERIHAR |
| | | | | GCAGGGGAAAGTTGTAGGGG | CTTCATCCTSTTAGTCCATT | WSHEETAMMARLEAGAIQRG |
| | | | | CCTGCCACCCCTACACTTTT | CCGGCTAAAATGATGAAGAC | GVRFMNQFLVPRMPGRTLEA |
| | | | | ATAGATATGGCATTCGATAC | CGAGGAGTGTCACTCTCTTG | VKSKRRDATYKALVQRFLQA |
| | | | | CTCAAATAGAGCCTCGGACT | GCGGGGTTAACCCGTCCAAG | PQINLPELRDGDAPRQPDPQ |
| | | | | TGGAGGAGCATGGTTCCCCT | TGTAAATGTGACCTCGCCAT | QENPPEPPSFDGAIRGAVAD |
| | | | | CCTCCTCGTACTAGACCTGG | TCGGGCTCTGATA | LVGGVDWQRLGFQGDRLCNI |
| | | | | AACCAACGGTCTTGACAACC | (SEQ ID NO: 1349) | ARRACDGGDVSGQLLGWLRD |
| | | | | CCATTGGACCTACGGGAGCG | | VFPVKRVSTRGDQSDLDVDG |
| | | | | GACCATGCTCATGGACATGG | | ALVSRRTARTREYARVQELY |
| | | | | ATTCCGAAGACGAAGCGGGG | | RKEPKACLARILGDRREGAN |
| | | | | GAACACGGACCCCCCGCCGA | | RAPNRDPAFIDFWRGVFSEA |
| | | | | TAATGCTCACTTAACGTCAG | | SAEVEGWAEEVSDHGELARR |
| | | | | GCGAACCCATCGAAATCATC | | VWDPISVEEVGRSRVRNGAA |
| | | | | TTGATGTTACCCTTTCAAAG | | PGPDGIAVSVWNKLPPEAAA |
| | | | | CAGGTCATGCGGCATATGTC | | LLFNVLLLGRCLPAELTRTR |
| | | | | TCAATGCCGGAAAGGGTGGC | | TVFIPKTDAPRTPADYRPIS |
| | | | | TCCCGGGCGTAACGGACATC | | IASVVARHFHRVLSARVQRI |
| | | | | TATCGCTGATGGAASCTAGC | | PDLFTKYQRGFLSGVDGIAD |
| | | | | TCGCTCTTGAAGAACGGCGG | | NLSVLDTMLTMSRRCCKHLH |
| | | | | ACGGGGACTTGGAATCGTGG | | LAALDVSKAFDTVSHFAIVR |
| | | | | TGTGGTTCTGATGTAAGTCC | | ACRSIFGSAETVLEEGGRRH |
| | | | | TGAAATTATGGCGTGATGGC | | FVQVRXGVRQXDPLSPLLFN |
| | | | | CCGCCCGCCCGACCGGAGGG | | LVLDRALKRLSTDVGFRLTD |
| | | | | ACTTAGAACCCCCTTCCGCG | | ATKVTALAFADDVVLCATTA |
| | | | | AGGGTCCTGTCTGTAGGTCC | | RGLQTNLDVLEAELRLAGLL |
| | | | | WCCATCTCCGTAAAACGAGT | | LNPNKCQALSLVASGRDHKV |
| | | | | TGGAGGAAACCGCAGACGGG | | KLVTKPTFKVGQNTIHQVDA |
| | | | | G | | SSIWKYLGIQFRGSGMCGCG |
| | | | | (SEQ ID NO: 1226) | | SEGVAAGLKRITCAPLKPQQ |
| | | | | | | RMHLLRVFFLPKFYHAWTFG |
| | | | | | | RLNAGVLRRLDVVVRTSVRT |
| | | | | | | WLRLPHDIPVGYFHAPTKSG |
| | | | | | | GLGIPQLSRFIPFLRLKRFD |
| | | | | | | RLGRSAVDYVRECAFTDIAD |
| | | | | | | RKIRWCRERLSGIVDQVAGG |
| | | | | | | RDALDAYWTAQLHQSVDGRA |
| | | | | | | LRESASVASSTQWLRCSTRA |
| | | | | | | IPASDWLHYTAVHIGALPSR |
| | | | | | | VRTSRGRRGGQDVSCRGGCL |
| | | | | | | LDETPAHCIQVCHRTHGGRV |
| | | | | | | LRHDAIAKRISADLMELGWI |
| | | | | | | VTREVSFRTTAGVFRPDMVA |
| | | | | | | VKEGVTVILDVQIVSPAPTL |
| | | | | | | DEAHRRKVAKYRDRADLARY |
| | | | | | | LAEAAVARGRAPPANIRFAS |
| | | | | | | ATISWRGVWSAESVGSLREL |
| | | | | | | GLSARHFDRYTTMALCGSWR |
| | | | | | | NWVRFNASTASRMGRGRGDA |
| | | | | | | SPRRHENQQ |
| | | | | | | (SEQ ID NO: 1471) |
| R2 | R2- | — | Megachile | TCTAGTTAGCAAGCGGCCCC | TAAATGTCGAACCGAATTTT | SGPATSTFGETKSRLCEPTS |
| | 7_MR | | rotundata | CTCTAA | GGGTAACGTGCACCCCACCA | ALGCRPGAVVIQWAQIHKEK |
| | | | | (SEQ ID NO: 1227) | TCCTTAATCGGCAGCACGCA | RKRIVGWPLGHLGSPTSLKL |
| | | | | | ATAAAGCCGTGGGCAGTGGT | RHPRLQAKRIVPVLAELMQC |
| | | | | | TTTAGTGGGTAGTCATTAGG | LCARHVSGRSPQKSAWAFTL |
| | | | | | AGTCCCACAGTACCCAGCGA | EERTSACGVDAMFVCSTCQR |
| | | | | | ACATCTTAGTGGGTCTGCGT | SFATKIGLGVHVRRAHVEVA |
| | | | | | AAACGCATTTCCACTGCCTA | NAAISVERVKDRWSEEERRI |
| | | | | | TCCTCCGGGAAAAAAAAAAA | MAAVEVRGVLSGARFINEYI |
| | | | | | AAAAAAAAAAAAAAAAAAAA | MSHLQTSRTLESVKGTRKNP |
| | | | | | AAAAAAAAAAAAAA | KYKELVATLLEEARTSVREE |
| | | | | | (SEQ ID NO: 1350) | SPRSAVNDSATQPSGPSDTR |
| | | | | | | SLRTEHLFTESTEPFEHRIR |
| | | | | | | ELIGDLEGVTDFRAELLVSI |
| | | | | | | AEQQLQGDEVAESLTRWLGE |
| | | | | | | VFKPENQQQQVQRKRRRQRK |
| | | | | | | APVSGQLPKWRERRRDYAAM |
| | | | | | | QTLFHRNPSLAAGRVLDGKN |
| | | | | | | ESRPPDLPEMTAFWEPILTE |
| | | | | | | QSAEHRAVGPASEKSELCSV |
| | | | | | | WGPVEKEELLSSVPPLDTAV |
| | | | | | | GPDGVTARQWRAVLPAVRAL |
| | | | | | | LYNIILKRGSFPASMLESRT |
| | | | | | | VFLPKKQHSVNPADFRPISI |
| | | | | | | ASVVVRQLHKILAMRLRRTN |
| | | | | | | LVDERQRCMDDGCAENITVL |
| | | | | | | ASLLDDARHGLKELHLVSLD |
| | | | | | | CAKAFDSVSHHAIDATLKEC |
| | | | | | | GLPAGFVQYISRTYSDSSTR |
| | | | | | | LEVGRNRSEPIKTNRGVRQG |
| | | | | | | DPLSTLIFCLCFDRVARTLS |
| | | | | | | PHIGYDLNNTRISTLLYADD |
| | | | | | | AFLVSTTAPGMNILLRSVEE |
| | | | | | | SAGEVGLSFNTSKCSALSLI |
| | | | | | | PSGKEKKMKVGTTPTFKTSQ |
| | | | | | | GFITQITPSQEWRYLGVDFQ |
| | | | | | | YSGPKKASRSLKIELERISK |
| | | | | | | APLKPQQRLLILRVYLLPRY |
| | | | | | | YHHLVLSRTTLGHLRGLDLQ |
| | | | | | | VRAAVRRWLSLPRDIPIAYF |
| | | | | | | HTTAKEGGLGLPAFETSIPC |
| | | | | | | LMLARLRSMETSTCKAARAA |
| | | | | | | VQGFWVQKRIHWATAALTKN |
| | | | | | | GEALTCKADVDRWWASRLHK |
| | | | | | | SVDGRELRECSGVGSSSTWV |
| | | | | | | NSALNITGRDYVQYHHVRIN |
| | | | | | | SLPTRIRTSRGVRREGMEVT |
| | | | | | | CRAGCQVTETAAHVIQSCHR |
| | | | | | | THGGRILRHNAVCKVLASGL |
| | | | | | | RDKGWEVREEPKLRTRQGLR |
| | | | | | | KPDIVAIKDGVARVIDAQVV |
| | | | | | | SGSGPLDEAHETKRKYYSDN |
| | | | | | | GDVTAAIARECNIAPSNVAY |
| | | | | | | SSCTISWRGVWSPRSAADLL |
| | | | | | | QVGLSKKLLGFITLRVLRGS |
| | | | | | | HLNWTRWNKMTTMRVHHQRT |
| | | | | | | GIG |
| | | | | | | (SEQ ID NO: 1472) |
| R2 | R2Amel | — | Apis | TGGTAATCAAATGCCTCGCT | TGATCGTTAAAAGTAAAAAT | MSSNEEGASDTGAPGPGVPV |
| | | | mellifera | ATTTTAGTAGCGGTAGCGCT | CTATTTATTTATTTTTATTC | ADVSAADGRATYDDHGMSTD |
| | | | | CCGCCCGCGCAGGAACCATT | CTATATTATAACACATTATT | YEKQTIELPLNGQIQCLWCH |
| | | | | GACGCCGCCGTAGTGTGGGT | TATTTATTTACTTATTGTTT | IEGRNQRFLQESQYLKHKDT |
| | | | | GATTTTATATCCAACCAATC | TAAAGATGACGAAGCCGCAA | QHPKGEIIWRCAACQKEFEK |
| | | | | ACGTCAACTACGATCATTTG | GGCCAATCCAAATTTAACAA | LHGCRCHLPKCKGRKEAKGV |
| | | | | TAATCACCGACGGTACTTGG | AAGAACGAGACTACTGGTCG | AKFKCDSCEESFLTQRGLSM |
| | | | | TAGGGGTACCACATGGGCAT | ACATTAAAAAGACGAAGCAG | HELHRHPAIRNLKRTQGTSR |
| | | | | TCTTGCTCATTCCACAACGC | CTGCCAGCTGATAAACAACA | GNTRPINRASVWSKEETDLL |
| | | | | CGCCTCCATCATGGCAACAA | GAGCCCGTCTCGGCCTTTAC | IKLNERYKHLKQPNVALKEY |
| | | | | TTTAAAATATATATAAATTC | ACCGAGCGGTGCAAGTCCTG | FPDKTLKQISDKRRLLPVQE |
| | | | | TTAAGGTTTGACCGTATTCA | ACGTACTATTGTACGTCTAG | PEDVATTDETGPPPSDSSEE |
| | | | | TATATATATATATATATTTA | GGCGCGGGGCAGATTCTACC | SIYESATEDEGGGDMQQTAP |
| | | | | ATATTACAACCATAAATCTT | GTGTAGAATCTGGGGCGACG | NDSWKEPFIQSIRTNHLEEE |
| | | | | ATATCGAGCCTTCTATTTGG | CCTCCGCGAGGCACTCCCTG | DSLRKVEEAIERMAMNEGVT |
| | | | | TCTCAAAAGCAATACGTTGT | GACAACGTACGCTAAAGCGT | EQEVGTLLEQFVDSLTQSPT |
| | | | | CAGATCTTGTAGAACATCAG | ACGGCTAAGTGCGCCTCCCG | TERKGSRRKSQKTTKRKTTH |
| | | | | GAGTGAGCGGTGCGCTGTGG | AAAGGGTCCCCGTTCCTAAT | NNRKKFLYAKHQELYKKSPR |
| | | | | TATCCGTGCTTTGTGCCGCG | TTTTCCGAGCCCGCGGGCAG | RLLELALSGESSSGREVVNL |
| | | | | GCGACAAACCAATACGCTGC | ATCTCGTGGCAGTGACGCTA | PEADSVGPLYKSLWGQIGPE |
| | | | | TGCCTGTCGCAAAGCAATAC | GAAAGTTAAGTCCGCGGACA | KTHRNQPMCNNIDMSEIWTP |
| | | | | GCTGCTGATTCTCGGATGCG | TATAAAATTACAGCCTTAAA | IALESLVEKFKKIKSDTAAG |
| | | | | GGTGTCGACGGTCACGCAAA | TAATGAACCCCACGAAGGAG | ADQIKKFHLRKKGALHVFAK |
| | | | | GCGATACGCTGGTGGGGTTT | GTATCCTCGAAATTCCGCCA | LCNLLMLHRIYPAQWKTNRT |
| | | | | CAAAACAATACGGCGCTGGT | CGATCCTTCTGATCGTAGGC | TLIPKPGKSAEEVENWRPIT |
| | | | | GCTAAAAAGCATTATGCCGC | GCAAAACA | IGSLLGRIYSAMIDRKLRSK |
| | | | | TAACGGCTGGATTGTCGATC | (SEQ ID NO: 1351) | IKQHIRQKGFTQEDGCKNNI |
| | | | | GCCGCTGCGGGGGCTAGTGG | | AILSSALTKMKEDSGGIITI |
| | | | | CGCACCCAGAGAGGTGCGAC | | IDISKAFDTVPHGEISQSLM |
| | | | | GCGCAAGCATTGGTTCTGTG | | NKGVPSPICEYIQKMYIGCK |
| | | | | CGAAGCGGAGTTCTTGAGAG | | TIIYCRDKKTLPVDILRGVK |
| | | | | TAATGGTTGCTGGGGGCACA | | QGDPLSPLLFNLIIDPIIGT |
| | | | | AAGCGCAACATATAGCCTCT | | LDETTEGIKLENENISVLAF |
| | | | | TATGCCTCAAGTCGTAGTTC | | ADDLVLLAKDKETADKQNRL |
| | | | | GTACCTCCACGTGGTCCCGC | | INEYLDDLKMKVSAEKCTTF |
| | | | | TGGAATGCCTATCGACTCCT | | EIKRQNKTWFLGDPQLTLGQ |
| | | | | CCCCGGAGGATCATAGAGTT | | QRIPYADPEAAIKYLGTNFN |
| | | | | CGAAACCGGCTACGGCGAGG | | PWRGLCKTSIKEIIDAARTV |
| | | | | CAAGGGCGGTGAGGTGCACA | | KQLKLKPHQKINLIRTYLLP |
| | | | | CCGATGGGGAGCAGCGACCC | | RYIHKLVANPPPLGTLDLID |
| | | | | CACCTACCCTTAGCTAAGAG | | KELKTIIKEILHLHPSTTDG |
| | | | | AGCAGGCGATCCGCCAACTG | | LIYTDKSHGGLGIQRVANIV |
| | | | | TCAGCACGAAATAAACTAAT | | KLAKLKHSILMTRSEDNAVK |
| | | | | CATATGTATACGAGGGAGAA | | IALNGQEGMVKRYATSIGLQ |
| | | | | TTTACAACGGGTACCTTGTG | | WPCGIEEIEETRKKLKRADT |
| | | | | CCCGAACCGCCTGTAGGTAT | | NKWKTLISQGQGIKEFFGDK |
| | | | | CACCTACAGGTGTTAAAATG | | TGNAWLYNPEMLRPSRYLDA |
| | | | | AATCTGATAGCTGGCGGATC | | LKLRTNTYGTKAALHRAKRD |
| | | | | GTCGACCCTCTTTGATGGCT | | IDINCRRCGVQVETLGHILG |
| | | | | CTGCGCCAACGACTGGAAAG | | LCTHTKNKRIKRHDEICDLI |
| | | | | AATAGGAACGGAAGTCTAAT | | AKNVSKEYVIFREPEVEVNG |
| | | | | GGAAGGAAAGTGTCGGGAGC | | DRRKPDMVIKDHDKVYVVDV |
| | | | | ACTATAAATTCCCAAAGAAG | | TVRYENNDSLNKAYKEKENK |
| | | | | AAAAGAAAAGAAAAAAAATA | | YKETAEIMRRDLKAKESRVL |
| | | | | AAAAACCCAAATTAA | | PVVIGSRGAVPRATIENLKV |
| | | | | (SEQ ID NO: 1228) | | LGLQTKHALTASLIALRSSI |
| | | | | | | EMANEFLDYDHTT |
| | | | | | | (SEQ ID NO: 1473) |
| R2 | R2B_NVi | — | Nasonia | GACTAGACTATGGGTTCAGT | TGACCTGAACAAAACGTGTT | TFAPTHPMVRSGPCRKTKRP |
| | | | vitripennis | CAGTCCCAAATAGCCGATCC | GTCTTGTCTTGTCTAAAACT | GSDYRESLIMDSGNNVASEP |
| | | | | TGGCGCGTCCGGCAGTAATG | ATTTATTCGAAATAAGGGGA | RGAVDVTSAAPIGAELNAEP |
| | | | | CCACGTATGAGTCGGTTACC | GGCTAACTGCCTGCAAGTTG | CEGRNORREAALSAQTRRRN |
| | | | | CATCTCTAAACGCGTAGAGG | AACGCGAAAGTTAGACCTTC | XARRARNAQQADEPGDDEEI |
| | | | | TGGGGAGCTAAAGGCCAGGC | CCACCTAAAGCCCAAAAGTG | ETHGPLTIRTXEPMEIVAIA |
| | | | | GGTTTACCCGACGTCGAATT | ATCGGGGAATGAATCCGCGG | KNPQACPKCLQGGTQLLCMG |
| | | | | TCTCCAGGTCTGTGTCAGTC | GTGACCCCAGAGTTGGGTAA | SWELSRHINKEHPSVDVTWV |
| | | | | GACGGAATAAAGGTACTACA | ACCCTTGAAACGTTGGAGAA | CGACQRRCTTLRSWSCHVLH |
| | | | | ACATCTACTATCTATCGGGA | GCGGAAGAGAGTCCCGCCAC | CKGRQEPKDLPFKCEHCSLS |
| | | | | TCGGAAGACGCCTTACAGCG | CGAGCATCGAGTGCTGCGGC | FDSQIGLSQHERHVHPEVRN |
| | | | | TTTTCCGATTTTTGCTCTTT | GCCCGAATGAAACCGATCGC | DKRAAEANKPKGKSGRRPSI |
| | | | | GAGCATTTTTCTTCAAATTG | GGATGGTGCAAGTCGTAGGA | WSDEDLLLIRELESEYHGAR |
| | | | | CGATAACCGACCCGATCACG | CGGGGCACGACCTAAGCCTC | NINEKIAEHFPDRTGRQVSD |
| | | | | CGGGGCTTTGACAAAGCAAT | TGTCACGGCGGCGAAGCCAG | ARRRKDYAALRGRGGPQGPA |
| | | | | GCGTGGTCGGTAAGATGGTT | GAATCACCATGCAAAGGTGT | EGVEAIEEVDEGEIPEGEEL |
| | | | | GCAATCTTTTCCACCTCGTT | GAACTGGGGCGGATACCTCC | VATDGAALESGPPENGGSAP |
| | | | | TCTTTTACGGAACGAAAGCA | ACGGGGTTTCCCTGGGCATC | AEQVNAPALESSSQQDRECS |
| | | | | ATGCGTGTGGGGAACGTTAA | GCGCGAGCGATGGCCAAAGT | PAVGSDEQIEDSSDDDEFSD |
| | | | | AAACTCCCTTCATGCATCCC | CCGCTTTCTCAGCTACAAAA | ALGEISLPEPLSVERTTISP |
| | | | | AGGATTTATCCTGCTTACTG | CAAAAATGGTATGAGACTTC | PPRDDWKGPMRWEICNASEE |
| | | | | CAAAGCAATGCGTGTGGAGC | GTTAACACTAATTTTTCCGA | AGSYANWVTGLQELVRNNAL |
| | | | | GACTTTACCACGAGTCGCTC | GCCTAGCAGGCTCCCTTGAC | SEIGLDSLYDQLIQIMRHPS |
| | | | | CACCGCAAAGCAATGCGTAT | AACGCTTATGAATCTGGAAA | DDNEQDRLQLNARGPPRRGH |
| | | | | CGCGCAAAAGCAATGCGTGT | AGGACACAAAGTGGAAAAAG | RKNRRRRRLTAADRKRFAFA |
| | | | | GGGGGACTTGTCAAAGATCC | CGCTGATGGTGGACAAAAGT | RCQDLWNNNPKKLAELVIAN |
| | | | | CCCGCCGCAAAGCAATGCGT | CAGTTGAGACTTGATATCAG | DLSILQRRQAPGRTETQTLY |
| | | | | GTCGGCACCACGTAGAGCAA | TTGTTTTGACTAAGAATTTT | NELWGRVGPNIEAPRRTEDP |
| | | | | AGCGTGTAGGCAGACTTTGT | ATTATCGTTGACTTTTAAAT | IPVSRIFTPITPQEIMGRIR |
| | | | | CAAAAGTAGTTCTGCCGCAA | ATTTTATTATTGACTGTTAA | RIKNDSAAGPDGVTKDDLRG |
| | | | | AGCAATGCGTGTGGAGATCT | TATACTGACTTGGGACCAAG | RGVSIALSKLFNSILLAGYY |
| | | | | TCGCCGGTGAAAGCAATACG | TCATCTCTGTTACCCGGTAC | PKAWRENRTTLLPKPEKDPA |
| | | | | TGTGGGCGAACTTAG | CGGTTCCTGTCATCAAACCG | DVKNWRPITISSMVSRVYSG |
| | | | | (SEQ ID NO: 1229) | GAAAGTCCGTCCCACGTAAT | LLDQRVRAVIKQCDRQKGFT |
| | | | | | GTGGTAGACGCAGGAG | EENGCFSNIQLLDDAVSNAK |
| | | | | | (SEQ ID NO: 1352) | KAGGVITILDVSKAFDTVPH |
| | | | | | | AVIQGCLEKKGIPETVAAYI |
| | | | | | | SSMYRDCSTAIRTRSGDVKI |
| | | | | | | GMKRGVKQGDPLSPLIFNLV |
| | | | | | | LEPLLERLQETSGVEIEGMN |
| | | | | | | LSCAAFADDIVCFANTAPEA |
| | | | | | | GRQLRMVADYLGRLDMSLSV |
| | | | | | | SKCIAVEYVPHRKTWYTKNP |
| | | | | | | GLEVNGNAVPSISPSETFKY |
| | | | | | | LGAKVSPWKGLLEGFESDAF |
| | | | | | | REVISRVQRLPLKPMQKVDL |
| | | | | | | LQMYIFPRYTYGLITSPPAK |
| | | | | | | AVLKTIDRIIRTRIKEILHL |
| | | | | | | PESVSSSFLYTPRKQGGLGL |
| | | | | | | LEVEKMVLIAALRNGLRARQ |
| | | | | | | SHDPVTRAAMNSNAADDRLK |
| | | | | | | SYADALRLHWPLTTKELDTY |
| | | | | | | KYQLRLSYAQKWAEQKWQGQ |
| | | | | | | GVEEFAQDPVGNSWLQRYDL |
| | | | | | | LPASRYIDAIKLRTNTYPTR |
| | | | | | | ALMKIIDGRVDSSCRKCQGS |
| | | | | | | SETLGHILGRCRYTKDKRIS |
| | | | | | | RHNEIKDLLKARLAKNHQVM |
| | | | | | | DEPQITVRGQRFKPDLVVKT |
| | | | | | | NEGRVHVIDVTVRYEHRTYL |
| | | | | | | DEGRTEKIGKYRQILSTLRR |
| | | | | | | DLHSNAEEVIPIVIGSRGAI |
| | | | | | | PRETRKALSKLGIGKSDWLT |
| | | | | | | ISLIALRSSLEIVNAFMDD |
| | | | | | | (SEQ ID NO: 1474) |
| R2 | R2Ci-B | AB097 | Ciona | CGACGGTGAACCACCTTGTC | TGACAGTAATATGAAAACAT | MGEWPWVSWSLTVLVEKWRP |
| | | 122 | intestinalis | GCGGTGTAAGAGCTTTAGTG | CACATCTGACCGGCACAGAA | FTILQPYPMPGQLRVDVYLP |
| | | | | TCTCGAACAAGAAATAGCTT | TCACCATGCCGTAATGCACC | RKTSYLMDKNIYENTTSPGG |
| | | | | GTGTGCTGTCCTTCTGGGCG | CAACTAAGGATTCCAATGGG | GPLCGEKTHRSDVIIPPPGF |
| | | | | GTGCACATACTTCTTAACCT | TAAAAAAAAAAAAAAAAAAA | APSTDTASNTLGENVDASAT |
| | | | | CCCGAGGCCATGCCGGCGGG | AAAAAAAAAAAAAAAAAAAA | TSSANPLSQEPGWCESCSKL |
| | | | | GGCTTTAGCCCCCGGCAGGT | AA | FKSQRGLRVHQRSKHPELYH |
| | | | | TTTACCATGCCGGACGGGTT | (SEQ ID NO: 1353) | SQNQPLPRSKARWSDEEMVI |
| | | | | CGAGAGGTAGAGGCCAAACT | | FAREEIANRKIRFINQHLHK |
| | | | | AAGAGTTCACCAGCAGACTT | | VFPHRTLESIKGLRGKNVRY |
| | | | | CGCACGCGGCTGGCCACTGG | | ARIMADLEAEMTSQPEAATS |
| | | | | CCGAAGTTTAAACAACAGGG | | LCTETSENLASSNVLPQTRG |
| | | | | CCGCATCTTCCCAAACTCAA | | WAENLVENIDTAHLANLGPL |
| | | | | TATATGGTGTTAAGTGAACC | | SQFEPGKPSSSTKEAINTEY |
| | | | | GTGCCG | | NDWISKWLPSGAAHRERRAN |
| | | | | (SEQ ID NO: 1230) | | PPSTKLNARATRRLQYSRIQ |
| | | | | | | NLYKLNRSACAQEVLSGAWK |
| | | | | | | VQSGELNLKEVQPFWEKMFR |
| | | | | | | KESAKDRRKPKPTGEVLWGL |
| | | | | | | MEPLTIAEVGSTLKSTTPSA |
| | | | | | | PGPDKLTLDGVKRIPIAELV |
| | | | | | | SHYNLWLYAGYQPEGLREGI |
| | | | | | | TTLIPKIKGTRDPAKLRPIT |
| | | | | | | VSSFICRIFHRCLAQRMETS |
| | | | | | | LPLGERQKAFRKVDGICHNI |
| | | | | | | WSLRSLIHNSKDNLKELNIT |
| | | | | | | FLDVRKAFDSISHKSLGIAA |
| | | | | | | ARLGLPPPLITYISNLYPNC |
| | | | | | | STKLKVNGKISKPIEVRRGV |
| | | | | | | RQGDPLSPLLFNAVMDWALS |
| | | | | | | ELDPRVGVQIGEQRINHLAF |
| | | | | | | ADDIILVSSTKIGMVSSINT |
| | | | | | | LSRHLAKSGLEISAGKEGKS |
| | | | | | | ASMAIVVDGKKKMWTVDPLP |
| | | | | | | RFKVNSQKIPALSITQQYKY |
| | | | | | | LGINIDAQGARNDAARILTE |
| | | | | | | GLAELSRAPLKPQQRLYLLR |
| | | | | | | VHLLPKLQHGLVLSSCAKRA |
| | | | | | | LTYLDKSVRSAIRRWLTLPK |
| | | | | | | DTPTAFYHAKACDGGLGITR |
| | | | | | | LEHTIPILKRNRMMKLTLSE |
| | | | | | | DPVIMELVKLTYFTNLLHKY |
| | | | | | | SNVKLLNSWPVTDKDSLARA |
| | | | | | | EASMLHTSVDGRGLSNCSDV |
| | | | | | | PRQSDWVTNGASLLSGRDFI |
| | | | | | | GAIKVRGNLLPTKVSAARGR |
| | | | | | | QREITCDCCRRPESLGHILQ |
| | | | | | | TCPRTWGPRISRHDSLLKRV |
| | | | | | | RNQACLKNWTPIIEPSIPTN |
| | | | | | | IGLRRPDLVLAKGNIAFLVD |
| | | | | | | ATVVADNANMQLQHEAKVEK |
| | | | | | | YNNSDIKEWIKVHCPGVDEV |
| | | | | | | RVTSLTANWRGCLYGGSASF |
| | | | | | | LTEDLGLPKAELSLLSAKIN |
| | | | | | | EKGYYLWCAHYRGTARLWNR |
| | | | | | | PLRS |
| | | | | | | (SEQ ID NO: 1475) |
| R2 | R2C_NGi | — | Nasonia | CGGGTTCCCCCGACTTCGGC | TAGCGGACTGGACTGTCTGG | WVTSPRRPRYVGPQKKKASD |
| | | | giraulti | TTGCCGTGGTCTGGGGCTCA | AGGAGTGTTTAACTCGGGTT | GNDGRAAARAEPTNPGGPDR |
| | | | | CTGCTTTTTGTGGAGTCATG | CTCATGGGAACCCGACAACG | ADDDEGDVKFWCEFPGCDRF |
| | | | | GTTACATGGTGACCCTGGTT | TTGTTATCTTGTATGACAAT | FMTRSGRGLHHKKGHPDWND |
| | | | | CCTCGCACCCCCGCTGGAAA | TCATAAAAAAAAAAAAAAAA | QRNLAGKQHRKEIWSEEERL |
| | | | | CTATCTGGGGAGGCCATGAT | AAAAAAAAAAAA | LLAKKEAELAISGARFINVE |
| | | | | TGGGTAACGATAAAGGTCCT | (SEQ ID NO: 1354) | LRDFTARSLDAIKGQRKRPD |
| | | | | GGTCGTGTCCTCCTGAGATA | | YKILVEKFVRELRVRGIRQG |
| | | | | GGCTGAATGGGTCACTAAGT | | VASRSQQARAMAVAGAPAAT |
| | | | | GGCACCTAA | | SSGAPPVATQPPPSGRVLRS |
| | | | | (SEQ ID NO: 1231) | | QVVEAPAMEIPVAESEGDSS |
| | | | | | | GDELFEDVEPVRLSDLPPDR |
| | | | | | | FTIYFAGLEIPGTEDIYAHR |
| | | | | | | LHTICLMTTWRTKEEVRLEL |
| | | | | | | GLFLKDLFPSKGSQERPERT |
| | | | | | | NLPDPRNRIERRRGEYKKCQ |
| | | | | | | DLWRRNKSTCVQRILKEDLS |
| | | | | | | QGECLPRELMEPFWNATFTQ |
| | | | | | | NPGTAPVLPPPTEVYSSVWE |
| | | | | | | PIRPENIKGNYPPQNTAAGI |
| | | | | | | DGLTVGDLKGVSREMLARIF |
| | | | | | | NLFMWCGKLPEHLCASRTIL |
| | | | | | | LPKKPGAKVPGEFRPITVTS |
| | | | | | | VLIRTFHKVLAERLKVVPLD |
| | | | | | | PRQRGFRESDGCAENVMLLD |
| | | | | | | MTIRYHHERRRKMFLALLDM |
| | | | | | | AKAFDSVSFESMREVLTTKG |
| | | | | | | IPTPFIEYFMTHLEDSFTVL |
| | | | | | | QHGNWQSGKIHPTCGVKQGD |
| | | | | | | PLSPPIFNFIMDEMLKRLPK |
| | | | | | | EIGVNLDGLFVNAMAFADDL |
| | | | | | | SLVANTEQGLQILIDEATSF |
| | | | | | | LGLCGLRANPNKCVTLAIKT |
| | | | | | | IPKEKKTAIDPSSHFRIGNA |
| | | | | | | VIPSLKRTDEWVYLGIKFNS |
| | | | | | | NGRLISDAKPKLIKDLELLT |
| | | | | | | KAPLKPQQRLWALKVIVIPG |
| | | | | | | ILYRGTLGSSTAGYLRSLDC |
| | | | | | | VIRAYVRRWLRLPGDCPNGY |
| | | | | | | FHAAVADGGLGVHPIRYKAM |
| | | | | | | VDRLARLRKLEKSAYITGPE |
| | | | | | | AARYLQRQVSIAENRLRDGA |
| | | | | | | NRIMSDASMLREFLRELLYK |
| | | | | | | SFDGRPLENSSKVPGQHRWV |
| | | | | | | EEPTRFLSGADYMNCIRARI |
| | | | | | | AALPTAARCARGRLKDKHCR |
| | | | | | | AGCGNVETLNHVLQFCHRTH |
| | | | | | | GTRIGRHDAVVKYVVGGLKK |
| | | | | | | RGYAVKEEPKIVLQDVVYKP |
| | | | | | | DMVATKEGKTLILDAQVLGD |
| | | | | | | QRDMRLAHEDKLRKYGAPEF |
| | | | | | | KRKIRSETGSATIKSLSVTL |
| | | | | | | SWRGLWGPDSVKGLLEEGVI |
| | | | | | | LKKDLKILSTRVLIGALAGW |
| | | | | | | RRFNERTSMATSGRREEVTT |
| | | | | | | RMVRRWKRRERVGVG |
| | | | | | | (SEQ ID NO: 1476) |
| R2 | R2La | JN937 | Lepidurus | GGGGTAGCAATTGATCGATT | TGATAATCGCTCCATCCTGC | MSGKSSKPRTVSSGSSSQET |
| | | 617 | arcticus | CCCGCTTCCTCGTGGCGCTA | AACTAATTATGAATGCAAAT | PPSGSNACDICGKCFMKPVG |
| | | | | CCCTGGGTAATACTATGAGG | CTGTTAAGTGACATTAGTGA | LSRVHPSQYHARLEKNQPKA |
| | | | | AATTGATCACACCGTAGCGA | TACTTACCTGATACTTACCC | KKFRWTDEDLYFLAKKEAEL |
| | | | | ACGTCATCAGTCACAGCTGC | TGGTATTTATTTGACCTATA | LHLGSIKFVNKELAEFFPEK |
| | | | | ACGAATCCAGATAGAAATAT | CTTACCCTGGTATCTACCTG | SVDQIRGQRRSETYKQQVLS |
| | | | | AACAGACGAGTAATTCTTTT | ACATATATTTATCTAACCAC | IHSELLKLQTVADSPPPSRI |
| | | | | AAAAGCTCGTCAGTAATCTT | CTACCTATGATGACTCCCGC | PAKEVSAWLDFFLALPKTKN |
| | | | | CCCAG | GGAAACTCTCACTTACCTTA | KFSEDKLDQLIRTAQDGTLI |
| | | | | (SEQ ID NO: 1232) | TTACCCACTTGGTCTTTTAT | LDDLDLYLREVLVQPTSQGE |
| | | | | | TTTCTCGTTCCTTATTACTT | KQAKLLPPPKSSREKRDREY |
| | | | | | TGTTCCTTTGGTGTAGGGTT | ARAQNLYRKNKTACVNAILD |
| | | | | | CTCTGGTTTTTGGAACGGCT | GNKKCENKIPDIDDFWKTIF |
| | | | | | TCCTTAGCCGGAATTTTGTC | ESHSPPDAEPVCYVVDEEPT |
| | | | | | TGATGTATCTTGCTTGTGTC | NIWSWISFFEMNHNYPDSST |
| | | | | | CTTGAAATATACGACCCAGG | SPGPDGVTARMLRSIPARVL |
| | | | | | CTTGCGTCATTTAGGCTCTG | NKLLNLLLFIEDLPAVFKCH |
| | | | | | GGAAA | RTVLIPKIDNPTSPGEFRPI |
| | | | | | (SEQ ID NO: 1355) | TISSIVVRQLNKIIAARVSE |
| | | | | | | GVPINPRQKAFRQIDGCAEN |
| | | | | | | VFLLDFILRDAKTKIKSLSL |
| | | | | | | ATVDIKKAFDSVSHHSIFRA |
| | | | | | | IRGARCPENLVNYIQNSYSG |
| | | | | | | CTTQISVGGSISASKIPMNR |
| | | | | | | GVKQGDPLSPVLFNLVINEI |
| | | | | | | IRKLPASIGYPINSELSINC |
| | | | | | | IAYADDLILVTNTREGLKLL |
| | | | | | | LGLLNEELPKRGLELNASKC |
| | | | | | | FGLSLTALGKLKKTHLCTSD |
| | | | | | | QLDLHGTLIKNLTAEESWVY |
| | | | | | | LGVPFSHIGRSKSFSPDLEA |
| | | | | | | LLNKLQKSPLKLQQKLFALR |
| | | | | | | VYLIPRLLHGLVLSRVAIGE |
| | | | | | | LKIMDKLILKHLRVWLRLPK |
| | | | | | | DTPLGFFYSPVKLGGLGIKN |
| | | | | | | LRTNVLKCRKQRIERMLVSP |
| | | | | | | DDVVRLVAESEIFLKETDKL |
| | | | | | | KDLLTINGMCLDXRNVPRTG |
| | | | | | | KNNKFWSERLYTSFDGKTLA |
| | | | | | | YSEYFTQGGGWIREDKILQP |
| | | | | | | AHVFAECIKLRINALPTKSR |
| | | | | | | VAHGRPTKDRSCRAGCLDVQ |
| | | | | | | KVPTIETINHIAQVCPRTHG |
| | | | | | | ARIKRHDRLVQFLSLNLRKN |
| | | | | | | PKRNVLVEYNFRTVAGIRKP |
| | | | | | | DIIVIEDTRAVILDVQVVGD |
| | | | | | | SSNLEMEYLEKSRKYSNDAN |
| | | | | | | FINALQKLYPTVTNLTFHAV |
| | | | | | | TFNNRGLIAKSTVAALRMLG |
| | | | | | | VPPRCIMILCVISLEKTLEV |
| | | | | | | WRMFNQSTASARK |
| | | | | | | (SEQ ID NO: 1477) |
| R2 | R2LcA | — | Lepidurus | TTTGGGGTAGCAATTGATCG | TAGTGCTTGAGTGATGCCTA | MSEESRPKQTASKRGAAVEK |
| | | | couesii | ATTCCCGCCTCCTCGTGGCG | TCCTTTCTTTGATTAACTCT | TMMSGTYVCTLCGRSFEKSV |
| | | | | CTACCCCGGGATAGCCTCAA | TACCATATACTTACCAGTTC | GLSLHTNRMHPEAYNKLKEA |
| | | | | AGAAATTTGACGGTAAAGCA | TTACCCGTACTTACCCTGTA | KKPVLKKARWSEEEVFLLAQ |
| | | | | AAGAGGAATTGATCACCCAA | TACTTACCTGTGTGCGTACC | KEAELSFIGGIKFMNIELHK |
| | | | | GGCAGTACATCGGCCTTCCT | TGTGTACTTGTCCTTTAGCC | IFPERELEGIKGQRKNPTYK |
| | | | | GCAGGAGCTCTGATAAAGAT | GCCTTGTGTTTTTACCATTG | AQVVSLLAEIRESKANDSSS |
| | | | | ATTAGTGAGTTATTCTGTTG | GTACTTACCTTGTGTGGTTG | SSSSSSSCDSASLGISNWLE |
| | | | | AAGCTCGCTATTTCATTCCC | CCCGATACTTACCTTGTATT | FLLALPKTSNQFQEGRLDRL |
| | | | | CTG | TGCCTTGTAATTCTGCATGA | ISDALRGVDVLENLDAYLLE |
| | | | | (SEQ ID NO: 1233) | TATTTATTGTGTAGGTTCCT | VFAKPMAQNPCPKPPPPAKN |
| | | | | | GATGCTTACCTGATTTGTCC | SRERRDREYSRVQNFYKKNR |
| | | | | | CCCTCATCATCTTTAGTTTC | SACINSILDGNTRSQNVIPG |
| | | | | | GTTCTATTTCACTCCATTAT | LTKFWTETFEKNSPPDDEAP |
| | | | | | GGAGTTCCGTTTGTTTTTTG | DQFVADEPRDMYKWITFYEM |
| | | | | | GTGGAGGTACAGCACCCTTT | SQDYLDSSTAPGVDGFSAKQ |
| | | | | | AAGCTGGAATTGAGTGAGTT | LRSMSPRVLNKILNLLLLSE |
| | | | | | TATGTACTTTGGATGGTTGT | NLPNSFKMHKTVLIPKIDDP |
| | | | | | AATAAACTACCCGGAGGCAT | KSPGDFRPITISPVLARLLN |
| | | | | | (SEQ ID NO: 1356) | KILAARLSKLVPISQRQKAF |
| | | | | | | LPVDGCGENIFLLDYILRSS |
| | | | | | | KKSSKSVAMAVLDVKKAFDS |
| | | | | | | VSHHSILRALNEAKCPINFI |
| | | | | | | NFVRNSYDGCTTKLTCGGTS |
| | | | | | | FPDSVRMNRGVKQGDPLSPV |
| | | | | | | LFNLIIDSAIRKLPDSIGYV |
| | | | | | | IRDGLKINCLAYADDLILVA |
| | | | | | | SSRAGLKTLLNIVAEHLSLR |
| | | | | | | GLDLNAAKCHGLSIIASGKA |
| | | | | | | KTTYVSAADSLDLDGQPIKN |
| | | | | | | LGVLDTWTYLGIPFSHLGRA |
| | | | | | | EKVSPDLTNLLNKLQKAPLK |
| | | | | | | LQQKLYAVRNFVIPRALHGL |
| | | | | | | ILSKTNLKELNTLDRAIRVF |
| | | | | | | LRTLLYLPKDTPLGFFHSPI |
| | | | | | | KSGGLGITCFRTSVLKCRLQ |
| | | | | | | RIARMRSSCDGVIQAVAESD |
| | | | | | | IFADEYAKLRDLIRINGNVL |
| | | | | | | DTTESIKRYWAQRLHSSVDG |
| | | | | | | KTLAYMDYFPQGNLWMSEDK |
| | | | | | | VSQRSYVFADCVKLRINAIP |
| | | | | | | TRVRVSRGRPNKEMCCRAKC |
| | | | | | | FDSQRMPAFESLNHITQVCP |
| | | | | | | RTHGSRIQRHDKIAKFLFKN |
| | | | | | | LNNCPSRSVLYEPHFVTVDG |
| | | | | | | LRKPDIIIYDDSHMVVLDVQ |
| | | | | | | VVSDSANLEKEFECKAKKYA |
| | | | | | | NDVALRSAMLIKYPFIKSFS |
| | | | | | | FVAATYNNRGLIAKSSVQVL |
| | | | | | | RQLGLSPRSIMVSILICLEG |
| | | | | | | TLETWRIFNQSTMNAH |
| | | | | | | (SEQ ID NO: 1478) |
| R2 | R2LcB | JN937 | Lepidurus | TTTTGGGGTAGCAATTGATC | TGATAATCGCTCCATCCTGC | MSGKSSKPRTVSSGSSSQET |
| | | 619 | couesii | GATTCCCGCCTCCTCGTGGC | AACTAATTATGAATGCAAAT | PPSGSNACDICGKCFMKPVG |
| | | | | GCTACCCTGGGATAACCTCA | CTGTTAAGTGACATTAGTGA | LSLHMSKVHPTQYHARLEKN |
| | | | | AAGAAATTTGACGGTAAAGC | TACTTACCTGATACTTACCC | QPKAKKFRWTDEDLYFLAKK |
| | | | | TAAGAGGAATTGATCACACC | TGGTATTTATTTGACCTATA | EAELLLLGGIKFMNKELAEF |
| | | | | GTGACGAATATCATCAGTCA | CTTACCCTGGTATCTACCTG | FPEKSVDQIKGQRRSETYKQ |
| | | | | CAGCTGCACGAATCCAGATA | ACATATATTTATCTAACCAC | QVVSIHSELLKLQAVADSPP |
| | | | | GATATATAACAGGCGAGTAA | CTACCTATGATGACTCCCGC | PSRIPAKEVSAWLDFLLALP |
| | | | | TTCTTTTCGAAGCTCGTCAG | GGAAACTCTCACTTACCTTA | KTKNKFSEDKLDQLIRTAQE |
| | | | | TAATCTTCCCAG | TTACCCACTTGGTCTTTTAT | GTPVLNDLDLYLREVLVQPT |
| | | | | (SEQ ID NO: 1234) | TTTCTCGTTCCTTATTACTT | RQGERQAKPLPPPKSSREKR |
| | | | | | TGTTCCTTTGGTGTAGGGTT | DREYARVQNFYRKNKTACVN |
| | | | | | CTCTGGTTTTTGGAACGGCT | AILDGNKKCENKIPDIDEFW |
| | | | | | TCCTTAGCCGGAATTTTGTC | KAIFESQSPPDAEPVSYVVD |
| | | | | | TGATGTATCTTGCTTGTGTC | EEPKNIWSWISFFEMNRNYP |
| | | | | | CTTGAAATATACGACCCAGG | DTSTSPGPDGVTARMLRSIP |
| | | | | | CTTGCGTCATTTAGGCTCTG | ARVLNKLLNLLLFIEDLPAV |
| | | | | | GGAAA | FKCHRTVLIPKVDNPALPGE |
| | | | | | (SEQ ID NO: 1357) | FRPITISSIIVRQLNKIIAA |
| | | | | | | RVSEGVPINPRQKAFRQIDG |
| | | | | | | CAENVFLLDFILRDAKTKIK |
| | | | | | | SLSLATVDIKKAFDSVSHHS |
| | | | | | | IFRAIRGARCPENLVNYIQN |
| | | | | | | SYSGCTTQISVGGSISTTKI |
| | | | | | | LMNRGVKQGDPLSPVLFNLV |
| | | | | | | INEIIRKLPASIGYPINSEL |
| | | | | | | SINCIAYADDLILVANTREG |
| | | | | | | LKLLLNLLNEELPKRGLELN |
| | | | | | | ASKCFGLSLTALGKLKKTHL |
| | | | | | | CTSDQLDLHGTLIKNLTAEE |
| | | | | | | SWVYLGVPFSHIGRSKSFSP |
| | | | | | | DLEALLNKLQKSPLKLQQKL |
| | | | | | | FALRVYLIPRLLHGLVLSRV |
| | | | | | | AIGELKIMDKLILKHLRVWL |
| | | | | | | RLPKDTPLGFFYSPVKLGGL |
| | | | | | | GIKNLRTNVLKCRKQRIERM |
| | | | | | | LVSPDDVVRLVAESEIFLKE |
| | | | | | | TDKLKDLLTINGMCLDXRNV |
| | | | | | | PRTGKNNKFWSERLYTSFDG |
| | | | | | | KTLAYSEYFTQGGGWIREDK |
| | | | | | | ILQPAHVFAECIKLRINALP |
| | | | | | | TKSRVAHGRPTKDRSCRAGC |
| | | | | | | LDVQKVPAIETINHIAQVCP |
| | | | | | | RTHGARIKRHDRLVQFLSLN |
| | | | | | | LRKNPKRNVLVEYNFRTVAG |
| | | | | | | IRKPDIIVIEDTRAAILDVQ |
| | | | | | | VVGDSSNLEMEYLEKSRKYS |
| | | | | | | NDATLSMRINALQKLYPTVT |
| | | | | | | SLTFHAVTFNNRGLIAKSTV |
| | | | | | | AALRMLGVPPRCIMILCVIS |
| | | | | | | LEKTLEVWRMFNQSTASARK |
| | | | | | | (SEQ ID NO: 1479) |
| R2 | R2Nvec-A | — | Nematostella | GGTTGGGGCCTTCTCGTGGC | TGATGGTGGGTTACTCGCCT | MLRGTGNMNDKRDGSATADP |
| | | | vectensis | GGAGTCGTGAGTAAGGGGTA | CTGTGTAACAGGCAAATGAA | TSALLGAVGDGSLVCNLCGL |
| | | | | TAGGGGTAAGGGACACCACG | AGCTGCGCAAGCAGTCGATG | ACKSRGGLSIHRRSKHATVY |
| | | | | GACCGAGAACGGTTACCGCT | AGCCAAAGCCGCACAGCCCC | HAERQPAPRAKARWTNDEMI |
| | | | | CAAGGCGAGTGGTGGAAGGC | CGACTGGGGTACAGGGCAGC | LVARKQIASEKSRCSAVVEG |
| | | | | ATAAAATCGTAACGCCGCCC | CCTGGGCTATGCCCGAAGTC | MREAVPHRTFDAVKSLKTKN |
| | | | | TCCGACCTGCTCCTGAAACT | TTTTGACAGGTCCAAACTTC | RNYTRILEQIRAECSEEEVI |
| | | | | AATGCCAACCAACTGACTGT | ACCCTTGCCGCCAGTAGGGC | ESGVLKDRTENVCVQTTSNV |
| | | | | GGGGCTAACCTCCCCAGAGT | ACCAGGGCCAGGTGCAGGTG | PGSAGRAASVELEGNIQVGH |
| | | | | CAGG | GGCGCTTTGTTCTATTTGGT | QLAQKTMAGNNSRKQPANHT |
| | | | | (SEQ ID NO: 1235) | TTCGCTTAATTTTTGTTAAA | NWAEFNIEEGNITLRKSKRK |
| | | | | | TTTTTCCCGTGCGCCCACCC | ANGMPDATHRPGPPTVDSLK |
| | | | | | TTTTTAACCCTTTTAACACC | HPVCLLQGAADKRDEPHTVE |
| | | | | | AATTTTTTTTACAACCCTCT | QLYYNIEEGMPLAEEQQWSE |
| | | | | | ACTCAATAATCCAAATGAAT | KLFDAIDSSLLSVEVELGRI |
| | | | | | AAAAGCGGCATAACAGGTGA | VPGCPDEETRQLIDREFLDF |
| | | | | | ACAC | IHSYSREKPPQRGLAKSKPP |
| | | | | | (SEQ ID NO: 1358) | PKGPKSLRRQQYRQLQRLWD |
| | | | | | | KNRSAAAEQALTGKWQEVRT |
| | | | | | | AAGVPLSLMEVPWREIFETP |
| | | | | | | STTDVREPAPAGPVLWQLLR |
| | | | | | | PVTIAEVEDAISSKKSASGP |
| | | | | | | DGVPCAALQTMGAASLAAHF |
| | | | | | | NLWLLAGTQPKRLTECRTIF |
| | | | | | | VPKEVNTHLPLHHRPITIGS |
| | | | | | | VVVRLFHQILGKPMEAVLPL |
| | | | | | | GSGQRGFRKGDGICQNIWLL |
| | | | | | | HTLIRRSTDLLRPLKLVFLD |
| | | | | | | VKKAFDSVSHESLLIAAKRL |
| | | | | | | GVPGPLLTYINELYSRSETV |
| | | | | | | FEVGGESSGSVKVSQGVKQG |
| | | | | | | DPLSSTLFNCVIDWAVSDLD |
| | | | | | | PHIGVLLGESRVSFLAYADD |
| | | | | | | LVLLSETEAALTSQLNSIEK |
| | | | | | | SLAHCGLKLSTGDSGKSASL |
| | | | | | | NIVIDGKAKRWVVNPTPFLR |
| | | | | | | ASGGEIRSLVANETYKYLGI |
| | | | | | | NIGAQGVKAAEYNAFKEALD |
| | | | | | | NLSRAPLKPQQRLFLLKTYL |
| | | | | | | LPQLHHSLVLSRTTGKLLNS |
| | | | | | | LDALVRKAVRGWLKLPHDTH |
| | | | | | | RAFFYAHQADGGLNVPSLYH |
| | | | | | | LIPLLRRSRYERLTRVEDPE |
| | | | | | | IREVSRTDYFKRVLGAAAAA |
| | | | | | | TTVAGHRIDSKVTLRLAWRE |
| | | | | | | ALYASADGRGLSQCPLVPEV |
| | | | | | | HSWVTDVSGLQTGSQYISAV |
| | | | | | | RLRGALLPTAVRKSRGRGGV |
| | | | | | | NSNCDCCGRGQPEFLGHVLQ |
| | | | | | | TCPRTWGSRISRHNHVLSLI |
| | | | | | | AKACRSRRWQVLEEPIIQTP |
| | | | | | | AQLLKPDLVIWNHQAAYVVD |
| | | | | | | VSVPGDNTPLSTCHNRKVAY |
| | | | | | | YSGESVREWVRSKTGHNPTV |
| | | | | | | SSVVINWRGAMAKESYRLLT |
| | | | | | | KDLRLAKTLPRLLVLRVLEG |
| | | | | | | GHGIWLNFHRSTFAVGVT |
| | | | | | | (SEQ ID NO: 1480) |
| R2 | R2Sm-A | — | Schistosoma | ATGTTTTAATTTATTTTTGA | TTGCTTATCTTCATGTTTTT | MPVSTGAETDITSSLPIPAS |
| | | | mansoni | ACTACTACTGTCTGAGTGCT | GTGTTAATTGACTGCTCTCT | SIVSPNYTLPDSSSTCLICF |
| | | | | TCTTACAACCTGAAGGCTCA | TCTGGGTTGATGTCTGATTG | AIFPTHNILLSHATAIHHIS |
| | | | | GAAACTACCCACTTTTTGCT | TCTCTCTCTCTTTCCATATT | CPPTPVQDGSQQMSCVLCAA |
| | | | | GTTTATCCACAACAACAGTT | GCTTGCTCTCCCCGCTTACT | AFSSNRGLTQHIRHRHISEY |
| | | | | GTGAATCTATTCTCCAAATA | TCCAATAGTTGTCATATTAT | NELIRQRIAVQPTSRIWSPF |
| | | | | TTCCTTGTGCTTTTGTCAAC | GTCTTTGTTTACTTGCCATG | DDASLLSIANHEAHRFPTKN |
| | | | | ATTATTCTATACCAACTGTA | TCTAACGACAATTACTTTAT | DLYQHISTVLTRRTAEAVKR |
| | | | | CCACCTACTTCTTCATCTCA | CTACCTTAGTTGGTCCTCTT | RLLHLQWSRSPTAITTSSNN |
| | | | | CGTTTTAATTCTGGTCTAAT | GGTTTGGTTGCCTTCATGTG | HTTTDIPNTEARYIFPVDLD |
| | | | | TTTCTCATCATTAGTCACGG | TTCATGGCGGAATCTGATGT | EHPPLSDATTPDASTHPLPE |
| | | | | AGAGGGCCTATGAACGGTCC | TTATAATGACTATTCCTACT | LLVILTPLPSPTRLQNISES |
| | | | | GTGACGCGAAATTCAATCCA | ACCACCATTACAACTATTAT | QTSHESNRNSMHTPPTYACD |
| | | | | CGAATTCGTCCTCTTCTGCT | TATTATCACTATTATTAACA | SDESLGVTPSSTIPSCFHSY |
| | | | | AGTGGTCCCCGAAATACGGT | TTATTATTACTTCTACAATT | RDPLAEQRSKLLRASASLLQ |
| | | | | TCCTCTGGCCTGTCAGTTGT | AGTATTATGGCTACTCCTTT | SSCTRIRSSSLLAFLQNAST |
| | | | | GTTAAAACTATATAATAACG | CAGCACACCAATAAAATCTC | LMDEEHVSTFLNSHGEFVFP |
| | | | | (SEQ ID NO: 1236) | AATCAAACATCTCACTTATT | RTWTPSRPKHPSHAPANVSR |
| | | | | | AAACTCTCTATTTCCCCTTC | KKRRKIEYAHIQTLFHHRPK |
| | | | | | GTTATAAACTTACAATTCAG | DAANTVLDGRWRNPYVANHS |
| | | | | | TTTAACCGAATATCTCTCTT | MIPDFDCFWTTVFTKTNSPD |
| | | | | | TTACAAATCTTAAGTATGTA | SREITPIIPMTPSLIDPILP |
| | | | | | ATTTTGTGCCAAGCCCATTT | SDVTWALKEMHGTAGGIDRL |
| | | | | | GGGTCTGTACAATTTGATAC | TSYDLMRFGKNGLAGYLNML |
| | | | | | TTAAAAATAAATGTTAT | LALAYLPTNLSTARVTFVPK |
| | | | | | (SEQ ID NO: 1359) | SSSPVSPEDFRPISVAPVAT |
| | | | | | | RCLHKILAKRWMPLFPQERL |
| | | | | | | QFAFLNRDGCFEAVNLLHSV |
| | | | | | | IRHVHTRHAGASFALLDISR |
| | | | | | | AFDTVSHDSIIRAAKRYGAP |
| | | | | | | ELLCRYLNNYYRRSTSCVNR |
| | | | | | | TELHPTCGVKQGDPLSPLLF |
| | | | | | | IMVLDELLEGLDPMTHLTVD |
| | | | | | | GESLNYIAYADDLVVFAPNA |
| | | | | | | ELLQRKLDRISLLLHEAGWS |
| | | | | | | INPEKSRTLDLISGGHSKIT |
| | | | | | | ALSQTEFTIAGMRIPPLSAA |
| | | | | | | DTFDYLGIKSNFKGRCPVAH |
| | | | | | | IDLLNNYLTEISCAPLKPQQ |
| | | | | | | RMKILKDNLLPRLLYPLTLG |
| | | | | | | IVHLKTLKSMDRNIHTAIRK |
| | | | | | | WLRLPSDTPLAYFHSPVAAG |
| | | | | | | GLGILHLSSSVPFHRRKRLE |
| | | | | | | TLLSSPNRLLHKLPTSPTLA |
| | | | | | | SYSHLSQLPVRIGHETVTSR |
| | | | | | | EEASNSWVRRLHSSCDGKGL |
| | | | | | | LLAPLSTESHAWLRYPQSIF |
| | | | | | | PSVYINAVKLRGGLLSTKVR |
| | | | | | | RSRGGRVTNGLNCRGGCAHH |
| | | | | | | ETIHHILQHCALTHDIRCKR |
| | | | | | | HNELCNLVAKKLRRQKIHFL |
| | | | | | | QEPCIPLEKTYCKPDFIIIR |
| | | | | | | DSIAYVLDVTVSDDGNTHAS |
| | | | | | | RLLKISKYGNERTVASIKRF |
| | | | | | | LTSSGYIITSVRQTPVLTFR |
| | | | | | | GILERASSQSLRRLCFSSRD |
| | | | | | | LGDLCLSAIQGSIKIYNTYM |
| | | | | | | RGTQRLNE |
| | | | | | | (SEQ ID NO: 1481) |
| R2 | R2Tc | EU854 | Triops | TTTTTGGTCTGGCATTTGAT | TAGATGACTGCCCTACCCCT | MSQKRRPEKAVPDEGATAHD |
| | | 578 | cancriformis | CGTTTCCGCCTCCTCGTGGC | TTGCTGCCGAAGAACTACTG | VAQPDKSKCSVCGETFKGPA |
| | | | | GCCAGACTGGGTAAGCTGAT | AAGACTATTGAACTAACCAA | SVTMHMVKKHPVEFNELKMA |
| | | | | TTATCAGTGAGCTAAGAGAA | CTGTGTTAAGTAAGAACTAA | KKPVPKKVRWSEEEIFQLAR |
| | | | | ACGATCACCGCAGGAGTCCA | TGCCTCTTTTTCCCTGCATG | TEAELTLQGVRFINVELQKI |
| | | | | TCTACCTGCGCTGCACGTGA | TATCCCCTGATCAGTGACTT | FPAREIEGIKGQRKLAKYKE |
| | | | | TTTCATTGTGCACTTGGCGA | ATTTTCTTTTCCTGTTGCGC | LVKDQLDEIGRAPNPPEQEI |
| | | | | GTTATCCCTTGTGGAGCTCG | CCTTTGTTTAGTTATTTCCT | GEDVPSPFKAWLELLLALPK |
| | | | | CTCGTTAGCTTTTGAG | TTAATTACTAGAATTATCTT | TPNDFLEHKLDNIIVQALKE |
| | | | | (SEQ ID NO: 1237) | TTCGTTCTCCGTCTAATTGC | DVNSDQVFNDLNSYLKLILE |
| | | | | | TTT | PSGRAKSVPGEIIHGDPSGS |
| | | | | | TTCGGTGTAGGAACGGCTAC | AKTSVTKAPKPATVSSSRKK |
| | | | | | CTAAAGCTGGAAGTGGGAAG | RRDAEFARIQRLYRKNRTSC |
| | | | | | TGTTTTCAATGTACTTTGTG | INTILDGNTREHEAPKNMEG |
| | | | | | ATTATAGAAATATATGACCC | FWREIFERESPDDPDDPDIF |
| | | | | | GAGGTGCATTGTTTGGCATT | LEEEASDIWKYISFYEMCNL |
| | | | | | TCCTCGAGAAA | YPPPSTAPGPDGFSSKDLRR |
| | | | | | (SEQ ID NO: 1360) | MTPRVLNKILNLLLHLRDLP |
| | | | | | | QILKSHRTVLIPKTDLPTKP |
| | | | | | | GDFRPITISNILVRHLNKIL |
| | | | | | | ANRVSHLIPINERQKAFLPI |
| | | | | | | DGCAENIFTLDFILHHARTK |
| | | | | | | IKSLSMAILDISKAFDSVSH |
| | | | | | | HSIFRALREARCPIGFIKFI |
| | | | | | | ENCYGGCFTKLFCGGVKYPS |
| | | | | | | EVSMNRGVKQGDPLSPVLFN |
| | | | | | | LVIDGLIRQIPSALGFNVSD |
| | | | | | | QVKVSCIAYADDLILIATTR |
| | | | | | | AGLKTLLDLTNSYLAKRGLS |
| | | | | | | LNPDKCSALSIVASGKQKLV |
| | | | | | | YIASSEHFDLAGQKMRNLNV |
| | | | | | | GDSWRYLGIQFSHLGRAEKV |
| | | | | | | TPDLTCLINRLQKAPLKLQQ |
| | | | | | | KLYALRIYLIPRLIHGLTLS |
| | | | | | | KTNLGELKTLDKLIRKYIRA |
| | | | | | | WLHLPDDTPMGYFYTPLKAG |
| | | | | | | GLGLPSLRLVILNNRLERIL |
| | | | | | | RMKASQDIIVRTIAESETLG |
| | | | | | | VEIRKLHDLLSIDGTILDTS |
| | | | | | | VKIHSFWAERLYSSYDGKCL |
| | | | | | | CNSANFPPGNKWIGEDSLNQ |
| | | | | | | RSHIFADCLKLRINALPTRS |
| | | | | | | RTARGRPLKDKPCRAGCRNS |
| | | | | | | DGVKVIETLNHITQVCERTH |
| | | | | | | GARVKRHDRLVDFAVKGLQR |
| | | | | | | PHRVVLKEPHYKTVNGVRKP |
| | | | | | | DIVIKIPDHTYICDFQVVSD |
| | | | | | | TSCLELEFRKKALKYAEDKG |
| | | | | | | LCDQLTRDHPGELSFTAITF |
| | | | | | | NTRGLIAKSSVTALRKLGMP |
| | | | | | | PRSIMTLQKICMEGSLEIWR |
| | | | | | | IFNQTTAMARN |
| | | | | | | (SEQ ID NO: 1482) |
| R2 | R2_DAn | — | Drosophila | AGAATATGGATTTGATTGTG | TAGCCAATGCACGGGTTCCA | FERRKDPWGYRPPGTLKQIG |
| | | | ananassae | CAGAGGGGGTGCTATACCGT | GATTAAGCTTGCTGCCGAAG | ATENNEPRNLNRFVRGESTA |
| | | | | AACTCGTAAGCCATGCAATC | CATACCATCAAAATCGGCAT | SSLESTQFGTSAEVNLAGRV |
| | | | | AGATCAAGTCGACTCAAAAC | AAAATTCGCTTAATAAAGGA | PCTICEMTFSSKRGLGVHMS |
| | | | | CTCCTCGTGGTATTCTCTGG | GGTGGTTTTAGTACGTAGGC | HRHKDDLDAQRLRVDKKARW |
| | | | | GTGCCAGTATTTACTGGTAG | GTCCCGGGACTTGTCTCGGG | SEEETLMMARKEVELAASGV |
| | | | | CTGA | ATGAATCGTGCATGCGTATA | RFLNKKLAEIFTHRSADAIS |
| | | | | (SEQ ID NO: 1238) | ATTGGGATCGATAACAAATA | SYRKRSEYKAKLEQIRGQSV |
| | | | | | CCAACTAAGTTATTACTAAT | PTPEAEEINTTQRRPSNSEQ |
| | | | | | ATATCGAAATACATAAATAT | NRRVPRSEGGPIAPTEQTNN |
| | | | | | CCCGTCCTTACGTATCTTTG | EILRVLQGLAPVVCLPRWRA |
| | | | | | AAGATTTCCATCCTCAGCGA | EVLQNIVDNAQVSGQETTLQ |
| | | | | | ACAAAAAAAAAAAAAA | SLSSYLMEIFPPRNEPHILT |
| | | | | | (SEQ ID NO: 1361) | RPRTEPRNMRQRRRQQYARV |
| | | | | | | QRNWDKHPGRCIKSLLEEDD |
| | | | | | | ESVMPNQEVMEPYWRRVMTQ |
| | | | | | | PSSSSIKRDMFNMEHSLERV |
| | | | | | | WSAVNQRDLRATKVKLSSSP |
| | | | | | | GPDGITPKTARSVPEGIMLR |
| | | | | | | IMNLILWCGNLPYSIRLART |
| | | | | | | IFIPKKATANQPQDYRPISV |
| | | | | | | PSVIVRQLNAILASRLSAAI |
| | | | | | | NWDTRQRGFLPTDGCADNTT |
| | | | | | | IVDLVLREHHKRFKSCYIGT |
| | | | | | | LDVSKAFDAVAHEAVYNTLA |
| | | | | | | SYGAPKGFINYLRKAYEGGG |
| | | | | | | TMLAGNGWVSEAFIPARGVK |
| | | | | | | QGDPLSPILFNLVIDRLLRS |
| | | | | | | LPSEIGAKVGNAMTNAAAFA |
| | | | | | | DDIVLFAETPMGLQKLLDTT |
| | | | | | | VCFLSSVGLTLNTDKCFTVS |
| | | | | | | IKGQAKQKCTVVERRSFLIG |
| | | | | | | GRECPSLKRTDEWKYLGIKF |
| | | | | | | TAEGRARYDPAEDLGPKLLR |
| | | | | | | LTRAPLKPQQKLFALRTVLI |
| | | | | | | PQLYHKLTLGSVTIGVLKKF |
| | | | | | | DKLVRYTARKWLGLPVDVPV |
| | | | | | | SFFHAPHKSGGLGLPSLRWT |
| | | | | | | APMLRLKRLSNIKWPHLERS |
| | | | | | | EVASSFVEEEMRRARDRLQA |
| | | | | | | GSEELLTRSQVDSYLANRLH |
| | | | | | | MSVDGCGLREAERFAPQHGW |
| | | | | | | VSQPTRLLTGKEYTDGIKLR |
| | | | | | | INALPSRSRTTRGRHELERR |
| | | | | | | CRAGCDAPETTNHILQQCYR |
| | | | | | | THGRRIARHNGVVNFLKRGL |
| | | | | | | ERRGCVVHVEPSLQGETGLN |
| | | | | | | KPDLVAIRQNRIYVIDTQIV |
| | | | | | | TDGHSLDQAHQRKVGKYDTP |
| | | | | | | DIRTNLRRSFGAFDIEFHSA |
| | | | | | | TVNWRGIWSGQSVKRLIASD |
| | | | | | | LLSSGDSNIISVRVISGGLW |
| | | | | | | SWRQFMYLSGYTRDWT |
| | | | | | | (SEQ ID NO: 1483) |
| R2 | R2_DM | X51967 | Drosophila | TTGGGGATCATGGGGTATTT | TAGCTAAATCGTTTGGTTCA | MTTRPSVDIFPEDQYEPNAA |
| | | | melano | GAGAGCAGAGGGGGAGTATT | AAACATTTGCTTGCTGTCTT | ATLSRVPCTVCGRSFNSKRG |
| | | | gaster | CTTCTGTAATTCGTAAGTCA | GGCATAACATCAATAAAGGC | LGVHMRSRHPDELDEERRRV |
| | | | | TATCATATGATGTGCGGAAG | ATAAACATCGCAAAATAATG | DIKARWSDEEKWMMARKEVE |
| | | | | GGGAATTTTACTCTGTAACT | GTTATAATTAAATGGCTATG | LTANGCKHINKQLAVYFANR |
| | | | | CACAAGTCTCTCCTTTACTC | AGGATGGTTTTAGTACGTAG | SVEAIKKLRQRGDYKEKIEQ |
| | | | | AAGTCGACTCAAAACCTCCT | GCGTTGCGGAACTTCGGTTC | IRGQSALAPEVANLTIRRRP |
| | | | | CGTGGTGGTCCCGGTAATGC | ATATAGAGCAATGAATCGTG | SRSEQDHQVTTSETTPITPF |
| | | | | TAAACTCGTTTAGCAGCTAA | CATGCTAGGAAAACTGACCA | EQSNREILRTLRGYSPVECH |
| | | | | TTTGAGCGGAAAAACTTTTC | CACACAGTGTTGGCAGACCT | SKWRAQELQTIIDRAHLEGK |
| | | | | CGATGGGCTGGTTCCCCAGA | AGTATCTTTCGAAGATTTCC | ETTLQCLSLYLLGIFPAQGV |
| | | | | GGAAATTTATTCATATTGGA | ATACCTCCGCGATCAAAAAA | RHTLTRPPRRPRNRRESRRQ |
| | | | | ACTACAAGCACAAATAACGA | AAAAAAAAAAAAAAAA | QYAVVQRNWDKHKGRCIKSL |
| | | | | GCCTCGGATACCTTTACACA | (SEQ ID NO: 1362) | LNGTDESVMPSQEIMVPYWR |
| | | | | ATCTG | | EVMTQPSPSSCSGEVIQMDH |
| | | | | (SEQ ID NO: 1239) | | SLERVWSAITEQDLRASRVS |
| | | | | | | LSSSPGPDGITPKSAREVPS |
| | | | | | | GIMLRIMNLILWCGNLPHSI |
| | | | | | | RLARTVFIPKTVTAKRPQDF |
| | | | | | | RPISVPSVLVRQLNAILATR |
| | | | | | | LNSSINWDPRQRGFLPTDGC |
| | | | | | | ADNATIVDLVLRHSHKHFRS |
| | | | | | | CYIANLDVSKAFDSLSHASI |
| | | | | | | YDTLRAYGAPKGFVDYVQNT |
| | | | | | | YEGGGTSLNGDGWSSEEFVP |
| | | | | | | ARGVKQGDPLSPILFNLVMD |
| | | | | | | RLLRTLPSEIGAKVGNAITN |
| | | | | | | AAAFADDLVLFAETRMGLQV |
| | | | | | | LLDKTLDFLSIVGLKLNADK |
| | | | | | | CFTVGIKGQPKQKCTVLEAQ |
| | | | | | | SFYVGSSEIPSLKRTDEWKY |
| | | | | | | LGINFTATGRVRCNPAEDIG |
| | | | | | | PKLQRLTKAPLKPQQRLFAL |
| | | | | | | RTVLIPQLYHKLALGSVAIG |
| | | | | | | VLRKTDKLIRYYVRRWLNLP |
| | | | | | | LDVPIAFVHAPPKSGGLGIP |
| | | | | | | SLRWVAPMLRLRRLSNIKWP |
| | | | | | | HLTQNEVASSFLEAEKQRAR |
| | | | | | | DRLLAEQNELLSRPAIEKYW |
| | | | | | | ANKLYLSVDGSGLREGGHYG |
| | | | | | | PQHGWVSQPTRLLTGKEYMD |
| | | | | | | GIRLRINALPTKSRTTRGRH |
| | | | | | | ELERQCRAGCDAPETTNHIM |
| | | | | | | QKCYRSHGRRVARHNCVVNR |
| | | | | | | IKRGLEERGCVVIVEPSLQC |
| | | | | | | ESGLNKPDLVALRQNHIDVI |
| | | | | | | DTQIVTDGHSMDDAHQRKIN |
| | | | | | | RYDRPDIRTELRRRFEAAGD |
| | | | | | | IEFHSATLNWRGIWSGQSVK |
| | | | | | | RLIAKGLLSKYDSHIISVQV |
| | | | | | | MRGSLGCFKQFMYLSGFSRD |
| | | | | | | WT |
| | | | | | | (SEQ ID NO: 1484) |
| R2 | R2_DPe | — | Drosophila | AAGATATGGATCTGAATAAT | TAGCCTATACACTATGTTGG | SSFGLIVTNLNSETVLWGCQ |
| | | | persimilis | AGCGTAGAAGGGGAGTCATT | AGAGAAGACGCTTGCTACCT | PLGQFSLIGTNMQNTTPRII |
| | | | | CCGTAATTCGTAAATCGTAA | AGGCAAAATGTGAAATTAGG | NTNSLTNQIPTVSSLGAQSE |
| | | | | AAATCAGATCAAGTTGATTC | TATAAACATCGTGGTTGTAA | HSAQVNPNSGYQCTICESSF |
| | | | | AAGACCTCCTCGTGGTATCT | AACTTGAGGTGGGTTTTTAG | RSKSGLGVHMSRRHKDEFDQ |
| | | | | TCTGGATGCTATTAGACTGA | TACGTATGCGTGATTACTTC | LRLRTDRKAQWSEEELSMMA |
| | | | | (SEQ ID NO: 1240) | GTAATCATGAATCGTGCATG | RKEIELAANGERYLNKKLAE |
| | | | | | CTAGTGGGGTTTGGCCTCCA | VFTNRSVDAIKKCRORERYK |
| | | | | | CTAGTATCTTTGAAGATTTT | TKIEQLKGQAVPLPEALESE |
| | | | | | CCTTCCTCAGCGATCAAAAA | TIQRRPSIRERDLLVTPPNT |
| | | | | | AAA | LGTTPTELSNSEILAVLQGY |
| | | | | | (SEQ ID NO: 1363) | PPVVCNDQWRVEVLQSIVDG |
| | | | | | | AQASGKEITLQRLSTYLMEV |
| | | | | | | FPSQNDRPIQTRPPRRPRNR |
| | | | | | | RQGRRQQYALTQRNWDKHKG |
| | | | | | | RCIKAILDGTEGTATMPSQG |
| | | | | | | IMGSYWRQVMTQTSPTYSGT |
| | | | | | | NTTFRTEHPLEGVWSPITLG |
| | | | | | | DLRVHRVSLTKSPGPDGITP |
| | | | | | | RTVRSIPSGVMLRIMNLILW |
| | | | | | | CGKLPVSIRQARTIFIPKVG |
| | | | | | | NASRPQDFRPITVQSVMVRI |
| | | | | | | LNAILASRLTSSVDWDPRQR |
| | | | | | | GFLPTDGCADNTTIVDLILR |
| | | | | | | DHHKRCKSLYIATLDISKAF |
| | | | | | | DSVSHAAVSATLTAYGAPKE |
| | | | | | | FVDYVQNSYEVCGTTLNGDG |
| | | | | | | WRSEEFIPARGVRQGDPLSP |
| | | | | | | IIFNLIIDQLLRSYPNEIGA |
| | | | | | | TIGDHTTNAAAFADDIVLFA |
| | | | | | | ETRLGLQTMLDTTVDFLSSV |
| | | | | | | GLTLNSDKCFTVGIKGQPKQ |
| | | | | | | KCTVVIPETFRIGSRSCPAL |
| | | | | | | KRTDEWKYLGITFTAQGRTR |
| | | | | | | YSPADDLGPKLLRLTRSPLK |
| | | | | | | PQQKLFALRTVLIPQLYHKL |
| | | | | | | TLGSVMIGVLRKCDILVRST |
| | | | | | | VRKWLGLPLDVSTAFFHAPH |
| | | | | | | TYGGLGIPSVRWVAPMLRMK |
| | | | | | | RLSNIKWAHLAQSEAASSFL |
| | | | | | | TDELNKARGRTLAGLNELTS |
| | | | | | | RTEIETYWANRLYMSVDGRG |
| | | | | | | LREAGLFRPQHGWVCQPTRL |
| | | | | | | LTGQDYRNSIKLRINALPSR |
| | | | | | | SRTTRGRNELERQCRAGCDA |
| | | | | | | PETTNH |
| | | | | | | ILQNCYRTHGRRVARHNCVV |
| | | | | | | NNLKRILEEKGHTVHVEPSL |
| | | | | | | QLETSVSKPDLVCIRDNHAC |
| | | | | | | VIDAQIITDGLFLDDVHHRK |
| | | | | | | VEKYKRPEVISALRREFGVS |
| | | | | | | GNVEVLSATLNWRGIWSNQS |
| | | | | | | VRRLIAKGLISSGDSNVISA |
| | | | | | | RVVTGGLYCFRQFMYLAGYT |
| | | | | | | RDWT |
| | | | | | | (SEQ ID NO: 1485) |
| R2 | R2_DPs | — | Drosophila | CAATTGGAAAGATATGGGTC | TAGCCTATACACTATGTTGG | SSFGLIVTNLNSETVLWGCQ |
| | | | pseudoobscura | TGAATAATAGCGTAGAAGGG | AGAGAAGACGCTTGCTACCT | PLGQFSLIGTNMQNTTPRII |
| | | | | GAGTCATTCCGTAATTCGTA | AGGCATAATGTGAAATTAGG | NTNSLTNQIPTVSSLGAQSE |
| | | | | AATCGTAAAAATCAGATCAA | TATAAACATCGTGGTTGTAA | HSAQVNPNSGYQCTICESSF |
| | | | | GTTGATTCAAGACCTCCTCG | AACTTGAGGTGGGTTTTTAG | RSKSGLGVHMSRRHKDEFDQ |
| | | | | TGGTATCTTCTGGATGCTAT | TACGTATGCGTGATTACTTC | LRLRTDRKAQWSEEELSMMA |
| | | | | TAGACTGA | GTAATCATGAATCGTGCATG | RKEIELAANGERYLNKKLAE |
| | | | | (SEQ ID NO: 1241) | CTAGTGGGGTTTGGCCTCCA | VFTNRSVDAIKKCRORERYK |
| | | | | | CTAGTATCTTTGAAGATTTT | TKIEQLKGQAVPLPEALESE |
| | | | | | CCTTCCTCAGCGATCAAAAA | TIQRRPSIRERDLLVTPPNT |
| | | | | | AAAAAAAAAAAAAAAAAAA | LGTTPTELSNREILAVLQGY |
| | | | | | (SEQ ID NO: 1364) | PPVVCNDQWRVEVLQSIVDG |
| | | | | | | AQASGKEITLQRLSTYLMEV |
| | | | | | | FPSQNDRPIQTRPPRRPRNR |
| | | | | | | RQGRRQQYALTQRNWDKHKG |
| | | | | | | RCIKAILDGTEGTATMPSQG |
| | | | | | | IMGSYWRQVMTQTSPTYSGT |
| | | | | | | NTTFRTEHPLEGVWSPITLG |
| | | | | | | DLRVHRVSLTKSPGPDGITP |
| | | | | | | RTVRSIPSGVMLRIMNLILW |
| | | | | | | CGKLPVSIRQARTIFIPKVG |
| | | | | | | NASRPQDFRPITVQSVMVRI |
| | | | | | | LNAILASRLTSSVDWDPRQR |
| | | | | | | GFLPTDGCADNTTIVDLILR |
| | | | | | | DHHKRCKSLYIATLDISKAF |
| | | | | | | DSVSHAAVSATLTAYGAPKE |
| | | | | | | FVDYVQNSYEVCGTTLNGDG |
| | | | | | | WRSEEFIPARGVRQGDPLSP |
| | | | | | | IIFNLIIDQLLRSYPNEIGA |
| | | | | | | TIGDHTTNAAAFADDIVLFA |
| | | | | | | ETRLGLQTMLDTTVDFLSSV |
| | | | | | | GLTLNSDKCFTVGIKGQPKQ |
| | | | | | | KCTVVIPETFRIGSRSCPAL |
| | | | | | | KRTDEWKYLGITFTAQGRTR |
| | | | | | | YSPADDLGPKLLRLTRSPLK |
| | | | | | | PQQKLFALRTVLIPQLYHKL |
| | | | | | | TLGSVMIGVLRKCDILVRST |
| | | | | | | VRKWLGLPLDVSTAFFHAPH |
| | | | | | | IYGGLGIPSVRWVAPMLRMK |
| | | | | | | RLSNIKWAHLAQSEAASSFL |
| | | | | | | TDELNKARGRTLAGLNELTS |
| | | | | | | RSEIETYWANRLYMSVDGRG |
| | | | | | | LREAGLFRPQHGWVCQPTRL |
| | | | | | | LTGQDYRNGIKLRINALPSR |
| | | | | | | SRTTRGRNELERQCRAGCDA |
| | | | | | | PETTNHILQNCYRTHGRRVA |
| | | | | | | RHNCVVNNLKRILEEKGHTV |
| | | | | | | HVEPSLQLETSVSKPDLVCI |
| | | | | | | RDNHACVIDAQIITDGLFLD |
| | | | | | | DVHHRKVEKYKRPEVISALR |
| | | | | | | REFGVSGNVEVLSATLNWRG |
| | | | | | | IWSNQSVRRLIAKGLISSGD |
| | | | | | | SNVISARVVTGGLYCFRQFM |
| | | | | | | YLAGYTRDWT |
| | | | | | | (SEQ ID NO: 1486) |
| R2 | R2_DSe | — | Drosophila | GGGATCAGGGGTAATTGCGA | TAGCTAAAACGTTTGGTTCA | FERQNFSDGLVPQRKFIHIG |
| | | | sechellia | GCAGAGGGGGAGTATTTTTC | AAACATTTGCTTGCTGTCTT | TTNRNNEPRSNLRNLMTTRP |
| | | | | TGTAATTCGTAAGTCATATC | GGCATAACATCAATAAAGGC | SVDIFPEDQYEPNAAATLSR |
| | | | | ATATGGTGTGCGGAAGGGGA | ATAAACATCGCAAATAATGG | VPCTVCGRSFNSKRGLGVHM |
| | | | | ATTTTACTCTGTAACTCACA | TAATATATAAATTGGCTATG | RSRHPDELDEERRRVDIKAR |
| | | | | AGTCTCTCCTTTACTCAAGT | AGGATGGTTTTAGTACGTAG | WSEEEKWMMARKEVELTANG |
| | | | | CGACTCAAAACCTCCTCGTG | GCGTTGCGGAACTTCGGTTC | HKHINKQLAVYFANRSVEAI |
| | | | | GTGGTCCCCGGTAATGCTAA | AGATAGAGCAATGAATCGTG | KKLRQRGDYKEKIEQIRRQS |
| | | | | ACTTGTTTAGCAGCTAA | CATGCTAGGAAACTGAAGTG | ALVPEVANLTIRRRPSRSEQ |
| | | | | (SEQ ID NO: 1242) | TTGACAGACCTAGT | NHQVTTSETTPITPFEQSNR |
| | | | | | ATCTTTCGATAGATTTCCAT | EILRTLRGYSPVECHSKWRA |
| | | | | | ACCTCCGCGATCAAAAAAAA | QELQTIIDRAELEGKETTLQ |
| | | | | | AAAAAAAAAAAAA | CLSLYLLGIFPAQGVRHTLT |
| | | | | | (SEQ ID NO: 1365) | RPPRRPRNRRESRRQQYAVV |
| | | | | | | QRNWDKHKGRCIKSLLNGTD |
| | | | | | | ESVMPSQEVMVPYWREVMTQ |
| | | | | | | PSPSSCSREVIQMDHSLERV |
| | | | | | | WSAITEHDLRASRISLSSSP |
| | | | | | | GPDGITPKTAREVPSGIMLR |
| | | | | | | IMNLILWCGNLPHSIRLART |
| | | | | | | VFIPKTVTAKRPQDFRPISV |
| | | | | | | PSVLVRQLNAILATRLNSSI |
| | | | | | | NWDPRQRGFLPTDGCADNAT |
| | | | | | | IVDLVLRHSHKHFRSCYIAN |
| | | | | | | LDVSKAFDSLSHASIYDTLR |
| | | | | | | AYGAPKGFVDYVQNTYEGGG |
| | | | | | | TSL |
| | | | | | | NGDGWSSEEFVPARGVKQGD |
| | | | | | | PLSPILFNLVMDRLLRNLPS |
| | | | | | | EIGARVGNAITNAAAFADDL |
| | | | | | | VLFAETRMGLQVLLDRTLDF |
| | | | | | | LSLVGLKLNADKCFTVGIKG |
| | | | | | | QPKQKCTVLEAQSFYVGSRE |
| | | | | | | IPSLKRTDEWKYLGINFTAT |
| | | | | | | GRVRCNPAEDIGPKLQRLTK |
| | | | | | | APLKPQQRMFALRTVLIPQL |
| | | | | | | YHKLALGSVAIGILRKTDKL |
| | | | | | | IRYYVRRWLNLPLDIPIAFI |
| | | | | | | HAPPKSGGLGIPSLRWVAPM |
| | | | | | | LRLRRLSNIKWPHLTQNEVA |
| | | | | | | SSFLEAEKQRARDRLLAEQN |
| | | | | | | ELLSRPAIEKYWANKLYLSV |
| | | | | | | DGSGLREAGHWGPQHGWVNQ |
| | | | | | | PTRLLTGKEYIDGIRLRINA |
| | | | | | | LPTKSRTTRGRHELERQCRA |
| | | | | | | GCDAPETTNHIMQKCYRSHG |
| | | | | | | RRIARHNCVVNRIKRGLEER |
| | | | | | | GCVVIVEPSLQCESGLNKPD |
| | | | | | | LVALRQNHIDVIDIQIVTDG |
| | | | | | | HSMDDAHQRKINRYDRPDIR |
| | | | | | | TELRRRFEAAGDIEFHSATL |
| | | | | | | NWRGIWSGQSVKRLIAKGLL |
| | | | | | | SKYDSHIISVQVMRGSLGCF |
| | | | | | | KQFMYLSGFSRDWT |
| | | | | | | (SEQ ID NO: 1487) |
| R2 | R2_DSi | — | Drosophila | GGGATCTGGGGTAATTGCGA | TAGCTAAAACGTTTGGTTCA | TCLAANLSGKNFSDGLVTQR |
| | | | simulans | GCAGAGGGGGAGTATTTTTC | AAACATTTGCTTGCTGTCTT | KFTHIGTTNTNNEPRISLHN |
| | | | | TGTAATTCGTAAGTCATATC | GGCATAACATCAATAAAGGC | LMTTRPSVDIFPEDQYEPNA |
| | | | | ATATGGTGTGCGGAAGGGGA | ATAAACATCGCAAAATAATG | AATLSRVPCTVCGRSFNSKR |
| | | | | ATTTTACTCTGTAACTCACA | GTTATATATAAATGGCTATG | GLGVHMRSRHPDELDEERRR |
| | | | | AGTCTCTCCTTTACTCAAGT | AGGATGGTTTTAGTACGTAG | VDIKARWSEEEKWMMARKEV |
| | | | | CGACTCAAAACCTCCTCGTG | GCGTTGCGGAACTTCGGTTC | ELTANGHKHMNKQLAVYFAN |
| | | | | GTGGTCCCCGGTAATGCTAA | AGATAGAGCAATGAATCGTG | RSVEAIKKLRQRGDYKEKIE |
| | | | | (SEQ ID NO: 1243) | CATGCTAGGAAAACTGACCA | QIRGQSALVPEVANLTIRRR |
| | | | | | CACGCAGTGTTGGCAGCCCT | PSRSEQNHQVTTSETTPITP |
| | | | | | AGTATCTTTCGATAGATTTC | FEQSNREILRTLRGYSPVEC |
| | | | | | CATACCTCCGCGATCAAAAA | HSKWRAQELQTIIDRAELEG |
| | | | | | AAAAAAAAAAAAAAAAAA | KETTLQCLSLYLLGIFPAQG |
| | | | | | (SEQ ID NO: 1366) | VRHTLTRPPRRPRNRRESRR |
| | | | | | | QQYAVVQRNWDKHKGRCIKS |
| | | | | | | LLNGTDESVMPSQEVMVPYW |
| | | | | | | REVMTQPSPSSCSGEVIQMD |
| | | | | | | HSLERVWSAITEHDLRASRI |
| | | | | | | SLSSSPGPDGITPKSAREVP |
| | | | | | | SGIMLRIMNLILWCGNLPHS |
| | | | | | | IRLARTVFIPKTVTAKRPQD |
| | | | | | | FRPISVPSVLVRQLNAILAT |
| | | | | | | RLNSSINWDPRQRGFLPTDG |
| | | | | | | CADNATIVDLVLRHSHKHFR |
| | | | | | | SCYIANLDVSKAFDSLSHAS |
| | | | | | | IYDTLRAYGAPKGFVDYVQN |
| | | | | | | TYEGGGTSLNGDGWSSEEFV |
| | | | | | | PARGVKQGDPLSPILFNLVM |
| | | | | | | DRLLRNLPSEIGAKVGNAIT |
| | | | | | | NAAAFADDLVLFAETRMGLQ |
| | | | | | | VLLDKTLDFLSLVGLKLNAD |
| | | | | | | KCFTVGIKGQPKQKCTVLEA |
| | | | | | | QSFYVGSREIPSLKRTDEWK |
| | | | | | | YLGINFTATGRVRCNPAEDI |
| | | | | | | GPKLQRLTKAPLKPQQRMFA |
| | | | | | | LRTVLIPQLYHKLALGSVAI |
| | | | | | | GVLRKTDKLIRYYVRRWLNL |
| | | | | | | PLDVPIAFIHAPPKSGGLGI |
| | | | | | | PSLRWVAPMLRLRRLSNIKW |
| | | | | | | PHLTQNEVASSFLEAEKQRA |
| | | | | | | RDRLLAEQNELLSRPAIEKY |
| | | | | | | WANKLYLSVDGSGLREAGHW |
| | | | | | | GPQHGWVNQPTRLLTGKEYI |
| | | | | | | DGIRLRINALPTKSRTTRGR |
| | | | | | | HELERQCRAGCDAPETTNHI |
| | | | | | | MQKCYRSHGRRVARHNCVVN |
| | | | | | | RIKRGLEERGCVVIVEPSLQ |
| | | | | | | CESGLNKPDLVALRQDHIDV |
| | | | | | | IDIQIVTDGHSMDDAHQRKI |
| | | | | | | NRYDRPDIRTELRRRFEAAG |
| | | | | | | DIEFHSATLNWRGIWSGQSV |
| | | | | | | KRLIAKGLLSKYDSHIISVQ |
| | | | | | | VMRGSLGCFKQFMYLSGFSR |
| | | | | | | DWT |
| | | | | | | (SEQ ID NO: 1488) |
| R2 | R2_DYa | — | Drosophila | CATAAGTCTTGCCTTTACTC | TAGCTTAAAACGTTTGGTTC | FERRIFPKGLVPLTKDNHIG |
| | | | yakuba | AAGTCGACTCAAAACCTCCT | ACATACATCTGCCTGCTGCC | TTNLQNEPRIFTNDLLTTRP |
| | | | | CGTGGTGTTTCCCGGTAATG | TTGGCACAATATCAAAAAGG | SVDHVPEDQYEPNAAATLSR |
| | | | | TTAAACTTGTTTAGCAGCTA | CATAAACATCGCACATATTG | VPCTVCDRSFNSKRGLGVHM |
| | | | | A | GTTATTTACGGCTATGAGGA | RSRHPDELDEERRRVDIKAR |
| | | | | (SEQ ID NO: 1244) | TGGTTTTAGTACGTAGGCGT | WSEEEKWMMARKEVELMANG |
| | | | | | TGCGGAACTTCGGTTCGGAT | FKHINKQLAVYFANRSVEAI |
| | | | | | AGAGCAATGAATCGTGCATG | KKLRQRGDYKEKIEQIRGQS |
| | | | | | CTAGGAACTGACCAAATAAC | ALAPEVANLTIRRRPSRSEQ |
| | | | | | AGCAGCCCTAGTATCTTTCG | DHQVPTSEASPITPLEQSNR |
| | | | | | AAGATTTCCATACCTTTGCG | EILRTLRGYSPVVCPSKWRA |
| | | | | | ATCAAAAAAAAAAAAAAAAA | QELQTIIDRAEFEGKETTLQ |
| | | | | | AA | CLSLYLQGIFPVQGVRHTLT |
| | | | | | (SEQ ID NO: 1367) | RPPRRPRNRRESRRQQYAVI |
| | | | | | | QRNWDKHKGRCIKSLLNGTD |
| | | | | | | ESVMPSREFMEPYWREVMTQ |
| | | | | | | PSPSSCNGEVIRTDHSLETV |
| | | | | | | WSAITEQDLRASRVSLSSSP |
| | | | | | | GPDGVTPKTAREVPSGIMLR |
| | | | | | | IMNLILWCGNLPHSIRLART |
| | | | | | | IFIPKTVTAKRPQDFRPISV |
| | | | | | | PSVLVRQLNAILATRLTSSI |
| | | | | | | DWDPRQRGFSPTDGCADNAT |
| | | | | | | IVDLVLRHSHKYFKSCYIAN |
| | | | | | | LDVSKAFDSLSHAAIYGTLR |
| | | | | | | AYGAPKGFVDYVQKTYEGGG |
| | | | | | | ISLNGEGWCSEEFVPARGVK |
| | | | | | | QGDPLSPILFNLVIDRLLRA |
| | | | | | | LPSEIGTKVGNAMINAAAFA |
| | | | | | | DDLVLFAETRMGLQTLLDKT |
| | | | | | | VDFLSTVGLKLNADKCFTVG |
| | | | | | | IKGQPKQKCTVLEAQSFCVG |
| | | | | | | SREIPTLKRTDEWKYLGIHF |
| | | | | | | TASGRVRCNPAEDIGPKLQR |
| | | | | | | LSEAPLKPQQRLFALRTVLI |
| | | | | | | PQLYHKLSLGSVTIGVLRKT |
| | | | | | | DKLIRFYVRRWLNLPSDVPI |
| | | | | | | AFVHAPPKCGGLGIPSLRWV |
| | | | | | | APMLRLRRLSNIKWPHLVQS |
| | | | | | | EEASSFIEAEKQRARGRLIA |
| | | | | | | EQNELLSRPAIEKYWANRLY |
| | | | | | | LSVDGGGLREAGHYGPQHGW |
| | | | | | | VSQPTRLLTGKEYLDGIRLR |
| | | | | | | INALPTKSRTTRGRHELERQ |
| | | | | | | CRAGCDAPETTNHIMQKCYR |
| | | | | | | SHGRRVARHNCVVNRIKRGL |
| | | | | | | EERGCVVIAEPSLQCESGLN |
| | | | | | | KPDLVVLRQNHIDVIDVQVV |
| | | | | | | TDGHSMDEAHQRKINRYDRP |
| | | | | | | DIRTELRRRFEAAGDIEFHS |
| | | | | | | ATLNWRGIWSGQSVKRLIAK |
| | | | | | | GLLSKYDSHIISVQVMRGSL |
| | | | | | | GCFRQFMYLSGFSRDWT |
| | | | | | | (SEQ ID NO: 1489) |
| R2 | R2_KF | GU949 | Kalotermes | GAGAGGTCACTGTTGCTGAT | TAATGTCCCTTTTGGCTTGC | MEVPLTSSLGSGATQAPGTP |
| | | 558 | flavicollis | CAGCTGGACACCTAGCTGAC | CCCCACCTGCTTAAAGGAAC | ELLGEHTVERPGLDQGHSYG |
| | | | | TGCGTGCATGCGTGCACGCC | TGGCAGGAAAGAGAGTGATC | LLMDDVELPVRLPFFGPLIC |
| | | | | GCGCGCCGCCTCCTCGTGGT | CGTGCCATAGAAATATGGTT | PGCRTLLTSEETISSHHRRV |
| | | | | ACCGCTGGTAACGCAGGGTC | ATCCGGGGCAAGTCACTAGC | HPDARTRWVCYGCDSPFMTY |
| | | | | ACTGAGACTACCTGCGGCTA | AATATGGGACTTCTCCGGGT | RAIKCHLPKCSGRKVVTGDH |
| | | | | AAGGCGCGCGCGAGGGATTG | CCGTGCGGTCCTTCCAACAT | ICNGCTKRFESQRGLSLHKR |
| | | | | TAAGTCCACCACCTCCACGT | GAGCTGGACGTAGTCCACTC | RAHPGLRNEEMLEPPVRAER |
| | | | | GGTTCCCCGCGGGCAACGGC | TATGACTTGAACGATACGGG | RPNAHKSSIWSIDEIRILEQ |
| | | | | ATAGTTCATCTGCCGGCCAA | GGCGTATCTCCCCCGGAAGA | YEAAYVGDLHINMKIAAHLP |
| | | | | GCGTGCCGTTCCCTCGATCC | GGTCGCCTAGGCGACTTAGA | FKTNKQVSNYRNDRRKKSRT |
| | | | | TCCTCTGATTAGGGATAGGA | A | ATDASQQGLGPNDGNRGIVP |
| | | | | GGGGGGCGGTGGCTCCCGCC | (SEQ ID NO: 1368) | SGQSSPLFLEGSDAEGDEDV |
| | | | | GACGACCTGGCAAACACCTT | | FNVLVPPTLGGLEPAGQVHS |
| | | | | GGACACGCTAAGATAATAGG | | LSEGETSPLVGEADPCFMGG |
| | | | | CCGTCCTCCGGGCCGGCCGA | | TPSAGEASGSTLLGPDPTPA |
| | | | | ATCATAAGCACACA | | DGYSLVRKDLQLSVQTSPLL |
| | | | | (SEQ ID NO: 1245) | | AVGSVGTESVQFERGVLSCG |
| | | | | | | TPPEFLHPEQFAHCANNDPV |
| | | | | | | LNASEEQVHAPLGEEANDLP |
| | | | | | | DNNHPSELGVDPEDPTCSPA |
| | | | | | | TEQVQPSSEEEADDPFAQFK |
| | | | | | | AWRRRVASYALKIETGVLPA |
| | | | | | | QVDDLLRRLRDGDTQSKVTC |
| | | | | | | EEVEEVVLSLTRTILGGTAP |
| | | | | | | KKRVEGRTKWTYKSRTNHEA |
| | | | | | | RKRIMYARCQDLYRRRPQRP |
| | | | | | | VERAVGYQAEESLLDNQDER |
| | | | | | | PSHGAFETFYTGLWGKSGQC |
| | | | | | | NITMPPGVPRHTGHVLREVT |
| | | | | | | PKDIYSRLRKLKKDYAPGPD |
| | | | | | | GVTKLKVQSMGAYPSLLAKV |
| | | | | | | YNLVMLTGYFSSCWKEHKTS |
| | | | | | | LIPKDRGSPMDVSNWRPITI |
| | | | | | | GSLLSRIYTGLIERRLRTVS |
| | | | | | | DIHQRQVGFMPVNGCAANLF |
| | | | | | | IFDECIRQAKKEGTIVGSLI |
| | | | | | | DVAKAFDTVPHEAILRALSS |
| | | | | | | QGVDEHTMAHIRDMYSGIRT |
| | | | | | | RINGKGSDIPLVRGVKQGDP |
| | | | | | | LSPMLFNMVMDPLIRDLQRK |
| | | | | | | GFRIGGHEIGALAFADDIVL |
| | | | | | | LADSIDGAQDHVDQVGRYMN |
| | | | | | | KLGMTLNPRKSSSFLITAMR |
| | | | | | | KTWICRDPGLSIGETKVPGA |
| | | | | | | RPSSALKYLGVNYTLSEGLE |
| | | | | | | SGALIDKLMQAVNRARGLAL |
| | | | | | | KPLQKVNLILERIIPKFLYG |
| | | | | | | IILGGPSLTRLHAADKCVRM |
| | | | | | | AVKEILHLHPSTTDHVLYAR |
| | | | | | | KKDGGMGIPRLAHLVRLASL |
| | | | | | | RSGLALLASGDVAVQAAGMA |
| | | | | | | GDLEGRCKKVANDLRLNWPV |
| | | | | | | TLRDVVRASNKFKSQESKDW |
| | | | | | | ERLASQGHGVKDFRNDRLGN |
| | | | | | | CWLYDPTVLSSSRYTDALRL |
| | | | | | | RTNTFGVNVALRRADKDLEV |
| | | | | | | NCRRCHGKPETLGHVLGECV |
| | | | | | | AGKGMRIQRHDKMAAFVATK |
| | | | | | | CEEKGYQTTREQLFSIEQGK |
| | | | | | | LKPDLVVIDGERALIVDVTV |
| | | | | | | RFESGNALSRGASEKIEKYQ |
| | | | | | | PLADYFVSQGAVREANVLPI |
| | | | | | | VVGSRGAITQATLKSLATLG |
| | | | | | | LDVERVGKYLAICAVASSVE |
| | | | | | | IACMHLDYT |
| | | | | | | (SEQ ID NO: 1490) |
| R2 | R2_RL | GU949 | Reticulitermes | CTCACTGCTGTCATGCCATT | TGAGTTAGATATATATGACG | MMADYNNSVDHALEDNTRLI |
| | | 555 | lucifugus | GTTAATGCGTTGGGTGATGG | ACTGATTCTTCCCTAACTAA | FARDAVLARVCGPFDNLECG |
| | | | | CGGGTGATGGGAGACGAGTT | AATATAATTTGGAATGTGCA | LCGVLLTSLQGVREHCHRAH |
| | | | | ACAGCAGAGCTGGCTTCACG | TTACTTATACTTTATTGTAT | HNLDLTFQCTKCDKGFSSYR |
| | | | | GGGGGGGCTGTAGTTGCCCG | TTATTGACATCCGTAGTAGT | GICCHFSKCIGARISVSEGP |
| | | | | AACCAGTCTGCTTCTGAGTG | CTGTTTAGTGGATTTAGATC | LSCSECEREFDSKRALSTHE |
| | | | | CCTCCACGTGGCCTCGCTGG | GTTAACCATTCTGTGACGTC | RHMHPGIRNAKRLKDFNPRG |
| | | | | AAACGTCGGAGCTGCTTACG | GCTGATGTCTATATGTACCA | GGGKTIHGNTKWTEEEVQLL |
| | | | | GCTAACCCGTAGACAACTCC | GTGGCAGAATGCTGACTAAG | VSLSKRFEGYKSINKEISLI |
| | | | | GGCGGCCAAACTCAGAAAAC | AACAAAATAATTTTAAACAA | LTSKTCKQISDKRRYLNLHN |
| | | | | GGCCTTACTACCAGGGTCAT | TAGACAGCACTAAGAAATTC | GNGGLAAAEAVLEFCEDSHP |
| | | | | CCCTCGCGGCGGCGCTAAGA | TGCAAACTGGAACGTGGCCC | EVTESDGAVLSEIMDEECHQ |
| | | | | CCTTACTGTATGTACTACGG | ACGGTAGGCCAATATACCGG | SSVTMRSSIVHGDIGREVQG |
| | | | | ACTACAGTTGAGTAGCGCGG | AAAGGGAAAATGACACATCC | KELVRIPPDNSVMGNCVVLL |
| | | | | GAGAGCACTTGATGTGAGGG | CCCCTTAAA | RKLATDKRSDLDLSKDKELR |
| | | | | TAGCAACTTGTTGCTACTTC | (SEQ ID NO: 1369) | IDIEKATKANRESADGRVIQ |
| | | | | GACTGTCTCCCTGAAGATTT | | SVAGNEIDPDTFQWKELLLG |
| | | | | CCGAAGGGGTGCCGCAAGTC | | QVRGFPRVDENSELFDLDDK |
| | | | | CATGGGGGCGGTCCTGCTGT | | LTKELSSDSPVWNDNCELIV |
| | | | | GGGAGTTATCTTGCACCCGG | | SDLCQVLCKKKYELGRQHHV |
| | | | | GAAGCCCTCAGTGGATAAAT | | RKGKRHRGIHHKREKFRECQ |
| | | | | ACTCCAAAATGGCTTAGCCA | | KIFRKSPRKLAEYLYRDKDL |
| | | | | CCTCACGTGGAGAGAGGGGA | | SHISKDASTPQGIEQYYSQL |
| | | | | ATTAGGGGTTTACTCCTAAG | | WGEPELLESNTIEEKLPSSS |
| | | | | GGCCGATGCCTCCAATCGGA | | LFDCLPPITPEEVEGRIHKI |
| | | | | TTTCCCCGGGCAACGGCTAT | | RPSSAPGLDGVRKIHLVGKG |
| | | | | TATCAGCCGGCTAAGTTCGG | | ITLVLVKLYNLLFLTGGYPE |
| | | | | ACCCTCATCTACTGATGGGA | | CWKRNRTVFIPKIGKDLSEV |
| | | | | TACTCTCTCTCCCCCCGCCT | | GGWRPLTIGSLLARMYSAFL |
| | | | | GCGTGATTAGTTGGGAATGC | | ERRIRRVTSLSLSQRGFTNI |
| | | | | ACGCGGGCGGGTGATTCTGA | | QGCHVNLTILKEGIRQAKVK |
| | | | | CAAGCCCAGCCCAAAAGTTC | | NGGVIVSVDIEKAFDTIPHS |
| | | | | TTACCACGACGTACCCGGGG | | VIFSRLASQGVPPLLRKIIS |
| | | | | GTGTCACCCGAACTAATATA | | NMYKDVYTVIEGQCIPIKRG |
| | | | | TTTTCCGCCGATCGGTTCGC | | VKQGDPLSPLLFNIAIDPVL |
| | | | | TGTGGGGGGATGTCGGGGCC | | RSLEEFQGGLPLGNSAIKIL |
| | | | | TGGTGGCCGGGAACCGTCAG | | AFADDIILGASSAGQAQQMV |
| | | | | CCGCTCTTTGAGTGTCCTGC | | DMLGIGLTSCGLGVSHRKCF |
| | | | | GTAACCCGGAGGCGGTGACG | | GFQIVNKNKTWTIVDPMITL |
| | | | | TCGAAGGGCTAGGCTAGCAC | | NGSSLPFSGPEDRLPYLGVD |
| | | | | GGTCCAGACCCCTGAACGCC | | INPWDRKSRYDAGQRLISAA |
| | | | | TGGGGAGACGGGCCCACCAC | | KRGSQLSLKPQQKINLITAF |
| | | | | CTGAGTAGGAGTGGGTCCTT | | LLPKFLYILIEDPPSPAYLK |
| | | | | TACCTCATTTGAGGTGTCTC | | SIDHDLRQIYKNILHLPNCV |
| | | | | CTCGTTCTTGTAGGGGGCGA | | STAFMYSPKRDGGLGLPRLS |
| | | | | AGGACGAGGAATGCATCCGT | | CLVPLAHLKAGIKLGSLQDS |
| | | | | CCCTCCAGGATGCTGGTGGT | | LVREITTSDRFVRTMGSVAH |
| | | | | TTCCGTCTGGTGGGCTCATG | | SLWASWSLTLQDIYKLKSAL |
| | | | | CTGAAACGCGCAGGTGCCGA | | KRREAKAWESCVSQGQGAAQ |
| | | | | TTTGTCGAAGAGGACATATG | | FRGDSIGNNWLHNPGTYRPG |
| | | | | GGGTAACCCATAGAACCTAG | | QYIEALKLRANLTGVRVNLK |
| | | | | GCAGGAGTAATCCCTTAGCT | | RSGYNVPITCRFCKDIPETQ |
| | | | | GGGGGGGTCAGCTGGTGGGT | | AHVLGLCPKTKGMRIQRHDS |
| | | | | CCTGTCAATTTATCCTCCCC | | IVNRVRDKLKTKSPVALMHE |
| | | | | TCCATGCCAGAGCCGGTCCG | | QNFTVEEGQVFKPDIVTILG |
| | | | | AGGTTAGAGACGGACTCATT | | EVGYVIDVTVRYDDRDYIKD |
| | | | | TTCTCCTTTTTATATGTC | | ASVEKIRKYEALKGYLKDLY |
| | | | | (SEQ ID NO: 1246) | | PQLNKVEVLPLVFGSRGAVP |
| | | | | | | GSTVHNMGLLGFTKREMVHI |
| | | | | | | SRKVIADSLIISNFLEVY |
| | | | | | | (SEQ ID NO: 1491) |
| R2 | R2_RU | GU949 | Reticulitermes | CACACTGCTGTCATGCCATT | TGAGTTAGATATATATAACG | MMADYNNSVDHALEDDTRFI |
| | | 554 | urbis | GTTAATTCGTTGGGTGATGG | ACTGATTCTTCCCTAACTAA | FARDSVLARVCGHFDNLKCE |
| | | | | CGGGTGATGGGAGACGAGTT | AATATAATTTGGAATGTGCA | LCGVLLTSLQGVREHCHRSH |
| | | | | ACAGCAGAGCTGGCTTCACG | TTACTTATACTTTATTGTAT | HNLDLTFQCTKCDKGFSSYR |
| | | | | GGGGGGCTGTAGTGGCCCGA | TTATTGACATCCGTAGTAGT | GICCHFSKCRGARISVSEGP |
| | | | | ACCAGTCTGCTTCTGAGTGC | CTGTTTAGTGGATTTAGATC | LSCSECERKFDSKRALSTHE |
| | | | | CCCCAAGTGGCCTCGCTGGA | GTTAACCATTCTGTGACGTC | RHMHPGIRNAKRLKDFNPRG |
| | | | | AACGTCGGAGCTGCTTACGG | GCTGATGTCTACATGTACCA | GGKTIHGNTKWTEEEVQLLV |
| | | | | TTAACCCGTAGACAACTCCG | GTGGCAGAATGCTGACTAAG | SLSKRFEGYKSINKEISLIL |
| | | | | GCGGCCAAACTCAGAAAACG | AACAAAATAATTTTAAACAA | TSKTCKQISDKRRYLNLHNG |
| | | | | GCCTTACTACCAGGGCCATC | TAGACAGCACTAAGAAATTC | NGGLAAAEAVLVFCDDSHLE |
| | | | | CCTTGCGGTTGCGCTAAGAC | TGCAAACTGGAACGTGGCCC | VTDSDGAVLSEIMDEEYYQS |
| | | | | CTTACTGTATGTACTACGGA | ACGGTAGGCCAATATACCGG | SLTMRSSIVHGDIGREVQGK |
| | | | | CTACAGTTGAGTAGCGCGGG | AAAGGGAAAATGACAAATCC | DLVRIPPDNSVMGNCVVLLR |
| | | | | AGAGCACTCGATGTGAGGGT | CCCCTTAAA | KLATEKRSDLDLSKDKELRI |
| | | | | AGCAACTTGTTGCTTCTTCG | (SEQ ID NO: 1370) | DIEKATKANRESADGRVIQS |
| | | | | ACTGTCTCCCTGAAGAGTTC | | VADNEIDPDTFQWKELLLGQ |
| | | | | CGAAGAGGTGCCGCAAGTCC | | VRGFPRVDENSELFDLDDKL |
| | | | | ATGGGGGCGACCCGGCTGTG | | TSELSSDSPVWNDNCELIVS |
| | | | | GGAGTTATCCTGCACCCGGG | | DLCHVLCKNKYELGRQHHVR |
| | | | | AAGCCCTCAGTGGATAAATA | | KGKRHRGIHHKREKFRECQK |
| | | | | CTCCAAAATGGCTTAGCCAC | | IFRKSPRKLAEYLYRDKDLS |
| | | | | CTCACGTGGAGAGAGGGGAA | | HISKDVSTPQGIEQYYSQLW |
| | | | | TTAGGGGTTTACTCCTAAGG | | GKPELLESNTTEEMLPSSSL |
| | | | | GCCGATGCCTCCAATCGGAT | | FDCLPPITPEEVEGRIHKIR |
| | | | | TTCCCAGGGCAACGGCTATT | | PSSAPGLDGVGKIHLVGKGI |
| | | | | ATCAGCCGGCTAAGTTCGGA | | TLVLAKLYNLLFLTGGYPEC |
| | | | | CCCTCATCTACCGATGGGAT | | WKRNRTVFIPKIGKDLSEVG |
| | | | | ACTCTCTCTCCCCCCGCCTG | | GWRPLTIGSLLARMYSAFLE |
| | | | | CGTGATTAATTGGGAATGCA | | RRIRRVTSLSSSQRGFTNIQ |
| | | | | CGAGGGCGGGTGATTCTGAC | | GCHVNLTILKEGIRQAKVKN |
| | | | | AAGCCCAGCCCAAAAGTTCT | | GGVIVSVDIEKAFDTIPHSV |
| | | | | TACCACGACGTACCCGGGGG | | IFSRLASQGVPPLLRKIISN |
| | | | | TGTCACCCGAACTAATATAT | | MYKDVYTVIEGQCIPIKRGV |
| | | | | TTTCCACCGATCGGTTCGCT | | KQGDPLFPLLFNIAIDPVLR |
| | | | | GTGGGGGGATGTCGGGGCCT | | SLEEFQGGLPLGNSAIKILA |
| | | | | GGTGGCCAGGAACCGTCAGC | | FDDDIILGASSAGQAQQMVD |
| | | | | CGCTCTTTGAGTGTCCTGCG | | MLGIGLTSCGLGVSHRKCFG |
| | | | | TAACCCGGAGGCGGTGACGT | | FQIVNKNKTWAIVDPMITLN |
| | | | | CGAAGGGCTAGGCTAGCACG | | GSSLPFSGPEDRLPYLGVDT |
| | | | | GTCCAGACCCCTGAACGCCT | | NPWDRKSRYDAGQRLISAAK |
| | | | | GGGGAGACGGGCCCACCACC | | RGSQLSLKPQQKINLITTFL |
| | | | | TGTGTAGGAGTGGGTCCTTT | | LPKFLYILIEDPPSPAYLKS |
| | | | | ACCTCATTTGAGGTGTCTCC | | IDHDLRQIYKNILHLPNCVS |
| | | | | TCGGTCTAGTAGGGGGCGAA | | TAFMYSPKRDGGLGLPRLSC |
| | | | | GGACGAGGGATGCATCCGTC | | LVPLAHIKAGIKLGSLQDSL |
| | | | | CCTCCAGGATGCTGGTGGTT | | VREITTSDRFVRTMGSVSHS |
| | | | | TCCGTCTGGTGGGCTCATGC | | IGASWPLTLQDIYKLKSALK |
| | | | | TGAAACCCGCAGGTGCCGAT | | RREAKAWESCVSQGQGAAQF |
| | | | | TTGTCGAAGAGGACATATGG | | RGDSIGNNWLHNPGTFRPGQ |
| | | | | GGTAACCCATAGAACCTAGG | | YIEALKLRANSTGVRVNLKR |
| | | | | CAGGAGTAATCCCTTAGCTG | | SGYNVPITCRFCKDIPETQA |
| | | | | GGGGGGTCAGCTGGTGGGTC | | HVLGLCPKTKGMRILRHDSI |
| | | | | CTGTCAATTTATCCTCCCCT | | VNRVRDKLKTKSPVALMHEQ |
| | | | | CCATGCCAGAGCCGGTCCGA | | NFTVEEGQVFKPDIVTILGE |
| | | | | GGTTAGAGACGGACTCATTT | | VGYVIDVTVRYEDRDYIKDA |
| | | | | TCTCCTTTTTATATGTC | | SVEKIRKYEALKGYLKDLYP |
| | | | | (SEQ ID NO: 1247) | | QLNKVEVLPLVFGSRGAVPG |
| | | | | | | STVHNMGLLGFTKREMVHIS |
| | | | | | | RKVITDSLIIISNFLEVY |
| | | | | | | (SEQ ID NO: 1492) |
| R2 | RaR2 | FJ461304 | Rhynchosciara | CAGAACGTGGAGAAACGGAA | TAGAAATGTGTGCGATAAGG | MSNYNETNTSGGDNPRMATQ |
| | | | americana | TAACTACCCAGATCCGTTGG | TGTGAATAGAAGGGTTCACC | TTGSLSSGPINQHTCELCCR |
| | | | | TTAACCGGTGGCAAAGTTAA | AAGAGGGAGACCTAGTTTGG | TFGTRAGLGQHVRKTHPIES |
| | | | | TCAAGGTTGCCATAGGCTTA | ACCTCAGAAATGGGGTCATA | NQSINVERKKRRWSPEEIRR |
| | | | | ATAACCCTATGGAAATGTTT | GGAGTGATAGGTTGTAAAGC | MANMEAQATINNIKHLTQYL |
| | | | | CCACACACCTCCACGTGGTG | CGTTGGGGAATCCGGCTACA | ATYLPQRTLNAIKGRRRDAE |
| | | | | CCTGCCGGAAATTGTTCTAG | CATGGTATCTCAGGAGCCAT | YKELVTGIIANLRSNSSTQQ |
| | | | | GGTGAACAAGCTAAGTIGTG | TCATGCGCTGATCTCATTAA | TNQVCNESEMSQRSKILQSI |
| | | | | AGAAACGGGCTCCACCACAA | GGCGTAATAAACTGTGAAAC | RESVRDLRSRRNKYAKALQE |
| | | | | TATGGAGCCTGCCAGGGCGC | AGATCCTGATAATGCCGTGC | LGEAALCGKMLNEEQLIHCI |
| | | | | GAGACTCAGGACTCTCCATG | TACCAAATGATGTAACGAGG | KSMFNTAKCPKGPRFRKTAT |
| | | | | TACAAAGTGGTTAGTTGCAA | CGGAAATAAAATTAATCTGG | HSGTNKQQRQQRYARVQKLY |
| | | | | AAAGAGTGCGCCTAGCATGA | GGCGTTCTGCGGAATGACTA | KMNRKVAAKMVLEETDKIQI |
| | | | | CTGATAATTTTTCACTGAAA | CTAAATATAGCGATGCTATA | KLPDHDPMFKFWESEFKEGE |
| | | | | TAACGTTGAACTTTATCTGT | TATACAAACGACTGATGGTA | GMPERMPKDLKESPDLKAIW |
| | | | | GTCATGTGCACAACACTATG | ACACCGGCCTTA | DPVTEEEVRKAKVANNTAAG |
| | | | | GTGTCTGATCAAGCACCATC | (SEQ ID NO: 1371) | PDGIQPKSWNRISLKYKTLI |
| | | | | AGTGGTGGACCTGCTAATGT | | YNLLLYYEKVPHKLKVSRTV |
| | | | | ATTAGTAGAACGTGTCCAGG | | FIPKKKDGSSDPGEFRPLTI |
| | | | | CGATAATGCACACACGGCCT | | CSVVLRGFNKILVQRLVSLY |
| | | | | CCGGGCCCATCGCTTTTTTT | | KYDERQTAYLPIDGVGTNIH |
| | | | | GAGATTCCCTAGAAACTTCA | | VLAAILNDSNTKLSELHVAL |
| | | | | GTGTGTGCGACAACTGTATA | | LDITKAFNRLHHTSIIKSLV |
| | | | | ACCCATAAGGGATGGACAAA | | GKGFPYGFITFIRRMYTGLQ |
| | | | | GGTTATACTAGGGGGTAAAA | | TMMQFEGHCKMTQVNRGVYQ |
| | | | | ACCCTAATCGGCTAATGGCA | | GDPLSGPIFLLAIEKGLQAL |
| | | | | AATGGGATGTAGAAATGCCA | | DKEVGYDIGDVRVNAGAYAD |
| | | | | AAGATTACTCGCACCGAATA | | DTDLVAGTRLGLQDNINRFS |
| | | | | ATGGTGGCCGAAAAGCGGGT | | STIKQVGLEVNPRKSMTLSL |
| | | | | AATCGAATGAAATGGTAATG | | VPSGKEKKMKVETGKPFRAN |
| | | | | CTGTAGCGGAAACATGATCA | | DVPLKELSINDFWRYLGISY |
| | | | | CATTCTGTGACAGTAAACCA | | TNEGPERLSLTIEQDLERLT |
| | | | | TTAGACCTAGGGGGAACTAT | | KAPLKPQQRIHMLNAYVIPK |
| | | | | GATTAACAAGATACCAGCTT | | YQDKLVLSKTTAKGLKRTDR |
| | | | | ACATGGAAGCAATGAAATGT | | QIRQYVRRWLKLPHDVPIAY |
| | | | | AAGTCACAGTAGTGATAAGT | | LHAPVKSGGLNIPCLQYWIP |
| | | | | GGTGAAGAGTCTTGTAATCA | | LLRVNRVNKITESQRSVLAA |
| | | | | CCGTAACTAGGCCAGGTTCT | | VGKTALLTSTVYKCNQSLAT |
| | | | | GGGGATGCCATGAACTTAGG | | LGGNPTMLAYRTYWEKELYA |
| | | | | GGGAGTATGGTTAGCAGATC | | KVDGKDLQNARDDKASTRWN |
| | | | | TACCAGCTAACACTATTACT | | GMLHSDISGEDYLNYHKLRT |
| | | | | GATAATATGTAAGCCGCAGT | | NSVPTKVRTARGRPQKETSC |
| | | | | AGCGCTAAGTGGTGTACAGA | | RGGCKSTETLQHVVQQCHRT |
| | | | | TTTGCAACCACCGTAACTAA | | HGGRTLRHDRIVGLLQHELR |
| | | | | GTTCTGTTTCGATGGACTAG | | RDYNVLAKQELKTGIGLRKP |
| | | | | GGGGAATCATGATTAACAAG | | DLVLIKDDTAHIVDVQVARC |
| | | | | ATACCAACTTACATGGAAGT | | SKLNESHVRKRSKYDKKEIE |
| | | | | TATGAAATGTAAGTCACAGT | | VEVKSRYRVSKVMYEACTIS |
| | | | | AGTGATAAGTGGTGAAGAGT | | YKGIWDKQSVMSMRRLGVSE |
| | | | | CTTGTAATCACCGTAACTAG | | YCLFKIVTSTLRGTWLCWKR |
| | | | | GCCAGATGTAGTCAAAGCAC | | FNMITSVRS |
| | | | | ATGTTTAGGGGGAACAAGGT | | (SEQ ID NO: 1493) |
| | | | | TAACATTGGTAAAAGACCAA | | |
| | | | | TGCAACCTCCGTAACTAAAC | | |
| | | | | GTGAAGGCACAAAACTAAAA | | |
| | | | | GTCCAGTGGATGACAGGTGA | | |
| | | | | GGTCATCACTGGACCCAAAT | | |
| | | | | GTTTTAAGCTCATCATAACA | | |
| | | | | ACACGGTGAAAAATCCAGCA | | |
| | | | | TTTATTTGCCTGATTGAGTA | | |
| | | | | GCTTCCACACTATTCCAAAG | | |
| | | | | CCGAACCTATCTGGGTTTTT | | |
| | | | | CTTGAAAGGCCGTATAGGGC | | |
| | | | | ATATGTCGAGAAATAAGTCC | | |
| | | | | AAGGTGAGGTAGTGTGGCCC | | |
| | | | | TGTACCCAGGGGTAAGGTAC | | |
| | | | | TATACGGTCGAGTGGCTCAG | | |
| | | | | TAGGCCTAACTAGCCACTGA | | |
| | | | | GTCACTATAATGACTAGTT | | |
| | | | | (SEQ ID NO: 1248) | | |
| R2 | YURE- | — | Ciona | CCAAAATTACTTCCAGCACC | TAAGATCCGCGGCTGTGGCG | MAGHKITMSEGKLLEVAVRY |
| | 2_Cis | | savignyi | TCCACAGCAGACGAACGAAG | CCGAACGAGCACCTGCCCAT | GGVRNVSYECPVPDCTKTFS |
| | | | | AAAGAAGACTTACGAAATAA | TCTTCTTGTAGGGACTTTTT | QANNLIRHLNNFGNTKHRAH |
| | | | | GAATAAGCAGTTTAAAGACG | CACCCTCACTCCCCCCAATA | NFTYFFTCEKCKIQIHSNTK |
| | | | | AAGCAGACGAACACCACTCC | GTTTTTTTTCGTTTTTTCGT | HNISNHYKQCCATGGGPSCE |
| | | | | ACCAACGACGCTCTGCAGCT | TTTTTCACCCCCACCCCACT | TGQYFCPACEQAGLGNLESA |
| | | | | ACACCACCACCATCTCGCCG | CGCCTCTGGGCTGCACATCC | LRHFQSSHPEFNLPPRSQFS |
| | | | | CAACAAGAAGAATTTTCCGC | CACACGTAGGGACCTGTTTA | KSHPNSYTLSLKPKDHLMKI |
| | | | | TGCTCTCCACTCTGCTCCAA | TATTATTTGCCTTTTATATG | LYSGPLTPGQLVCPIKICLR |
| | | | | CACCACCTCTCCTGCTCTGT | TACCACTTTTTAAATATATT | SSAARLFHDVSKLRKHMLVD |
| | | | | GGACTGCTGCCTTGCTGCTG | TTTGTACCCCACAAGATGCT | HNRTLVYETTCGKCLRPVDT |
| | | | | GACCAACCTCTACCCGAAGG | TTTCGCCAAAAAAAAAAAAT | SKNMRKTTSHFEKCSGESFI |
| | | | | AACCCTTCGAACCCAGCAGC | TTTTGTATCACATTTTTATA | SSPSPIPQKTYKLDLPSTST |
| | | | | AAGGTACGTGTCACCACCTC | TTTTGTAAAACACAGATTTT | PPPRKSPKLQPYKPIRTFKN |
| | | | | TCCACAGAGCCAAGGCCAGA | TATAAACTTTGCACTATTTT | PLTKSSQSKSDNPPKPTPFF |
| | | | | GTGGATAGAGCAGCGGCCTC | TATATAAACTTCGCACTTAT | SPRTLERSASWPALSEVVDP |
| | | | | TACAACCAAGTTCTCCACTC | TTAAAATGAATCGCATCTTT | LPKLKEKHPSLPCALDKCPP |
| | | | | CGACGACAAAACACCTGCCT | TTTATATACACCAACACAAA | SPRIKPSTLVPPCHTANNSP |
| | | | | CGTGGCCAGAGTCCTGCCGA | CAGGATGTGCAGCTCAGGGG | KPTSPESPSTLKPLPRPIRP |
| | | | | AGAAGAATCTTCGACCCCAA | AACCAATCCTGCGTCCCTCC | SKPLEDWLTVRSVGPDREIV |
| | | | | CACCGTCTCGGCAGGGCTCC | TAGCGGCGGGAGGGGCGCCC | LNIGPRPRPGPAAGSRTTSP |
| | | | | AAGCAACGACATCAGCCACG | ACCTACCCCCACGCTCCTCT | PSTAPAKRVAANPIAAPLSG |
| | | | | AGTGCCCACCGGAGTGGACG | TGAGCACCAACAGGGACTCC | EPGATLDCGQTGRKVQPPKK |
| | | | | CGGCGAACCCGAGGACCGCT | CTTCCGGAGCCCCTGCACCC | RPTESAGSLPPPAEPATDLL |
| | | | | GTCGCCAAGAACAATAACAT | TCAACTTTTCTTATTTTTAA | TGREGLARLVEEYHLSGDFG |
| | | | | CACCGCCTGCAGCAGCTACC | AAAAAAAAAATCATATATAT | AFCRDLERWTALSSTNRRPK |
| | | | | AAACAAAGGTTAGTCTCCTA | TGATCTTGACGACGGGGGCT | PRRGRYNRGAAARATRNRGR |
| | | | | CCTCACCTACAAACTCGTCT | ACATTCAGCCCCCAAAAACC | DDRQDPQDRDDQGGPGPVTC |
| | | | | GAATAGACGCCCCCGCGTGG | CACCCACCATCCCCAACGAG | GRPQRYKRAAALRSAFGRDM |
| | | | | GAGCTAACCTTGGTAGCTAG | TGCCGGGGCATTGAAGAGCT | KATVRRIIDGERGDARCEID |
| | | | | CTGCAGTGCCCTGCGACAGC | CCGGCACAATTAGCACTTAG | PKTIEGRFRDELSPPVREGP |
| | | | | GGCCTCGAAGAGCTGCAGAG | CTTATTTATTATTTTTTGTC | ECSLPPWMAEAQAGEHAPSN |
| | | | | CGTCAGCCTGCTTCGACCTC | AACATTTTTGTTTTTTCAAA | DSQPGDAYDGPITALEVEMV |
| | | | | GCTTGTTCTCATTTCAACCT | ITTTTTCACCCCTCACCCCC | LSTLNVGSAPGSDGLSYGFW |
| | | | | ACTCCGTCCTGTGGAATCAA | ACCCTAATAGGTCCCTCGGG | RALDPKGLVLSELFEVCRIE |
| | | | | AAGAGCCCCACTAACAATTA | CTTGGGCCCCTTTTTCGTGC | RRVPGPWKSSRVTLICKDAE |
| | | | | CATTCATAAAATCTAGCAAG | TCGAGAAGCGTCACATCGCC | GDLDDLGNWRPISICQTVYK |
| | | | | AACGAAGAGAAGCGACCAAC | CCACTGACCACGACCTTCCC | IYAAVLARRLQSWALDGGVI |
| | | | | TTTTAATCCATAACTTTTAG | CGACATTGGAGTCCTTGGCG | SRSQKGFMPFEGVYEHVFLL |
| | | | | ATCTTTTTATTTATTAC | TCTCCCAGGTCGAAACAGTC | DSVVADARATRRSLAVCWLD |
| | | | | TGTTTTTAAG | CCAAGTGATAGCACCTAATG | LRNAFGSVDHTTIVEALSRF |
| | | | | CCCTAAGCATATTGCCTTTT | CTCGACTTGTTTCGGCCTGG | GAPAGLVEMISDIYTGGSCR |
| | | | | TTTAGATCTTATAATTATAA | GCCGCCGAGGATTCCCAGAA | IRTRAGFTPDIPVGRGVRQG |
| | | | | AAATAGATTCAAAGTTAACA | CGACCATTCTTCTAAATAAT | CPLSGIIFNLVMEVLLRGVE |
| | | | | CCACCAGGCCGCTACAGAGC | ATTTATATTTCAGAATAAAA | ANNACGYRLSCAGGASVRVL |
| | | | | ATTTTATTTAATCAATTTGT | CTATATATATATCGTTGGCG | AYADDVALVGSSRAEXKIQL |
| | | | | TACCGACCTCCTGCTGCTTC | GGACTTGTCCCGCCTCGATA | GVCERFAAWAGFSFNNKKCA |
| | | | | TTTTTACTTTCTCCAGACTA | CCGAGTGCTGCAGAGCGGCA | AMVLKHQRGGRRLLDSAPLR |
| | | | | CTACCCGGATACAACCCTTG | AAATAAAGAAGAAACCGACG | LCGEEVAILGPDSFYKYLGA |
| | | | | GAAACGAGAGGA | TCGCTCTGCAGCCAAGGACC | HTGYGRQTGGQLVDRVERQV |
| | | | | (SEQ ID NO: 1249) | ACCCAAACTCAAGCCAGCAC | VRLFTSFLTPTQKLSALKRI |
| | | | | | CGTCGACAACCAACATCCTC | VLPAMSFHLRVRPCAEGHLR |
| | | | | | AAGTCGGCGGTTGCTGGAAC | RLDNTVRRCVKTALRLPKGS |
| | | | | | AACTCATAACATCTTCAANA | CRAFFHTSPDAGGLGITSVV |
| | | | | | TAAATTATCACCCTGTGCAG | AECDILTVTQAFKMLSSPDH |
| | | | | | CAGGAGGCCGTGCTTTTAAA | LVSLVAKGRLGMHAARMGRS |
| | | | | | ACTACTCTGTAGTGGCTCAT | ETASACAMADYLSGDSVMGH |
| | | | | | GATAATATTTCGCTCCTTTT | XSWKTGYRMPADLWTATRAA |
| | | | | | TTGCCCCGTGTAAACTTAGT | SRRLSLRFSPQPQGEFGLES |
| | | | | | NGATGCGAATAAAATCAGTT | GTFKIAPRERRSLTRRLHHR |
| | | | | | GAATCA | QNLWWRNQWAALPNQGKTVA |
| | | | | | (SEQ ID NO: 1372) | AHSAYAASNNWVKGPSSLAP |
| | | | | | | QALFFGLKARLNQMPTRSVK |
| | | | | | | ACYSRAPNYDKSCRRCGAEV |
| | | | | | | ETLPHVLNHCPKSMKSILER |
| | | | | | | HDSVLAEVLAAIPRGTFASV |
| | | | | | | DVDRTSREHFRRVGEALRPD |
| | | | | | | IVARRHDGSVVVADVTCPFE |
| | | | | | | SCASALDTAAARKIEKYDQL |
| | | | | | | CANLRQLYRKPVESHALVVG |
| | | | | | | SLGSWGRTNNTALAALGIRG |
| | | | | | | AVRSRLAKQLVNLSVEGSHN |
| | | | | | | IWLRWSGGIPKDLVR |
| | | | | | | (SEQ ID NO: 1494) |
| R4 | Dong | — | Bomby | GCTAGCTCCCTAAAATCCTA | TAAAAACTAGCATAATTATT | MLRRGRIFLPASTKAGKTRG |
| | | | x mori | CCTTACGTCCGAGGCGAACA | AACTCATAACTAATGTATAT | RMKWSREVNLFIMRTYYYVT |
| | | | | TCTGTCCACGTGGGGAGCGG | TACTTGGCCAAAAGCCCGTA | KLETDLTIYRKKLHEHFSLK |
| | | | | AAACGCGTACTATCGAAACT | TATACAGTTCCACCGGCTCT | YPNVIISQQRISDQKRAIER |
| | | | | TACGCGGCTAACAAGGTAAA | GTCGACAGACTGAACTGAGA | NKLLSQETLDRLKEEVRKQL |
| | | | | GGTAACCCATTAATATGGAG | AAGGGGAAACATATGGAAAT | EDEQTNNVENEKLNSETYSH |
| | | | | ACAAGACTAAAAAGAAAATT | AATAATAA | EYTTLTPQTILTKKTQQHTN |
| | | | | GAGAGGGCCGCTTCCCGGGG | (SEQ ID NO: 1373) | IISSTQTSHSSTQTESITLL |
| | | | | GCGATCGCCGGGGCACACCT | | LENEVDILNTNPTEGATQTQ |
| | | | | GGAGCTGGCGCTGGGTGTTC | | EVKDKFETNLTMYSGMDPKA |
| | | | | CAGCATAGGATCCGTCAGCG | | RPPLPKLKYSSKLNELIRLF |
| | | | | GCGGAGAGTTGAGCAGGCGG | | NNDILVDYISPDTQLSDVHT |
| | | | | GCTCTCGCCGGGGATTTACA | | LTYCTAVTISEQLKYKIIAI |
| | | | | ACCCGAAAATGCTACAGCCG | | EGNARHKKNFKPPWQQRLEK |
| | | | | CCAACAGAAATCACGATGTA | | DIAKLRADIGKLTQYINNNR |
| | | | | GAAAGTAGGAGCAATAGCCC | | SKKVVQSVEQIFKNTKIHTS |
| | | | | ATGTGAACCTTACAGCCCGA | | HENGNKKSQEFLDTLKQKLA |
| | | | | GTACCGGTTCATACAACCCC | | LKAHRLKRYNNSQKRKNENT |
| | | | | TCGGTACAATCATCACCATC | | IFLTNEKLFYRNLIKPKTDR |
| | | | | ATCCTCGGGTCATAGAGGCT | | DNSNIDIPTAEQLEMYWARL |
| | | | | CACCAACGTCGACTATGG | | WENSAKHNDKANWITEEKER |
| | | | | (SEQ ID NO: 1250) | | WDTIEEMQFDDVTEEEITTI |
| | | | | | | TARLHNWKSPGIDKIHNFWF |
| | | | | | | KKLICLHKTIAKNLTDIISG |
| | | | | | | NQSIPEFIATGITYMIPKGD |
| | | | | | | FSIEASQYRPITCLPTIYKI |
| | | | | | | LTTVITKKINSHIEHNNILA |
| | | | | | | EEQKGCRRGHMGCKEQLIID |
| | | | | | | STIMKHATTKNRNLHCTYID |
| | | | | | | YKKAFDSIPHSWLIQVLEIY |
| | | | | | | KINPIIISFLRNIMTHWQTT |
| | | | | | | LKLKNPPNFVTTRQIAIKKG |
| | | | | | | IYQGDSLSPLWFCLALNPLS |
| | | | | | | HQLHNDRAGYRIKQQDNTET |
| | | | | | | IISHLIYMDDIKLYAKNDKE |
| | | | | | | MKKLIDTTTIFSNDISMQFG |
| | | | | | | LDKCKTVHIIKGKVQPGDYT |
| | | | | | | IDDTNTITAMEPSDLYKYLG |
| | | | | | | FQQLKGLDHITIKQSLTSEY |
| | | | | | | KKRINAICKTKLSGKHLIKA |
| | | | | | | LNTYAIPILTYSFGIIKWSK |
| | | | | | | TDIEQIERITRTTLTKHNNL |
| | | | | | | HPKSAIERLTIKRQDGGRGM |
| | | | | | | IDIWHLWRKQIHSLKTFFYI |
| | | | | | | KSDLSEIHRAIAQNDNNYTP |
| | | | | | | LNLKQKELIDNTENLRNRNP |
| | | | | | | QKDMEENWKKKALHGRHPHD |
| | | | | | | LSQSHIDSKASNMWLKTGSL |
| | | | | | | FPETEGFLIAIQDQVINTKN |
| | | | | | | YRKYIIKDPTIRDDKCRKCN |
| | | | | | | TQPETIQHITGACSTLTQTD |
| | | | | | | YTHRHNQLANIIHQQLALKH |
| | | | | | | KLIQNTNTPYYNYKPQTVLE |
| | | | | | | NDSCKLYYDRAILTDRTIHY |
| | | | | | | NRPDITLQDKNNKVTYIIDI |
| | | | | | | AVPNTHNIQKTFTEKMTKYT |
| | | | | | | ELKEEIVRIWKQKKAYIVPI |
| | | | | | | IISTTGVVPNHIHNSLKLLD |
| | | | | | | LKDNIFISLQKAAILNTCRI |
| | | | | | | VRKFMQLEENQTYYTQ |
| | | | | | | (SEQ ID NO: 1495) |
| R4 | DongAG | AB097127 | Anopheles | GAAGGCTAACCACAATA | TAACATCCGGTGCAAACTCA | METRSMRKRTTRLPEEGAPT |
| | | | gambiae | (SEQ ID NO: 1251) | TTAACATTAAGAAAAGAGAG | GAGPGTGDRASIQRLEDEMV |
| | | | | | AGGAGAAATGAGAATGAGAT | QERSFSQRALPVPRTQNRNG |
| | | | | | TCATTCACCTTTGGCATTTG | SPINHQGNAASANVAVADRQ |
| | | | | | AATAGCCCGGGGTAGGTGAA | QSLILAGGRRQRIMWTREMN |
| | | | | | AAGTTCCCAGCATATTGCTG | HYVIRCYYVYTRMETDMPGR |
| | | | | | AGAAGTGACAAAATTCGGAT | VKMLGMFNDRFPRFAHQLDL |
| | | | | | AATAATAATAATAATAATAA | SKLYIRQRAIILPEELEFIK |
| | | | | | TAATAATAATAATAATAATA | LEVRREFGEEEAGWRESSRI |
| | | | | | ATAATAATAATATGCATAAT | SARLNTIDQNTSRASEDRDL |
| | | | | | AATA | DEPTAPGLSVDIQHQMATAV |
| | | | | | (SEQ ID NO: 1374) | TQFHGTDPLSRHRLPKLHYS |
| | | | | | | YRLKTAVSIINQDVLPQYLD |
| | | | | | | SVGSIEDLQLIVYSAAVAVV |
| | | | | | | RTLWLRTYPQGDSEGRPCSK |
| | | | | | | AEKPAWMRRLENRINATRTK |
| | | | | | | IGRMQEYQRGNSSMKVVRQI |
| | | | | | | AEMVKPKELRDLTDANITEV |
| | | | | | | LDIHLQRLSALAKRLRRYAE |
| | | | | | | CSKRKEQNRMFNINEREFYN |
| | | | | | | WIRNDKPNFREGLPDIGDFT |
| | | | | | | QFWANLCEKPVQHNSEGMRL |
| | | | | | | AEDERFSDGIEDMPVLVVNA |
| | | | | | | QDIREATQYTRNGAAPGPDF |
| | | | | | | VYNFWYKKLITIHEQIAACF |
| | | | | | | NTVLEDSRKLPKFITGGVTY |
| | | | | | | FLPKDQNTKNPAKYRPLTCL |
| | | | | | | SNLNKVLSSVITQKVKDHCD |
| | | | | | | TNNVMTEEQTGRRKNTQGCK |
| | | | | | | DQVIIDAVIVGQAAKKQRNL |
| | | | | | | DMAYIDYKKAYDSVPHSYLL |
| | | | | | | KVLQLYKVDGNVIKLMQHAM |
| | | | | | | GMWSTSLHVTDGKVVLRSRS |
| | | | | | | LNIRRGIFQGDTFSTLWFCL |
| | | | | | | AMNPLSRTLNQQCNFGYLLK |
| | | | | | | SEEISTRITHTFFMDDLKLF |
| | | | | | | AETVQKMHHLLKNVQGFSND |
| | | | | | | IKMEFGIGKCRSIHLHRGQV |
| | | | | | | LDADSFRANEQEEIRHMVQG |
| | | | | | | ETYKFLGFLQLRGIHYAVIK |
| | | | | | | KELQDKFLHRVSCILKSFLS |
| | | | | | | VGNKVKAINTFAVALLTYSF |
| | | | | | | GVMKWSNTDLEALERTIRVV |
| | | | | | | STKHQMRHPKASVERVILPR |
| | | | | | | KIGGVGIIDIQALCISQIHQ |
| | | | | | | LRSYFVESQNRHELYRTVYK |
| | | | | | | ADHGLSALHLAQQDYQLNCN |
| | | | | | | IKTVDGKGATWKQKELHGTH |
| | | | | | | THQLNLEHIDKVSSSTWLVR |
| | | | | | | CDLFCETEGFMVAIQDRVIA |
| | | | | | | TWNYRRCILREDVEDRCRKC |
| | | | | | | NSGGESIEHVIAGCPVLAGS |
| | | | | | | AYLDRHNDVAKIVHQQLALR |
| | | | | | | HKLVERFLPCYRYLPDPVQE |
| | | | | | | NDCIKLYWDREIITDILIRA |
| | | | | | | NRPDILVYEKRKKRATIDID |
| | | | | | | IAVTLDHNVQTTFSTKVMKY |
| | | | | | | HDLAEELKQTWYLEDIRIVP |
| | | | | | | VIISATGIVPMALLRSLDEL |
| | | | | | | ELQRELPRIQKAVILRTCST |
| | | | | | | LRRFLNPYN |
| | | | | | | (SEQ ID NO: 1496) |
| R4 | R4- | CADV0 | Bursaphelenchus | GGGATCCTGGGTTCCTACTA | TAAGAAAAGCATGAAATAAT | MTCNNAVVFPPADGNPAGTA |
| | 1_BX | 1008175 | xylophilus | CCTCGCTCCACCTCCTCGCG | AAGAAATCAGATAAGAATAA | DRNFAIRFPSSEPPGPSGIR |
| | | | | ATGGATCCTGGGGAAGTCTC | CAAGAATACTAATAAGTATA | PSEPLDGRTGIGDVEHAQAG |
| | | | | CGGACTGAGCTAAGAGAGCG | TCATGTAACTATGACAAAAA | NGGFLVDVLEYKEAHRYGSK |
| | | | | TTAAAGTAGAGGGTGACGGC | GAACGCACCAATAAGAACAT | CEFCYVQTKGTVCSKPRTDA |
| | | | | GTAAGTACCTCCAAGTTGCG | GCTTGAGTGGCCAGCTCTGC | WLKCEILFLLHHAYTANQNK |
| | | | | GTGGAGCGGAACATCTACTC | AGGCAAAAGTCGAATTTGGA | SIELAESAFRRAGITRRSKA |
| | | | | TTCGGAGAGAGGGGAAGCTC | ACAGCCGGTAATGGAAGACC | TIAKRWSLIQRGKGTDYKEY |
| | | | | TATGGCGGCGTTAGAAAGGT | TGCAACAAACGTGGGGTAGC | WDEYFEKFRYECNPTPIVRR |
| | | | | TGGACTACGGCAACGCCAGG | AGGCAATATGTAACTATGAC | KRNRLAAGLQSPSSVPNGYE |
| | | | | GAGATGGGGAAGGTTCATCA | AGACCAAAACTCCGAAACTC | FERKRTCETPLDTKASSLPL |
| | | | | GGTGATACTAGTTCGCTACT | TGGTAATGAGCCCGTGCCCC | ICNLLTGIVGVENVEENMSV |
| | | | | GTCATTCGATGTATCCGGAA | CCAAGCATGTGGTCTCGTTC | ECTEPKELSGTANSSVPGLA |
| | | | | CCATACTCGCCAAGTTGTGA | GATGTAGTTAGGAACAGTTC | EGVYERRHNNVNEPAAGCPQ |
| | | | | ACTATGTGAAAGTCTGGATC | TCTTTAACCCGTGATGATTA | DVPVANNLIDSPTTNDRLEA |
| | | | | CAATCCAAGACCACGGGGCG | CGCCCTGTCTTAAATGGCAG | EFKAQLDRAERSYMRRRLPR |
| | | | | CAATTAAAAGGTGTGAAGCA | GTGCCACCAAATACCGAACA | LKNLSPDERMWIGTTVERLR |
| | | | | GCTTGCTGGTGATCACCACG | CTCGTTGAGGTATGGTGGTC | LETVSEPVCEQWRLANAGLY |
| | | | | GTGGTACCTACACCGGCGGG | CGAATGTGAAGCTGGGAGTA | AAIRSIAVMRPLDAAREAHK |
| | | | | GGAACATCTTTAATGCCGAG | CAATTTGGTACGAGAGCACC | TWLLNMKMTERKLRQQIGWV |
| | | | | ATGACCGCGCGAATAATAGG | AGCGCCCCCGATCTAAGTGA | ETTRRTKNEARTERQEIVYR |
| | | | | GAGCCGGCAAAAGCCGAGCG | TGACGCATGCGTCGGAACAA | KVAKLRRERFPEMDLDSVSV |
| | | | | TAAGTGGAAAGGATACAGAA | TGAAGACGGCTGGCAAACAT | HLKRKLELLKGRIQVRTAER |
| | | | | ATTTGCTCAAAAGTATACCA | TCAGGAGTCGCAAA | LRRDTREAAGPYGKTALRGQ |
| | | | | ACCCGCCACTTATAAAAGAC | (SEQ ID NO: 1375) | GFAPNVKDATQYWSGLAQPS |
| | | | | CGAGAAAAGGGTACCACTAG | | GQKCSENSAILSDWKELVEC |
| | | | | AGCTCATTATAAAACATCT | | NLSSLPDQMEPLVVQGISRA |
| | | | | (SEQ ID NO: 1252) | | SPWKSPGPDGIFNYYWRQDF |
| | | | | | | IVDWLKQLMLDSLRTGHYPW |
| | | | | | | KLSSGRTVLLYKDGDPTKAE |
| | | | | | | NYRPITCLNGCFKMINSVVS |
| | | | | | | EVILKRVENTIALPIEQMAL |
| | | | | | | RRKVWACVESQIWDQIKQRK |
| | | | | | | LSDRTQKCKVAWVDFSKAYD |
| | | | | | | SLNHDAIKFVIGVLKLPTGI |
| | | | | | | NNYLLDSMQNWSTHLELKSS |
| | | | | | | GKVVRGPSYPIKRGVLQGDS |
| | | | | | | LSPTLFVVVTSIIVRHIKTI |
| | | | | | | ESSDIQMYMDDIKLYGKDQE |
| | | | | | | TLTRLIKELQTVSNKLGLCM |
| | | | | | | NLKKCAILGDDLPEEINGIE |
| | | | | | | HLKESYKYLGVPQREITQVR |
| | | | | | | ATMAALEKKILTEVDTSLGA |
| | | | | | | AELSYRQRISRVNSKIAPLV |
| | | | | | | RFVVQSMLVTPRDVLKVYNR |
| | | | | | | LGGIDVEIRRRLVKYEIRYK |
| | | | | | | KSNVARLYLDRKVGGIGFVN |
| | | | | | | LCRIMVEAVAARAVYCRLAP |
| | | | | | | SFNEFQDFLAEQNTSPITAA |
| | | | | | | QTILDKCGINIELSTSTLGD |
| | | | | | | VKKIVRNHYHELWLTAWKNT |
| | | | | | | GLYKRWENDHVDIKRSSLWI |
| | | | | | | NRGNLSANNARIGIGIQDNS |
| | | | | | | IFCRGFVGNKCDTKYCRLCG |
| | | | | | | DGIESVSHIVTGCPTHRTNL |
| | | | | | | YIERHDCVARNVYAYLAIRY |
| | | | | | | GIPVPHYTQRVKTIEKNGDQ |
| | | | | | | SVELYWNYKFPCTRALEACR |
| | | | | | | PDIVLIDKVSKRTHIIEVAV |
| | | | | | | SWRGRLQEMVDRKVYKYTVN |
| | | | | | | GEYEADGSSRGWNIVRELND |
| | | | | | | QYGFPVEVYTLVIGAGGEIL |
| | | | | | | PCTVKDVERLTGGAATDNLI |
| | | | | | | ERMERSAVLGSCRIIKRHLA |
| | | | | | | L |
| | | | | | | (SEQ ID NO: 1497) |
| R4 | R4- | — | Heterodera | TGGCGATACTCGGAACCTCC | TGAGGACTCANAATTGACAA | MISCDLERETLTQMALFRAR |
| | 1_HG | | glycines | GGGGAGCCTGGTAGGAGTTG | TACACCTCAGA | SDKTPTHAGIPAPDEVREGG |
| | | | | GCCTACAGGTCGCGAAAGTC | (SEQ ID NO: 1376) | CGQNRTNPAAPRGKAAAIQR |
| | | | | CCTAGGTGCTGCACGGGTTG | | QNGITIPIXACAQSGLVRTQ |
| | | | | CGCTAATCCGAGGGCGCTGG | | RVQQWSAVEESALKDVVVRN |
| | | | | GTTACCTTCCCATCGGCCAA | | TDDRGLINWAKGVLPEWQRL |
| | | | | AAACGTCTGGGCCTTCTTAG | | CQLNPTMYMARSSPSLSNKW |
| | | | | CCGCGGGTCCAGTATTTCTG | | ASLRRTHVGPGCPSKEGSGP |
| | | | | TTGAGCCTGACAGTTCTTCC | | SQDLSDVKIQPARLAHDTVA |
| | | | | CGGATATGGCGAAAGATTAC | | ELPQRTVPCGTDGHGVIDSD |
| | | | | AGGGCGGTATTTCGTGAAAC | | ETETALAEVSRSSPFGEREP |
| | | | | CTAAAAAWGGTCGGGCCGAA | | LDLGATERITRKRLRNAVRD |
| | | | | TGGCACGGACAGACTCACTT | | VVPPRKRRVPSTPSRKEQDL |
| | | | | CGGAGTGAGCTCG | | VPEVDGPAPTDVLTHPPTES |
| | | | | GGGGCATCCGTGTGTTACCC | | EPEPMLDPLSLVQLVRPQLG |
| | | | | CGCTGCACCACGCCGAAGCT | | RAMGWAAEEMELGNVVMDVE |
| | | | | GTCATAGCGAGCCCGAAGGG | | LKREFNREVRRVGRTPPDQM |
| | | | | GAATGGCCATGGAGACTCCA | | YKRGAGPPLPQKREPERVAL |
| | | | | GCCTCACCCTGTAACTCGAA | | LEQLIAARVERGINRGLDWF |
| | | | | CCTAAGTCCAGGCCCCTTTC | | LELNVAVFAAARVLSRRERV |
| | | | | TGGTGTTGGCTCGCACTGGT | | ETLADRLHINDSATLSEVSR |
| | | | | TAGGAACACGACAGTCTCGT | | RRAKAERKLRCAREQPWMSR |
| | | | | GTAATCCCACACGCACCGAA | | RIRXLGVRVERLKQLADLVR |
| | | | | AGCCCTAGCCCTCGTAGGCG | | QRIAGRGNRSSYEGPRRRFR |
| | | | | AAGGCTGCGTTGCTGGTTTC | | LRPSLRSVTEAPVNPPLNGN |
| | | | | AGAACTGTGAGCWAGTGGGG | | EVYTFWHSLWAQSLRANTDD |
| | | | | TTCGGATGGCCGAGTGTACC | | CQLREFKNQLSAARHTDLTS |
| | | | | AACCTGCTTGCTAACAGGTA | | VGTSSLVQMFSAALRKMKKG |
| | | | | GCATAGAGTAATATGCTAGT | | KAPGPDGIRAAWWGVFRRIA |
| | | | | AAGCAGGGCACGAGAAAGGG | | PYVATWVVRVIRGAEPVANW |
| | | | | CCGTAAAGGCTCCGGCTATG | | ICNGLTVLLPKSSDNADPSN |
| | | | | AAGGACCTTGCGACCACGCG | | YRPITCLNTCYKLFTAVIAQ |
| | | | | TGTGTCTCCCACGTGCGGAT | | ITASYVDVLGGLPRQQVALR |
| | | | | TCTTGAAGCCAGAGTCTTGC | | KGVWGTSVSLMIDALTVADA |
| | | | | ACTGCGCGCAGGATGGAGCC | | RRAKRPLGVCWFDFKKA |
| | | | | TGTGCAACTCCTCCCTCGCT | | FDSVPHNLIRWILRVIGLPP |
| | | | | GATCGCAGGAGTGGAGGATC | | VILSVIVSVMDQWATRLKIG |
| | | | | ACCACTCTTTTTACCTTGCT | | GKVMPKTIPVRTGVFQGDTL |
| | | | | AGCTTGGGGTACCACCTTGA | | SPLLFCLSVWPISFALDQFP |
| | | | | GCTGGGGCCGGCCTTGCTAG | | QYQFRCANHLQQGFSVGHVF |
| | | | | CTTGGGGTACGACCCTTTGA | | YMDDLKCYCPDREVLTAVIQ |
| | | | | GCTGGGGCTGGCCTTACTAG | | QVQKSASALGLTIHYKKSAW |
| | | | | CTTGGCGCGCCACCCTTGGA | | LDQDGGKSGKAVLGVPXLVG |
| | | | | GCTGGGGTGGCGCAAGATCA | | TYKYLGMHERFMIVSKDSLE |
| | | | | CTTGTATACGGTCTAACCAA | | SVRGKFMGRLKTLWTSKLTF |
| | | | | TACATTTGAAAAGCGATCAA | | GQAMLGTKSXCMPVVRYVLQ |
| | | | | AGCGAA | | NLFLPKSEFNQTRLVLREWD |
| | | | | (SEQ ID NO: 1253) | | RQIRDLLDECNIRQVFRSKT |
| | | | | | | ELYVSREEGGWGLPSMEDAL |
| | | | | | | EEEVVTKLAILVARQETEPL |
| | | | | | | FRVCEALERKRCPTPLSLGL |
| | | | | | | QILKDWGVGVELQGRTLLLN |
| | | | | | | GNTVGPSQATRKLTGELVLR |
| | | | | | | REAERLSRWRSKVKPGCGMT |
| | | | | | | GGAWRDVPGIDVHLSNRWLV |
| | | | | | | KGALSPTVVSNSLAIRANTV |
| | | | | | | ILRGSGGGYTKGTLLRCRGC |
| | | | | | | GNTGETRRHIVSACSLGRQK |
| | | | | | | GAASRRHDNVCRILVRAICH |
| | | | | | | KLNIEPPNSANFPHVVVLEG |
| | | | | | | SGAKMWIDFPFVVPHKIRHT |
| | | | | | | RPDIVVLFEWNGVRRLSVIE |
| | | | | | | VAVSDVANMQTQHIRKSHRY |
| | | | | | | GTNSTEPFVAGVTPTYRNDC |
| | | | | | | LAAQLRAKFKAQQVDVIPII |
| | | | | | | VGTTGETLDGEFGRIRKGLP |
| | | | | | | MLTKLQMPRLWSEIQRAVIL |
| | | | | | | GSYRILVEHLALPKGGA |
| | | | | | | (SEQ ID NO: 1498) |
| R4 | R4- | — | Parhyale | CCGACCGCCAGCGGGATAAC | TGAGCCTTAGGTCGCGGGAT | MKMSHNRDTPSNGVKGTSVR |
| | 1_PH | | hawaiensis | TGGCAAACCCTGTCTCGACC | GTGACCCGGCGCCAGAGTGT | LGTSLVRSPVGEAGAVRERG |
| | | | | ACCGGCCCGTGAATCCATCG | AGAGCTGAACATCGCTCAAC | THPSESVSQDSDASVNATGE |
| | | | | GGGCGTATGAGTCTGACACA | CGATCCAATTTGGGTCGTGA | GSVREQAPLSPPGAEEATVP |
| | | | | GGGGGGTGTTTAAGGTGACC | AATCCCCTCGATAATAATAA | TQRRTRHKWSREDRVVLWEC |
| | | | | CTGTTGCGAGGAAATGCGCA | TAATAA | FVASKREGPGYLKRLKQLWD |
| | | | | GCAAAAGCCGGATGAGCCTT | (SEQ ID NO: 1377) | ERGIPGNFPQASLSGQIRQI |
| | | | | AGAACATCGAAGGCCAACGA | | CSKNLLSEEERLQIAARMEA |
| | | | | CAACCTGCCGAAAGACTGGC | | QVASPSADEPARQVPTRPVT |
| | | | | GACTAATCCAGTCAACCTCC | | PPRSPPVEPARRPSIPSEET |
| | | | | TGTAGGTCACCGGCTGGTCA | | PDLGAVPSEIDSADPNRSPS |
| | | | | TGCTGAATCTCAGCTTAACC | | RGPRHLPAHNMSQSESEDDV |
| | | | | AGGCGTACGAACTTACAGTT | | TDPDVSDQQRSDSLEPRDLL |
| | | | | GGAGGGTCGAGCACCCCTGA | | RNSSVESTPGHPNQELSDTL |
| | | | | TGGCTGAAAAGGACCATCAA | | LSNYVPSEIDSDDPNQSPRR |
| | | | | AGTCGAAGGTAGCCAACGAG | | GPRHLPAHDMSLSDSMDEET |
| | | | | AAGACCAACGGCTGATTCAG | | EPDLSDQQRSDLLELRDLLR |
| | | | | GCGGAAGAGTCAACTCGTTG | | NSSVETTPKGHPSLRHLPEP |
| | | | | AATGCGTTCGACAGCTTGGG | | KIRAAAFRVNSVIGKIHTNN |
| | | | | GTAGATGGAACTCCTAAGCC | | ITETNALIKAGADLAVRILE |
| | | | | CTGAAAGGCAGTCCATCTTC | | VQPRPQRTQRKKDPPWKHRL |
| | | | | GCAGACGCTAAGGTGCCCCG | | EKNIAEIRKHLSWISEWRRG |
| | | | | CCGCCTGAGGGTTATCAGGC | | NLHDEEKKTLLESRYRCLEV |
| | | | | CCCGCCGCCTGAGGGTTACC | | GLTNLEDTLKQRLSAKRSKV |
| | | | | AGGCAACC | | RRFEARVAGFHQNQLFNTNQ |
| | | | | (SEQ ID NO: 1254) | | KRLYQTLRGEETSSDSPNAE |
| | | | | | | ESIRFWSDIWSKEVRHNNTA |
| | | | | | | EWLHDVKEKNVAADPDLTIT |
| | | | | | | SQQLKKQLSKTKNWKAPGPD |
| | | | | | | MVQGYWIKTFTSLHSRIAAQ |
| | | | | | | LNHCLQRGTVPTWMTTGKTV |
| | | | | | | LIQKDKAKGTEVSNYRPITC |
| | | | | | | LPLMWKVLTGIIYERVYQHL |
| | | | | | | DSKKLLPDEQKGCRRNTRGT |
| | | | | | | KDHLLVDKLLTKDARSKKKN |
| | | | | | | LSMAWVDYKKAFDMVPHSWI |
| | | | | | | LECLDIYGIAGNIRNLIATT |
| | | | | | | MPNWKTQLTSANKHLGEVSI |
| | | | | | | KRGIFQGDSLSPLLFVLTMI |
| | | | | | | PLSETLNKAGQGYNYSRTMK |
| | | | | | | LNHLLYMDDLKLYAKSKDQV |
| | | | | | | EQLLNIVHQYSQDIKMQFGV |
| | | | | | | SKCGVLNIERGEVTASEGIT |
| | | | | | | IEEGTIKDIEEAGYKYLGVM |
| | | | | | | EYNTILHRTMKDSIRKEYLT |
| | | | | | | RLRLILKSHLNGGNTIKAIN |
| | | | | | | TWAVPVVRYSAGIINWTKKD |
| | | | | | | CTDMDIKTRKLMTIYRALHP |
| | | | | | | RSCVDRLYINRREGGRGLIS |
| | | | | | | VEDCVEAEKRALSQHFRESD |
| | | | | | | DPWARCLVEAKLLKETETAD |
| | | | | | | QFKERRRLDRTNKWKSMKMS |
| | | | | | | GQYLEAVQDKIVPDSWNWLL |
| | | | | | | RGELKRETEGTILAAQEQAL |
| | | | | | | RTRYIQNKIDKRNVPSTCRI |
| | | | | | | CRSSDETINHVISECGVLAQ |
| | | | | | | KEYKRRHDKVARHLHWTLLR |
| | | | | | | IHNFPVSERWYEHEPAPVVE |
| | | | | | | NEAVQIYWDKRMETDRVLHA |
| | | | | | | NRPDIVVKDKQEKSAKLIDI |
| | | | | | | SIPFDSRIVDKEAEKKEKYR |
| | | | | | | DLAIELQRLWQMKVDVVPVV |
| | | | | | | IGALGAMSKNLKTALRELKC |
| | | | | | | GHLHPGTLQKSALLGTAHII |
| | | | | | | RKVL |
| | | | | | | (SEQ ID NO: 1499) |
| R4 | R4- | CADV0 | Bursaphelenchus | GAGGATCCTGGGTTCCTACT | TAACAAGTGTAATAAAAACC | MVFNNCKPKHLCPAIRPTGQ |
| | 2_BX | 10090 | xylophilus | ACCCTGCTCCATCTCCTCGC | ACCCATGCGTAGTAAACCGA | QETNGGSEGTAEPTAGPSRP |
| | | 48 | | GATGGATCCTTGGGGAAGTC | TCAATTATCTAGCAAAATCG | AVSEDAAQPVPLFEEGEYIR |
| | | | | TCCGGACTGAGCTAAGAGAG | CAGGTCAGAAGACCAAAGAA | AHRDKTCPYCEVLWIGARSS |
| | | | | CGTTAAAGTAGAGGGTGGCG | CCGACCCAGAGGAATAGGAC | KARSDSWPLCQILYLMKRND |
| | | | | GCGTAGTGACTTCCAAGTTG | CAGAGCTGAAACTCTCAGAT | DLRGQRTRYPLLESSLRAAG |
| | | | | CGATGGGGCGGAACATCTAC | ACGCCAACGGTCCTAATAAA | IARTKFAIIKCIRNVLRDRY |
| | | | | TCTTCTGAGAGAGGGAAAGC | ACGTCGTTAAGTAAAGCATC | VPNGPYSEHWKIYRANSGEV |
| | | | | CCTATGGCGGCGGTAGAAAG | GTTAAGTACAAAACAAAAGC | PQGATITKGKRSARVAGLPS |
| | | | | GTTGGGCTACGGCAACACTT | ACTGTAAACGCGAGGCCCCC | PSQSGHHTKRIQAGTGIETE |
| | | | | GCCATGATCAGATTCGATCA | TCTTTGCCAAACTCCGGTAA | TTVTETNTTPEVSHEHRDPC |
| | | | | AAATTAGCCTCTGGGGCTGG | TCCTCGTAGTACGGTGCTTT | GEPETSAANVDKVTELTEDG |
| | | | | CAACCCTACAACGGATTGTA | TTCCCGCTTCACGAATCAGA | SETRGTANVANGGVSVSDPG |
| | | | | AACTGAACTATGCTATGCAA | ACGCTGCCAGATCTTGTCCG | RKRQSSSQNRGNIETTNPEL |
| | | | | AATGAAAATAAAAAATGGGG | ACATGGGCCGTAGGGTTTGG | VGMWEDMFGVQLDGAMRTTE |
| | | | | GCTTTACAATCTAAGGTGTT | GAGTACCAGCGTGGGGCGGA | RPRLPKLKHLSEPERLWIRA |
| | | | | GGCAGATCACGAAAACTGCC | GAGCGTACCTGGGTACACTG | KLEQAWLQCVSYDVEQQWLN |
| | | | | CGTCGATGAGGGTGAGATAA | CATAATCGGGTCTCAGAAAA | ANAVLYAAIRSVAASRPCKE |
| | | | | CATCCTACGGAACAGCCCCT | CCACCTATGGTTTATTATTC | AREAQKTWLDNKKKDEAKLR |
| | | | | GCTGGACCAAACCAAATCAT | TGTCTCCCATCTGCAGGGTA | RLIGRISSVHSMPKGDRTPR |
| | | | | CCACAAATTGGAGGGTTTTC | GCTTTTCGTTGGGCCATAGG | EKKLVKNITKLKNTHYPDMD |
| | | | | TTGGTAGTTTCCCTTGGCAC | AGCCTAGGGGCAAGAGTGCA | WGGLLNHFKVKLSQLKEKIS |
| | | | | GTCTTGTTTCATAAGCCAGA | TGTAGTCTTCAACGGCCATG | VRVAEHKRKVNRNAAGQYGK |
| | | | | ATAAAAACGATACCATACAG | CCAGGGAAACTTGTGAGAGG | SVAGSAGLAPDVVSATAYWS |
| | | | | ACATGAGGCTGGGTACCTGC | TGAGGGATAACTAGCATCAG | GLAQPGPKKFKASSPIFQTW |
| | | | | CAGCCGCGACACGGAAAACC | ATAATATCAGTCATGAAATT | KDDVAKNLNTEPVLLYPIIK |
| | | | | GGTAGGTGCAACCGGAGACA | AGTAACAACCAACGTTCACC | ECIRKPSPWKAPGPDGIYNY |
| | | | | GCTAGGGGAAAGAAAATAGT | GTCGTTGGCAAAACACCGAC | YWQQEFVAQWIQTLVKRTLD |
| | | | | AAAGTGTCGAAAACAAAACA | TAACGATGCTAGTTAGAAAG | IGRFPTALMCGRTVLLFKSG |
| | | | | GGTAGCCCCTGGCTAGAGGG | AGTCGGGTCTTCCCAAAGTT | DKSMPQNYRPITCLNGCFKI |
| | | | | AATGGGACATTGTCCGATTA | AGGTGCTTGCACCGAAGCCG | TNAVLTKVILQRVQDTCALP |
| | | | | GGTTGCCTTGACCCAATGAA | ATCCGCTCTACCCACAGCTC | REQMALKPKVWSCMEAQLRD |
| | | | | AGCCAACCGGGTTTACATTA | TGCCCAGCGTT | QALQSEIGDDCKTAWIDFSK |
| | | | | TCGGTCTACCAAGGGCAATG | (SEQ ID NO: 1378) | AYDSLDHDALRFVIQTIALP |
| | | | | ACCAGAGAAACTGCGACTAT | | AGMEEYLLKSLDSWRTQLVL |
| | | | | GCCGTAACCCTTCGCAGATT | | SDAGKVVSGKPYPIKRGVLQ |
| | | | | GCCGATGAGAACCATCGATC | | GDSLSPALFVLTTSPIVAHL |
| | | | | GTAAGTCGAAGCCAAGCGGA | | QRTCPTGRIQLYMDDIKLYG |
| | | | | TTGACCAGTGGAGGGTTATC | | KTESDLCMLIKETQRVANKL |
| | | | | CCGACAACAGC | | GLNINLKKCALFGKSIKQSI |
| | | | | (SEQ ID NO: 1255) | | AGFDPLGDRTYKYLGIPQRD |
| | | | | | | VADIKQAYDELKAKTVQTIG |
| | | | | | | ETMACDYLTTRQVINRLNSK |
| | | | | | | IPPVVRFVTQSALCSAPMTR |
| | | | | | | GLYNKITELDNVSRAELRKV |
| | | | | | | LIYKATNVSRFYLATKEGGF |
| | | | | | | GYASLQQVFVEAVVSRAIYC |
| | | | | | | LRAPSLCDIREFILSKFDPV |
| | | | | | | KVARIALARSKIDMDIERMD |
| | | | | | | MASATRTIRQHYQAKWKTLF |
| | | | | | | QQSKLYQKWVQHKIDIPNSS |
| | | | | | | RWLQRGEISPRNCRIAVAVQ |
| | | | | | | DNTLLCRGFVGSKDPNKQCR |
| | | | | | | LCNAGIETASHIVTECSTHR |
| | | | | | | VHMYIERHDSVARNIYAVLA |
| | | | | | | KNCGFWIPHYSQKIPTVKIT |
| | | | | | | KSYELYWNYKFPCTQALEAC |
| | | | | | | RPDIVLIDRAKKRILVVEVA |
| | | | | | | VSYVTRLEQMTQRKLYKYGV |
| | | | | | | NGEYQADGETRGWNICRELV |
| | | | | | | QKYNMRIDLCIVVIGACGEI |
| | | | | | | LPCMVKEIEKISKVSGRQLL |
| | | | | | | ERCQRSAVLGTVRTVRRHLA |
| | | | | | | N |
| | | | | | | (SEQ ID NO: 1500) |
| R4 | R4- | ABLAO | Heterodera | TGTGGCGATACTCGGAACCT | TAGTCGTAGCCCAGATGTCG | MRKSFLQHIPELSSHIAMSV |
| | 2_HG | 10003 | glycines | CCGGGGAGCCTGGTAGGAGT | ACAGCCCCTACACCGGTAGA | PARNYPKMCSLAQGSSGTLS |
| | | 89 | | TGGCCTACAGGTCGCGAAAG | TGGAAGGAGGTATGTATCTA | HNGKGVAMHRCPSDDCAGKD |
| | | | | TCCCTAGGTGCTGCACGGGT | AGCCCACGGCAAGCCACCAG | PPQRGSQKGNLRSVRWTPSE |
| | | | | TGCGCTAATCCGAGCCCCTT | TGGAAACGGTGACCACCTCT | EKAVFEYWSRLEQHAMLNGS |
| | | | | CCGGTGTTGGCTAGCACTGG | GTTCGCGGAAATGCCCCGTA | EARGTCAITRSQFLIHWDGE |
| | | | | AGGGGGGGGGGTCCAAAGAA | GAGTATATGAAGGTCGGAGC | RESRSLSDGVPEYPMRTERA |
| | | | | TACGTGAAGCGGACCCTGTG | ATTGAAGCACAAGTGAGAAC | YYERVRLLRQRGWQWDCANE |
| | | | | TTTTCTCTGACCTCATACGG | CCTGGAAGTATGGTGGTGA | CLVIGQCAEPCRKPNVVAIK |
| | | | | GTATATCCCGATGATATCTA | GCTGGT | ADKGMKRSLVKGKLLSLPHV |
| | | | | TACAGTGTTCATTTTCATTT | AACCTCGAATTCCTCCTATG | MGEINQVSVQVEVPLPSVPA |
| | | | | CTTAACCTGCTTTTTCCTCA | GGTGCTTGCGCCCGTAGGTC | SVPQVEGVESKGFTETEPSN |
| | | | | AGAGAAATATGACCACATTC | ATTTGTGTATGTAGGGATGG | KPSLEGNPAEEGLRKPERVN |
| | | | | GTTTGCCATTTCGAAGGTGC | AAGGAATCTCGATAGCGCAA | VPVHGIISDSERKDLKDRFW |
| | | | | GACTTTTGAGGGAGTTCTCA | ATCGGGATACCGCACTGGCG | SAYKTAKRSVGFRPALKIEP |
| | | | | GGGACATCAAGCTGTTCATG | ATCATGCTGCCAGTGGGCCC | NRVNRAQWEVLDSCVVEVLK |
| | | | | GACGGCTTGACGGCTCGTGG | TGCTGAGTTGGGCGGGTTAG | KRETSNGYRGCVLRHLNVAV |
| | | | | CGGCACGCAGCCGCGCGGGC | CAACCCGTCCAGGGACGCAG | YAAGYVLAEGNKERRQVIRR |
| | | | | CAGTTAGGGCTGGTGCCAAT | ATGCCAAAAGCCTGGTGACA | QSAEWLLRQKSEINNIRRHI |
| | | | | GAGGCAGCGAAGAAGTCTCT | CTCTAAAGGGAGTCTACGGC | GWITDELTRRRTGKNPTSRQ |
| | | | | GAAACGCCAAAAGCAGCGGG | GACGAGAACATCCCCTAAGT | LSNFAWLQRRYQVLGKPVRE |
| | | | | AGAAGAGAGAGAAAGCGGGG | C | TRDLEVQRERLVSRLRLAQD |
| | | | | ACGGGTTAGAGATAATAGCA | (SEQ ID NO: 1379) | RINSSMDREERVRKRMLPLR |
| | | | | TGATTGACGGCGAAGCAATA | | RKLEEPLGDSKLDTKQARTF |
| | | | | CTTTGACTTCCAGGTACGGA | | WASLIGERKEFGKIPELENW |
| | | | | GGACGGCGGCAAAAAGCAAA | | AEEVRSKVTDGQGFASDHVD |
| | | | | AAGGGGACGAAACCGATGGC | | QTVWKKILGKARPLKAPGPD |
| | | | | ATTGCCAAAGGGGCCGAAAC | | GIPNLLWKRLPSANQALFKW |
| | | | | CATTGAGCTGGACGCTGATG | | LMGIKRKQLSVPSWLTKGRV |
| | | | | GGCCGTCTGCCGCGCAAAAG | | VLLPKGGDPVDPANYRPIAC |
| | | | | GAGGGGGGAGCCCCTCCGTC | | LNTQYKLVTGMVTAWVSEHL |
| | | | | TGGGAAGAAGGTGCGGCGCC | | TTYSILPIEQRAMVSGTWGC |
| | | | | ATTCGTCCAACAAACCGGAA | | THAMVIDRAITSYAEATGLP |
| | | | | TAGATCTTGATGATCTCAGC | | LYVGFVDFAKAFDSVSQPWI |
| | | | | AATTGATCATATTGATCTCT | | RYALKVAGVHKRIRCLIGIL |
| | | | | TTTTCCAGTTGTTGCGATAA | | MKCWSVRYEVFKSGRVLRSA |
| | | | | ATTATCGTGCATTATTTCTT | | PLAVKNGVLQGDTLSPLLFC |
| | | | | CGATTTCTCCAAAGCTTAAC | | LSVAVVSSAVGSLFDFEVTI |
| | | | | TCCTTTCCTAATACCTACTC | | PGRGVMQQQNHLFYMDDFKG |
| | | | | ATGTATACGTTAGTAGGCAT | | FAPSEASLTRMLVTLERTAS |
| | | | | GTTTTATGCAGGTAAAGATA | | ALGLKINKRKCALVHPRERE |
| | | | | GACCTGGTGCCCCCGGGCGA | | NEETGSDIPVLGLRDTYKYL |
| | | | | CTTGGGATGTGGATGATGGT | | GIEERFGIVFEDAWDRVRTK |
| | | | | TGGCGGAGAGTTCTGATGAC | | MFERMRTLLCTEHTFGELRA |
| | | | | GCCGTAGTTCCGGAGGAACA | | AFASTIAPVARYLFLNVIVG |
| | | | | GTTCCTACTAGTGCCAGCCT | | GPSWSETLTKAKDMDLRIRR |
| | | | | GGGCTAGTGGAGCTGGTCTG | | LLWERRDNEPGWRFKHCSAD |
| | | | | GCGAGTGCTTTGCTCGTCAG | | RLYLRVQYGGLGFVSVEDTL |
| | | | | ATAAGGGGTGGTTGGGGTGG | | SESIIYCWAYVQCRPELELA |
| | | | | TACCTCTGGAATGATGTGTC | | RELFGTLNRSARSGIKQSIA |
| | | | | GGATAAGCACTCTGCCTTAT | | KGARKVFRSYALLSKNSAQR |
| | | | | AAAGCTGTCGTTCTGCCCAG | | VSDLDGDASPGFRVGEMIFM |
| | | | | GTTTCTCCTAACCAGGTTGA | | EPTRGARAIVKILRKENDSR |
| | | | | ACTTGTAATGAGCCTTTGGG | | RLAAWKGRPMGGRVVSLPEL |
| | | | | TATCTGGTCGGGGTCTGCGC | | DQVHSYHWLIRARIGRRSFR |
| | | | | GGAGATAGCTCGTGAGGAGC | | DCIAAQEGQLKARELMCPHI |
| | | | | TGTTATTACATTATTGGTTG | | NAKAKWCRRCGDGRVETEQH |
| | | | | AACGCTTTTGGGTCGTACTG | | ILSGCAWSRTGTMLDRHNGV |
| | | | | CACAGATAAAT | | VRQVHTALCRKYGLPVSSHV |
| | | | | (SEQ ID NO: 1256) | | VPLHAVIENEHAKILYDVAL |
| | | | | | | HTSPAGVLPREDGSTSYTGL |
| | | | | | | RSTRPDMVIFDKKARTILIV |
| | | | | | | EISVPWRENLVKQELIKWRK |
| | | | | | | YAINSMIEPLELAEAEIPGP |
| | | | | | | NLKHALGLAYGTSFPTVKVV |
| | | | | | | PIVVGSCGEVLPNITKRLSE |
| | | | | | | LGIPKRGIPSLLESIQRAAI |
| | | | | | | IGSGHVIRAHLSVPRSESET |
| | | | | | | (SEQ ID NO: 1501) |
| R4 | R4- | CACX0 | Strongyloides | CGTCAGAAGAGCAGGTGTTT | TAATTAGATTTATATGTGCC | MQKFSVPKDSSQIFLVDSIL |
| | 2_SRa | 10020 | ratti | TTCAAAGCAAAGACTTATTC | ACTTTACCTCAAAGATATAT | NKHICSTKNKVKDVIKRRSI |
| | | 06 | | TACGAAGGGGAAAGATGATC | TAATACTAACTTAATTATAA | IKTLICAAGLTLRKLVCGKL |
| | | | | AAACATGCAGATTTGGCTGC | TTTATTATGAATTATAATAT | GNNKYNSKINQLWKKERKII |
| | | | | AATGAAATAGAATCAAACTA | AATAAGTTTTAAAATAAAA | NCIEDLKHLIETNKRRHNFG |
| | | | | CCATGTGGTGACATCTTGCA | (SEQ ID NO: 1380) | KRLRNAKVSPSEMLKDYYNK |
| | | | | AATACCATTCATACACAAGA | | LRYIKNEITACLDEHKKAIL |
| | | | | AGACACGATATGGTTGTGTA | | RTKFKLTPSIKIISNIQNHN |
| | | | | CAATATATTAAAAAGACTAA | | DEEAELPKEEEFVKYYKELF |
| | | | | AAGAAAAGTATAAGTTAGAT | | TNKDGDDKETPHLDNWLKKF |
| | | | | GGTGATTTACAATATGGTAG | | SKTLIVDWTINDKEILEALK |
| | | | | ATCAGTATTTAATGGGAAGA | | YCGNFKAPGSDMVMKVCYKW |
| | | | | AGGAAAAAATTAGGATCAGA | | FKSAQNYLIRWIKSTWYGEY |
| | | | | TCTGGCCATAAGTTTTTGAC | | TINKKDTNAVTFMIWKRDGK |
| | | | | TGAACAACCGTTAGTAAACA | | PKNDVKSYRPISCLNCDFKL |
| | | | | ATAAACCGGATATTGTTATA | | LNKLIANKIYESIEKILPIN |
| | | | | ACGATGAAAGAAGGGAAAAA | | QMAVIKNKHGTCEALLLYKS |
| | | | | AAAGATAACGTACATACTAG | | LVQSMKFRRTKDVKEIWCSW |
| | | | | AGATGTCGATACCACATATC | | IDFSKCYDSISHKCLKKMIQ |
| | | | | TAGAACTTGAAGATGCAAGA | | SIKAPPIIHKLILDGIDSWN |
| | | | | AAGAATAAAGTATAAAAAAT | | ISICNGKNISKTKIPVKSGI |
| | | | | ATTGTGTGAGCTCCATGGTA | | LQGKVASSLYFVLLTGEISY |
| | | | | AAAATAACGAATGATAATGT | | ALNKEEQVPIETITPSNTLK |
| | | | | TGATTCGATAGCTCGTGATT | | INHISFIDDYQLYATSQKKV |
| | | | | TTAATCTACTAAATTTAATG | | EKLTIKLREIAEEMNLKLNP |
| | | | | GAAAGAAAAGAAAGGTGTAA | | QKCGIYGTDDLGKRLMLKES |
| | | | | GATAAAGTTTGGATCATTTG | | SLNFPYTSEYKYLGLVENSL |
| | | | | TATTTGGCTGTTATGGAGAA | | DLKDINIQLFKDKILSKYST |
| | | | | TATGTCTTGACTGAATCTGC | | IFESRLTTHQKRKVFNSTIS |
| | | | | TCTAAGAACACAGAAAATCC | | PCAAYYLGNLITNKCSIQEL |
| | | | | TGATTGAATTGGGATTCTCC | | LNECKKFDQMVRNQLVNQNI |
| | | | | AAAAAAGAGATGGATAGCTT | | KKLQVSNSRIYLPKEYNSLG |
| | | | | GATCAAAGAGTGTTCTTACA | | LNEIEIEVAANIIRKACYIK |
| | | | | GTTAAATGAATGAGACAGCA | | KRETLRGVDKLYIAMSKNGH |
| | | | | AGAATTATTATGAAACATCT | | RNTLSDALYITKKYSNFQIN |
| | | | | AGAAGGCGAAAAGAATCAAG | | WNIMGMVKDQNNILLDAKKI |
| | | | | ATGAAATCAGCCATTAATAA | | IENIKEKRRNLWLEHWKKGN |
| | | | | CTTTTATTTACCCAATTATT | | MTYANEAIKKEFHLPDLNID |
| | | | | TATTGCGTTAACTTGATTAT | | SKYLMLCYAGSEEQUIYNGH |
| | | | | ATGATATTTATTGTATATTT | | VSLVNQSSPSSRLCRKCNKL |
| | | | | ATTGTTTAATTTAGTTTCAT | | EETSYHVASVCEFHKKNLHL |
| | | | | AGTACAAATAAAAGAATATA | | MRHNSAVYHIITELCRIMKV |
| | | | | CTACGATTCTTTACTTTTAA | | KCTLRYPEASGIIKSGNMKI |
| | | | | GTTCTACGAGAACGTTGTTT | | AAGVKYTFGTAKIYHNKPDL |
| | | | | TAGAATATTTTAATAATATT | | VWYTPEVIYVIEVSISSLKN |
| | | | | TCTACTACAATTAAGTAATT | | AKSQMKMKTARYAVNSTKKL |
| | | | | AGAAGAAATCAACGAAAGCA | | ENFAALNNLKKGENFVEILS |
| | | | | GCTAAACTTACTCGCAAAAT | | HKANFKRVHFMPLVFCTFGE |
| | | | | TCGTTGATCGAGGCTGGAAT | | IPKETMKYLEKLNFSNEKIK |
| | | | | GGCACCAACTAATATACTAA | | TIASPIARYTGRTLKAHFTN |
| | | | | CCAACAATAGAAAAAAAAAG | | |
| | | | | AAGAACTTCAGTGGACTTCA | | (SEQ ID NO: 1502) |
| | | | | AATAAAATAAAATTATTGGT | | |
| | | | | AGAATTGTATGATAAAACTG | | |
| | | | | AGAAAATTTGACTAAAACAA | | |
| | | | | AAAGATTAGAGCAAATATGT | | |
| | | | | CATCATTTTCCTAATCATAC | | |
| | | | | AATTAAAGCGATGATGACGA | | |
| | | | | AATTGAGAGAATTTGAAAGA | | |
| | | | | GAAAAAAGGGAAAATTGTGA | | |
| | | | | AATTAAAATGAGGGAAAATG | | |
| | | | | AGGAAAAACCTGAGGAAAAA | | |
| | | | | TTAAATTTTGACAACTATGA | | |
| | | | | AGAAGCAAAATTGAAAAGAG | | |
| | | | | GAATTAAGTGTAAAAAAGAA | | |
| | | | | GTAAAACCAATTGTTATTGA | | |
| | | | | AAACAAGGATTAGGAATTTT | | |
| | | | | TGAAAACGGAAAAATTATTT | | |
| | | | | CTCAAGTTTGTCAACACAAT | | |
| | | | | CAATTACCAAAGAAAGAAGG | | |
| | | | | GTAAATCAACCAGA | | |
| | | | | (SEQ ID NO: 1257) | | |
| R4 | R4- | CADV0 | Bursaphelenchus | GGGTCCTCGGTTCTTACTAC | TGAGACCACCCATGCGCAGA | MISRSQADRPVEGQPVTAMS |
| | 3_BX | 10088 | xylophilus | CGTGCTCCACCTCCTCGCGA | GTATCCGAATCAGTGAAAGT | FHNLEPNNLYPENLRPTGSQ |
| | | 32 | | TGGACCCTGGGGTAGGCCTC | CCAAGTTTCAGGACAGAAAC | DANRGVADIAEEVTGPSGLV |
| | | | | CGGGCTGAGCTAAGCAGAGC | GTCAGATAAGTCCAAGAGAA | TNEEAARAPPLFVEGEYKRA |
| | | | | ATTAAAGTAAAGAGTGACGG | ACGAGAAAACAAGTTCAAGT | HCGGGKCHYCRVLWIGARSS |
| | | | | CGCAGTTGCTTCCAAGTTGC | ATGCAAGAGTTAATCAATAA | KARTDSWNLCEILFLINKCM |
| | | | | GGTGGGGCGGAACATCTACT | GAGAGTACCGTAAATGTATG | ELGNVRRIYSPLESSLKEAG |
| | | | | CTTCTGAGAGAGGGGAAGCC | ACCCCCCCCTTTGCCAAGTC | INRTRHAIVKCRLAVMRDRF |
| | | | | CTATGGCGGCGTTAGAAAGG | GACAACTGTCATGCAGGTGT | VDNAPYSEHWRLYNACAENR |
| | | | | TTGGACTGCGGCAACACTAG | CTCTCTTTTCACCCGCCATA | AVVVPMDSATTVKKRTARQA |
| | | | | CCATGATCAGATTCGATCAA | TGGACCAAACGCTATCCAGC | GLESPSQIGVAGKRVHEAET |
| | | | | AATAGCCTCTGGGGCTGGCG | CTCGCTCAGAAGAGCCTTAG | GTDRINAVIETNTTPLEDID |
| | | | | ACCCTATAACGGATTGTAAA | GGCTGGGGAGTACCACATGT | LSPETPEGLAELPSTVEIME |
| | | | | CTGAACTATGCTAACCTGTC | GGCGGAAACTGAATCTGGAT | LTEDGSRSRGTANDADGGVS |
| | | | | AGTAAAGACAGAACGGGGGC | GCGATGCATACCGGGAGCGC | ISDPLRNRPSSSQESRNVPE |
| | | | | TTTGCAATCTAAGGTGTTGG | AGCGAAATCACTTAACGCTG | QVDPDGELVWESLYGAQLRG |
| | | | | CAGACCACTAAAACTGCCCT | GTGCACCTCCTGCTATCGTA | AMRTTDRPRLPKLTKFSAAE |
| | | | | TTGATGAGGGTGAGATAACA | GTACTTCCTAGATAGATGAG | QLWIKSKVEKARLECVSYGI |
| | | | | TCCTACGGAACAGCCCCTGC | TAGGGTGGGCTAAAGGTAGT | EQQWLRASAVLYATIKTVAA |
| | | | | TGATCCAAACAAAATCATCC | CGTCTTCAATGGCAATACCG | CRPYNKAREAHKVWLENKRA |
| | | | | ACAAATCGGAGGGTTTTCTT | AGGGGTCTCGTGACAGGTGA | EEKRVRRIIGRIETVRTMPK |
| | | | | GGTAGTTTCCCTTGGCACGT | GGGATAACTAGTATCAGATA | GKRTDKQIRLARKINRLKRV |
| | | | | CTTGTTTCAAAAGCCAGAAT | ATATCAGTCATGAAATTAGC | SFPEMDWHGFLNHFKAKLDL |
| | | | | ATAAAACAATACCGAAGTAC | AACAACCAACGTCACCGTCG | LKKLISVRVAEHERKISRKI |
| | | | | AGAATGGCTGGAACCTAACA | TTGGCAAAACACCGACTAAC | AGTYGKSVSGQSGFTPDVVA |
| | | | | GCCATGGCACAGAAAACCGG | GATGCTAGTTAGAAAGAGTC | ATTFWSGLAQPGPKKFKKNS |
| | | | | TGGGTGCACACCGGAGACAG | GGGTCTTCCCAAAGTTAGGT | LIFQTWKDSVVENMNTEPVL |
| | | | | CAGGGGAAAGATTGCAAAGT | GCTTGCACCGAAGCCGATCC | LHPLIIECMNKPSPFKATGP |
| | | | | GCCGTAAATAAAGATGGTAG | GCTCTACCCACAGCTCTGCC | DGIFNSYWRQGFIANWVKSL |
| | | | | CTCTCTGACCTGAGGGAATG | CAGCGTT | IQRTIQTGEFPASLMCGRTV |
| | | | | GGACACTGTCCGATTAATGC | (SEQ ID NO: 1381) | LLYKNGDTAKPENYRPITCL |
| | | | | CTTATCCCGAAGACGGTCAA | | NGCFKMTNAVITKVIVQRVQ |
| | | | | GGTTCTATCTTATCGGTCTC | | DTCALPGEQMALKPKVWACM |
| | | | | CAAAGGGCTCTGGCCATAGA | | EAQLRDQALQSEIGNDCKTA |
| | | | | AGCTGCGAGGAAGCCGTAAC | | WIDFSKAYDSLDHDAIRFVI |
| | | | | CCTACGCAGATTGCCGCCGT | | ETLALPDGMEKYLLKSLESW |
| | | | | GC | | KTKLVLSNRGKVATGRPYKI |
| | | | | (SEQ ID NO: 1258) | | KRGVLQGDSLSPALFVIATS |
| | | | | | | PIVSHLKRVCPSGRIQLYMD |
| | | | | | | DIKLYGKSETELRMLIKEVQ |
| | | | | | | KVANKLGLQMNLKKCSTYGA |
| | | | | | | GLTESIAGFDPLGDRAYKYL |
| | | | | | | GVPQRSVADTNLAFGELEGK |
| | | | | | | VIRSIEETMACEYLTMRQVV |
| | | | | | | TRLNSVIGPLVRFVAQSVLT |
| | | | | | | SQAKVSWIYNKISDLDSKIR |
| | | | | | | AKLAQTGLRYKKSNVARLYL |
| | | | | | | SKSKNGIGLVNVQQVLVEAL |
| | | | | | | VSRAIYCLRAPSLVEIREHI |
| | | | | | | LTAEFDPVGAARTVLRRSRI |
| | | | | | | QLEIERVEMASAISAIKTNY |
| | | | | | | QARWMTKFTQSKLYQKWVHH |
| | | | | | | DIDLANSNLWLERGEISPQN |
| | | | | | | ARIAVAAQDNTLLCRGFVGN |
| | | | | | | RESEKQCRMCNMGIETCSHI |
| | | | | | | LTECSYHRAHMYIERHDSVA |
| | | | | | | RNIYAVLAKDHGLWIPHYSQ |
| | | | | | | PVSSVTKTPTCELYWNYKFP |
| | | | | | | CTRALEACRPDIVLIDRAKR |
| | | | | | | TILIVEVAVSYVTRLKQMVS |
| | | | | | | RKVYKYGVNGEKGADGESRG |
| | | | | | | WNMIRELSEVYNMKVNLCAV |
| | | | | | | VIGASGEVLPCTVKAIQSIS |
| | | | | | | SKTSSRQLLERCQRSAVLGS |
| | | | | | | TRVVKRHLAEFH |
| | | | | | | (SEQ ID NO: 1503) |
| R4 | R4- | — | Bursaphelenchus | TGCCAGCGGTGTTGATTAGG | TAATTAGGCAGTGCTCCTAG | MEILWEDLRLKIEDRYGVTL |
| | 4_BX | | xylophilus | TCCAAGTTCTTTGGCCAAAG | CGGAGTGCCGTGAAGTGGTG | PQRSASSLKNQYPKVILRGL |
| | | | | ATCCGCCCTCGGTTTAGCAG | TCAGTACCCGTCGTGTGGAA | PDSGLPWAGVQVNDTGQVVV |
| | | | | TACCGAACGAGTATACCTTC | AGCCCAGGAGGGTTAGTACC | VDHAEAATLRGSSPAAVDGE |
| | | | | AAGTGGTGGCACTGAATTAG | GACAGTGGGAAACCCGCTGC | AEEPVVPPLPAAEVVESAAD |
| | | | | ACTGAATACTCTGAACTGTA | ACGCAACCTAAAGACATTTG | AAVPDPQSEIVADQGVETRP |
| | | | | GACTTTTGTGCAACTGTGTA | CCCTTCGGGGGAGAGGTATG | VENPPANSRETETEPVEVEP |
| | | | | TGGTGTGGAAGACTTGTTTG | AGACCACACTAGTCATGGTT | YLEGQYKFFVSKILGKSMWR |
| | | | | TACCACTATCAGCTTTATTG | GCTTGCGCAAGCATGACTCA | KPIKYPRRVPETLWRQANEL |
| | | | | GGGCTCGTTACTGTTTCATA | TTCATTGTAAGTTCGTATTA | IERSIRQGEVSIQSLNCMVY |
| | | | | CAGGTAGATGTCCCCTTTAG | TGAGGCCTCGCGGAATGCGA | AAGCAVKSSLDKKDQEAKRR |
| | | | | AGATTTCCCTGCAGTTTGCG | AAGTCCAAGAGCGCCAACTT | ESEWYACRKAEIKALERYLN |
| | | | | CTCCAAGTCGCTAGCCTCTT | GTCTCTTTGGGAGGTTCCTC | FIDLELKRRSASRPLTSRQR |
| | | | | GCGTGTAGTCAAAGGAATAC | CGGGTTCCTTAGGGTTGGCG | QNLGVLITKYGRARVRSGVR |
| | | | | ATTCGCCGTCGGTGACAGGG | TACCATGCTTCGTGTGAGAC | LSELQAMLRDALVGIRKCMA |
| | | | | CTATACCCGGCGACTACGGA | CTAGGCCGCTTGGACCTAGA | KRSADKKRKQGKFVPIQRYL |
| | | | | CTTGTTTATTACGTAGTGCA | GTTAAGCTGTTGCATGTTTG | EPSSAEPRLSPDTVRAYWND |
| | | | | GCCTCGTTTAAGACGAATGT | AGGATGCCTTAGGCGGACGC | IVGSSQQSTSDSTIQDWSSN |
| | | | | GAAAAGAAGGTGTGATTACT | CATG | LSVPSQELNASKIMGWWRAA |
| | | | | AAGCGTTATGAGTCGGGTTA | (SEQ ID NO: 1382) | VSKSKPNKAAGPDGIPGVLW |
| | | | | TCTGGAAACTCCGCCCCGCC | | KRFRSASEWVCTWLYRLLQK |
| | | | | GCAATGGCTTCAAGGGTCAA | | RRIITPRWLSVGRVVLLPKK |
| | | | | ACTGCTAACATTTTAAACCA | | GPLEDPANYRPIACLNTVYK |
| | | | | ATATTTGGCAGCAGCAGACT | | LITSVVEMAVREQIQACPGL |
| | | | | ATGATGTCAGAGTGCCGGGG | | VPYEQIANRKGVWGCTHASI |
| | | | | GTCTATCGATATAAGACTGA | | VDRMITGASREGKGGGFPDL |
| | | | | AAGCGATAGACGTGGAGTGA | | RVLFYDCKKAFDSVNRDHMF |
| | | | | AAGGATTCCCTTTGTTAAGA | | AVLRVANVNVKVVHLLHTLS |
| | | | | GAATCGGTAGAATTCACTTT | | QQWCVRYELRRNNRVERSSP |
| | | | | TTACTTATTCAAGAACTTAA | | LRVKRGLLQGDTLSPTWFCL |
| | | | | CAGCAACAAGCACTCGCGAG | | CMAPISASIKTLNPGPTLRP |
| | | | | GATTACCGCCCCAGATTCGG | | NMGNGRNRGQVAIQVSHVFY |
| | | | | TCGGCGGTACTTCACCTGCT | | MDDLKVYCPRVADQRRMEQN |
| | | | | TTCTTCCACTTTCGGAATCT | | IPQLFGEIGLSINASKSAAA |
| | | | | GGCATCCTGGCTTTCAGTGT | | AAVGRYVESELPVLGTKDEY |
| | | | | GGTGATGGCCGGCTTGAGTT | | KYLGIESGFVVNEVAALDRM |
| | | | | TTCTTGAGTCGTGCGAGTGC | | QAVLLNRVEAILSVKEHTVG |
| | | | | CTCATCTGGGACGTCCGGAC | | QRRDAIRAKAIPGGAYILGH |
| | | | | CGATTGATGGAGTCTGCAGT | | IILSDLDPRGAAERMRRLDI |
| | | | | GGACGAGGACTTGATGGACC | | EIRRLVKSAGILHDKCSTAR |
| | | | | GTAACCATAGTATATCCCTC | | IHLSCEQGGLAWPSMERAYY |
| | | | | ATGCGTCTTCTCGACTCGAG | | VAVAYSASYLLTSQDETISR |
| | | | | GGGGTAGCTTGCACTACCCA | | ARDYFVSGRLSNKFTVYKHL |
| | | | | CCCTTCTCTTCTCCGATTGG | | TSIVDSLGLSVELPDPNGLP |
| | | | | GATTTAGACCTAGCCCTCTG | | TGQPSVLARTIARAIDAKLE |
| | | | | GTGTGTCTCGACCCGCGATA | | AQWKETLLTYQRAGRVERAD |
| | | | | TCAGATTCCTGAATCGACTG | | PTVVDHANSYHWLRKAWINE |
| | | | | TGAGAAATGTCTACGCGCAA | | KAYQHAVSVMEGTLLEGVNP |
| | | | | AGATCGACCCATTGCCACCC | | HGVLTMCRACKAPSASIAHI |
| | | | | GGCTATGTGGATCGGGCTCT | | ITGCAELRKSHMKVRHDGVT |
| | | | | TGACTGCTTATCTCCGGCTT | | RWLYNALTEVDGSLPKFHYT |
| | | | | TAATCGCTTGAGGAAAGGGG | | QQIPAEMRGERLTVRYDSDI |
| | | | | GGTGTCGCCCGAAAGGGTTA | | VTPNKPRHNRPDLVVFDSTR |
| | | | | CGCGATCATCCGATTCCTAC | | KVIYIVEVSVTWLSVLQKQY |
| | | | | CGTAAAAACGTAGTTGAAGT | | DNKLNRYAVNSNHEFSESIP |
| | | | | AGGATTGAACCTGAGTACCA | | YPPGVNLANEIRVLYPQFTG |
| | | | | AGTGAAAAGAGTGGCTATAA | | GVKVFPMIISPTGEVHMQFV |
| | | | | TGCTCCATGGTATACCCTAG | | PHLAELLENPNIPRILEKIQ |
| | | | | GGATAACCGTGTCGAGCGCA | | RSVVLGTDYIIRSYFAM |
| | | | | CTGCTCAATACCCTGATTTG | | (SEQ ID NO: 1504) |
| | | | | TTAGTGTAGGTATGTCTAGT | | |
| | | | | GGCTGCCTAGGCAGATTCGC | | |
| | | | | CTATTCACTACGTAAAATCT | | |
| | | | | GGGTGAGTACCATAAGAACC | | |
| | | | | TCCTGTAGGGCCAGGAGTCA | | |
| | | | | AACTAGTCCAGGTTCGGTAT | | |
| | | | | GCTTCGGTATACTCTCTCAC | | |
| | | | | GGGCTAGTCACCTAAGAGTT | | |
| | | | | AAGAACCGCCTTTTTCTGCA | | |
| | | | | CTGTGAATAGAAAAAGAAGG | | |
| | | | | GCGGGAGAATATACGGGCGA | | |
| | | | | GGTAAGCACGTCGGAACGGG | | |
| | | | | GTGTGCCCAACTCGTACCGT | | |
| | | | | ACGCCCGGACAAGGACCATC | | |
| | | | | TTTCGTACCCCGTTCACCCG | | |
| | | | | GCACAAGTCCGATTGTCTCT | | |
| | | | | CCCGAGAGGCGTCGGCGGAG | | |
| | | | | GTTGGCTAACGCCGTCTCTC | | |
| | | | | CAACCATCGGTTTGGGTTTA | | |
| | | | | AGTAACGCCCCAGTGGCCGG | | |
| | | | | TAGCCAAACTGATGGAGGCA | | |
| | | | | GAAATGCCGGTCCGTTGCTA | | |
| | | | | AATGCGGGAACGGACCAAAA | | |
| | | | | CGCCGGTGTGGTGGATACAG | | |
| | | | | GTGGAAGAGTCTTTTGGTCT | | |
| | | | | ACGCAAGAAAAGACCAGGCT | | |
| | | | | CAAGTACGAATACGACCGTC | | |
| | | | | TTCGTGAACGACGCCGTCGA | | |
| | | | | GACAAAGTTCGAAATCCTAC | | |
| | | | | GGTCGATAAGGCC | | |
| | | | | (SEQ ID NO: 1259) | | |
| R4 | R4_AL | U29445 | Ascaris | GGGGCCGGTGGGTTTACTCA | TAGTCGCTAAGGGGTCCGGA | MPCSTNSFFERGTPEPHREP |
| | | | lumbricoides | CTTCTGACCCACCACCAACG | AATGGTCCGGTCCTGCGCTA | ISGTDSSESLGMGTHRSPRL |
| | | | | GAACGAGGGAAAGCAGAGCT | CCCGGTTCTGGTAGCACGTT | NDDEVINGPKGHESDPVHVV |
| | | | | GGGGCCCTCTTCCGATTGGC | CAAGCGCTCAATCGCCTGCC | RAPRTLHPRRLELPIGVNNL |
| | | | | ATGGAACCGACCTCCACGTG | TTGTAGGCAGTCCATCTGTG | GEASQLRQDSAIAEEAQLES |
| | | | | GTGGCCCTGGGCAACGGAAT | GAAGTCGCGCTCTTGATACA | TENHDGRRPPLRGGRKLWSE |
| | | | | TCAAGAGAGGATTTAATCCT | GATGTGGACGGATGGAAGCA | KEIATLRRLCEAYGNRQVCW |
| | | | | CTCTATCATTTGCAAGATGG | GATGATAGAGCCGGTGACGG | KEVQRKFADFHEERTVAALA |
| | | | | ATGAGATCGAGGTATCCGGC | CCCTACTAGCCAAACGC | TKWGALKRPRAPMVGAPPTP |
| | | | | AAACAGGTTCCAAGTGAGCA | (SEQ ID NO: 1383) | DHDPERGPAGEGDGGTTSQE |
| | | | | CCTTTCCCATAGCTGGGAAT | | NVPTDDPIPANGPTEGKESD |
| | | | | ATGGGTTAGGCGTCCTCTGA | | VRPAVACRCTEPEEQLMESD |
| | | | | CATATAAGAGGAATCAGACT | | VRPPAVVRLADPEQHTMKSG |
| | | | | CGTTCGCGCCCGGTCATTAA | | VKPVALDGSADLEERPKEKD |
| | | | | CATCGATCAGCGGGAGGGCC | | IEQMGVDFEGEPRFRAFRKA |
| | | | | GGACTGAAGTAAATTTCCTG | | FYGYFRWAVNSFDREPVKRV |
| | | | | TTGGCCCGAGTGCAGGTGGA | | RRDCPKVFYAYADYLIATGS |
| | | | | GCTCGGACCCGAAAAACGAT | | SKALGPNQSRIGRLNGLVYA |
| | | | | CCCTAAGAGGACCACAACCC | | AARTIHQFWREEVGHRQQGE |
| | | | | GAAGGGATGGACGCAGTCGC | | KGWYTKTKATREDLQMLISM |
| | | | | CCCGGCACGTTTGGTGTTGG | | MESELARRKEKRKPGAKELE |
| | | | | TTATCCTGGAGTGTTGTGGG | | NIHKLVARLGTRSTSGIVRR |
| | | | | ACGAATAGCT | | LEMTRQRLKLLEDRISLHEQ |
| | | | | (SEQ ID NO: 1260) | | EKRRKRLRKQFAETPSLKLL |
| | | | | | | TKGAKDRGDTMVTMKSVMDF |
| | | | | | | WRPIIGRRVTSNPDQLQVLR |
| | | | | | | DWRDEQKKAYPADLDLEKAD |
| | | | | | | LEEKYEGAIRRIQPWKAPGP |
| | | | | | | DGLHAHWWKALPSAKRLLGE |
| | | | | | | LVVDWLTTGKVTTGWMCRGR |
| | | | | | | TILIPKKGDRGDPSNYRPIT |
| | | | | | | CLNTCYKVLTSVMNSVILSH |
| | | | | | | LSRGEALPMNQRAMRKREWG |
| | | | | | | CTHAMVLDRAMVMDAMAQKK |
| | | | | | | HSLSVAWLDYRKAYDSVSHE |
| | | | | | | YIRWAINSVNIPRSVQLTLK |
| | | | | | | RLMSDWETRFESTQCRPKLR |
| | | | | | | SDKMKVLNGIFQGDSLSPTL |
| | | | | | | FVLCIAPISYALNKGVGQCQ |
| | | | | | | SSSGWSAGYGFEIGHQFYMD |
| | | | | | | DLKLYARTPAMLDSQIQVVS |
| | | | | | | EVSEAMGLHLNLSKCAKAHY |
| | | | | | | APHGAGGAQEAVEGAEGSRK |
| | | | | | | GEIPILGLRSTYKYLGVEQR |
| | | | | | | LLPMEVALKEFEDKFMDRAE |
| | | | | | | TIFASELTWGQMATAYNTIA |
| | | | | | | IAGLRYVYSNTNGASPKLLE |
| | | | | | | ALKRAATLDTRIRDLLRRHK |
| | | | | | | CRFRNSFVERLYIPRECGGY |
| | | | | | | GLKSVEDTLRESILATWSYI |
| | | | | | | ATNPHLAGQQYFFERLAARG |
| | | | | | | KRTPMADGVKILLDLGVEPQ |
| | | | | | | VDLKRRTVTVDGIVFEDPTK |
| | | | | | | LHRYLVGKLLKARTEARIRR |
| | | | | | | WKEASLAGRLVNDTSIDMRL |
| | | | | | | SCLWMKKGFVSARNLRDALA |
| | | | | | | VQEGSLLTRACPALKGKGGQ |
| | | | | | | EVCRCCHAAPETAEHITSAC |
| | | | | | | RYWLPSLYVERHDSVARNLY |
| | | | | | | YVICCRYGITPVHYSNRVSP |
| | | | | | | LSENSQCRVLWNMDMQTRTP |
| | | | | | | MKHRKPDIVVFDLKREKILM |
| | | | | | | FEVSIAHASGLLKQREIKIN |
| | | | | | | RYTVNSEELPDETITPYPPG |
| | | | | | | PNLAADLAATYGWQVEFAPV |
| | | | | | | VVGTCGEHVPAVKEDLQRTL |
| | | | | | | DLKPHQVEALLERISRSAVI |
| | | | | | | GTARVVRAHLACS |
| | | | | | | (SEQ ID NO: 1505) |
| R4 | R4_H | — | Heliconius | ATAAATAATAATAATAATAA | TAACTTATTGTCAGAATTCC | ITYTANMALVTLFMENMENK |
| | mel | | melpomene | TAATAATAAGCCCCCTAAAA | TTACTAGTAATAATAATTAT | RYNLRPLPGGRRGASGANAG |
| | | | | TCCAACCATACGTCCGAGTC | CGCTGAAAATCTCCACCCAA | CHSMRTVGDGGLSRRVPLEK |
| | | | | GAACATCTGATTCTCGTGGG | ATATTGCTTGGCTATATGCT | NVTAEQSSSPLTSSSSHSPV |
| | | | | GGGCGGACACGTGAAAATAA | CGCAATTTTTGGTTAACGTA | SSIPSPSSTRTLLNSPNSSP |
| | | | | (SEQ ID NO: 1261) | CCCCAATGATTTGGGAGAAC | TSSHSSLVIRSADVVQEALA |
| | | | | | AAAAATGGTAAAACTATAAT | NYPAPTAGSIRARKKWTDIM |
| | | | | | AATAATAATTATATTAATAT | NRYIWRTYLIITKCETTLLN |
| | | | | | (SEQ ID NO: 1384) | NYLEPLHQEFSSKFPEMQVT |
| | | | | | | RQRIGDQRRAIIRNKLLSDD |
| | | | | | | TLAQILIEVKELLQIGDQPL |
| | | | | | | TQNNIHSTQLSHSNTRIKWS |
| | | | | | | NELNEEIVKCYFEVTLLEVN |
| | | | | | | KTSYRKNLYSLFISRNPHLS |
| | | | | | | HLTEQRIADQRRLIFMNKSV |
| | | | | | | HNDRIIELKREVEIKLANSN |
| | | | | | | SLTKNITESNSPSSQTNEIN |
| | | | | | | DSAYVQSNLQPVEPLDQHCI |
| | | | | | | NRHNLIEKHYVEQEFNNALI |
| | | | | | | QFNNTNPETRPYIPRQKSSR |
| | | | | | | KFSQIVSFLNSEVLPKHLNN |
| | | | | | | ELDFNALHNIIYTAXYTASL |
| | | | | | | CNGTKFSFIDNYRPRNSKPS |
| | | | | | | WQRRLESRIDKYRLQIGRLT |
| | | | | | | QYISGNRNRKILKTVEEIKT |
| | | | | | | QYKIHSHHEEPNTELPHFLD |
| | | | | | | TLKQKLNATSNRLRRYLTCT |
| | | | | | | KRKQQNNTFVNNEKHFYRTL |
| | | | | | | SSTNQNTTTQLXEHPTENNL |
| | | | | | | QQYWANIWETSIEHNADAEW |
| | | | | | | LNKIPDXEINXMKFKDISIE |
| | | | | | | TFNQUIQRTHNWKAPGTDNI |
| | | | | | | HNYWYKKLTCTHSLLLKHIN |
| | | | | | | QFIQSPCTLPLFITNGITYM |
| | | | | | | LPKGLDPTNPANYRPITCLQ |
| | | | | | | TIYKIITACITDIIYKHIDQ |
| | | | | | | NNILAEQQKGCRKNSQGCKE |
| | | | | | | QLTIDAIVMKQAHNKNXNTM |
| | | | | | | YIDYRKAFDSVPHSWLLYIL |
| | | | | | | KKYKIHPILITFLSSVMLSW |
| | | | | | | KTRLKLINNNETLITDWIKI |
| | | | | | | QRGIFQGDALSPLWFCLALN |
| | | | | | | PLSELLNNTNTGFKLKHNNT |
| | | | | | | YHIISHLMYMDDIKLYASNN |
| | | | | | | KELKILADLTQSFSTDIRME |
| | | | | | | FGIEKCKVHSIKRGKSQQNT |
| | | | | | | YILNTGEQIESMDENSTYKY |
| | | | | | | LGFQQAKQIQQKQTKIELTN |
| | | | | | | KFKFRLNQILRSQLNSRNII |
| | | | | | | KAINTYAIPILTYSFAIINW |
| | | | | | | SQTDLSNLQRIINTHMTTHR |
| | | | | | | KHHPKSCIQRLTISRLDGGR |
| | | | | | | GLIDIRNLHNNLVTKFRNYF |
| | | | | | | YAKAEISELHKFIVNIDNKY |
| | | | | | | TPLNLNDRNIQLNQTLITKQ |
| | | | | | | QKIEAWSLKSLHGRHLADLS |
| | | | | | | QTHVDKVASNEWLRRGDLFP |
| | | | | | | ETEAFMMAIQDQVIDTRNYQ |
| | | | | | | KHIIKRPNMVNDLCRRCYSS |
| | | | | | | PETIQHITGACKTIVQTDYK |
| | | | | | | HRHDQVAAIIHQHLAFKHSL |
| | | | | | | ITQAQKTPYYKYSPQAILES |
| | | | | | | TNFKLYWDRTIITDKTVHYN |
| | | | | | | RPDILLHDKVKXSVYLIDIA |
| | | | | | | IPNTHNLASTFSNKIDKYTD |
| | | | | | | LTIELKSQWKVQSVTTVPIV |
| | | | | | | LSTTGVVPHTLHTSLETLGI |
| | | | | | | HRLSYILLQKAAILNTCRIV |
| | | | | | | RKFLSSNN |
| | | | | | | (SEQ ID NO: 1506) |
| R4 | Rex6 | — | Takifugu | TTCTATGCGCCTTATGCGAC | TAGAGGACCCGAGTCTGAAG | MSGTXTDRVIPARTSPGSTR |
| | | | rubripes | TGGATAGGCCAGTGGTTTAC | GAAGGAGGCACCGCCCAGGA | SASGVGEPGPPDVKLATGTR |
| | | | | GCCGCTGACTTTGGTGCGGA | GGGCGAGGAAGAGATTTTTT | HSWSRAENVVLMECYYGSNP |
| | | | | AGGTTGTCGGTTCGAATCCA | TTTATATATATATATATATA | SERGYMQRMWEKWVLRNPTS |
| | | | | GGCGAGCCCTTAGGCAAGGC | TATA | SLTKKQLLAQCSNIRNKKLL |
| | | | | TCCTTACGCATATATGCCTA | (SEQ ID NO: 1385) | SQLEIDEARRCASPTVQICY |
| | | | | CACCTCGGT | | GKGEPGRQVSXGVISSSPPN |
| | | | | (SEQ ID NO: 1262) | | IEIGYKAPMTDGLGTRAADL |
| | | | | | | RERIMKSWGNSTTSLPRLTH |
| | | | | | | KVPDQSLLEDMNTALSTIPT |
| | | | | | | TTITETNQLMYAAATVILQM |
| | | | | | | LGYKMKSMNSQKEQMAPWRR |
| | | | | | | RLEAKIMATRREVSLLTELS |
| | | | | | | RGVNLRTEXPKKYNKLSTTE |
| | | | | | | ALETAKQRLTALATRLKRYT |
| | | | | | | REVEARRINKVFSTNPAKVY |
| | | | | | | SQWQGNKMTTDPPRAETEQY |
| | | | | | | WKSIWEKEATHNTXAQWLQD |
| | | | | | | LQTEHSQLPEQDPVVITLAD |
| | | | | | | IQTRVSKMKSWTAPGPDKIH |
| | | | | | | AYWLKKLTALHERLAAQMNQ |
| | | | | | | LLTSGNHPEWLTQGRTVLIM |
| | | | | | | KDPQKGTIPSNYRPITCLST |
| | | | | | | TWKLLSGIIAAKISRHMDQY |
| | | | | | | MSRAQKGIGNNTRGAKHQLL |
| | | | | | | VDRAIAQDCRTRHTNLCTAW |
| | | | | | | IDYKKAYDSMPHTWILECLK |
| | | | | | | LYNINRTLREFIQNSMKLWN |
| | | | | | | TTLEANSKPIARVSIRCGIY |
| | | | | | | QGDALSPLLFCIGLNPLSQI |
| | | | | | | ITKSGYGYQFRSGTTVSHLL |
| | | | | | | YMDDIKLYAKNERDIDSLIH |
| | | | | | | LTRIYSKDIGMSFGLDKCGR |
| | | | | | | MISRRGKVIATDGVELPEGN |
| | | | | | | ITDVQDSYKYLGIPQANGNH |
| | | | | | | EEAARRSATAKYLQRLRQVL |
| | | | | | | KSQLNGKNKIQAINTYALPV |
| | | | | | | IRYPAGIIPWPLEEIQATDI |
| | | | | | | KTRKLNGKHKIQAINTYALP |
| | | | | | | VIRYPAGIIPWPLEEIQATD |
| | | | | | | IKTRKLLTMHGGFHPKSSVL |
| | | | | | | RLYTKRKEGGRGLVSVRTTV |
| | | | | | | QEETTSLREYIKKMAPTDRL |
| | | | | | | LSECLRQQKPTKEEEPEGLS |
| | | | | | | WKDKPLHGMYHRQIEEVADI |
| | | | | | | EKTYQWLEKAGLKDSTEALL |
| | | | | | | MAAQEQALSTRAIEARVYHT |
| | | | | | | RQDPRCRLCGDAPETVQHIT |
| | | | | | | AGCKMLAGKAYMERHNQVAG |
| | | | | | | IVYRNICTEYGLEVPGSRWE |
| | | | | | | TPPKVLENKQAKILWDFQIQ |
| | | | | | | TDKMVVANQPDIVVVDKHQK |
| | | | | | | TVVVIDVAIPSDSNIRKKEH |
| | | | | | | EKLEKYQGLKEEMERMWGMK |
| | | | | | | ATVVPVVIGTLGAVTPKLSR |
| | | | | | | WLQQIPGTTSEISVQKSAVL |
| | | | | | | GTAKILRRTLRLPGLW |
| | | | | | | (SEQ ID NO: 1507) |

TABLE 30
Exemplary monomeric retroviral reverse transcriptases and
their RT domain signatures

| | | | | RT |
|---|---|---|---|---|
| Name | Accession | Organism | Sequence | Signatures |
| Q4VF | Q4VFZ2 | Porcine | MGATGQQQYPWTTRRTVDLGVGRVT | IPR043502, |
| Z2_ | | endogenous | HSFLVIPECPAPLLGRDLLTKMGAQISF | SSF56672, |
| 9GAMR- | | retrovirus | EQGKPEVSANNKPITVLTLQLDDEYRL | IPR000477, |
| resi- | | | YSPLVKPDQNIQFWLEQFPQAWAETA | PF00078, |
| dues | | | GMGLAKQVPPQVIQLKASATPVSVRQ | cd03715 |
| only | | | YPLSKEAQEGIRPHVQRLIQQGILVPVQ | |
| | | | SPWNTPLLPVRKPGTNDYRPVQDLRE | |
| | | | VNKRVQDIHPTVPNPYNLLCALPPQRS | |
| | | | WYTVLDLKDAFFCLRLHPTSQPLFAFE | |
| | | | WRDPGTGRTGQLTWTRLPQGFKNSPTI | |
| | | | FDEALHRDLANFRIQHPQVTLLQYVDD | |
| | | | LLLAGATKQDCLEGTKALLLELSDLGY | |
| | | | RASAKKAQICRREVTYLGYSLRDGQR | |
| | | | WLTEARKKTVVQIPAPTTAKQVREFLG | |
| | | | TAGFCRLWIPGFATLAAPLYPLTKEKG | |
| | | | EFSWAPEHQKAFDAIKKALLSAPALAL | |
| | | | PDVTKPFTLYVDERKGVARGVLTQTL | |
| | | | GPWRRPVAYLSKKLDPVASGWPVCLK | |
| | | | AIAAVAILVKDADKLTLGQNITVIAPH | |
| | | | ALENIVRQPPDRWMTNARMTHYQSLL | |
| | | | LTERVTFAPPAALNPATLLPEETDEPVT | |
| | | | HDCHQLLIEETGVRKDLTDIPLTGEVLT | |
| | | | WFTDGSSYVVEGKRMAGAAVVDGTR | |
| | | | TIWASSLPEGTSAQKAELMALTQALRL | |
| | | | AEGKSINIYTDSRYAFATAHVHGAIYK | |
| | | | QRGLLTSAGREIKNKEEILSLLEALHLP | |
| | | | KRLAIIHCPGHQKAKDPISRGNQMADR | |
| | | | VAKQAAQGVNLLPMIETPKAPEPGRQ | |
| | | | YTLEDWQEIKKIDQFSETPEGTCYTSD | |
| | | | GKEILPHKEGLEYVQQIHRLTHLGTKH | |
| | | | LQQLVRTSPYHVLRLPGVADSVVKHC | |
| | | | VPCQLVNANPSRIPPGKRLRGSHPGAH | |
| | | | WEVDFTEVKPAKYGNKYLLVFVDTFS | |
| | | | GWVEAYPTKKETSTVVAKKILEEIFPR | |
| | | | FGIPKVIGSDNGPAFVAQVSQGLAKILG | |
| | | | IDWKLHCAYRPQSSGQVERMNRTIKET | |
| | | | LTKLTAETGVNDWIALLPFVLFRVRNT | |
| | | | PGQFGLTPYELLYGGPPPLVEIASVHSA | |
| | | | DVLLSQPLFSRLKALEWVRQRAWRQL | |
| | | | REAYSGGGDLQIPHRFQVGDSVYVRR | |
| | | | HRAGNLETRWKGPYHVLLTTPTAVKV | |
| | | | EGISTWIHASHVKPAPPPDSGWKAEKT | |
| | | | ENPLKLRLHRVVPYSVNNFSS | |
| | | | (SEQ ID NO: 1559) | |
| POL_ | P23074 | Simian | MDPLQLLQPLEAEIKGTKLKAHWDSG | IPR043502, |
| SFV1- | | foamy | ATITCVPEAFLEDERPIQTMLIKTIHGEK | SSF56672, |
| resi- | | virus | QQDVYYLTFKVQGRKVEAEVLASPYD | IPR000477, |
| dues | | type 1 | YILLNPSDVPWLMKKPLQLTVLVPLHE | PF00078 |
| only | | | YQERLLQQTALPKEQKELLQKLFLKY | |
| | | | DALWQHWENQVGHRRIKPHNIATGTL | |
| | | | APRPQKQYPINPKAKPSIQIVIDDLLKQ | |
| | | | GVLIQQNSTMNTPVYPVPKPDGKWRM | |
| | | | VLDYREVNKTIPLIAAQNQHSAGILSSI | |
| | | | YRGKYKTTLDLTNGFWAHPITPESYW | |
| | | | LTAFTWQGKQYCWTRLPQGFLNSPAL | |
| | | | FTADVVDLLKEIPNVQAYVDDIYISHD | |
| | | | DPQEHLEQLEKIFSILLNAGYVVSLKKS | |
| | | | EIAQREVEFLGFNITKEGRGLTDTFKQK | |
| | | | LLNITPPKDLKQLQSILGLLNFARNFIPN | |
| | | | YSELVKPLYTIVANANGKFISWTEDNS | |
| | | | NQLQHIISVLNQADNLEERNPETRLIIK | |
| | | | VNSSPSAGYIRYYNEGSKRPIMYVNYIF | |
| | | | SKAEAKFTQTEKLLTTMHKGLIKAMD | |
| | | | LAMGQEILVYSPIVSMTKIQRTPLPERK | |
| | | | ALPVRWITWMTYLEDPRIQFHYDKSLP | |
| | | | ELQQIPNVTEDVIAKTKHPSEFAMVFY | |
| | | | TDGSAIKHPDVNKSHSAGMGIAQVQFI | |
| | | | PEYKIVHQWSIPLGDHTAQLAEIAAVE | |
| | | | FACKKALKISGPVLIVTDSFYVAESAN | |
| | | | KELPYWKSNGFLNNKKKPLRHVSKW | |
| | | | KSIAECLQLKPDIIIMHEKGHQQPMTTL | |
| | | | HTEGNNLADKLATQGSYVVHCNTTPS | |
| | | | LDAELDQLLQGHYPPGYPKQYKYTLE | |
| | | | ENKLIVERPNGIRIVPPKADREKIISTAH | |
| | | | NIAHTGRDATFLKVSSKYWWPNLRKD | |
| | | | VVKSIRQCKQCLVTNATNLTSPPILRPV | |
| | | | KPLKPFDKFYIDYIGPLPPSNGYLHVLV | |
| | | | VVDSMTGFVWLYPTKAPSTSATVKAL | |
| | | | NMLTSIAIPKVLHSDQGAAFTSSTFAD | |
| | | | WAKEKGIQLEFSTPYHPQSSGKVERKN | |
| | | | SDIKRLLTKLLIGRPAKWYDLLPVVQL | |
| | | | ALNNSYSPSSKYTPHQLLFGVDSNTPF | |
| | | | ANSDTLDLSREEELSLLQEIRSSLHQPT | |
| | | | SPPASSRSWSPSVGQLVQERVARPASL | |
| | | | RPRWHKPTAILEVVNPRTVIILDHLGN | |
| | | | RRTVSVDNLKLTAYQDNGTSNDSGTM | |
| | | | ALMEEDESSTSST | |
| | | | (SEQ ID NO: 1560) | |
| POL_ | P07572 | Mason- | MGQELSQHERYVEQLKQALKTRGVK | IPR043502, |
| MPMV- | | Pfizer | VKYADLLKFFDFVKDTCPWFPQEGTID | SSF56672, |
| resi- | | monkey | IKRWRRVGDCFQDYYNTFGPEKVPVT | IPR000477, |
| dues | | virus | AFSYWNLIKELIDKKEVNPQVMAAVA | PF00078, |
| only | | | QTEEILKSNSQTDLTKTSQNPDLDLISL | cd01645, |
| | | | DSDDEGAKSSSLQDKGLSSTKKPKRFP | PF06817, |
| | | | VLLTAQTSKDPEDPNPSEVDWDGLED | IPR010661 |
| | | | EAAKYHNPDWPPFLTRPPPYNKATPSA | |
| | | | PTVMAVVNPKEELKEKIAQLEEQIKLE | |
| | | | ELHQALISKLQKLKTGNETVTHPDTAG | |
| | | | GLSRTPHWPGQHIPKGKCCASREKEEQ | |
| | | | IPKDIFPVTETVDGQGQAWRHHNGFDF | |
| | | | AVIKELKTAASQYGATAPYTLAIVESV | |
| | | | ADNWLTPTDWNTLVRAVLSGGDHLL | |
| | | | WKSEFFENCRDTAKRNQQAGNGWDF | |
| | | | DMLTGSGNYSSTDAQMQYDPGLFAQI | |
| | | | QAAATKAWRKLPVKGDPGASLTGVK | |
| | | | QGPDEPFADFVHRLITTAGRIFGSAEAG | |
| | | | VDYVKQLAYENANPACQAAIRPYRKK | |
| | | | TDLTGYIRLCSDIGPSYQQGLAMAAAF | |
| | | | SGQTVKDFLNNKNKEKGGCCFKCGKK | |
| | | | GHFAKNCHEHAHNNAEPKVPGLCPRC | |
| | | | KRGKHWANECKSKTDNQGNPIPPHQG | |
| | | | NRVEGPAPGPETSLWGSQLCSSQQKQP | |
| | | | ISKLTRATPGSAGLDLCSTSHTVLTPEM | |
| | | | GPQALSTGIYGPLPPNTFGLILGRSSITM | |
| | | | KGLQVYPGVIDNDYTGEIKIMAKAVN | |
| | | | NIVTVSQGNRIAQLILLPLIETDNKVQQ | |
| | | | PYRGQGSFGSSDIYWVQPITCQKPSLTL | |
| | | | WLDDKMFTGLIDTGADVTIIKLEDWPP | |
| | | | NWPITDTLTNLRGIGQSNNPKQSSKYL | |
| | | | TWRDKENNSGLIKPFVIPNLPVNLWGR | |
| | | | DLLSQMKIMMCSPNDIVTAQMLAQGY | |
| | | | SPGKGLGKKENGILHPIPNQGQSNKKG | |
| | | | FGNFLTAAIDILAPQQCAEPITWKSDEP | |
| | | | VWVDQWPLTNDKLAAAQQLVQEQLE | |
| | | | AGHITESSSPWNTPIFVIKKKSGKWRLL | |
| | | | QDLRAVNATMVLMGALQPGLPSPVAI | |
| | | | PQGYLKIIIDLKDCFFSIPLHPSDQKRFA | |
| | | | FSLPSTNFKEPMQRFQWKVLPQGMAN | |
| | | | SPTLCQKYVATAIHKVRHAWKQMYII | |
| | | | HYMDDILIAGKDGQQVLQCFDQLKQE | |
| | | | LTAAGLHIAPEKVQLQDPYTYLGFELN | |
| | | | GPKITNQKAVIRKDKLQTLNDFQKLLG | |
| | | | DINWLRPYLKLTTGDLKPLFDTLKGDS | |
| | | | DPNSHRSLSKEALASLEKVETAIAEQF | |
| | | | VTHINYSLPLIFLIFNTALTPTGLFWQD | |
| | | | NPIMWIHLPASPKKVLLPYYDAIADLII | |
| | | | LGRDHSKKYFGIEPSTIIQPYSKSQIDW | |
| | | | LMQNTEMWPIACASFVGILDNHYPPN | |
| | | | KLIQFCKLHTFVFPQIISKTPLNNALLVF | |
| | | | TDGSSTGMAAYTLTDTTIKFQTNLNSA | |
| | | | QLVELQALIAVLSAFPNQPLNIYTDSAY | |
| | | | LAHSIPLLETVAQIKHISETAKLFLQCQ | |
| | | | QLIYNRSIPFYIGHVRAHSGLPGPIAQG | |
| | | | NQRADLATKIVASNINTNLESAQNAHT | |
| | | | LHHLNAQTLRLMFNIPREQARQIVKQC | |
| | | | PICVTYLPVPHLGVNPRGLFPNMIWQM | |
| | | | DVTHYSEFGNLKYIHVSIDTFSGFLLAT | |
| | | | LQTGETTKHVITHLLHCFSIIGLPKQIKT | |
| | | | DNGPGYTSKNFQEFCSTLQIKHITGIPY | |
| | | | NPQGQGIVERAHLSLKTTIEKIKKGEW | |
| | | | YPRKGTPRNILNHALFILNFLNLDDQN | |
| | | | KSAADRFWHNNPKKQFAMVKWKDPL | |
| | | | DNTWHGPDPVLIWGRGSVCVYSQTYD | |
| | | | AARWLPERLVRQVSNNNQSRE | |
| | | | (SEQ ID NO: 1561) | |
| POL_ | P03365 | Mouse | MGVSGSKGQKLFVSVLQRLLSERGLH | IPR043502, |
| MMT | | mammary | VKESSAIEFYQFLIKVSPWFPEEGGLNL | SSF56672, |
| VB- | | tumor | QDWKRVGREMKRYAAEHGTDSIPKQ | IPR000477, |
| resi- | | virus | AYPIWLQLREILTEQSDLVLLSAEAKSV | PF00078, |
| dues | | | TEEELEEGLTGLLSTSSQEKTYGTRGT | cd01645, |
| only | | | AYAEIDTEVDKLSEHIYDEPYEEKEKA | PF06817, |
| | | | DKNEEKDHVRKIKKVVQRKENSEGKR | IPR010661 |
| | | | KEKDSKAFLATDWNDDDLSPEDWDD | |
| | | | LEEQAAHYHDDDELILPVKRKVVKKK | |
| | | | PQALRRKPLPPVGFAGAMAEAREKGD | |
| | | | LTFTFPVVFMGESDEDDTPVWEPLPLK | |
| | | | TLKELQSAVRTMGPSAPYTLQVVDMV | |
| | | | ASQWLTPSDWHQTARATLSPGDYVL | |
| | | | WRTEYEEKSKEMVQKAAGKRKGKVS | |
| | | | LDMLLGTGQFLSPSSQIKLSKDVLKDV | |
| | | | TTNAVLAWRAIPPPGVKKTVLAGLKQ | |
| | | | GNEESYETFISRLEEAVYRMMPRGEGS | |
| | | | DILIKQLAWENANSLCQDLIRPIRKTGT | |
| | | | IQDYIRACLDASPAVVQGMAYAAAMR | |
| | | | GQKYSTFVKQTYGGGKGGQGAEGPV | |
| | | | CFSCGKTGHIRKDCKDEKGSKRAPPGL | |
| | | | CPRCKKGYHWKSECKSKFDKDGNPLP | |
| | | | PLETNAENSKNLVKGQSPSPAQKGDG | |
| | | | VKGSGLNPEAPPFTIHDLPRGTPGSAGL | |
| | | | DLSSQKDLILSLEDGVSLVPTLVKGTLP | |
| | | | EGTTGLIIGRSSNYKKGLEVLPGVIDSD | |
| | | | FQGEIKVMVKAAKNAVIIHKGERIAQL | |
| | | | LLLPYLKLPNPVIKEERGSEGFGSTSHV | |
| | | | HWVQEISDSRPMLHIYLNGRRFLGLLD | |
| | | | TGADKTCIAGRDWPANWPIHQTESSLQ | |
| | | | GLGMACGVARSSQPLRWQHEDKSGII | |
| | | | HPFVIPTLPFTLWGRDIMKDIKVRLMT | |
| | | | DSPDDSQDLMIGAIESNLFADQISWKS | |
| | | | DQPVWLNQWPLKQEKLQALQQLVTE | |
| | | | QLQLGHLEESNSPWNTPVFVIKKKSGK | |
| | | | WRLLQDLRAVNATMHDMGALQPGLP | |
| | | | SPVAVPKGWEIIIIDLQDCFFNIKLHPED | |
| | | | CKRFAFSVPSPNFKRPYQRFQWKVLPQ | |
| | | | GMKNSPTLCQKFVDKAILTVRDKYQD | |
| | | | SYIVHYMDDILLAHPSRSIVDEILTSMI | |
| | | | QALNKHGLVVSTEKIQKYDNLKYLGT | |
| | | | HIQGDSVSYQKLQIRTDKLRTLNDFQK | |
| | | | LLGNINWIRPFLKLTTGELKPLFEILNG | |
| | | | DSNPISTRKLTPEACKALQLMNERLST | |
| | | | ARVKRLDLSQPWSLCILKTEYTPTACL | |
| | | | WQDGVVEWIHLPHISPKVITPYDIFCTQ | |
| | | | LIIKGRHRSKELFSKDPDYIVVPYTKVQ | |
| | | | FDLLLQEKEDWPISLLGFLGEVHFHLP | |
| | | | KDPLLTFTLQTAIIFPHMTSTTPLEKGIV | |
| | | | IFTDGSANGRSVTYIQGREPIIKENTQN | |
| | | | TAQQAEIVAVITAFEEVSQPFNLYTDSK | |
| | | | YVTGLFPEIETATLSPRTKIYTELKHLQ | |
| | | | RLIHKRQEKFYIGHIRGHTGLPGPLAQG | |
| | | | NAYADSLTRILTALESAQESHALHHQN | |
| | | | AAALRFQFHITREQAREIVKLCPNCPD | |
| | | | WGHAPQLGVNPRGLKPRVLWQMDVT | |
| | | | HVSEFGKLKYVHVTVDTYSHFTFATA | |
| | | | RTGEATKDVLQHLAQSFAYMGIPQKIK | |
| | | | TDNAPAYVSRSIQEFLARWKISHVTGIP | |
| | | | YNPQGQAIVERTHQNIKAQLNKLQKA | |
| | | | GKYYTPHHLLAHALFVLNHVNMDNQ | |
| | | | GHTAAERHWGPISADPKPMVMWKDL | |
| | | | LTGSWKGPDVLITAGRGYACVFPQDA | |
| | | | ETPIWVPDRFIRPFTERKEATPTPGTAE | |
| | | | KTPPRDEKDQQESPKNESSPHQREDGL | |
| | | | ATSAGVDLRSGGGP (SEQ ID NO: | |
| | | | 1562) | |
| POL_ | P03355 | Moloney | MGQTVTTPLSLTLGHWKDVERIAHNQ | IPR043502, |
| MLV | | murine | SVDVKKRRWVTFCSAEWPTFNVGWP | SSF56672, |
| MS- | | leukemia | RDGTFNRDLITQVKIKVFSPGPHGHPD | IPR000477, |
| resi- | | virus | QVPYIVTWEALAFDPPPWVKPFVHPKP | PF00078, |
| dues | | | PPPLPPSAPSLPLEPPRSTPPRSSLYPALT | cd03715 |
| only | | | PSLGAKPKPQVLSDSGGPLIDLLTEDPP | |
| | | | PYRDPRPPPSDRDGNGGEATPAGEAPD | |
| | | | PSPMASRLRGRREPPVADSTTSQAFPL | |
| | | | RAGGNGQLQYWPFSSSDLYNWKNNN | |
| | | | PSFSEDPGKLTALIESVLITHQPTWDDC | |
| | | | QQLLGTLLTGEEKQRVLLEARKAVRG | |
| | | | DDGRPTQLPNEVDAAFPLERPDWDYT | |
| | | | TQAGRNHLVHYRQLLLAGLQNAGRSP | |
| | | | TNLAKVKGITQGPNESPSAFLERLKEA | |
| | | | YRRYTPYDPEDPGQETNVSMSFIWQSA | |
| | | | PDIGRKLERLEDLKNKTLGDLVREAEK | |
| | | | IFNKRETPEEREERIRRETEEKEERRRTE | |
| | | | DEQKEKERDRRRHREMSKLLATVVSG | |
| | | | QKQDRQGGERRRSQLDRDQCAYCKE | |
| | | | KGHWAKDCPKKPRGPRGPRPQTSLLT | |
| | | | LDDQGGQGQEPPPEPRITLKVGGQPVT | |
| | | | FLVDTGAQHSVLTQNPGPLSDKSAWV | |
| | | | QGATGGKRYRWTTDRKVHLATGKVT | |
| | | | HSFLHVPDCPYPLLGRDLLTKLKAQIH | |
| | | | FEGSGAQVMGPMGQPLQVLTLNIEDE | |
| | | | HRLHETSKEPDVSLGSTWLSDFPQAW | |
| | | | AETGGMGLAVRQAPLIIPLKATSTPVSI | |
| | | | KQYPMSQEARLGIKPHIQRLLDQGILV | |
| | | | PCQSPWNTPLLPVKKPGTNDYRPVQD | |
| | | | LREVNKRVEDIHPTVPNPYNLLSGLPPS | |
| | | | HQWYTVLDLKDAFFCLRLHPTSQPLFA | |
| | | | FEWRDPEMGISGQLTWTRLPQGFKNSP | |
| | | | TLFDEALHRDLADFRIQHPDLILLQYV | |
| | | | DDLLLAATSELDCQQGTRALLQTLGN | |
| | | | LGYRASAKKAQICQKQVKYLGYLLKE | |
| | | | GQRWLTEARKETVMGQPTPKTPRQLR | |
| | | | EFLGTAGFCRLWIPGFAEMAAPLYPLT | |
| | | | KTGTLFNWGPDQQKAYQEIKQALLTA | |
| | | | PALGLPDLTKPFELFVDEKQGYAKGVL | |
| | | | TQKLGPWRRPVAYLSKKLDPVAAGWP | |
| | | | PCLRMVAAIAVLTKDAGKLTMGQPLV | |
| | | | ILAPHAVEALVKQPPDRWLSNARMTH | |
| | | | YQALLLDTDRVQFGPVVALNPATLLPL | |
| | | | PEEGLQHNCLDILAEAHGTRPDLTDQP | |
| | | | LPDADHTWYTDGSSLLQEGQRKAGAA | |
| | | | VTTETEVIWAKALPAGTSAQRAELIAL | |
| | | | TQALKMAEGKKLNVYTDSRYAFATA | |
| | | | HIHGEIYRRRGLLTSEGKEIKNKDEILA | |
| | | | LLKALFLPKRLSIIHCPGHQKGHSAEAR | |
| | | | GNRMADQAARKAAITETPDTSTLLIEN | |
| | | | SSPYTSEHFHYTVTDIKDLTKLGAIYDK | |
| | | | TKKYWVYQGKPVMPDQFTFELLDFLH | |
| | | | QLTHLSFSKMKALLERSHSPYYMLNR | |
| | | | DRTLKNITETCKACAQVNASKSAVKQ | |
| | | | GTRVRGHRPGTHWEIDFTEIKPGLYGY | |
| | | | KYLLVFIDTFSGWIEAFPTKKETAKVV | |
| | | | TKKLLEEIFPRFGMPQVLGTDNGPAFV | |
| | | | SKVSQTVADLLGIDWKLHCAYRPQSS | |
| | | | GQVERMNRTIKETLTKLTLATGSRDW | |
| | | | VLLLPLALYRARNTPGPHGLTPYEILY | |
| | | | GAPPPLVNFPDPDMTRVTNSPSLQAHL | |
| | | | QALYLVQHEVWRPLAAAYQEQLDRP | |
| | | | VVPHPYRVGDTVWVRRHQTKNLEPR | |
| | | | WKGPYTVLLTTPTALKVDGIAAWIHA | |
| | | | AHVKAADPGGGPSSRLTWRVQRSQNP | |
| | | | LKIRLTREAP (SEQ ID NO: 1563) | |
| POL_ | P03362 | Human T- | MGQIFSRSASPIPRPPRGLAAHHWLNFL | IPR043502, |
| HTL1 | | cell | QAAYRLEPGPSSYDFHQLKKFLKIALE | SSF56672, |
| A- | | leukemia | TPARICPINYSLLASLLPKGYPGRVNEIL | IPR000477, |
| resi- | | virus 1 | HILIQTQAQIPSRPAPPPPSSPTHDPPDS | PF00078 |
| dues | | | DPQIPPPYVEPTAPQVLPVMHPHGAPP | |
| only | | | NHRPWQMKDLQAIKQEVSQAAPGSPQ | |
| | | | FMQTIRLAVQQFDPTAKDLQDLLQYL | |
| | | | CSSLVASLHHQQLDSLISEAETRGITGY | |
| | | | NPLAGPLRVQANNPQQQGLRREYQQL | |
| | | | WLAAFAALPGSAKDPSWASILQGLEEP | |
| | | | YHAFVERLNIALDNGLPEGTPKDPILRS | |
| | | | LAYSNANKECQKLLQARGHTNSPLGD | |
| | | | MLRACQTWTPKDKTKVLVVQPKKPPP | |
| | | | NQPCFRCGKAGHWSRDCTQPRPPPGP | |
| | | | CPLCQDPTHWKRDCPRLKPTIPEPEPEE | |
| | | | DALLLDLPADIPHPKNLHRGGGLTSPP | |
| | | | TLQQVLPNQDPASILPVIPLDPARRPVI | |
| | | | KAQVDTQTSHPKTIEALLDTGADMTV | |
| | | | LPIALFSSNTPLKNTSVLGAGGQTQDH | |
| | | | FKLTSLPVLIRLPFRTTPIVLTSCLVDTK | |
| | | | NNWAIIGRDALQQCQGVLYLPEAKRPP | |
| | | | VILPIQAPAVLGLEHLPRPPQISQFPLNP | |
| | | | ERLQALQHLVRKALEAGHIEPYTGPGN | |
| | | | NPVFPVKKANGTWRFIHDLRATNSLTI | |
| | | | DLSSSSPGPPDLSSLPTTLAHLQTIDLRD | |
| | | | AFFQIPLPKQFQPYFAFTVPQQCNYGP | |
| | | | GTRYAWKVLPQGFKNSPTLFEMQLAH | |
| | | | ILQPIRQAFPQCTILQYMDDILLASPSHE | |
| | | | DLLLLSEATMASLISHGLPVSENKTQQ | |
| | | | TPGTIKFLGQIISPNHLTYDAVPTVPIRS | |
| | | | RWALPELQALLGEIQWVSKGTPTLRQP | |
| | | | LHSLYCALQRHTDPRDQIYLNPSQVQS | |
| | | | LVQLRQALSQNCRSRLVQTLPLLGAIM | |
| | | | LTLTGTTTVVFQSKEQWPLVWLHAPL | |
| | | | PHTSQCPWGQLLASAVLLLDKYTLQS | |
| | | | YGLLCQTIHHNISTQTFNQFIQTSDHPS | |
| | | | VPILLHHSHRFKNLGAQTGELWNTFLK | |
| | | | TAAPLAPVKALMPVFTLSPVIINTAPCL | |
| | | | FSDGSTSRAAYILWDKQILSQRSFPLPP | |
| | | | PHKSAQRAELLGLLHGLSSARSWRCL | |
| | | | NIFLDSKYLYHYLRTLALGTFQGRSSQ | |
| | | | APFQALLPRLLSRKVVYLHHVRSHTNL | |
| | | | PDPISRLNALTDALLITPVLQLSPAELHS | |
| | | | FTHCGQTALTLQGATTTEASNILRSCH | |
| | | | ACRGGNPQHQMPRGHIRRGLLPNHIW | |
| | | | QGDITHFKYKNTLYRLHVWVDTFSGAI | |
| | | | SATQKRKETSSEAISSLLQAIAHLGKPS | |
| | | | YINTDNGPAYISQDFLNMCTSLAIRHTT | |
| | | | HVPYNPTSSGLVERSNGILKTLLYKYF | |
| | | | TDKPDLPMDNALSIALWTINHLNVLTN | |
| | | | CHKTRWQLHHSPRLQPIPETRSLSNKQ | |
| | | | THWYYFKLPGLNSRQWKGPQEALQEA | |
| | | | AGAALIPVSASSAQWIPWRLLKRAACP | |
| | | | RPVGGPADPKEKDLQHHG | |
| | | | (SEQ ID NO: 1564) | |
| POL_ | P14350 | Human | MNPLQLLQPLPAEIKGTKLLAHWDSG | IPR043502, |
| FOA | | spumaretro- | ATITCIPESFLEDEQPIKKTLIKTIHGEK | SSF56672, |
| MV- | | virus | QQNVYYVTFKVKGRKVEAEVIASPYE | IPR000477, |
| resi- | | | YILLSPTDVPWLTQQPLQLTILVPLQEY | PF00078 |
| dues | | | QEKILSKTALPEDQKQQLKTLFVKYDN | |
| only | | | LWQHWENQVGHRKIRPHNIATGDYPP | |
| | | | RPQKQYPINPKAKPSIQIVIDDLLKQGV | |
| | | | LTPQNSTMNTPVYPVPKPDGRWRMVL | |
| | | | DYREVNKTIPLTAAQNQHSAGILATIV | |
| | | | RQKYKTTLDLANGFWAHPITPESYWL | |
| | | | TAFTWQGKQYCWTRLPQGFLNSPALF | |
| | | | TADVVDLLKEIPNVQVYVDDIYLSHDD | |
| | | | PKEHVQQLEKVFQILLQAGYVVSLKKS | |
| | | | EIGQKTVEFLGFNITKEGRGLTDTFKTK | |
| | | | LLNITPPKDLKQLQSILGLLNFARNFIPN | |
| | | | FAELVQPLYNLIASAKGKYIEWSEENT | |
| | | | KQLNMVIEALNTASNLEERLPEQRLVI | |
| | | | KVNTSPSAGYVRYYNETGKKPIMYLN | |
| | | | YVFSKAELKFSMLEKLLTTMHKALIKA | |
| | | | MDLAMGQEILVYSPIVSMTKIQKTPLP | |
| | | | ERKALPIRWITWMTYLEDPRIQFHYDK | |
| | | | TLPELKHIPDVYTSSQSPVKHPSQYEGV | |
| | | | FYTDGSAIKSPDPTKSNNAGMGIVHAT | |
| | | | YKPEYQVLNQWSIPLGNHTAQMAEIA | |
| | | | AVEFACKKALKIPGPVLVITDSFYVAES | |
| | | | ANKELPYWKSNGFVNNKKKPLKHISK | |
| | | | WKSIAECLSMKPDITIQHEKGISLQIPVF | |
| | | | ILKGNALADKLATQGSYVVNCNTKKP | |
| | | | NLDAELDQLLQGHYIKGYPKQYTYFL | |
| | | | EDGKVKVSRPEGVKIIPPQSDRQKIVLQ | |
| | | | AHNLAHTGREATLLKIANLYWWPNM | |
| | | | RKDVVKQLGRCQQCLITNASNKASGPI | |
| | | | LRPDRPQKPFDKFFIDYIGPLPPSQGYL | |
| | | | YVLVVVDGMTGFTWLYPTKAPSTSAT | |
| | | | VKSLNVLTSIAIPKVIHSDQGAAFTSST | |
| | | | FAEWAKERGIHLEFSTPYHPQSGSKVE | |
| | | | RKNSDIKRLLTKLLVGRPTKWYDLLPV | |
| | | | VQLALNNTYSPVLKYTPHQLLFGIDSN | |
| | | | TPFANQDTLDLTREEELSLLQEIRTSLY | |
| | | | HPSTPPASSRSWSPVVGQLVQERVARP | |
| | | | ASLRPRWHKPSTVLKVLNPRTVVILDH | |
| | | | LGNNRTVSIDNLKPTSHQNGTTNDTAT | |
| | | | MDHLEKNE (SEQ ID NO: 1565) | |
| POL_ | P03361 | Bovine | MGNSPSYNPPAGISPSDWLNLLQSAQR | IPR043502, |
| BLVJ- | | leukemia | LNPRPSPSDFTDLKNYIHWFHKTQKKP | SSF56672, |
| resi- | | virus | WTFTSGGPTSCPPGRFGRVPLVLATLN | IPR000477, |
| dues | | | EVLSNEGGAPGASAPEEQPPPYDPPAIL | PF00078 |
| only | | | PIISEGNRNRHRAWALRELQDIKKEIEN | |
| | | | KAPGSQVWIQTLRLAILQADPTPADLE | |
| | | | QLCQYIASPVDQTAHMTSLTAAIAAAE | |
| | | | AANTLQGFNPKTGTLTQQSAQPNAGD | |
| | | | LRSQYQNLWLQAGKNLPTRPSAPWSTI | |
| | | | VQGPAESSVEFVNRLQISLADNLPDGV | |
| | | | PKEPIIDSLSYANANRECQQILQGRGPV | |
| | | | AAVGQKLQACAQWAPKNKQPALLVH | |
| | | | TPGPKMPGPRQPAPKRPPPGPCYRCLK | |
| | | | EGHWARDCPTKATGPPPGPCPICKDPS | |
| | | | HWKRDCPTLKSKNKLIEGGLSAPQTIT | |
| | | | PITDSLSEAELECLLSIPLARSRPSVAVY | |
| | | | LSGPWLQPSQNQALMLVDTGAENTVL | |
| | | | PQNWLVRDYPRIPAAVLGAGGVSRNR | |
| | | | YNWLQGPLTLALKPEGPFITIPKILVDT | |
| | | | SDKWQILGRDVPSRLQASISIPEEVRPP | |
| | | | VVGVLDTPPSHIGLEHLPPPPEVPQFPL | |
| | | | NLERLQALQDLVHRSLEAGYISPWDGP | |
| | | | GNNPVFPVRKPNGAWRFVHDLRATNA | |
| | | | LTKPIPALSPGPPDLTAIPTHPPHIICLDL | |
| | | | KDAFFQIPVEDRFRFYLSFTLPSPGGLQ | |
| | | | PHRRFAWRVLPQGFINSPALFERALQE | |
| | | | PLRQVSAAFSQSLLVSYMDDILYASPT | |
| | | | EEQRSQCYQALAARLRDLGFQVASEK | |
| | | | TSQTPSPVPFLGQMVHEQIVTYQSLPTL | |
| | | | QISSPISLHQLQAVLGDLQWVSRGTPTT | |
| | | | RRPLQLLYSSLKRHHDPRAIIQLSPEQL | |
| | | | QGIAELRQALSHNARSRYNEQEPLLAY | |
| | | | VHLTRAGSTLVLFQKGAQFPLAYFQTP | |
| | | | LTDNQASPWGLLLLLGCQYLQTQALS | |
| | | | SYAKPILKYYHNLPKTSLDNWIQSSED | |
| | | | PRVQELLQLWPQISSQGIQPPGPWKTLI | |
| | | | TRAEVFLTPQFSPDPIPAALCLFSDGAT | |
| | | | GRGAYCLWKDHLLDFQAVPAPESAQK | |
| | | | GELAGLLAGLAAAPPEPVNIWVDSKY | |
| | | | LYSLLRTLVLGAWLQPDPVPSYALLYK | |
| | | | SLLRHPAIVVGHVRSHSSASHPIASLNN | |
| | | | YVDQLLPLETPEQWHKLTHCNSRALS | |
| | | | RWPNPRISAWDPRSPATLCETCQKLNP | |
| | | | TGGGKMRTIQRGWAPNHIWQADITHY | |
| | | | KYKQFTYALHVFVDTYSGATHASAKR | |
| | | | GLTTQTTIEGLLEAIVHLGRPKKLNTD | |
| | | | QGANYTSKTFVRFCQQFGVSLSHHVP | |
| | | | YNPTSSGLDERTNGLLKLLLSKYHLDE | |
| | | | PHLPMTQALSRALWTHNQINLLPILKT | |
| | | | RWELHHSPPLAVISEGGETPKGSDKLF | |
| | | | LYLLPGQNNRRWLGPLPALVEASGGA | |
| | | | LLATDPPVWVPWRLLKAFKCLKNDGP | |
| | | | EDAHNRSSDG (SEQ ID NO: 1566) | |
| O4189 | O41894 | Bovine | MPALRPLQVEIKGNHLKGYWDSGAEI | IPR043502, |
| 4_9RE | | foamy | TCVPAIYIIEEQPVGKKLITTIHNEKEHD | SSF56672, |
| TR- | | virus | VYYVEMKIEKRKVQCEVIATALDYVL | IPR000477, |
| resi- | | | VAPVDIPWYKPGPLELTIKIDVESQKHT | PF00078 |
| dues | | | LITESTLSPQGQMRLKKLLDQYQALW | |
| only | | | QCWENQVGHRRIEPHKIATGALKPRPQ | |
| | | | KQYHINPRAKADIQIVIDDLLRQGVLR | |
| | | | QQNSEMNTPVYPVPKADGRWRMVLD | |
| | | | YREVNKVTPLVATQNCHSASILNTLYR | |
| | | | GPYKSTLDLANGFWAHPIKPEDYWITA | |
| | | | FTWGGKTYCWTVLPQGFLNSPALFTA | |
| | | | DVVDILKDIPNVQVYVDDVYVSSATE | |
| | | | QEHLDILETIFNRLSTAGYIVSLKKSKL | |
| | | | AKETVEFLGFSISQNGRGLTDSYKQKL | |
| | | | MDLQPPTTLRQLQSILGLINFARNFLPN | |
| | | | FAELVAPLYQLIPKAKGQCIPWTMDHT | |
| | | | TQLKTIIQALNSTENLEERRPDVDLIMK | |
| | | | VHISNTAGYIRFYNHGGQKPIAYNNAL | |
| | | | FTSTELKFTPTEKIMATIHKGLLKALDL | |
| | | | SLGKEIHVYSAIASMTKLQKTPLSERK | |
| | | | ALSIRWLKWQTYFEDPRIKFHHDATLP | |
| | | | DLQNLPVPQQDTGKEMTILPLLHYEAI | |
| | | | FYTDGSAIRSPKPNKTHSAGMGIIQAKF | |
| | | | EPDFRIVHLWSFPLGDHTAQYAEIAAF | |
| | | | EFAIRRATGIRGPVLIVTDSNYVAKSYN | |
| | | | EELPYWESNGFVNNKKKTLKHISKWK | |
| | | | AIAECKNLKADIHVIHEPGHQPAEASP | |
| | | | HAQGNALADKQAVSGSYKVFSNELKP | |
| | | | SLDAELEQVLSTGRPNPQGYPNKYEYK | |
| | | | LVNGLCYVDRRGEEGLKIIPPKADRVK | |
| | | | LCQLAHDGPGSAHLGRSALLLKLQQK | |
| | | | YWWPRMHIDASRIVLNCTVCAQTNST | |
| | | | NQKPRPPLVIPHDTKPFQVWYMDYIGP | |
| | | | LPPSNGYQHALVIVDAGTGFTWIYPTK | |
| | | | AQTANATVKALTHLTGTAVPKVLHSD | |
| | | | QGPAFTSSILADWAKDRGIQLEHSAPY | |
| | | | HPQSSGKVERKNSEIKRLLTKLLAGRP | |
| | | | TKWYPLIPIVQLALNNTPNTRQKYTPH | |
| | | | QLMYGADCNLPFENLDTLDLTREEQL | |
| | | | AVLKEVRDGLLDLYPSPSQTTARSWTP | |
| | | | SPGLLVQERVARPAQLRPKWRKPTPIK | |
| | | | KVLNERTVIIDHLGQDKVVSIDNLKPA | |
| | | | AHQKLAQTPDSAEICPSATPCPPNTSL | |
| | | | WYDLDTGTWTCQRCGYQCPDKYHQP | |
| | | | QCTWSCEDRCGHRWKECGNCIPQDGS | |
| | | | SDDASAVAAVEI (SEQ ID NO: 1567) | |
| POL_ | Q7SVK7 | Murine | MGQTVTTPLSLTLEHWGDVQRIASNQ | IPR043502, |
| MLV | | leukemia | SVGVKKRRWVTFCSAEWPTFGVGWP | SSF56672, |
| BM- | | virus | QDGTFNLDIILQVKSKVFSPGPHGHPD | IPR000477, |
| resi- | | | QVPYIVTWEAIAYEPPPWVKPFVSPKL | PF00078, |
| dues | | | SLSPTAPILPSGPSTQPPPRSALYPAFTP | cd03715 |
| only | | | SIKPRPSKPQVLSDDGGPLIDLLTEDPPP | |
| | | | YGEQGPSSPDGDGDREEATSTSEIPAPS | |
| | | | PMVSRLRGKRDPPAADSTTSRAFPLRL | |
| | | | GGNGQLQYWPFSSSDLYNWKNNNPSF | |
| | | | SEDPGKLTALIESVLTTHQPTWDDCQQ | |
| | | | LLGTLLTGEEKQRVLLEARKAVRGND | |
| | | | GRPTQLPNEVNSAFPLERPDWDYTTPE | |
| | | | GRNHLVLYRQLLLAGLQNAGRSPTNL | |
| | | | AKVKGITQGPNESPSAFLERLKEAYRR | |
| | | | YTPYDPEDPGQETNVSMSFIWQSAPAI | |
| | | | GRKLERLEDLKSKTLGDLVREAEKIFN | |
| | | | KRETPEEREERIRRETEEKEERRRAGDE | |
| | | | QREKERDRRRQREMSKLLATVVTGQR | |
| | | | QDRQGGERRRPQLDKDQCAYCKEKG | |
| | | | HWAKDCPKKPRGPRGPRPQTSLLTLD | |
| | | | DQGGQGQEPPPEPRITLTVGGQPVTFL | |
| | | | VDTGAQHSVLTQNPGPLSDRSAWVQG | |
| | | | ATGGKRYRWTTDRKVHLATGKVTHSF | |
| | | | LHVPDCPYPLLGRDLLTKLKAQIHFEG | |
| | | | SGAQVVGPKGQPLQVLTLGIEDEYRLH | |
| | | | ETSTEPDVSLGSTWLSDFPQAWAETGG | |
| | | | MGLAVRQAPLIIPLKATSTPVSIQQYPM | |
| | | | SHEARLGIKPHIQRLLDQGILVPCQSPW | |
| | | | NTPLLPVKKPGTNDYRPVQDLREVNK | |
| | | | RVEDIHPTVPNPYNLLSGLPPSHQWYT | |
| | | | VLDLKDAFFCLRLHPTSQPLFAFEWRD | |
| | | | PGMGISGQLTWTRLPQGFKNSPTLFDE | |
| | | | ALHRDLADFRIQHPDLILLQYVDDILLA | |
| | | | ATSELDCQQGTRALLQTLGDLGYRAS | |
| | | | AKKAQICQKQVKYLGYLLREGQRWLT | |
| | | | EARKETVMGQPVPKTPRQLREFLGTA | |
| | | | GFCRLWIPGFAEMAAPLYPLTKTGTLF | |
| | | | SWGPDQQKAYQEIKQALLTAPALGLP | |
| | | | DLTKPFELFVDEKQGYAKGVLTQKLG | |
| | | | PWRRPVAYLSKKLDPVAAGWPPCLRM | |
| | | | VAAIAVLTKDAGKLTMGQPLVILAPH | |
| | | | AVEALVKQPPDRWLSNARMTHYQAM | |
| | | | LLDTDRVQFGPVVALNPATLLPLPEEG | |
| | | | APHDCLEILAETHGTRPDLTDQPIPDAD | |
| | | | HTWYTDGSSFLQEGQRKAGAAVTTET | |
| | | | EVIWAGALPAGTSAQRAELIALTQALK | |
| | | | MAEGKRLNVYTDSRYAFATAHIHGEI | |
| | | | YRRRGLLTSEGREIKNKSEILALLKALF | |
| | | | LPKRLSIIHCLGHQKGDSAEARGNRLA | |
| | | | DQAAREAAIKTPPDTSTLLIEDSTPYTP | |
| | | | AYFHYTETDLKKLRDLGATYNQSKGY | |
| | | | WVFQGKPVMPDQFVFELLDSLHRLTH | |
| | | | LGYQKMKALLDRGESPYYMLNRDKT | |
| | | | LQYVADSCTVCAQVNASKAKIGAGVR | |
| | | | VRGHRPGTHWEIDFTEVKPGLYGYKY | |
| | | | LLVFVDTFSGWVEAFPTKRETARVVSK | |
| | | | KLLEEIFPRFGMPQVLGSDNGPAFTSQ | |
| | | | VSQSVADLLGIDWKLHCAYRPQSSGQ | |
| | | | VERINRTIKETLTKLTLAAGTRDWVLL | |
| | | | LPLALYRARNTPGPHGLTPYEILYGAPP | |
| | | | PLVNFHDPDMSELTNSPSLQAHLQALQ | |
| | | | TVQREIWKPLAEAYRDRLDQPVIPHPF | |
| | | | RIGDSVWVRRHQTKNLEPRWKGPYTV | |
| | | | LLTTPTALKVDGISAWIHAAHVKAATT | |
| | | | PPIKPSWRVQRSQNPLKIRLTRGAP | |
| | | | (SEQ ID NO: 2453) | |

TABLE 31
Exemplary dimeric retroviral reverse transcriptases and
their RT domain signatures

| | | | | RT |
|---|---|---|---|---|
| Name | Accession | Organism | Sequence | Signatures |
| Q8313 | Q83133 | Avian | RATVLTVALHLAIPLKWKPN | IPR043502, |
| 3_AVIMA | | myeloblastosis- | HTPVWIDQWPLPEGKLVALT | SSF56672, |
| | | associated | QLVEKELQLGHIEPSLSCWN | IPR000477, |
| | | virus type | TPVFVIRKASGSYRLLHDLR | PF00078, |
| | | 1 | AVNAKLVPFGAVQQGAPVLS | cd01645, |
| | | | ALPRGWPLMVLDLKDCFFSI | PF06817, |
| | | | PLAEQDREAFAFTLPSVNNQ | IPR010661 |
| | | | APARRFQWKVLPQGMTCSPT | |
| | | | ICQLIVGQILEPLRLKHPSL | |
| | | | RMLHYMDDLLLAASSHDGLE | |
| | | | AAGEEVISTLERAGFTISPD | |
| | | | KVQREPGVQYLGYKLGSTYV | |
| | | | APVGLVAEPRIATLWDVQKL | |
| | | | VGSLQSVRPALGIPPRLMGP | |
| | | | FYEQLRGSDPNEAREWNLDM | |
| | | | KMAWREIVQLSTTAALERWD | |
| | | | PALPLEGAVARCEQGAIGVL | |
| | | | GQGLSTHPRPCLWLFSTQPT | |
| | | | KAFTAWLEVLTLLITKLRAS | |
| | | | AVRTFGKEVDILLLPACFRE | |
| | | | DLPLPEGILLALRGFAGKIR | |
| | | | SSDTPSIFDIARPLHVSLKV | |
| | | | RVTDHPVPGPTVFTDASSST | |
| | | | HKGVVVWREGPRWEIKEIAD | |
| | | | LGASVQQLEARAVAMALLLW | |
| | | | PTTPTNVVTDSAFVAKMLLK | |
| | | | MGQEGVPSTAAAFILEDALS | |
| | | | QRSAMAAVLHVRSHSEVPGF | |
| | | | FTEGNDVADSQATFQAYPLR | |
| | | | EAKDLHTALHIGPRALSKAC | |
| | | | NISMQQAREVVQTCPHCNSA | |
| | | | PALEAGVNPRGLGPLQIWQT | |
| | | | DFTLEPRMAPRSWLAVTVDT | |
| | | | ASSAIVVTQHGRVTSVAAQH | |
| | | | HWATAIAVLGRPKAIKTDNG | |
| | | | SCFTSKSTREWLARWGIAHT | |
| | | | TGIPGNSQGQAMVERANRLL | |
| | | | KDKIRVLAEGDGFMKRIPTS | |
| | | | KQGELLAKAMYALNHFERGE | |
| | | | NTKTPIQKHWRPTVLTEGP | |
| | | | PVKIRIETGEWEKGWNVLVW | |
| | | | GRGYAAVKNRDTDKVIWVPS | |
| | | | RKVKPDITQKDEVTKKDEAS | |
| | | | PLFAGISDWAPWEGEQEGLQ | |
| | | | EETASNKQERPGEDTPAANE | |
| | | | S | |
| | | | (SEQ ID NO: 1568) | |
| POL_ | P05896 | Simian | MGARNSVLSGKKADELEKIR | IPR043502, |
| SIVM1 | | immuno- | LRPGGKKKYMLKHVVWAANE | SSF56672, |
| | | deficiency | LDRFGLAESLLENKEGCQKI | IPR000477, |
| | | virus | LSVLAPLVPTGSENLKSLYN | PF00078, |
| | | | TVCVIWCIHAEEKVKHTEEA | PF06817, |
| | | | KQIVQRHLVMETGTAETMPK | IPR010661, |
| | | | TSRPTAPFSGRGGNYPVQQI | PF06815, |
| | | | GGNYTHLPLSPRTLNAWVKL | IPR010659 |
| | | | IEEKKFGAEVVSGFQALSEG | |
| | | | CLPYDINQMLNCVGDHQAAM | |
| | | | QIIRDIINEEAADWDLQHPQ | |
| | | | QAPQQGQLREPSGSDIAGTT | |
| | | | STVEEQIQWMYRQQNPIPVG | |
| | | | NIYRRWIQLGLQKCVRMYNP | |
| | | | TNILDVKQGPKEPFQSYVDR | |
| | | | FYKSLRAEQTDPAVKNWMTQ | |
| | | | TLLIQNANPDCKLVLKGLGT | |
| | | | NPTLEEMLTACQGVGGPGQK | |
| | | | ARLMAEALKEALAPAPIPFA | |
| | | | AAQQKGPRKPIKCWNCGKEG | |
| | | | HSARQCRAPRRQGCWKCGKM | |
| | | | DHVMAKCPNRQAGFFRPWPL | |
| | | | GKEAPQFPHGSSASGADANC | |
| | | | SPRRTSCGSAKELHALGQAA | |
| | | | ERKQREALQGGDRGFAAPQF | |
| | | | SLWRRPVVTAHIEGQPVEVL | |
| | | | LDTGADDSIVTGIELGPHYT | |
| | | | PKIVGGIGGFINTKEYKNVE | |
| | | | IEVLGKRIKGTIMTGDTPIN | |
| | | | IFGRNLLTALGMSLNLPIAK | |
| | | | VEPVKSPLKPGKDGPKLKQW | |
| | | | PLSKEKIVALREICEKMEKD | |
| | | | GQLEEAPPTNPYNTPTFAIK | |
| | | | KKDKNKWRMLIDFRELNRVT | |
| | | | QDFTEVQLGIPHPAGLAKRK | |
| | | | RITVLDIGDAYFSIPLDEEF | |
| | | | RQYTAFTLPSVNNAEPGKRY | |
| | | | IYKVLPQGWKGSPAIFQYTM | |
| | | | RHVLEPFRKANPDVTLVQYM | |
| | | | DDILIASDRTDLEHDRVVLQ | |
| | | | LKELLNSIGFSSPEEKFQKD | |
| | | | PPFQWMGYELWPTKWKLQKI | |
| | | | ELPQRETWTVNDIQKLVGVL | |
| | | | NWAAQIYPGIKTKHLCRLIR | |
| | | | GKMTLTEEVQWTEMAEAEYE | |
| | | | ENKIILSQEQEGCYYQESKP | |
| | | | LEATVIKSQDNQWSYKIHQE | |
| | | | DKILKVGKFAKIKNTHTNGV | |
| | | | RLLAHVIQKIGKEAIVIWGQ | |
| | | | VPKFHLPVEKDVWEQVVWTD | |
| | | | YWQVTWIPEWDFISTPPLVR | |
| | | | LVFNLVKDPIEGEETYYVDG | |
| | | | SCSKQSKEGKAGYITDRGKD | |
| | | | KVKVLEQTTNQQAELEAFLM | |
| | | | ALTDSGPKANIIVDSQYVMG | |
| | | | IITGCPTESESRLVNQIIEE | |
| | | | MIKKTEIYVAWVPAHKGIGG | |
| | | | NQEIDHLVSQGIRQVLFLEK | |
| | | | IEPAQEEHSKYHSNIKELVF | |
| | | | KFGLPRLVAKQIVDTCDKCH | |
| | | | QKGEAIHGQVNSDLGTWQMD | |
| | | | CTHLEGKIVIVAVHVASGFI | |
| | | | EAEVIPQETGRQTALFLLKL | |
| | | | ASRWPITHLHTDNGANFASQ | |
| | | | EVKMVAWWAGIEHTFGVPYN | |
| | | | PQSQGVVEAMNHHLKNQIDR | |
| | | | IREQANSVETIVLMAVHCMN | |
| | | | FKRRGGIGDMTPAERLINMI | |
| | | | TTEQEIQFQQSKNSKFKNFR | |
| | | | VYYREGRDQLWKGPGELLWK | |
| | | | GEGAVILKVGTDIKVVPRRK | |
| | | | AKIIKDYGGGKEMDSSSHME | |
| | | | DTGEAREVA | |
| | | | (SEQ ID NO: 1569) | |
| POL_ | P03354 | Rous | MEAVIKVISSACKTYCGKTS | IPR043502, |
| RSVP | | sarcoma | PSKKEIGAMLSLLQKEGLLM | SSF56672, |
| | | virus | SPSDLYSPGSWDPITAALSQ | IPR000477, |
| | | | RAMILGKSGELKTWGLVLGA | PF00078, |
| | | | LKAAREEQVTSEQAKFWLGL | cd01645, |
| | | | GGGRVSPPGPECIEKPATER | PF06817, |
| | | | RIDKGEEVGETTVQRDAKMA | IPR010661 |
| | | | PEETATPKTVGTSCYHCGTA | |
| | | | IGCNCATASAPPPPYVGSGL | |
| | | | YPSLAGVGEQQGQGGDTPPG | |
| | | | AEQSRAEPGHAGQAPGPALT | |
| | | | DWARVREELASTGPPVVAMP | |
| | | | VVIKTEGPAWTPLEPKLITR | |
| | | | LADTVRTKGLRSPITMAEVE | |
| | | | ALMSSPLLPHDVTNLMRVIL | |
| | | | GPAPYALWMDAWGVQLQTVI | |
| | | | AAATRDPRHPANGQGRGERT | |
| | | | NLNRLKGLADGMVGNPQGQA | |
| | | | ALLRPGELVAITASALQAFR | |
| | | | EVARLAEPAGPWADIMQGPS | |
| | | | ESFVDFANRLIKAVEGSDLP | |
| | | | PSARAPVIIDCFRQKSQPDI | |
| | | | QQLIRTAPSTLTTPGEIIKY | |
| | | | VLDRQKTAPLTDQGIAAAMS | |
| | | | SAIQPLIMAVVNRERDGQTG | |
| | | | SGGRARGLCYTCGSPGHYQA | |
| | | | QCPKKRKSGNSRERCQLCNG | |
| | | | MGHNAKQCRKRDGNQGQRPG | |
| | | | KGLSSGPWPGPEPPAVSLAM | |
| | | | TMEHKDRPLVRVILTNTGSH | |
| | | | PVKQRSVYITALLDSGADIT | |
| | | | IISEEDWPTDWPVMEAANPQ | |
| | | | IHGIGGGIPMRKSRDMIELG | |
| | | | VINRDGSLERPLLLFPAVAM | |
| | | | VRGSILGRDCLQGLGLRLTN | |
| | | | LIGRATVLTVALHLAIPLKW | |
| | | | KPDHTPVWIDQWPLPEGKLV | |
| | | | ALTQLVEKELQLGHIEPSLS | |
| | | | CWNTPVFVIRKASGSYRLLH | |
| | | | DLRAVNAKLVPFGAVQQGAP | |
| | | | VLSALPRGWPLMVLDLKDCF | |
| | | | FSIPLAEQDREAPAFTLPSV | |
| | | | NNQAPARRFQWKVLPQGMTC | |
| | | | SPTICQLVVGQVLEPLRLKH | |
| | | | PSLCMLHYMDDLLLAASSHD | |
| | | | GLEAAGEEVISTLERAGFTI | |
| | | | SPDKVQREPGVQYLGYKLGS | |
| | | | TYVAPVGLVAEPRIATLWDV | |
| | | | QKLVGSLQWLRPALGIPPRL | |
| | | | MGPFYEQLRGSDPNEAREWN | |
| | | | LDMKMAWREIVRLSTTAALE | |
| | | | RWDPALPLEGAVARCEQGAI | |
| | | | GVLGQGLSTHPRPCLWLFST | |
| | | | QPTKAFTAWLEVLTLLITKL | |
| | | | RASAVRTFGKEVDILLLPAC | |
| | | | FREDLPLPEGILLALKGFAG | |
| | | | KIRSSDTPSIFDIARPLHVS | |
| | | | LKVRVTDHPVPGPTVFTDAS | |
| | | | SSTHKGVVVWREGPRWEIKE | |
| | | | IADLGASVQQLEARAVAMAL | |
| | | | LLWPTTPTNVVTDSAFVAKM | |
| | | | LLKMGQEGVPSTAAAFILED | |
| | | | ALSQRSAMAAVLHVRSHSEV | |
| | | | PGFFTEGNDVADSQATFQAY | |
| | | | PLREAKDLHTALHIGPRALS | |
| | | | KACNISMQQAREVVQTCPHC | |
| | | | NSAPALEAGVNPRGLGPLQI | |
| | | | WQTDFTLEPRMAPRSWLA | |
| | | | VTVD | |
| | | | TASSAIVVTQHGRVTSVAVQ | |
| | | | HHWATAIAVLGRPKAIKTDN | |
| | | | GSCFTSKSTREWLARWGIAH | |
| | | | TTGIPGNSQGQAMVERANRL | |
| | | | LKDRIRVLAEGDGFMKRIPT | |
| | | | SKQGELLAKAMYALNHFERG | |
| | | | ENTKTPIQKHWRPTVLTEGP | |
| | | | PVKIRIETGEWEKGWNVLVW | |
| | | | GRGYAAVKNRDTDKVIWVPS | |
| | | | RKVKPDITQKDEVTKKDEAS | |
| | | | PLFAGISDWIPWEDEQEGLQ | |
| | | | GETASNKQERPGEDTLAANE | |
| | | | S | |
| | | | (SEQ ID NO: 1570) | |
| POL_ | P15833 | Human | MGARGSVLSGKKTDELEKVR | IPR043502, |
| HV2D2 | | immuno- | LRPGGKKKYMLKHVVWAVNE | SSF56672, |
| | | deficiency | LDRFGLAESLLESKEGCQKI | IPR000477, |
| | | virus type | LKVLAPLVPTGSENLKSLFN | PF00078, |
| | | 2 | IVCVIFCLHAEEKVKDTEEA | PF06817, |
| | | | KKIAQRHLAADTEKMPATNK | IP010661, |
| | | | PTAPPSGGNYPVQQLAGNYV | PF06815, |
| | | | HLPLSPRTLNAWVKLVEEKK | IPR010659 |
| | | | FGAEVVPGFQALSEGCTPYD | |
| | | | INQMLNCVGEHQAAMQIIRE | |
| | | | IINEEAADWDQQHPSPGPMP | |
| | | | AGQLRDPRGSDIAGTTSTVE | |
| | | | EQIQWMYRAQNPVPVGNIYR | |
| | | | RWIQLGLQKCVRMYNPTNIL | |
| | | | DIKQGPKEPFQSYVDRFYKS | |
| | | | LRAEQTDPAVKNWMTQTLLI | |
| | | | QNANPDCKLVLKGLGMNPTL | |
| | | | EEMLTACQGIGGPGQKARLM | |
| | | | AEALKEALTPAPIPFAAVQQ | |
| | | | KAGKRGTVTCWNCGKQGHTA | |
| | | | RQCRAPRRQGCWKCGKTGHI | |
| | | | MSKCPERQAGFLRVRTLGKE | |
| | | | ASQLPHDPSASGSDTICTPD | |
| | | | EPSRGHDTSGGDTICAPCRS | |
| | | | SSGDAEKLHADGETTEREPR | |
| | | | ETLQGGDRGFAAPQFSLWR | |
| | | | RPVVKACIEGQSVEVLLDTG | |
| | | | VDDSIVAGIELGSNYTPKIV | |
| | | | GGIGGFINTKEYKDVEIEVV | |
| | | | GKRVRATIMTGDTPINIFGR | |
| | | | NILNTLGMTLNFPVAKVEPV | |
| | | | KVELKPGKDGPKIRQWPLSR | |
| | | | EKILALKEICEKMEKEGQLE | |
| | | | EAPPTNPYNTPTFAIKKKDK | |
| | | | NKWRMLIDFRELNKVTQDFT | |
| | | | EVNWVFPTRQVAEKRRITVI | |
| | | | DVGDAYFSIPLDPNFRQYTA | |
| | | | FTLPSVNNAEPGKRYIYKVL | |
| | | | PQGWKGSQSICQYSMRKVLD | |
| | | | PFRKANSDVIIIQYMDDILI | |
| | | | ASDRSDLEHDRVVSQLKELL | |
| | | | NDMGFSTPEEKFQKDPPFKW | |
| | | | MGYELWPKKWKLQKIQLPEK | |
| | | | EVWTVNAIQKLVGVLNWAAQ | |
| | | | LFPGIKTRHICKLIRGKMTL | |
| | | | TEEVQWTELAEAELQENKII | |
| | | | LEQEQEGSYYKERVPLEATV | |
| | | | QKNLANQWTYKIHQGNKVLK | |
| | | | VGKYAKVKNTHTNGVRLLAH | |
| | | | VVQKIGKEALVIWGEIPVFH | |
| | | | LPVERETWDQWWTDYWQVTW | |
| | | | IPEWDFVSTPPLIRLAYNLV | |
| | | | KDPLEGRETYYTDGSCNRTS | |
| | | | KEGKAGYVTDRGKDKVKVLE | |
| | | | QTTNQQAELEAFALALTDSE | |
| | | | PQVNIIVDSQYVMGIIAAQP | |
| | | | TETESPIVAKIIEEMIKKEA | |
| | | | VYVGWVPAHKGLGGNQEVDH | |
| | | | LVSQGIRQVLFLEKIEPAQE | |
| | | | EHEKYHGNVKELVHKFGIPQ | |
| | | | LVAKQIVNSCDKCQQKGEAI | |
| | | | HGQVNADLGTWQMDCTHLEG | |
| | | | KIIIVAVHVASGFIEAEVIP | |
| | | | QETGRQTALFLLKLASRWPI | |
| | | | THLHTDNGANFTSPSVKMVA | |
| | | | WWVGIEQTFGVPYNPQSQGV | |
| | | | VEAMNHHLKNQIDRLRDQAV | |
| | | | SIETVVLMATHCMNFKRRGG | |
| | | | IGDMTPAERLVNMITTEQEI | |
| | | | QFFQAKNLKFQNFQVYYREG | |
| | | | RDQLWKGPGELLWKGEGAVI | |
| | | | IKVGTEIKVVPRRKAKIIRH | |
| | | | YGGGKGLDCSADMEDTRQAR | |
| | | | EMAQSD | |
| | | | (SEQ ID NO: 1571) | |
| POL_ | P03369 | Human | MGARASVLSGGELDKWEKIR | IPR043502, |
| HV1A2 | | immuno- | LRPGGKKKYKLKHIVWASRE | SSF56672, |
| | | deficiency | LERFAVNPGLLETSEGCRQI | IPR000477, |
| | | virus type | LGQLQPSLQTGSEELRSLYN | PF00078, |
| | | 1 | TVATLYCVHQRIDVKDTKEA | cd01645, |
| | | | LEKIEEEQNKSKKKAQQAAA | PF06817, |
| | | | AAGTGNSSQVSQNYPIVQNL | IPR010661, |
| | | | QGQMVHQAISPRTLNAWVKV | PF06815, |
| | | | VEEKAFSPEVIPMFSALSEG | IPR010659 |
| | | | ATPQDLNTMLNTVGGHQAAM | |
| | | | QMLKETINEEAAEWDRVHPV | |
| | | | HAGPIAPGQMREPRGSDIAG | |
| | | | TTSTLQEQIGWMTNNPPIPV | |
| | | | GEIYKRWIILGLNKIVRMYS | |
| | | | PTSILDIRQGPKEPFRDYVD | |
| | | | RFYKTLRAEQASQDVKNWMT | |
| | | | ETLLVQNANPDCKTILKALG | |
| | | | PAATLEEMMTACQGVGGPGH | |
| | | | KARVLAEAMSQVTNPANIMM | |
| | | | QRGNFRNQRKTVKCFNCGKE | |
| | | | GHIAKNCRAPRKKGCWRCGR | |
| | | | EGHQMKDCTERQANFLREDL | |
| | | | AFLQGKAREFSSEQTRANSP | |
| | | | TRRELQVWGGENNSLSEAGA | |
| | | | DRQGTVSFNFPQITLWQRPL | |
| | | | VTIRIGGQLKEALLDTGADD | |
| | | | TVLEEMNLPGKWKPKMIGGI | |
| | | | GGFIKVRQYDQIPVEICGHK | |
| | | | AIGTVLVGPTPVNIIGRNLL | |
| | | | TQIGCTLNFPISPIETVPVK | |
| | | | LKPGMDGPKVKQWPLTEEKI | |
| | | | KALVEICTEMEKEGKISKIG | |
| | | | PENPYNTPVFAIKKKDSTKW | |
| | | | RKLVDFRELNKRTQDFWEVQ | |
| | | | LGIPHPAGLKKKKSVTVLDV | |
| | | | GDAYFSVPLDKDFRKYTAFT | |
| | | | IPSINNETPGIRYQYNVLPQ | |
| | | | GWKGSPAIFQSSMTKILEPF | |
| | | | RKQNPDIVIYQYMDDLYVGS | |
| | | | DLEIGQHRTKIEELRQHLLR | |
| | | | WGFTTPDKKHQKEPPFLWMG | |
| | | | YELHPDKWTVQPIMLPEKDS | |
| | | | WTVNDIQKLVGKLNWASQIY | |
| | | | AGIKVKQLCKLLRGTKALTE | |
| | | | VIPLTEEAELELAENREILK | |
| | | | EPVHEVYYDPSKDLVAEIQK | |
| | | | QGQGQWTYQIYQEPFKNLKT | |
| | | | GKYARMRGAHTNDVKQLTEA | |
| | | | VQKVSTESIVIWGKIPKFKL | |
| | | | PIQKETWEAWWMEYWQATWI | |
| | | | PEWEFVNTPPLVKLWYQLEK | |
| | | | EPIVGAETFYVDGAANRETK | |
| | | | LGKAGYVTDRGRQKVVSIAD | |
| | | | TTNQKTELQAIHLALQDSGL | |
| | | | EVNIVTDSQYALGIIQAQPD | |
| | | | KSESELVSQIIEQLIKKEKV | |
| | | | YLAWVPAHKGIGGNEQVDKL | |
| | | | VSAGIRKVLFLNGIDKAQEE | |
| | | | HEKYHSNWRAMASDFNLPPV | |
| | | | VAKEIVASCDKCQLKGEAMH | |
| | | | GQVDCSPGIWQLDCTHLEGK | |
| | | | IILVAVHVASGYIEAEVIPA | |
| | | | ETGQETAYFLLKLAGRWPVK | |
| | | | TIHTDNGSNFTSTTVKAACW | |
| | | | WAGIKQEFGIPYNPQSQGVV | |
| | | | ESMNNELKKIIGQVRDQAEH | |
| | | | LKTAVQMAVFIHNFKRKGGI | |
| | | | GGYSAGERIVDIIATDIQTK | |
| | | | ELQKQITKIQNFRVYYRDNK | |
| | | | DPLWKGPAKLLWKGEGAVVI | |
| | | | QDNSDIKVVPRRKAKIIRDY | |
| | | | GKQMAGDDCVASRQDED | |
| | | | (SEQ ID NO: 1572) | |
| POL_ | P16088 | Feline | KEFGKLEGGASCSPSESNAA | IPR043502, |
| FIVPE | | Immuno- | SSNAICTSNGGETIGFVNYN | SSF56672, |
| | | deficiency | KVGTTTTLEKRPEILIFVNG | IPR000477, |
| | | virus | YPIKFLLDTGADITILNRRD | PF00078, |
| | | | FQVKNSIENGRQNMIGVGGG | PF06817, |
| | | | KRGTNYINVHLEIRDENYKT | IPR010661, |
| | | | QCIFGNVCVLEDNSLIQPLL | PF06815, |
| | | | GRDNMIKFNIRLVMAQISDK | IPR010659 |
| | | | IPVVKVKMKDPNKGPQIKQW | |
| | | | PLTNEKIEALTEIVERLEKE | |
| | | | GKVKRADSNNPWNTPVFAIK | |
| | | | KKSGKWRMLIDFRELNKLTE | |
| | | | KGAEVQLGLPHPAGLQIKKQ | |
| | | | VTVLDIGDAYFTIPLDPDYA | |
| | | | PYTAFTLPRKNNAGPGRRFV | |
| | | | WCSLPQGWILSPLIYQSTLD | |
| | | | NIIQPFIRQNPQLDIYQYMD | |
| | | | DIYIGSNLSKKEHKEKVEEL | |
| | | | RKLLLWWGFETPEDKLQEEP | |
| | | | PYTWMGYELHPLTWTIQQKQ | |
| | | | LDIPEQPTLNELQKLAGKIN | |
| | | | WASQAIPDLSIKALTNMMRG | |
| | | | NQNLNSTRQWTKEARLEVQK | |
| | | | AKKAIEEQVQLGYYDPSKEL | |
| | | | YAKLSLVGPHQISYQVYQKD | |
| | | | PEKILWYGKMSRQKKKAENT | |
| | | | CDIALRACYKIREESIIRIG | |
| | | | KEPRYEIPTSREAWESNLIN | |
| | | | SPYLKAPPPEVEYIHAALNI | |
| | | | KRALSMIKDAPIPGAETWYI | |
| | | | DGGRKLGKAAKAAYWTDTGK | |
| | | | WRVMDLEGSNQKAEIQALLL | |
| | | | ALKAGSEEMNIITDSQYVIN | |
| | | | IILQQPDMMEGIWQEVLEEL | |
| | | | EKKTAIFIDWVPGHKGIPGN | |
| | | | EEVDKLCQTMMIIEGDGILD | |
| | | | KRSEDAGYDLLAAKEIHLLP | |
| | | | GEVKVIPTGVKLMLPKGYWG | |
| | | | LIIGKSSIGSKGLDVLGGVI | |
| | | | DEGYRGEIGVIMINVSRKSI | |
| | | | TLMERQKIAQLIILPCKHEV | |
| | | | LEQGKVVMDSERGDNGYGST | |
| | | | GVFSSWVDRIEEAEINHEKF | |
| | | | HSDPQYLRTEFNLPKMVAEE | |
| | | | IRRKCPVCRIIGEQVGGQLK | |
| | | | IGPGIWQMDCTHFDGKIILV | |
| | | | GIHVESGYIWAQIISQETAD | |
| | | | CTVKAVLQLLSAHNVTELQT | |
| | | | DNGPNFKNQKMEGVLNYMGV | |
| | | | KHKFGIPGNPQSQALVENVN | |
| | | | HTLKVWIQKFLPETTSLDNA | |
| | | | LSLAVHSLNFKRRGRIGGMA | |
| | | | PYELLAQQESLRIQDYFSAI | |
| | | | PQKLQAQWIYYKDQKDKKWK | |
| | | | GPMRVEYWGQGSVLLKDEEK | |
| | | | GYFLIPRRHIRRVPEPCALP | |
| | | | EGDE | |
| | | | (SEQ ID NO: 1573) | |
| POL_ | P03371 | Equine | TAWTFLKAMQKCSKKREARG | IPR043502, |
| EIAVY | | infectious | SREAPETNFPDTTEESAQQI | SSF56672, |
| | | anemia | CCTRDSSDSKSVPRSERNKK | IPR000477, |
| | | virus | GIQCQGEGSSRGSQPGQFVG | PF00078, |
| | | | VTYNLEKRPTTIVLINDTPL | PF06817, |
| | | | NVLLDTGADTSVLTTAHYNR | IPR010661, |
| | | | LKYRGRKYQGTGIIGVGGNV | PF06815, |
| | | | ETFSTPVTIKKKGRHIKTRM | IPR010659 |
| | | | LVADIPVTILGRDILQDLGA | |
| | | | KLVLAQLSKEIKFRKIELKE | |
| | | | GTMGPKIPQWPLTKEKLEGA | |
| | | | KETVQRLLSEGKISEASDNN | |
| | | | PYNSPIFVIKKRSGKWRLLQ | |
| | | | DLRELNKTVQVGTEISRGLP | |
| | | | HPGGLIKCKHMTVLDIGDAY | |
| | | | FTIPLDPEFRPYTAFTIPSI | |
| | | | NHQEPDKRYVWKCLPQGFVL | |
| | | | SPYIYQKTLQEILQPFRERY | |
| | | | PEVQLYQYMDDLFVGSNGSK | |
| | | | KQHKELIIELRAILQKGFET | |
| | | | PDDKLQEVPPYSWLGYQLCP | |
| | | | ENWKVQKMQLDMVKNPTLND | |
| | | | VQKLMGNITWMSSGVPGLTV | |
| | | | KHIAATTKGCLELNQKVIWT | |
| | | | EEAQKELEENNEKIKNAQGL | |
| | | | QYYNPEEEMLCEVEITKNYE | |
| | | | ATYVIKQSQGILWAGKKIMK | |
| | | | ANKGWSTVKNLMLLLQHVAT | |
| | | | ESITRVGKCPTFKVPFTKEQ | |
| | | | VMWEMQKGWYYSWLPEIVYT | |
| | | | HQVVHDDWRMKLVEEPTSGI | |
| | | | TIYTDGGKQNGEGIAAYVTS | |
| | | | NGRTKQKRLGPVTHQVAERM | |
| | | | AIQMALEDTRDKQVNIVTDS | |
| | | | YYCWKNITEGLGLEGPQNPW | |
| | | | WPIIQNIREKEIVYFAWVPG | |
| | | | HKGIYGNQLADEAAKIKEEI | |
| | | | MLAYQGTQIKEKRDEDAGFD | |
| | | | LCVPYDIMIPVSDTKIIPTD | |
| | | | VKIQVPPNSFGWVTGKSSMA | |
| | | | KQGLLINGGIIDEGYTGEIQ | |
| | | | VICTNIGKSNIKLIEGQKFA | |
| | | | QLIILQHHSNSRQPWDENKI | |
| | | | SQRGDKGFGSTGVFWVENIQ | |
| | | | EAQDEHENWHTSPKILARNY | |
| | | | KIPLTVAKQITQECPHCTKQ | |
| | | | GSGPAGCVMRSPNHWQADCT | |
| | | | HLDNKIILHFVESNSGYIHA | |
| | | | TLLSKENALCTSLAILEWAR | |
| | | | LFSPKSLHTDNGTNFVAEPV | |
| | | | VNLLKFLKIAHTTGIPYHPE | |
| | | | SQGIVERANRTLKEKIQSHR | |
| | | | DNTQTLEAALQLALITCNKG | |
| | | | RESMGGQTPWEVFITNQAQV | |
| | | | IHEKLLLQQAQSSKKFCFYK | |
| | | | IPGEHDWKGPTRVLWKGDGA | |
| | | | VVVNDEGKGIIAVPLTRTKL | |
| | | | LIKPN | |
| | | | (SEQ ID NO: 1574) | |
| POL_ | P19560 | Bovine | MKRRELEKKLRKVRVTPQQD | IPR043502, |
| BIV29 | | Immuno- | KYYTIGNLQWAIRMINLMGI | SSF56672, |
| | | deficiency | KCVCDEECSAAEVALIITQF | IPR000477, |
| | | virus | SALDLENSPIRGKEEVAIKN | PF00078, |
| | | | TLKVFWSLLAGYKPESTETA | PF06817, |
| | | | LGYWEAFTYREREARADKEG | IPR010661 |
| | | | EIKSIYPSLTQNTQNKKQTS | |
| | | | NQTNTQSLPAITTQDGTPRF | |
| | | | DPDLMKQLKIWSDATERNGV | |
| | | | DLHAVNILGVITANLVQEEI | |
| | | | KLLLNSTPKWRLDVQLIESK | |
| | | | VREKENAHRTWKQHHPEAPK | |
| | | | TDEIIGKGLSSAEQATLISV | |
| | | | ECRETFRQWVLQAAMEVAQA | |
| | | | KHATPGPINIHQGPKEPYTD | |
| | | | FINRLVAALEGMAAPETTKE | |
| | | | YLLQHLSIDHANEDCQSILR | |
| | | | PLGPNTPMEKKLEACRVVGS | |
| | | | QKSKMQFLVAAMKEMGIQSP | |
| | | | IPAVLPHTPEAYASQTSGPE | |
| | | | DGRRCYGCGKTGHLKRNCKQ | |
| | | | QKCYHCGKPGHQARNCRSKN | |
| | | | REVLLCPLWAEEPTTEQFSP | |
| | | | EQHEFCDPICTPSYIRLDKQ | |
| | | | PFIKVFIGGRWVKGLVDTGA | |
| | | | DEVVLKNIHWDRIKGYPGTP | |
| | | | IKQIGVNGVNVAKRKTHVEW | |
| | | | RFKDKTGIIDVLFSDTPVNL | |
| | | | FGRSLLRSIVTCFTLLVHTE | |
| | | | KIEPLPVKVRGPGPKVPQWP | |
| | | | LTKEKYQALKEIVKDLLAEG | |
| | | | KISEAAWDNPYNTPVFVIKK | |
| | | | KGTGRWRMLMDFRELNKITV | |
| | | | KGQEFSTGLPYPPGIKECEH | |
| | | | LTAIDIKDAYFTIPLHEDFR | |
| | | | PFTAFSVVPVNREGPIERFQ | |
| | | | WNVLPQGWVCSPAIYQTTTQ | |
| | | | KIIENIKKSHPDVMLYQYMD | |
| | | | DLLIGSNRDDHKQIVQEIRD | |
| | | | KLGSYGFKTPDEKVQEERVK | |
| | | | WIGFELTPKKWRFQPRQLKI | |
| | | | KNPLTVNELQQLVGNCVWVQ | |
| | | | PEVKIPLYPLTDLLRDKTNL | |
| | | | QEKIQLTPEAIKCVEEFNLK | |
| | | | LKDPEWKDRIREGAELVIKI | |
| | | | QMVPRGIVFDLLQDGNPIWG | |
| | | | GVKGLNYDHSNKIKKILRTM | |
| | | | NELNRTVVIMTGREASFLLP | |
| | | | GSSEDWEAALQKEESLTQIF | |
| | | | PVKFYRHSCRWTSICGPVRE | |
| | | | NLTTYYTDGGKKGKTAAAVY | |
| | | | WCEGRTKSKVFPGTNQQAEL | |
| | | | KAICMALLDGPPKMNIITDS | |
| | | | RYAYEGMREEPETWAREGIW | |
| | | | LEIAKILPFKQYVGVGWVPA | |
| | | | HKGIGGNTEADEGVKKALEQ | |
| | | | MAPCSPPEAILLKPGEKQNL | |
| | | | ETGIYMQGLRPQSFLPRADL | |
| | | | PVAITGTMVDSELQLQLLNI | |
| | | | GTEHIRIQKDEVFMTCFLEN | |
| | | | IPSATEDHERWHTSPDILVR | |
| | | | QFHLPKRIAKEIVARCQECK | |
| | | | RTTTSPVRGTNPRGRFLWQM | |
| | | | DNTHWNKTIIWVAVETNSGL | |
| | | | VEAQVIPEETALQVALCILQ | |
| | | | LIQRYTVLHLHSDNGPCFTA | |
| | | | HRIENLCKYLGITKTTGIPY | |
| | | | NPQSQGVVERAHRDLKDRLA | |
| | | | AYQGDCETVEAALSLALVSL | |
| | | | NKKRGGIGGHTPYEIYLESE | |
| | | | HTKYQDQLEQQFSKQKIEKW | |
| | | | CYVRNRRKEWKGPYKVLWDG | |
| | | | DGAAVIEEEGKTALYPHRHM | |
| | | | RFIPPPDSDIQDGSS | |
| | | | (SEQ ID NO: 1575) | |
| A0A14 | A0A142B | Avian | TVALHLAIPLKWKPDHTPVW | IPR043502, |
| 2BKH1_ | KH1 | leukosis | IDQWPLPEGKLVALTQLVEK | SSF56672, |
| ALV | | and | ELQLGHIEPSLSCWNTPVFV | IPR000477, |
| | | sarcoma | IRKASGSYRLLHDLRAVNAK | PF00078, |
| | | virus | LVPFGAVQQGAPVLSALPRG | cd01645, |
| | | | WPLMVLDLKDCFFSIPLAEQ | PF06817, |
| | | | DREAFAFTLPSVNNQAPARR | IPR010661 |
| | | | FQWKVLPQGMTCSPTICQLV | |
| | | | VGQVLEPLRLKHPSLRMLHY | |
| | | | MDDLLLAASSHDGLEAAGEE | |
| | | | VISTLERAGFTISPDKIQRE | |
| | | | PGVQYLGYKLGSTYVAPVGL | |
| | | | VAEPRIATLWDVQKLVGSLQ | |
| | | | WLRPALGIPPRLMGPFYEQL | |
| | | | RGSDPNEAREWNLDMKMAWR | |
| | | | EIVQLSTTAALERWDPALPL | |
| | | | EGAVARCEQGAIGVLGQGLS | |
| | | | THPRPCLWLFSTQPTKAFTA | |
| | | | WLEVLTLLITKLRASAVRTF | |
| | | | GKEVDVLLLPACFREDLPLP | |
| | | | EGILLALRGFAGKIRSSDTP | |
| | | | SIFDIARPLHVSLKVRVTDH | |
| | | | PVPGPTVFTDASSSTHKGVV | |
| | | | VWREGPRWEIKEIADLGASV | |
| | | | QQLEARAVAMALLLWPTTPT | |
| | | | NVVTDSAFVAKMLLKMGQEG | |
| | | | VPSTAAAFILEDALSQRSAM | |
| | | | AAVLHVRSHSEVPGFFTEGN | |
| | | | DVADSQATFQAYPLREAKDL | |
| | | | HTALHIGPRALSKACNISMQ | |
| | | | QAREVVQTCPHCNSAPALEA | |
| | | | GVNPRGLGPLQIWQTDFTLE | |
| | | | PRMAPRSWLAVTVATASSAI | |
| | | | VVTQHGRVTSVAARHHWATA | |
| | | | IAVLGRPKAIKTDNGSCFTS | |
| | | | KSTREWLARWGIAHTTGIPG | |
| | | | NSQGQAMVERANRLLKDKIR | |
| | | | VLAEGDGFMKRIPTGKQGEL | |
| | | | LAKAMYALNHFERGENTKTP | |
| | | | IQKHWRPTVLTEGPPVKIRI | |
| | | | ETGEWEKGWNVLVWGRGYAA | |
| | | | VKNRDTDKIIWVPSRKVKPD | |
| | | | ITQKDELTKKDEASPLFAGI | |
| | | | SDWAPWKGEQEGL | |
| | | | (SEQ ID NO: 1576) | |

TABLE 32
InterPro descriptions of signatures present in reverse transcriptases
in Table 30 (monomeric viral RTs) and Table 31 (dimeric viral RTs).

| Signature | Database | Short Name | Description |
|---|---|---|---|
| cd01645 | CDD | RT_Rtv | RT_Rtv: Reverse transcriptases (RTs) from |
| | | | retroviruses (Rtvs). RTs catalyze the |
| | | | conversion of single-stranded RNA into |
| | | | double-stranded viral DNA for integration into |
| | | | host chromosomes. Proteins in this subfamily |
| | | | contain long terminal repeats (LTRs) and are |
| | | | multifunctional enzymes with RNA-directed |
| | | | DNA polymerase, DNA directed DNA |
| | | | polymerase, and ribonuclease hybrid (RNase |
| | | | H) activities. The viral RNA genome enters the |
| | | | cytoplasm as part of a nucleoprotein complex, |
| | | | and the process of reverse transcription |
| | | | generates in the cytoplasm forming a linear |
| | | | DNA duplex via an intricate series of steps. |
| | | | This duplex DNA is colinear with its RNA |
| | | | template, but contains terminal duplications |
| | | | known as LTRs that are not present in viral |
| | | | RNA. It has been proposed that two |
| | | | specialized template switches, known as |
| | | | strand-transfer reactions or “jumps”, are |
| | | | required to generate the LTRs. [PMID: |
| | | | 9831551, PMID: 15107837, PMID: 11080630, |
| | | | PMID: 10799511, PMID: 7523679, PMID: |
| | | | 7540934, PMID: 8648598, PMID: 1698615] |
| cd03715 | CDD | RT_ZFREV_ | RT_ZFREV_like: A subfamily of reverse |
| | | like | transcriptases (RTs) found in sequences |
| | | | similar to the intact endogenous retrovirus |
| | | | ZFERV from zebrafish and to Moloney murine |
| | | | leukemia virus RT. An RT gene is usually |
| | | | indicative of a mobile element such as a |
| | | | retrotransposon or retrovirus. RTs occur in a |
| | | | variety of mobile elements, including |
| | | | retrotransposons, retroviruses, group II introns, |
| | | | bacterial msDNAs, hepadnaviruses, and |
| | | | caulimoviruses. These elements can be divided |
| | | | into two major groups. One group contains |
| | | | retroviruses and DNA viruses whose |
| | | | propagation involves an RNA intermediate. |
| | | | They are grouped together with transposable |
| | | | elements containing long terminal repeats |
| | | | (LTRs). The other group, also called poly(A)- |
| | | | type retrotransposons, contain fungal |
| | | | mitochondrial introns and transposable |
| | | | elements that lack LTRs. Phylogenetic analysis |
| | | | suggests that ZFERV belongs to a distinct |
| | | | group of retroviruses. [PMID: 14694121, |
| | | | PMID: 2410413, PMID: 9684890, PMID: |
| | | | 10669612, PMID: 1698615, PMID: 8828137] |
| PF00078 | Pfam | RVT_1 | A reverse transcriptase gene is usually |
| | | | indicative of a mobile element such as a |
| | | | retrotransposon or retrovirus. Reverse |
| | | | transcriptases occur in a variety of mobile |
| | | | elements, including retrotransposons, |
| | | | retroviruses, group II introns, bacterial |
| | | | msDNAs, hepadnaviruses, and caulimoviruses. |
| | | | [PMID: 1698615] |
| IPR000477 | InterPro | RT dom | The use of an RNA template to produce DNA, |
| | | | for integration into the host genome and |
| | | | exploitation of a host cell, is a strategy |
| | | | employed in the replication of retroid |
| | | | elements, such as the retroviruses and bacterial |
| | | | retrons. The enzyme catalysing polymerisation |
| | | | is an RNA-directed DNA-polymerase, or |
| | | | reverse trancriptase (RT) (2.7.7.49). Reverse |
| | | | transcriptase occurs in a variety of mobile |
| | | | elements, including retrotransposons, |
| | | | retroviruses, group II introns [PMID: |
| | | | 12758069], bacterial msDNAs, |
| | | | hepadnaviruses, and caulimoviruses. |
| | | | Retroviral reverse transcriptase is synthesised |
| | | | as part of the POL polyprotein that contains; |
| | | | an aspartyl protease, a reverse transcriptase, |
| | | | RNase H and integrase. POL polyprotein |
| | | | undergoes specific enzymatic cleavage to yield |
| | | | the mature proteins. The discovery of |
| | | | retroelements in the prokaryotes raises |
| | | | intriguing questions concerning their roles in |
| | | | bacteria and the origin and evolution of reverse |
| | | | transcriptases and whether the bacterial reverse |
| | | | transcriptases are older than eukaryotic reverse |
| | | | transcriptases [PMID: 8828137], Several |
| | | | crystal structures of the reverse transcriptase |
| | | | (RT) domain have been determined [PMID: |
| | | | 1377403], |
| IPR043502 | InterPro | DNA/RNA | This entry represents the DNA/RNA |
| | | polymerase | polymerase superfamily, which includes DNA |
| | | superfamily | polymerase I, reverse transcriptase, T7 RNA |
| | | | polymerase, lesion bypass DNA polymerase |
| | | | (Y-family), RNA-dependent RNA-polymerase |
| | | | and dsRNA phage RNA-dependent RNA- |
| | | | polymerase. These enzymes share a similar |
| | | | protein fold at their active site, which |
| | | | resembles the palm subdomain of the right- |
| | | | hand-shaped polymerases. [PMID: 26931141] |
| SSF56672 | Superfamily | DNA/RNA | This superfamily comprises DNA polymerases |
| | | polymerases | and RNA polymerases |
| PF06817 | Pfam | RVT_thumb | This domain is known as the thumb domain. It |
| | | | is composed of a four helix bundle |
| | | | [PMID: 1377403], |
| IPR010661 | InterPro | RVT thumb | This domain is known as the thumb domain. It |
| | | | is composed of a four helix bundle. Reverse |
| | | | transcriptase converts the viral RNA genome |
| | | | into double-stranded viral DNA. Reverse |
| | | | transcriptase often occurs in a polyprotein; |
| | | | with integrase, ribonuclease H and/or protease, |
| | | | which is cleaved before the enzyme takes |
| | | | action. The impact of antiretroviral treatment |
| | | | on the first 400 amino acids of HIV reverse |
| | | | transcriptase is good. Little is known, |
| | | | however, of the antiretroviral drug impact on |
| | | | the C-terminal domains of Pol, which includes |
| | | | the thumb, connection and RNase H. Evidence |
| | | | suggests that these might be well conserved |
| | | | domains. [PMID: 1377403, PMID: 18335052] |
| PF06815 | Pfam | RVT_connect | This domain is known as the connection |
| | | | domain. This domain lies between the thumb |
| | | | and palm domains [PMID: 1377403], |
| IPR010659 | InterPro | RVT connect | This domain is known as the connection |
| | | | domain. This domain lies between the thumb |
| | | | and palm domains [PMID: 1377403], |
| cd03715 | CDD | RT_ZFREV_ | RT_ZFREV_like: A subfamily of reverse |
| | | like | transcriptases (RTs) found in sequences |
| | | | similar to the intact endogenous retrovirus |
| | | | ZFERV from zebrafish and to Moloney murine |
| | | | leukemia virus RT. An RT gene is usually |
| | | | indicative of a mobile element such as a |
| | | | retrotransposon or retrovirus. RTs occur in a |
| | | | variety of mobile elements, including |
| | | | retrotransposons, retroviruses, group II introns, |
| | | | bacterial msDNAs, hepadnaviruses, and |
| | | | caulimoviruses. These elements can be divided |
| | | | into two major groups. One group contains |
| | | | retroviruses and DNA viruses whose |
| | | | propagation involves an RNA intermediate. |
| | | | They are grouped together with transposable |
| | | | elements containing long terminal repeats |
| | | | (LTRs). The other group, also called poly(A)- |
| | | | type retrotransposons, contain fungal |
| | | | mitochondrial introns and transposable |
| | | | elements that lack LTRs. Phylogenetic analysis |
| | | | suggests that ZFERV belongs to a distinct |
| | | | group of retroviruses. [PMID: 14694121, |
| | | | PMID: 2410413, PMID: 9684890, PMID: |
| | | | 10669612, PMID: 1698615, PMID: 8828137] |

Table 41 provides a listing of retrotransposase proteins and the associated retrotransposon 5′UTRs and 3′UTRs for use in novel Gene Writing systems. Reverse transcriptase domains in the proteins described here were identified using conserved RT signatures, and annotated to indicate the presence and location of RT domains within the polypeptide sequences. In some embodiments, a system or method described herein involves a polypeptide having an amino acid sequence according to Table 41, or a sequence having at least 70%, 75%, 80%, 85%, 90%, 95%, 96%, 97%, 98%, or 99% identity thereto, or a functional fragment thereof. In some embodiments, a system or method described herein involves a domain (e.g., a reverse transcriptase domain) having an amino acid sequence according to a domain (e.g., a reverse transcriptase domain) of Table 41, or a sequence having at least 70%, 75%, 80%, 85%, 90%, 95%, 96%, 97%, 98%, or 99% identity thereto, or functional fragment thereof. In some embodiments, a system or method described herein involves a template RNA comprising a sequence according to one or both of a predicted 5′ UTR and a predicted 3′ UTR of Table 41, or a sequence having at least 70%, 75%, 80%, 85%, 90%, 95%, 96%, 97%, 98%, or 99% identity thereto, or functional fragment thereof.

Lengthy table referenced here
US20230348939A1-20231102-T00002
Please refer to the end of the specification for access instructions.

Table 44 provides Retroviral reverse transcriptase domains for use in Gene Writer polypeptides. Wild-type reverse transcriptase enzymes were collected and prioritized as according to the descriptions herein (see Example 33). The Type column indicates whether the sequence corresponds to a wild-type sequence (“root”) or comprises mutations that may improve the activity of the enzyme (“derivative”).

TABLE 44
Retroviral reverse transcriptase domains for use in Gene Writer polypeptides.
In some embodiments, a system or method described herein involves a reverse
transcriptase domain having an amino acid sequence according to a reverse
transcriptase domain of Table 44, or a sequence having at least 70%, 75%,
80%, 85%, 90%, 95%, 96%, 97%, 98%, or 99% identity thereto, or functional
fragment thereof.

| | | | | SEQ | |
|---|---|---|---|---|---|
| | virus_ | uniprot_ | | ID | |
| name | name | ID | type | NO: | peptide |
| AVIRE_ | AVIRE | P03360 | root | 3136 | TAPLEEEYRLFLEAPIQNVTLLEQWKREIPKVWAEINPPGLASTQAPIHV |
| P03360 | | | | | QLLSTALPVRVRQYPITLEAKRSLRETIRKFRAAGILRPVHSPWNTPLLP |
| | | | | | VRKSGTSEYRMVQDLREVNKRVETIHPTVPNPYTLLSLLPPDRIWYSVLD |
| | | | | | LKDAFFCIPLAPESQLIFAFEWADAEEGESGQLTWTRLPQGFKNSPTLFD |
| | | | | | EALNRDLQGFRLDHPSVSLLQYVDDLLIAADTQAACLSATRDLLMTLAEL |
| | | | | | GYRVSGKKAQLCQEEVTYLGFKIHKGSRSLSNSRTQAILQIPVPKTKRQV |
| | | | | | REFLGTIGYCRLWIPGFAELAQPLYAATRGGNDPLVWGEKEEEAFQSLKL |
| | | | | | ALTQPPALALPSLDKPFQLFVEETSGAAKGVLTQALGPWKRPVAYLSKRL |
| | | | | | DPVAAGWPRCLRAIAAAALLTREASKLTFGQDIEITSSHNLESLLRSPPD |
| | | | | | KWLTNARITQYQVLLLDPPRVRFKQTAALNPATLLPETDDTLPIHHCLDT |
| | | | | | LDSLTSTRPDLTDQPLAQAEATLFTDGSSYIRDGKRYAGAAVVTLDSVIW |
| | | | | | AEPLPIGTSAQKAELIALTKALEWSKDKSVNIYTDSRYAFATLHVHGMIY |
| | | | | | RERGLLTAGGKAIKNAPEILALLTAVWLPKRVAVMHCKGHQKDDAPTSTG |
| | | | | | NRRADEVAREVAIRPLSTQATIS |
| AVIRE_ | AVIRE | P03360 | derivative | 3137 | TAPLEEEYRLFLEAPIQNVTLLEQWKREIPKVWAEINPPGLASTQAPIHV |
| P03360_ | | | | | QLLSTALPVRVRQYPITLEAKRSLRETIRKFRAAGILRPVHSPWNTPLLP |
| 3mut | | | | | VRKSGTSEYRMVQDLREVNKRVETIHPTVPNPYTLLSLLPPDRIWYSVLD |
| | | | | | LKDAFFCIPLAPESQLIFAFEWADAEEGESGQLTWTRLPQGFKNSPTLFN |
| | | | | | EALNRDLQGFRLDHPSVSLLQYVDDLLIAADTQAACLSATRDLLMTLAEL |
| | | | | | GYRVSGKKAQLCQEEVTYLGFKIHKGSRSLSNSRTQAILQIPVPK |
| | | | | | TKRQVREFLGTIGYCRLWIPGFAELAQPLYAATRPGNDPLVWGEKEEEAF |
| | | | | | QSLKLALTQPPALALPSLDKPFQLFVEETSGAAKGVLTQALGPWKRPVAY |
| | | | | | LSKRLDPVAAGWPRCLRAIAAAALLTREASKLTFGQDIEITSSHNLESLL |
| | | | | | RSPPDKWLTNARITQYQVLLLDPPRVRFKQTAALNPATLLPETDDTLPIH |
| | | | | | HCLDTLDSLTSTRPDLTDQPLAQAEATLFTDGSSYIRDGKRYAGAAVVTL |
| | | | | | DSVIWAEPLPIGTSAQKAELIALTKALEWSKDKSVNIYTDSRYAFATLHV |
| | | | | | HGMIYRERGWLTAGGKAIKNAPEILALLTAVWLPKRVAVMHCKGHQKDDA |
| | | | | | PTSTGNRRADEVAREVAIRPLSTQATIS |
| AVIRE_ | AVIRE | P03360 | derivative | 3138 | TAPLEEEYRLFLEAPIQNVTLLEQWKREIPKVWAEINPPGLASTQAPIHV |
| P03360_ | | | | | QLLSTALPVRVRQYPITLEAKRSLRETIRKFRAAGILRPVHSPWNTPLLP |
| 3mutA | | | | | VRKSGTSEYRMVQDLREVNKRVETIHPTVPNPYTLLSLLPPDRIWYSVLD |
| | | | | | LKDAFFCIPLAPESQLIFAFEWADAEEGESGQLTWTRLPQGFKNSPTLFN |
| | | | | | EALNRDLQGFRLDHPSVSLLQYVDDLLIAADTQAACLSATRDLLMTLAEL |
| | | | | | GYRVSGKKAQLCQEEVTYLGFKIHKGSRSLSNSRTQAILQIPVPKTKRQV |
| | | | | | REFLGKIGYCRLFIPGFAELAQPLYAATRPGNDPLVWGEKEEEAFQSLKL |
| | | | | | ALTQPPALALPSLDKPFQLFVEETSGAAKGVLTQALGPWKRPVAYLSKRL |
| | | | | | DPVAAGWPRCLRAIAAAALLTREASKLTFGQDIEITSSHNLESLLRSPPD |
| | | | | | KWLTNARITQYQVLLLDPPRVRFKQTAALNPATLLPETDDTLPIHHCLDT |
| | | | | | LDSLTSTRPDLTDQPLAQAEATLFTDGSSYIRDGKRYAGAAVVTLDSVIW |
| | | | | | AEPLPIGTSAQKAELIALTKALEWSKDKSVNIYTDSRY |
| | | | | | AFATLHVHGMIYRERGWLTAGGKAIKNAPEILALLTAVWLPKRVAVMHCK |
| | | | | | GHQKDDAPTSTGNRRADEVAREVAIRPLSTQATIS |
| BAEVM_ | BAEVM | P10272 | root | 3139 | TVSLQDEHRLFDIPVTTSLPDVWLQDFPQAWAETGGLGRAKCQAPIIIDL |
| P10272 | | | | | KPTAVPVSIKQYPMSLEAHMGIRQHIIKFLELGVLRPCRSPWNTPLLPVK |
| | | | | | KPGTQDYRPVQDLREINKRTVDIHPTVPNPYNLLSTLKPDYSWYTVLDLK |
| | | | | | DAFFCLPLAPQSQELFAFEWKDPERGISGQLTWTRLPQGFKNSPTLFDEA |
| | | | | | LHRDLTDFRTQHPEVTLLQYVDDLLLAAPTKKACTQGTRHLLQELGEKGY |
| | | | | | RASAKKAQICQTKVTYLGYILSEGKRWLTPGRIETVARIPPPRNPREVRE |
| | | | | | FLGTAGFCRLWIPGFAELAAPLYALTKESTPFTWQTEHQLAFEALKKALL |
| | | | | | SAPALGLPDTSKPFTLFLDERQGIAKGVLTQKLGPWKRPVAYLSKKLDPV |
| | | | | | AAGWPPCLRIMAATAMLVKDSAKLTLGQPLTVITPHTLEAIVRQPPDRWI |
| | | | | | TNARLTHYQALLLDTDRVQFGPPVTLNPATLLPVPENQPSPHDCRQVLAE |
| | | | | | THGTREDLKDQELPDADHTWYTDGSSYLDSGTRRAGAAVVDGHNTIWAQS |
| | | | | | LPPGTSAQKAELIALTKALELSKGKKANIYTDSRYAFATAHTHGSIYERR |
| | | | | | GLLTSEGKEIKNKAEIIALLKALFLPQEVAIIHCPGHQKGQDPVAVGNRQ |
| | | | | | ADRVARQAAMAEVLTLATEPDNTSHIT |
| BAEVM_ | BAEVM | P10272 | derivative | 3140 | TVSLQDEHRLFDIPVTTSLPDVWLQDFPQAWAETGGLGRAKCQAPIIIDL |
| P10272_ | | | | | KPTAVPVSIKQYPMSLEAHMGIRQHIIKFLELGVLRPCRSPWNTPLLPVK |
| 3mut | | | | | KPGTQDYRPVQDLREINKRTVDIHPTVPNPYNLLSTLKPDYSWYTVLDLK |
| | | | | | DAFFCLPLAPQSQELFAFEWKDPERGISGQLTWTRLPQGFKNSPTLFNEA |
| | | | | | LHRDLTDFRTQHPEVTLLQYVDDLLLAAPTKKACTQGTRHLLQELGEKGY |
| | | | | | RASAKKAQICQTKVTYLGYILSEGKRWLTPGRIETVARIPPPRNPREVRE |
| | | | | | FLGTAGFCRLWIPGFAELAAPLYALTKPSTPFTWQTEHQLAFEALKKALL |
| | | | | | SAPALGLPDTSKPFTLFLDERQGIAKGVLTQKLGPWKRPVAYLSKKLDPV |
| | | | | | AAGWPPCLRIMAATAMLVKDSAKLTLGQPLTVITPHTLEAIVRQPPDRWI |
| | | | | | TNARLTHYQALLLDTDRVQFGPPVTLNPATLLPVPENQPSPHDCRQVLAE |
| | | | | | THGTREDLKDQELPDADHTWYTDGSSYLDSGTRRAGAAVVDGHNTIWAQS |
| | | | | | LPPGTSAQKAELIALTKALELSKGKKANIYTDSRYAFATAHTHGSIYERR |
| | | | | | GWLTSEGKEIKNKAEIIALLKALFLPQEVAIIHCPGHQKGQDPVAVGNRQ |
| | | | | | ADRVARQAAMAEVLTLATEPDNTSHIT |
| BAEVM_ | BAEVM | P10272 | derivative | 3141 | TVSLQDEHRLFDIPVTTSLPDVWLQDFPQAWAETGGLGRAKCQAPIIIDL |
| P10272_ | | | | | KPTAVPVSIKQYPMSLEAHMGIRQHIIKFLELGVLRPCRSPWNTPLLPVK |
| 3mutA | | | | | KPGTQDYRPVQDLREINKRTVDIHPTVPNPYNLLSTLKPDYSWYTVLDLK |
| | | | | | DAFFCLPLAPQSQELFAFEWKDPERGISGQLTWTRLPQGFKNSPTLFNEA |
| | | | | | LHRDLTDFRTQHPEVTLLQYVDDLLLAAPTKKACTQGTRHLLQELGEKGY |
| | | | | | RASAKKAQICQTKVTYLGYILSEGKRWLTPGRIETVARIPPPRNPREVRE |
| | | | | | FLGKAGFCRLFIPGFAELAAPLYALTKPSTPFTWQTEHQLAFEALKKALL |
| | | | | | SAPALGLPDTSKPFTLFLDERQGIAKGVLTQKLGPWKRPVAYLSKKLDPV |
| | | | | | AAGWPPCLRIMAATAMLVKDSAKLTLGQPLTVITPHTLEAIVRQPPDRWI |
| | | | | | TNARLTHYQALLLDTDRVQFGPPVTLNPATLLPVPENQPSPHDCRQVLAE |
| | | | | | THGTREDLKDQELPDADHTWYTDGSSYLDSGTRRAGAAVVDGHNTIWAQS |
| | | | | | LPPGTSAQKAELIALTKALELSKGKKANIYTDSRYAFATAHTHGSIYERR |
| | | | | | GWLTSEGKEIKNKAEIIALLKALFLPQEVAIIHCPGHQKGQDPVAVGNRQ |
| | | | | | ADRVARQAAMAEVLTLATEPDNTSHIT |
| BLVAU_ | BLVA | P25059 | root | 3142 | GVLDAPPSHIGLEHLPPPPEVPQFPLNLERLQALQDLVHRSLEAGYISPW |
| P25059 | | | | | DGPGNNPVFPVRKPNGAWRFVHDLRVTNALTKPIPALSPGPPDLTAIPTH |
| | | | | | LPHIICLDLKDAFFQIPVEDRFRSYFAFTLPTPGGLQPHRRFAWRVLPQG |
| | | | | | FINSPALFERALQEPLRQVSAAFSQSLLVSYMDDILYVSPTEEQRLQCYQ |
| | | | | | TMAAHLRDLGFQVASEKTRQTPSPVPFLGQMVHERMVTYQSLPTLQISSP |
| | | | | | ISLHQLQTVLGDLQWVSRGTPTTRRPLQLLYSSLKGIDDPRAIIHLSPEQ |
| | | | | | QQGIAELRQALSHNARSRYNEQEPLLAYVHLTRAGSTLVLFQKGAQFPLA |
| | | | | | YFQTPLTDNQASPWGLLLLLGCQYLQAQALSSYAKTILKYYHNLPKTSLD |
| | | | | | NWIQSSEDPRVQELLQLWPQISSQGIQPPGPWKTLVTRAEVFLTPQFSPE |
| | | | | | PIPAALCLFSDGAARRGAYCLWKDHLLDFQAVPAPESAQKGELAGLLAGL |
| | | | | | AAAPPEPLNIWVDSKYLYSLLRTLVLGAWLQPDPVPSYALLYKSLLRHPA |
| | | | | | IFVGHVRSHSSASHPIASLNNYVDQL |
| BLVAU_ | BLVAU | P25059 | derivative | 3143 | GVLDAPPSHIGLEHLPPPPEVPQFPLNLERLQALQDLVHRSLEAGYISPW |
| P25059_ | | | | | DGPGNNPVFPVRKPNGAWRFVHDLRVTNALTKPIPALSPGPPDLTAIPTH |
| 2mut | | | | | LPHIICLDLKDAFFQIPVEDRFRSYFAFTLPTPGGLQPHRRFAWRVLPQG |
| | | | | | FINSPALFQRALQEPLRQVSAAFSQSLLVSYMDDILYVSPTEEQRLQCYQ |
| | | | | | TMAAHLRDLGFQVASEKTRQTPSPVPFLGQMVHERMVTYQSLPTLQISSP |
| | | | | | ISLHQLQTVLGDLQWVSRGTPTTRRPLQLLYSSLKPIDDPRAIIHLSPEQ |
| | | | | | QQGIAELRQALSHNARSRYNEQEPLLAYVHLTRAGSTLVLFQKGAQFPLA |
| | | | | | YFQTPLTDNQASPWGLLLLLGCQYLQAQALSSYAKTILKYYHNLPKTSLD |
| | | | | | NWIQSSEDPRVQELLQLWPQISSQGIQPPGPWKTLVTRAEVFLTPQFSPE |
| | | | | | PIPAALCLFSDGAARRGAYCLWKDHLLDFQAVPAPESAQKGELAGLLAGL |
| | | | | | AAAPPEPLNIWVDSKYLYSLLRTLVLGAWLQPDPVPSYALLYKSLLRHPA |
| | | | | | IFVGHVRSHSSASHPIASLNNYVDQL |
| BLVAU_ | BLVAU | P25059 | derivative | 3144 | GVLDAPPSHIGLEHLPPPPEVPQFPLNLERLQALQDLVHRSLEAGYISPW |
| P25059_ | | | | | DGPGNNPVFPVRKPNGAWRFVHDLRVTNALTKPIPALSPGPPDLTAPPTH |
| 2mutB | | | | | LPHIICLDLKDAFFQIPVEDRFRSYFAFTLPTPGGLQPHRRFAWRVLPQG |
| | | | | | FINSPALFQRALQEPLRQVSAAFSQSLLVSYMDDILYVSPTEEQRLQCYQ |
| | | | | | TMAAHLRDLGFQVASEKTRQTPSPVPFLGQMVHERMVTYQSLPTLQISSP |
| | | | | | ISLHQLQTVLGDLQWVSRGTPTTRRPLQLLYSSLKPIDDPRAIIHLSPEQ |
| | | | | | QQGIAELRQALSHNARSRYNEQEPLLAYVHLTRAGSTLVLFQKGAQFPLA |
| | | | | | YFQTPLTDNQASPWGLLLLLGCQYLQAQALSSYAKTILKYYHNLPKTSLD |
| | | | | | NWIQSSEDPRVQELLQLWPQISSQGIQPPGPWKTLVTRAEVFLTPQFSPE |
| | | | | | PIPAALCLFSDGAARRGAYCLWKDHLLDFQAVPAPESAQKGELAGLLAGL |
| | | | | | AAAPPEPLNIWVDSKYLYSLLRTLVLGAWLQPDPVPSYALLYKSLLRHPA |
| | | | | | IFVGHVRSHSSASHPIASLNNYVDQL |
| BLVJ_ | BLVJ | P03361 | root | 3145 | GVLDTPPSHIGLEHLPPPPEVPQFPLNLERLQALQDLVHRSLEAGYISPW |
| P03361 | | | | | DGPGNNPVFPVRKPNGAWRFVHDLRATNALTKPIPALSPGPPDLTAIPTH |
| | | | | | PPHIICLDLKDAFFQIPVEDRFRFYLSFTLPSPGGLQPHRRFAWRVLPQG |
| | | | | | FINSPALFERALQEPLRQVSAAFSQSLLVSYMDDILYASPTEEQRSQCYQ |
| | | | | | ALAARLRDLGFQVASEKTSQTPSPVPFLGQMVHEQIVTYQSLPTLQISSP |
| | | | | | ISLHQLQAVLGDLQWVSRGTPTTRRPLQLLYSSLKRHHDPRAIIQLSPEQ |
| | | | | | LQGIAELRQALSHNARSRYNEQEPLLAYVHLTRAGSTLVLFQKGAQFPLA |
| | | | | | YFQTPLTDNQASPWGLLLLLGCQYLQTQALSSYAKPILKYYHNLPKTSLD |
| | | | | | NWIQSSEDPRVQELLQLWPQISSQGIQPPGPWKTLITRAEVFLTPQFSPD |
| | | | | | PIPAALCLFSDGATGRGAYCLWKDHLLDFQAVPAPESAQKGELAGLLAGL |
| | | | | | AAAPPEPVNIWVDSKYLYSLLRTLVLGAWLQPDPVPSYALLYKSLLRHPA |
| | | | | | IVVGHVRSHSSASHPIASLNNYVDQL |
| BLVJ_ | BLVJ | P03361 | derivative | 3146 | GVLDTPPSHIGLEHLPPPPEVPQFPLNLERLQALQDLVHRSLEAGYISPW |
| P03361_ | | | | | DGPGNNPVFPVRKPNGAWRFVHDLRATNALTKPIPALSPGPPDLTAIPTH |
| 2mut | | | | | PPHIICLDLKDAFFQIPVEDRFRFYLSFTLPSPGGLQPHRRFAWRVLPQG |
| | | | | | FINSPALFNRALQEPLRQVSAAFSQSLLVSYMDDILYASPTEEQRSQCYQ |
| | | | | | ALAARLRDLGFQVASEKTSQTPSPVPFLGQMVHEQIVTYQSLPTLQISSP |
| | | | | | ILHQLQAVLGDLQWVSRGTPTTRRPLQLLYSSLKRHHDPRAIIQLSPEQL |
| | | | | | QGIAELRQALSHNARSRYNEQEPLLAYVHLTRAGSTLVLFQKGAQFPLA |
| | | | | | YFQTPLTDNQASPWGLLLLLGCQYLQTQALSSYAKPILKYYHNLPKTSL |
| | | | | | DNWIQSSEDPRVQELLQLWPQISSQGIQPPGPWKTLITRAEVFLTPQFSP |
| | | | | | DPIPAALCLFSDGATGRGAYCLWKDHLLDFQAVPAPESAQKGELAGLLAG |
| | | | | | LAAAPPEPVNIWVDSKYLYSLLRTWVLGAWLQPDPVPSYALLYKSLLRHP |
| | | | | | AIVVGHVRSHSSASHPIASLNNYVDQL |
| BLVJ_ | BLVJ | P03361 | derivative | 3147 | GVLDTPPSHIGLEHLPPPPEVPQFPLNLERLQALQDLVHRSLEAGYISPW |
| P03361_ | | | | | DGPGNNPVFPVRKPNGAWRFVHDLRATNALTKPIPALSPGPPDLTAPP |
| 2mutB | | | | | THPPHIICLDLKDAFFQIPVEDRFRFYLSFTLPSPGGLQPHRRFAWRVLP |
| | | | | | QGFINSPALFQRALQEPLRQVSAAFSQSLLVSYMDDILYASPTEEQRSQC |
| | | | | | YQALAARLRDLGFQVASEKTSQTPSPVPFLGQMVHEQIVTYQSLPTLQIS |
| | | | | | SPISLHQLQAVLGDLQWVSRGTPTTRRPLQLLYSSLKRHHDPRAIIQLSP |
| | | | | | EQLQGIAELRQALSHNARSRYNEQEPLLAYVHLTRAGSTLVLFQKGAQFP |
| | | | | | LAYFQTPLTDNQASPWGLLLLLGCQYLQTQALSSYAKPILKYYHNLPKTS |
| | | | | | LDNWIQSSEDPRVQELLQLWPQISSQGIQPPGPWKTLITRAEVFLTPQFS |
| | | | | | PDPIPAALCLFSDGATGRGAYCLWKDHLLDFQAVPAPESAQKGELAGLLA |
| | | | | | GLAAAPPEPVNIWVDSKYLYSLLRTWVLGAWLQPDPVPSYALLYKSLLRH |
| | | | | | PAIVVGHVRSHSSASHPIASLNNYVDQL |
| FFV_ | FFV | O93209 | root | 3148 | MDLLKPLTVERKGVKIKGYWNSQADITCVPKDLLQGEEPVRQQNVTTIHG |
| O93209 | | | | | TQEGDVYYVNLKIDGRRINTEVIGTTLDYAIITPGDVPWILKKPLELTIK |
| | | | | | LDLEEQQGTLLNNSILSKKGKEELKQLFEKYSALWQSWENQVGHRRIRPH |
| | | | | | KIATGTVKPTPQKQYHINPKAKPDIQIVINDLLKQGVLIQKESTMNTPVY |
| | | | | | PVPKPNGRWRMVLDYRAVNKVTPLIAVQNQHSYGILGSLFKGRYKTTIDL |
| | | | | | SNGFWAHPIVPEDYWITAFTWQGKQYCWTVLPQGFLNSPGLFTGDVVDLL |
| | | | | | QGIPNVEVYVDDVYISHDSEKEHLEYLDILFNRLKEAGYIISLKKSNIAN |
| | | | | | SIVDFLGFQITNEGRGLTDTFKEKLENITAPTTLKQLQSILGLLNFARNF |
| | | | | | IPDFTELIAPLYALIPKSTKNYVPWQIEHSTTLETLITKLNGAEYLQGRK |
| | | | | | GDKTLIMKVNASYTTGYIRYYNEGEKKPISYVSIVFSKTELKFTELEKLL |
| | | | | | TTVHKGLLKALDLSMGQNIHVYSPIVSMQNIQKTPQTAKKALASRWLSWL |
| | | | | | SYLEDPRIRFFYDPQMPALKDLPAVDTGKDNKKHPSNFQHIFYTDGSAIT |
| | | | | | SPTKEGHLNAGMGIVYFINKDGNLQKQQEWSISLGNHTAQFAEIAAFEFA |
| | | | | | LKKCLPLGGNILVVTDSNYVAKAYNEELDVWASNGFVNNRKKPLKHISKW |
| | | | | | KSVADLKRLRPDVVVTHEPGHQKLDSSPHAYGNNLADQLATQASFKVH |
| FFV_ | FFV | O93209 | derivative | 3149 | VPWILKKPLELTIKLDLEEQQGTLLNNSILSKKGKEELKQLFEKYSALWQ |
| O93209- | | | | | SWENQVGHRRIRPHKIATGTVKPTPQKQYHINPKAKPDIQIVINDLLKQG |
| Pro | | | | | VLIQKESTMNTPVYPVPKPNGRWRMVLDYRAVNKVTPLIAVQNQHSYGIL |
| | | | | | GSLFKGRYKTTIDLSNGFWAHPIVPEDYWITAFTWQGKQYCWTVLPQGFL |
| | | | | | NSPGLFTGDVVDLLQGIPNVEVYVDDVYISHDSEKEHLEYLDILFNRLKE |
| | | | | | AGYIISLKKSNIANSIVDFLGFQITNEGRGLTDTFKEKLENITAPTTLKQ |
| | | | | | LQSILGLLNFARNFIPDFTELIAPLYALIPKSTKNYVPWQIEHSTTLETL |
| | | | | | ITKLNGAEYLQGRKGDKTLIMKVNASYTTGYIRYYNEGEKKPISYVSIVF |
| | | | | | SKTELKFTELEKLLTTVHKGLLKALDLSMGQNIHVYSPIVSMQNIQKTPQ |
| | | | | | TAKKALASRWLSWLSYLEDPRIRFFYDPQMPALKDLPAVDTGKDNKKHPS |
| | | | | | NFQHIFYTDGSAITSPTKEGHLNAGMGIVYFINKDGNLQKQQEWSISLGN |
| | | | | | HTAQFAEIAAFEFALKKCLPLGGNILVVTDSNYVAKAYNEELDVWASNGF |
| | | | | | VNNRKKPLKHISKWKSVADLKRLRPDVVVTHEPGHQKLDSSPHAYGNNLA |
| | | | | | DQLATQASFKVH |
| FFV_ | FFV | O93209 | derivative | 3150 | VPWILKKPLELTIKLDLEEQQGTLLNNSILSKKGKEELKQLFEKYSALWQ |
| O93209- | | | | | SWENQVGHRRIRPHKIATGTVKPTPQKQYHINPKAKPDIQIVINDLLKQG |
| Pro_2 | | | | | VLIQKESTMNTPVYPVPKPNGRWRMVLDYRAVNKVTPLIAVQNQHSYGIL |
| mut | | | | | GSLFKGRYKTTIDLSNGFWAHPIVPEDYWITAFTWQGKQYCWTVLPQGFL |
| | | | | | NSPGLFNGDVVDLLQGIPNVEVYVDDVYISHDSEKEHLEYLDILFNRLKE |
| | | | | | AGYIISLKKSNIANSIVDFLGFQITNEGRGLTDTFKEKLENITAPTTLKQ |
| | | | | | LQSILGLLNFARNFIPDFTELIAPLYALIPKSPKNYVPWQIEHSTTLETL |
| | | | | | ITKLNGAEYLQGRKGDKTLIMKVNASYTTGYIRYYNEGEKKPISYVSIVF |
| | | | | | SKTELKFTELEKLLTTVHKGLLKALDLSMGQNIHVYSPIVSMQNIQKTPQ |
| | | | | | TAKKALASRWLSWLSYLEDPRIRFFYDPQMPALKDLPAVDTGKDNKKHPS |
| | | | | | NFQHIFYTDGSAITSPTKEGHLNAGMGIVYFINKDGNLQKQQEWSISLGN |
| | | | | | HTAQFAEIAAFEFALKKCLPLGGNILVVTDSNYVAKAYNEELDVWASNGF |
| | | | | | VNNRKKPLKHISKWKSVADLKRLRPDVVVTHEPGHQKLDSSPHAYGNNLA |
| | | | | | DQLATQASFKVH |
| FFV_ | FFV | O93209 | derivative | 3151 | VPWILKKPLELTIKLDLEEQQGTLLNNSILSKKGKEELKQLFEKYSALWQ |
| O93209- | | | | | SWENQVGHRRIRPHKIATGTVKPTPQKQYHINPKAKPDIQIVINDLLKQG |
| Pro_ | | | | | VLIQKESTMNTPVYPVPKPNGRWRMVLDYRAVNKVTPLIAVQNQHSYGIL |
| 2mutA | | | | | GSLFKGRYKTTIDLSNGFWAHPIVPEDYWITAFTWQGKQYCWTVLPQGFL |
| | | | | | NSPGLFNGDVVDLLQGIPNVEVYVDDVYISHDSEKEHLEYLDILFNRLKE |
| | | | | | AGYIISLKKSNIANSIVDFLGFQITNEGRGLTDTFKEKLENITAPTTLKQ |
| | | | | | LQSILGKLNFARNFIPDFTELIAPLYALIPKSPKNYVPWQIEHSTTLETL |
| | | | | | ITKLNGAEYLQGRKGDKTLIMKVNASYTTGYIRYYNEGEKKPISYVIVFS |
| | | | | | KTELKFTELEKLLTTVHKGLLKALKDLSMGQNIHVYSPIVSMQNIQKTPQ |
| | | | | | TAKKALASRWLSWLSYLEDPRIRFFYDPQMPALKDLPAVDTGKDNKKHPS |
| | | | | | NFQHIFYTDGSAITSPTKEGHLNAGMGIVYFINKDGNLQKQQEWSISLGN |
| | | | | | HTAQFAEIAAFEFALKKCLPLGGNILVVTDSNYVAKAYNEELDVWASNGF |
| | | | | | VNNRKKPLKHISKWKSVADLKRLRPDVVVTHEPGHQKLDSSPHAYGNNLA |
| | | | | | DQLATQASFKVH |
| FFV_ | FFV | O93209 | derivative | 3152 | MDLLKPLTVERKGVKIKGYWNSQADITCVPKDLLQGEEPVRQQNVTTIHG |
| O93209_2 | | | | | TQEGDVYYVNLKIDGRRINTEVIGTTLDYAIITPGDVPWILKKPLELTIK |
| mut | | | | | LDLEEQQGTLLNNSILSKKGKEELKQLFEKYSALWQSWENQVGHRRIRPH |
| | | | | | KIATGTVKPTPQKQYHINPKAKPDIQIVINDLLKQGVLIQKESTMNTPVY |
| | | | | | PVPKPNGRWRMVLDYRAVNKVTPLIAVQNQHSYGILGSLFKGRYKTTIDL |
| | | | | | SNGFWAHPIVPEDYWITAFTWQGKQYCWTVLPQGFLNSPG |
| | | | | | LFNGDVVDLLQGIPNVEVYVDDVYISHDSEKEHLEYLDILFNRLKEAGYI |
| | | | | | ISLKKSNIANSIVDFLGFQITNEGRGLTDTFKEKLENITAPTTLKQLQSI |
| | | | | | LGLLNFARNFIPDFTELIAPLYALIPKSPKNYVPWQIEHSTTLETLITKL |
| | | | | | NGAEYLQGRKGDKTLIMKVNASYTTGYIRYYNEGEKKPISYVSIVFSKTE |
| | | | | | LKFTELEKLLTTVHKGLLKALDLSMGQNIHVYSPIVSMQNIQKTPQTAKK |
| | | | | | ALASRWLSWLSYLEDPRIRFFYDPQMPALKDLPAVDTGKDNKKHPSNFQH |
| | | | | | IFYTDGSAITSPTKEGHLNAGMGIVYFINKDGNLQKQQEWSISLGNHTAQ |
| | | | | | FAEIAAFEFALKKCLPLGGNILVVTDSNYVAKAYNEELDVWASNGFVNNR |
| | | | | | KKPLKHISKWKSVADLKRLRPDVVVTHEPGHQKLDSSPHAYGNNLADQLA |
| | | | | | TQASFKVH |
| FFV_ | FFV | O93209 | derivative | 3153 | MDLLKPLTVERKGVKIKGYWNSQADITCVPKDLLQGEEPVRQQNVTTIHG |
| O93209_ | | | | | TQEGDVYYVNLKIDGRRINTEVIGTTLDYAIITPGDVPWILKKPLELTIK |
| 2mutA | | | | | LDLEEQQGTLLNNSILSKKGKEELKQLFEKYSALWQSWENQVGHRRIRPH |
| | | | | | KIATGTVKPTPQKQYHINPKAKPDIQIVINDLLKQGVLIQKESTMNTPVY |
| | | | | | PVPKPNGRWRMVLDYRAVNKVTPLIAVQNQHSYGILGSLFKGRYKTTIDL |
| | | | | | SNGFWAHPIVPEDYWITAFTWQGKQYCWTVLPQGFLNSPGLFNGDVVDLL |
| | | | | | QGIPNVEVYVDDVYISHDSEKEHLEYLDILFNRLKEAGYIISLKKSNIAN |
| | | | | | SIVDFLGFQITNEGRGLTDTFKEKLENITAPTTLKQLQSILGKLNFARNF |
| | | | | | IPDFTELIAPLYALIPKSPKNYVPWQIEHSTTLETLITKLNGAEYLQGRK |
| | | | | | GDKTLIMKVNASYTTGYIRYYNEGEKKPISYVSIVFSKTELKFTELEKLL |
| | | | | | TTVHKGLLKALDLSMGQNIHVYSPIVSMQNIQKTPQTAKKALASRWLSWL |
| | | | | | SYLEDPRIRFFYDPQMPALKDLPAVDTGKDNKKHPSNFQHIFYTDGSAIT |
| | | | | | SPTKEGHLNAGMGIVYFINKDGNLQKQQEWSISLGNHTAQFAEIAAFEFA |
| | | | | | LKKCLPLGGNILVVTDSNYVAKAYNEELDVWASNGFVNNRKKPLKHISKW |
| | | | | | KSVADLKRLRPDVVVTHEPGHQKLDSSPHAYGNNLADQLATQASFKVH |
| FLV_ | FLV | P10273 | root | 3154 | TLQLEEEYRLFEPESTQKQEMDIWLKNFPQAWAETGGMGTAHCQAPVLIQ |
| P10273 | | | | | LKATATPISIRQYPMPHEAYQGIKPHIRRMLDQGILKPCQSPWNTPLLPV |
| | | | | | KKPGTEDYRPVQDLREVNKRVEDIHPTVPNPYNLLSTLPPSHPWYTVLDL |
| | | | | | KDAFFCLRLHSESQLLFAFEWRDPEIGLSGQLTWTRLPQGFKNSPTLFDE |
| | | | | | ALHSDLADFRVRYPALVLLQYVDDLLLAAATRTECLEGTKALLETLGNKG |
| | | | | | YRASAKKAQICLQEVTYLGYSLKDGQRWLTKARKEAILSIPVPKNSRQVR |
| | | | | | EFLGTAGYCRLWIPGFAELAAPLYPLTRPGTLFQWGTEQQLAFEDIKKAL |
| | | | | | LSSPALGLPDITKPFELFIDENSGFAKGVLVQKLGPWKRPVAYLSKKLDT |
| | | | | | VASGWPPCLRMVAAIAILVKDAGKLTLGQPLTILTSHPVEALVRQPPNKW |
| | | | | | LSNARMTHYQAMLLDAERVHFGPTVSLNPATLL |
| | | | | | PLPSGGNHHDCLQILAETHGTRPDLTDQPLPDADLTWYTDGSSFIRNGER |
| | | | | | EAGAAVTTESEVIWAAPLPPGTSAQRAELIALTQALKMAEGKKLTVYTDS |
| | | | | | RYAFATTHVHGEIYRRRGLLTSEGKEIKNKNEILALLEALFLPKRLSIIH |
| | | | | | CPGHQKGDSPQAKGNRLADDTAKKAATETHSSLTVLP |
| FLV_ | FLV | P10273 | derivative | 3155 | TLQLEEEYRLFEPESTQKQEMDIWLKNFPQAWAETGGMGTAHCQAPVLIQ |
| P10273_ | | | | | LKATATPISIRQYPMPHEAYQGIKPHIRRMLDQGILKPCQSPWNTPLLPV |
| 3mut | | | | | KKPGTEDYRPVQDLREVNKRVEDIHPTVPNPYNLLSTLPPSHPWYTVLDL |
| | | | | | KDAFFCLRLHSESQLLFAFEWRDPEIGLSGQLTWTRLPQGFKNSPTLFNE |
| | | | | | ALHSDLADFRVRYPALVLLQYVDDLLLAAATRTECLEGTKALLETLGNKG |
| | | | | | YRASAKKAQICLQEVTYLGYSLKDGQRWLTKARKEAILSIPVPKNSRQVR |
| | | | | | EFLGTAGYCRLWIPGFAELAAPLYPLTRPGTLFQWGTEQQLAFEDIKKAL |
| | | | | | LSSPALGLPDITKPFELFIDENSGFAKGVLVQKLGPWKRPVAYLSKKLDT |
| | | | | | VASGWPPCLRMVAAIAILVKDAGKLTLGQPLTILTSHPVEALVRQPPNKW |
| | | | | | LSNARMTHYQAMLLDAERVHFGPTVSLNPATLLPLPSGGNHHDCLQILAE |
| | | | | | THGTRPDLTDQPLPDADLTWYTDGSSFIRNGEREAGAAVTTESEVIWAAP |
| | | | | | LPPGTSAQRAELIALTQALKMAEGKKLTVYTDSRYAFATTHVHGEIYRRR |
| | | | | | GWLTSEGKEIKNKNEILALLEALFLPKRLSIIHCPGHQKGDSPQAKGNRL |
| | | | | | ADDTAKKAATETHSSLTVLP |
| FLV_ | FLV | P10273 | derivative | 3156 | TLQLEEEYRLFEPESTQKQEMDIWLKNFPQAWAETGGMGTAHCQAPVLIQ |
| P10273_ | | | | | LKATATPISIRQYPMPHEAYQGIKPHIRRMLDQGILKPCQSPWNTPLLPV |
| 3mutA | | | | | KKPGTEDYRPVQDLREVNKRVEDIHPTVPNPYNLLSTLPPSHPWYTVLDL |
| | | | | | KDAFFCLRLHSESQLLFAFEWRDPEIGLSGQLTWTRLPQGFKNSPTLFNE |
| | | | | | ALHSDLADFRVRYPALVLLQYVDDLLLAAATRTECLEGTKALLETLGNKG |
| | | | | | YRASAKKAQICLQEVTYLGYSLKDGQRWLTKARKEAILSIPVPKNSRQVR |
| | | | | | EFLGKAGYCRLFIPGFAELAAPLYPLTRPGTLFQWGTEQQLAFEDIKKAL |
| | | | | | LSSPALGLPDITKPFELFIDENSGFAKGVLVQKLGPWKRPVAYLSKKLDT |
| | | | | | VASGWPPCLRMVAAIAILVKDAGKLTLGQPLTILTSHPVEALVRQPPNKW |
| | | | | | LSNARMTHYQAMLLDAERVHFGPTVSLNPATLLPLPSGGNHHDCLQILAE |
| | | | | | THGTRPDLTDQPLPDADLTWYTDGSSFIRNGEREAGAAVTTESEVIWAAP |
| | | | | | LPPGTSAQRAELIALTQALKMAEGKKLTVYTDSRYAFATTHVHGEIYRRR |
| | | | | | GWLTSEGKEIKNKNEILALLEALFLPKRLSIIHCPGHQKGDSPQAKGNRL |
| | | | | | ADDTAKKAATETHSSLTVLP |
| FOAMV_ | FOAMV | P14350 | root | 3157 | MNPLQLLQPLPAEIKGTKLLAHWNSGATITCIPESFLEDEQPIKKTLIKT |
| P14350 | | | | | IHGEKQQNVYYVTFKVKGRKVEAEVIASPYEYILLSPTDVPWLTQQPLQL |
| | | | | | TILVPLQEYQEKILSKTALPEDQKQQLKTLFVKYDNLWQHWENQVGHRKI |
| | | | | | RPHNIATGDYPPRPQKQYPINPKAKPSIQIVIDDLLKQGVLTPQNSTMNT |
| | | | | | PVYPVPKPDGRWRMVLDYREVNKTIPLTAAQNQHSAGILATIVRQKYKTT |
| | | | | | LDLANGFWAHPITPESYWLTAFTWQGKQYCWTRLPQGFLNSPALFTADVV |
| | | | | | DLLKEIPNVQVYVDDIYLSHDDPKEHVQQLEKVFQILLQAGYVVSLKKSE |
| | | | | | IGQKTVEFLGFNITKEGRGLTDTFKTKLLNITPPKDLKQLQSILGLLNFA |
| | | | | | RNFIPNFAELVQPLYNLIASAKGKYIEWSEENTKQLNMVIEALNTASNLE |
| | | | | | ERLPEQRLVIKVNTSPSAGYVRYYNETGKKPIMYLNYVFSKAELKFSMLE |
| | | | | | KLLTTMHKALIKAMDLAMGQEILVYSPIVSMTKIQKTPLPERKALPIRWI |
| | | | | | TWMTYLEDPRIQFHYDKTLPELKHIPDVYTSSQSPVKHPSQYEGVFYTDG |
| | | | | | SAIKSPDPTKSNNAGMGIVHATYKPEYQVLNQWSIPLGNHTAQMAEIAAV |
| | | | | | EFACKKALKIPGPVLVITDSFYVAESANKELPYWKSNGFVNNKKKPLKHI |
| | | | | | SKWKSIAECLSMKPDITIQHEKGISLQIPVFILKGNALADKLATQGSYVV |
| | | | | | N |
| FOAMV_ | FOAMV | P14350 | derivative | 3158 | VPWLTQQPLQLTILVPLQEYQEKILSKTALPEDQKQQLKTLFVKYDNLWQ |
| P14350- | | | | | HWENQVGHRKIRPHNIATGDYPPRPQKQYPINPKAKPSIQIVIDDLLKQG |
| Pro | | | | | VLTPQNSTMNTPVYPVPKPDGRWRMVLDYREVNKTIPLTAAQNQHSAGIL |
| | | | | | ATIVRQKYKTTLDLANGFWAHPITPESYWLTAFTWQGKQYCWTRLPQGFL |
| | | | | | NSPALFTADVVDLLKEIPNVQVYVDDIYLSHDDPKEHVQQLEKVFQILLQ |
| | | | | | AGYVVSLKKSEIGQKTVEFLGFNITKEGRGLTDTFKTKLLNITPPKDLKQ |
| | | | | | LQSILGLLNFARNFIPNFAELVQPLYNLIASAKGKYIEWSEENTKQLNMV |
| | | | | | IEALNTASNLEERLPEQRLVIKVNTSPSAGYVRYYNETGKKPIMYLNYVF |
| | | | | | SKAELKFSMLEKLLTTMHKALIKAMDLAMGQEILVYSPIVSMTKIQKTPL |
| | | | | | PERKALPIRWITWMTYLEDPRIQFHYDKTLPELKHIPDVYTSSQSPVKHP |
| | | | | | SQYEGVFYTDGSAIKSPDPTKSNNAGMGIVHATYKPEYQVLNQWSIPLGN |
| | | | | | HTAQMAEIAAVEFACKKALKIPGPVLVITDSFYVAESANKELPYWKSNGF |
| | | | | | VNNKKKPLKHISKWKSIAECLSMKPDITIQHEKGISLQIPVFILKGNALA |
| | | | | | DKLATQGSYVVN |
| FOAMV_ | FOAMV | P14350 | derivative | 3159 | VPWLTQQPLQLTILVPLQEYQEKILSKTALPEDQKQQLKTLFVKYDNLWQ |
| P14350- | | | | | HWENQVGHRKIRPHNIATGDYPPRPQKQYPINPKAKPSIQIVIDDLLKQG |
| Pro_2 | | | | | VLTPQNSTMNTPVYPVPKPDGRWRMVLDYREVNKTIPLTAAQNQHSAGIL |
| mut | | | | | ATIVRQKYKTTLDLANGFWAHPITPESYWLTAFTWQGKQYCWTRLPQGFL |
| | | | | | NSPALFNADVVDLLKEIPNVQVYVDDIYLSHDDPKEHVQQLEKVFQILLQ |
| | | | | | AGYVVSLKKSEIGQKTVEFLGFNITKEGRGLTDTFKTKLLNITPPKDLKQ |
| | | | | | LQSILGLLNFARNFIPNFAELVQPLYNLIAPAKGKYIEWSEENTKQLNMV |
| | | | | | IEALNTASNLEERLPEQRLVIKVNTSPSAGYVRYYNETGKKPIMYLNYVF |
| | | | | | SKAELKFSMLEKLLTTMHKALIKAMDLAMGQEILVYSPIVSMTKIQKTPL |
| | | | | | PERKALPIRWITWMTYLEDPRIQFHYDKTLPELKHIPDVYTSSQSPVKHP |
| | | | | | SQYEGVFYTDGSAIKSPDPTKSNNAGMGIVHATYKPEYQVLNQWSIPLGN |
| | | | | | HTAQMAEIAAVEFACKKALKIPGPVLVITDSFYVAESANKELPYWKSNGF |
| | | | | | VNNKKKPLKHISKWKSIAECLSMKPDITIQHEKGISLQIPVFILKGNALA |
| | | | | | DKLATQGSYVVN |
| FOAMV_ | FOAMV | P14350 | derivative | 3160 | VPWLTQQPLQLTILVPLQEYQEKILSKTALPEDQKQQLKTLFVKYDNLWQ |
| P14350- | | | | | HWENQVGHRKIRPHNIATGDYPPRPQKQYPINPKAKPSIQIVIDDLLKQG |
| Pro_2 | | | | | VLTPQNSTMNTPVYPVPKPDGRWRMVLDYREVNKTIPLTAAQNQHSAGIL |
| mutA | | | | | ATIVRQKYKTTLDLANGFWAHPITPESYWLTAFTWQGKQYCWTRLPQGFL |
| | | | | | NSPALFNADVVDLLKEIPNVQVYVDDIYLSHDDPKEHVQQLEKVFQILLQ |
| | | | | | AGYVVSLKKSEIGQKTVEFLGFNITKEGRGLTDTFKTKLLNITPPKDLKQ |
| | | | | | LQSILGKLNFARNFIPNFAELVQPLYNLIAPAKGKYIEWSEENTKQLNMV |
| | | | | | IEALNTASNLEERLPEQRLVIKVNTSPSAGYVRYYNETGKKPIMYLNYVF |
| | | | | | SKAELKFSMLEKLLTTMHKALIKAMDLAMGQEILVYSPIVSMTKIQKTPL |
| | | | | | PERKALPIRWITWMTYLEDPRIQFHYDKTLPELKHIPDVYTSSQSPVKHP |
| | | | | | SQYEGVFYTDGSAIKSPDPTKSNNAGMGIVHATYKPEYQVLNQWSIPLGN |
| | | | | | HTAQMAEIAAVEFACKKALKIPGPVLVITDSFYVAESANKELPYWKSNGF |
| | | | | | VNNKKKPLKHISKWKSIAECLSMKPDITIQHEKGISLQIPVFILKGNALA |
| | | | | | DKLATQGSYVVN |
| FOAMV_ | FOAMV | P14350 | derivative | 3161 | MNPLQLLQPLPAEIKGTKLLAHWNSGATITCIPESFLEDEQPIKKTLIKT |
| P14350_ | | | | | IHGEKQQNVYYVTFKVKGRKVEAEVIASPYEYILLSPTDVPWLTQQPLQL |
| 2mut | | | | | TILVPLQEYQEKILSKTALPEDQKQQLKTLFVKYDNLWQHWENQVGHRKI |
| | | | | | RPHNIATGDYPPRPQKQYPINPKAKPSIQIVIDDLLKQGVLTPQNSTMNT |
| | | | | | PVYPVPKPDGRWRMVLDYREVNKTIPLTAAQNQHSAGILATIVRQKYKTT |
| | | | | | LDLANGFWAHPITPESYWLTAFTWQGKQYCWTRLPQGFLNSPALFNADVV |
| | | | | | DLLKEIPNVQVYVDDIYLSHDDPKEHVQQLEKVFQILLQAGYVVSLKKSE |
| | | | | | IGQKTVEFLGFNITKEGRGLTDTFKTKLLNITPPKDLKQLQSILGLLNFA |
| | | | | | RNFIPNFAELVQPLYNLIAPAKGKYIEWSEENTKQLNMVIEALNTASNLE |
| | | | | | ERLPEQRLVIKVNTSPSAGYVRYYNETGKKPIMYLNYVFSKAELKFSMLE |
| | | | | | KLLTTMHKALIKAMDLAMGQEILVYSPIVSMTKIQKTPLPERKALPIRWI |
| | | | | | TWMTYLEDPRIQFHYDKTLPELKHIPDVYTSSQSPVKHPSQYEGVFYTDG |
| | | | | | SAIKSPDPTKSNNAGMGIVHATYKPEYQVLNQWSIPLGNHTAQMAEIAAV |
| | | | | | EFACKKALKIPGPVLVITDSFYVAESANKELPYWKSNGFVNNKKKPLKHI |
| | | | | | SKWKSIAECLSMKPDITIQHEKGISLQIPVFILKGNALADKLATQGSYVV |
| | | | | | N |
| FOAMV_ | FOAMV | P14350 | derivative | 3162 | MNPLQLLQPLPAEIKGTKLLAHWNSGATITCIPESFLEDEQPIKKTLIKT |
| P14350_ | | | | | IHGEKQQNVYYVTFKVKGRKVEAEVIASPYEYILLSPTDVPWLTQQPLQL |
| 2mutA | | | | | TILVPLQEYQEKILSKTALPEDQKQQLKTLFVKYDNLWQHWENQVGHRKI |
| | | | | | RPHNIATGDYPPRPQKQYPINPKAKPSIQIVIDDLLKQGVLTPQNSTMNT |
| | | | | | PVYPVPKPDGRWRMVLDYREVNKTIPLTAAQNQHSAGILATIVRQKYKTT |
| | | | | | LDLANGFWAHPITPESYWLTAFTWQGKQYCWTRLPQGFLNSPALFNADVV |
| | | | | | DLLKEIPNVQVYVDDIYLSHDDPKEHVQQLEKVFQILLQAGYVVSLKKSE |
| | | | | | IGQKTVEFLGFNITKEGRGLTDTFKTKLLNITPPKDLKQLQSILGKLNFA |
| | | | | | RNFIPNFAELVQPLYNLIAPAKGKYIEWSEENTKQLNMVIEALNTASNLE |
| | | | | | ERLPEQRLVIKVNTSPSAGYVRYYNETGKKPIMYLNYVFSKAELKFSMLE |
| | | | | | KLLTTMHKALIKAMDLAMGQEILVYSPIVSMTKIQKTPLPERKALPIRWI |
| | | | | | TWMTYLEDPRIQFHYDKTLPELKHIPDVYTSSQSPVKHPSQYEGVFYTDG |
| | | | | | SAIKSPDPTKSNNAGMGIVHATYKPEYQVLNQWSIPLGNHTAQMAEIAAV |
| | | | | | EFACKKALKIPGPVLVITDSFYVAESANKELPYWKSNGFVNNKKKPLKHI |
| | | | | | SKWKSIAECLSMKPDITIQHEKGISLQIPVFILKGNALADKLATQGSYVV |
| | | | | | N |
| GALV_ | GALV | P21414 | root | 3163 | VLNLEEEYRLHEKPVPSSIDPSWLQLFPTVWAERAGMGLANQVPPVVVEL |
| P21414 | | | | | RSGASPVAVRQYPMSKEAREGIRPHIQKFLDLGVLVPCRSPWNTPLLPVK |
| | | | | | KPGTNDYRPVQDLREINKRVQDIHPTVPNPYNLLSSLPPSYTWYSVLDLK |
| | | | | | DAFFCLRLHPNSQPLFAFEWKDPEKGNTGQLTWTRLPQGFKNSPTLFDEA |
| | | | | | LHRDLAPFRALNPQVVLLQYVDDLLVAAPTYEDCKKGTQKLLQELSKLGY |
| | | | | | RVSAKKAQLCQREVTYLGYLLKEGKRWLTPARKATVMKIPVPTTPRQVRE |
| | | | | | FLGTAGFCRLWIPGFASLAAPLYPLTKESIPFIWTEEHQQAFDHIKKALL |
| | | | | | SAPALALPDLTKPFTLYIDERAGVARGVLTQTLGPWRRPVAYLSKKLDPV |
| | | | | | ASGWPTCLKAVAAVALLLKDADKLTLGQNVTVIASHSLESIVRQPPDRWM |
| | | | | | TNARMTHYQSLLLNERVSFAPPAVLNPATLLPVESEATPVHRCSEILAEE |
| | | | | | TGTRRDLEDQPLPGVPTWYTDGSSFITEGKRRAGAPIVDGKRTVWASSLP |
| | | | | | EGTSAQKAELVALTQALRLAEGKNINIYTDSRYAFATAHIHGAIYKQRGL |
| | | | | | LTSAGKDIKNKEEILALLEAIHLPRRVAIIHCPGHQRGSNPVATGNRRAD |
| | | | | | EAAKQAALSTRVLAGTTKP |
| GALV_ | GALV | P21414 | derivative | 3164 | VLNLEEEYRLHEKPVPSSIDPSWLQLFPTVWAERAGMGLANQVPPVVVEL |
| P21414_ | | | | | RSGASPVAVRQYPMSKEAREGIRPHIQKFLDLGVLVPCRSPWNTPLLPVK |
| 3mut | | | | | KPGTNDYRPVQDLREINKRVQDIHPTVPNPYNLLSSLPPSYTWYSVLDLK |
| | | | | | DAFFCLRLHPNSQPLFAFEWKDPEKGNTGQLTWTRLPQGFKNSPTLFNEA |
| | | | | | LHRDLAPFRALNPQVVLLQYVDDLLVAAPTYEDCKKGTQKLLQELSKLGY |
| | | | | | RVSAKKAQLCQREVTYLGYLLKEGKRWLTPARKATVMKIPVPTTPRQVRE |
| | | | | | FLGTAGFCRLWIPGFASLAAPLYPLTKPSIPFIWTEEHQQAFDHIKKALL |
| | | | | | SAPALALPDLTKPFTLYIDERAGVARGVLTQTLGPWRRPVAYLSKKLDPV |
| | | | | | ASGWPTCLKAVAAVALLLKDADKLTLGQNVTVIASHSLESIVRQPPDRWM |
| | | | | | TNARMTHYQSLLLNERVSFAPPAVLNPATLLPVESEATPVHRCSEILAEE |
| | | | | | TGTRRDLEDQPLPGVPTWYTDGSSFITEGKRRAGAPIVDGKRTVWASSLP |
| | | | | | EGTSAQKAELVALTQALRLAEGKNINIYTDSRYAFATAHIHGAIYKQRGW |
| | | | | | LTSAGKDIKNKEEILALLEAIHLPRRVAIIHCPGHQRGSNPVATGNRRAD |
| | | | | | EAAKQAALSTRVLAGTTKP |
| GALV_ | GALV | P21414 | derivative | 3165 | VLNLEEEYRLHEKPVPSSIDPSWLQLFPTVWAERAGMGLANQVPPVVVEL |
| P21414_ | | | | | RSGASPVAVRQYPMSKEAREGIRPHIQKFLDLGVLVPCRSPWNTPLLPVK |
| 3mutA | | | | | KPGTNDYRPVQDLREINKRVQDIHPTVPNPYNLLSSLPPSYTWYSVLDLK |
| | | | | | DAFFCLRLHPNSQPLFAFEWKDPEKGNTGQLTWTRLPQGFKNSPTLFNEA |
| | | | | | LHRDLAPFRALNPQVVLLQYVDDLLVAAPTYEDCKKGTQKLLQELSKLGY |
| | | | | | RVSAKKAQLCQREVTYLGYLLKEGKRWLTPARKATVMKIPVPTTPRQVRE |
| | | | | | FLGKAGFCRLFIPGFASLAAPLYPLTKPSIPFIWTEEHQQAFDHIKKALL |
| | | | | | SAPALALPDLTKPFTLYIDERAGVARGVLTQTLGP |
| | | | | | WRRPVAYLSKKLDPVASGWPTCLKAVAAVALLLKDADKLTLGQNVTVIAS |
| | | | | | HSLESIVRQPPDRWMTNARMTHYQSLLLNERVSFAPPAVLNPATL |
| | | | | | LPVESEATPVHRCSEILAEETGTRRDLEDQPLPGVPTWYTDGSSFITEGK |
| | | | | | RRAGAPIVDGKRTVWASSLPEGTSAQKAELVALTQALRLAEGKNINIYTD |
| | | | | | SRYAFATAHIHGAIYKQRGWLTSAGKDIKNKEEILALLEAIHLPRRVAII |
| | | | | | HCPGHQRGSNPVATGNRRADEAAKQAALSTRVLAGTTKP |
| HTL1A_ | HTL1A | P03362 | root | 3166 | AVLGLEHLPRPPQISQFPLNPERLQALQHLVRKALEAGHIEPYTGPGNNP |
| P03362 | | | | | VFPVKKANGTWRFIHDLRATNSLTIDLSSSSPGPPDLSSLPTTLAHLQTI |
| | | | | | DLRDAFFQIPLPKQFQPYFAFTVPQQCNYGPGTRYAWKVLPQGFKNSPTL |
| | | | | | FEMQLAHILQPIRQAFPQCTILQYMDDILLASPSHEDLLLLSEATMASLI |
| | | | | | SHGLPVSENKTQQTPGTIKFLGQIISPNHLTYDAVPTVPIRSRWALPELQ |
| | | | | | ALLGEIQWVSKGTPTLRQPLHSLYCALQRHTDPRDQIYLNPSQVQSLVQL |
| | | | | | RQALSQNCRSRLVQTLPLLGAIMLTLTGTTTVVFQSKEQWPLVWLHAPLP |
| | | | | | HTSQCPWGQLLASAVLLLDKYTLQSYGLLCQTIHHNISTQTFNQFIQTSD |
| | | | | | HPSVPILLHHSHRFKNLGAQTGELWNTFLKTAAPLAPVKALMPVFTLSPV |
| | | | | | IINTAPCLFSDGSTSRAAYILWDKQILSQRSFPLPPPHKSAQRAELLGLL |
| | | | | | HGLSSARSWRCLNIFLDSKYLYHYLRTLALGTFQGRSSQAPFQALLPRLL |
| | | | | | SRKVVYLHHVRSHTNLPDPISRLNALTDALLITPVLQL |
| HTL1A_ | HTL1A | P03362 | derivative | 3167 | AVLGLEHLPRPPQISQFPLNPERLQALQHLVRKALEAGHIEPYTGPGNNP |
| P03362_ | | | | | VFPVKKANGTWRFIHDLRATNSLTIDLSSSSPGPPDLSSLPTTLAHLQTI |
| 2mut | | | | | DLRDAFFQIPLPKQFQPYFAFTVPQQCNYGPGTRYAWKVLPQGFKNSPTL |
| | | | | | FQMQLAHILQPIRQAFPQCTILQYMDDILLASPSHEDLLLLSEATMASLI |
| | | | | | SHGLPVSENKTQQTPGTIKFLGQIISPNHLTYDAVPTVPIRSRWALPELQ |
| | | | | | ALLGEIQWVSKGTPTLRQPLHSLYCALQPHTDPRDQIYLNPSQVQSLVQL |
| | | | | | RQALSQNCRSRLVQTLPLLGAIMLTLTGTTTVVFQSKEQWPLVWLHAPLP |
| | | | | | HTSQCPWGQLLASAVLLLDKYTLQSYGLLCQTIHHNISTQTFNQFIQTSD |
| | | | | | HPSVPILLHHSHRFKNLGAQTGELWNTFLKTAAPLAPVKALMPVFTLSPV |
| | | | | | IINTAPCLFSDGSTSRAAYILWDKQILSQRSFPLPPPHKSAQRAELLGLL |
| | | | | | HGLSSARSWRCLNIFLDSKYLYHYLRTLALGTFQGRSSQAPFQALLPRLL |
| | | | | | SRKVVYLHHVRSHTNLPDPISRLNALTDALLITPVLQL |
| HTL1A_ | HTL1A | P03362 | derivative | 3168 | AVLGLEHLPRPPQISQFPLNPERLQALQHLVRKALEAGHIEPYTGPGNNP |
| P03362_ | | | | | VFPVKKANGTWRFIHDLRATNSLTIDLSSSSPGPPDLSSPPTTLAHLQTI |
| 2mutB | | | | | DLRDAFFQIPLPKQFQPYFAFTVPQQCNYGPGTRYAWKVLPQGFKNSPTL |
| | | | | | FQMQLAHILQPIRQAFPQCTILQYMDDILLASPSHEDLLLLSEATMASLI |
| | | | | | SHGLPVSENKTQQTPGTIKFLGQIISPNHLTYDAVPTVPIRSRWALPELQ |
| | | | | | ALLGEIQWVSKGTPTLRQPLHSLYCALQPHTDPRDQIYLNPSQVQSLVQL |
| | | | | | RQALSQNCRSRLVQTLPLLGAIMLTLTGTTTVVFQSKEQWPLVWLHAPLP |
| | | | | | HTSQCPWGQLLASAVLLLDKYTLQSYGLLCQTIHHNISTQTFNQFIQTSD |
| | | | | | HPSVPILLHHSHRFKNLGAQTGELWNTFLKTAAPLAPVKALMPVFTLSPV |
| | | | | | IINTAPCLFSDGSTSRAAYILWDKQILSQRSFPLPPPHKSAQRAELLGLL |
| | | | | | HGLSSARSWRCLNIFLDSKYLYHYLRTLALGTFQGRSSQAPFQALLPRLL |
| | | | | | SRKVVYLHHVRSHTNLPDPISRLNALTDALLITPVLQL |
| HTLIC_ | HTL1C | P14078 | root | 3169 | AVLGLEHLPRPPEISQFPLNPERLQALQHLVRKALEAGHIEPYTGPGNNP |
| P14078 | | | | | VFPVKKANGTWRFIHDLRATNSLTIDLSSSSPGPPDLSSLPTTLAHLQTI |
| | | | | | DLKDAFFQIPLPKQFQPYFAFTVPQQCNYGPGTRYAWRVLPQGFKNSPTL |
| | | | | | FEMQLAHILQPIRQAFPQCTILQYMDDILLASPSHADLQLLSEATMASLI |
| | | | | | SHGLPVSENKTQQTPGTIKFLGQIISPNHLTYDAVPKVPIRSRWALPELQ |
| | | | | | ALLGEIQWVSKGTPTLRQPLHSLYCALQRHTDPRDQIYLNPSQVQSLVQL |
| | | | | | RQALSQNCRSRLVQTLPLLGAIMLTLTGTTTVVFQSKQQWPLVWLHAPLP |
| | | | | | HTSQCPWGQLLASAVLLLDKYTLQSYGLLCQTIHHNISTQTFNQFIQTSD |
| | | | | | HPSVPILLHHSHRFKNLGAQTGELWNTFLKTTAPLAPVKALMPVFTLSPV |
| | | | | | IINTAPCLFSDGSTSQAAYILWDKHILSQRSFPLPPPHKSAQRAELLGLL |
| | | | | | HGLSSARSWRCLNIFLDSKYLYHYLRTLALGTFQGRSSQAPFQALLPRLL |
| | | | | | SRKVVYLHHVRSHTNLPDPISRLNALTDALLITPVLQL |
| HTLIC_ | HTL1C | P14078 | derivative | 3170 | AVLGLEHLPRPPEISQFPLNPERLQALQHLVRKALEAGHIEPYTGPGNNP |
| P14078_2 | | | | | VFPVKKANGTWRFIHDLRATNSLTIDLSSSSPGPPDLSSLPTTLAHLQTI |
| mut | | | | | DLKDAFFQIPLPKQFQPYFAFTVPQQCNYGPGTRYAWRVLPQGFKNSPTL |
| | | | | | FQMQLAHILQPIRQAFPQCTILQYMDDILLASPSHADLQLLSEATMA |
| | | | | | SLISHGLPVSENKTQQTPGTIKFLGQIISPNHLTYDAVPKVPIRSRWALP |
| | | | | | ELQALLGEIQWVSKGTPTLRQPLHSLYCALQPHTDPRDQIYLNPSQVQSL |
| | | | | | VQLRQALSQNCRSRLVQTLPLLGAIMLTLTGTTTVVFQSKQQWPLVWLHA |
| | | | | | PLPHTSQCPWGQLLASAVLLLDKYTLQSYGLLCQTIHHNISTQTFNQFIQ |
| | | | | | TSDHPSVPILLHHSHRFKNLGAQTGELWNTFLKTTAPLAPVKALMPVFTL |
| | | | | | SPVIINTAPCLFSDGSTSQAAYILWDKHILSQRSFPLPPPHKSAQRAELL |
| | | | | | GLLHGLSSARSWRCLNIFLDSKYLYHYLRTLALGTFQGRSSQAPFQALLP |
| | | | | | RLLSRKVVYLHHVRSHTNLPDPISRLNALTDALLITPVLQL |
| HTLIC_ | HTL1C | P14078 | derivative | 3171 | AVLGLEHLPRPPEISQFPLNPERLQALQHLVRKALEAGHIEPYTGPGNNP |
| P14078_2 | | | | | VFPVKKANGTWRFIHDLRATNSLTIDLSSSSPGPPDLSSPPTTLAHLQTI |
| mutB | | | | | DLKDAFFQIPLPKQFQPYFAFTVPQQCNYGPGTRYAWRVLPQGFKNSPTL |
| | | | | | FQMQLAHILQPIRQAFPQCTILQYMDDILLASPSHADLQLLSEATMASLI |
| | | | | | SHGLPVSENKTQQTPGTIKFLGQIISPNHLTYDAVPKVPIRSRWALPELQ |
| | | | | | ALLGEIQWVSKGTPTLRQPLHSLYCALQPHTDPRDQIYLNPSQVQSLVQL |
| | | | | | RQALSQNCRSRLVQTLPLLGAIMLTLTGTTTVVFQSKQQWPLVWLHAPLP |
| | | | | | HTSQCPWGQLLASAVLLLDKYTLQSYGLLCQTIHHNISTQTFNQFIQTSD |
| | | | | | HPSVPILLHHSHRFKNLGAQTGELWNTFLKTTAPLAPVKALMPVFTLSPV |
| | | | | | IINTAPCLFSDGSTSQAAYILWDKHILSQRSFPLPPPHKSAQRAELLGLL |
| | | | | | HGLSSARSWRCLNIFLDSKYLYHYLRTLALGTFQGRSSQAPFQALLPRLL |
| | | | | | SRKVVYLHHVRSHTNLPDPISRLNALTDALLITPVLQL |
| HTLIL_ | HTL1L | POC211 | root | 3172 | GLEHLPRPPEISQFPLNPERLQALQHLVRKALEAGHIEPYTGPGNNPVFP |
| P0C211 | | | | | VKKANGTWRFIHDLRATNSLTVDLSSSSPGPPDLSSLPTTLAHLQTIDLK |
| | | | | | DAFFQIPLPKQFQPYFAFTVPQQCNYGPGTRYAWKVLPQGFKNSPTLFEM |
| | | | | | QLASILQPIRQAFPQCVILQYMDDILLASPSPEDLQQLSEATMASLISHG |
| | | | | | LPVSQDKTQQTPGTIKFLGQUISPNHITYDAVPTVPIRSRWALPELQALL |
| | | | | | GEIQWVSKGTPTLRQPLHSLYCALQGHTDPRDQIYLNPSQVQSLMQLQQA |
| | | | | | LSQNCRSRLAQTLPLLGAIMLTLTGTTTVVFQSKQQWPLVWLHAPLPHTS |
| | | | | | QCPWGQLLASAVLLLDKYTLQSYGLLCQTIHHNISIQTFNQFIQTSDHPS |
| | | | | | VPILLHHSHRFKNLGAQTGELWNTFLKTAAPLAPVKALTPVFTLSPIIIN |
| | | | | | TAPCLFSDGSTSQAAYILWDKHILSQRSFPLPPPHKSAQQAELLGLLHGL |
| | | | | | SSARSWHCLNIFLDSKYLYHYLRTLALGTFQGKSSQAPFQALLPRLLAHK |
| | | | | | VIYLHHVRSHTNLPDPISKLNALTDALLITPIL |
| HTLIL_ | HTL1L | POC211 | derivative | 3173 | GLEHLPRPPEISQFPLNPERLQALQHLVRKALEAGHIEPYTGPGNNPVFP |
| P0C211_2 | | | | | VKKANGTWRFIHDLRATNSLTVDLSSSSPGPPDLSSLPTTLAHLQTIDLK |
| mut | | | | | DAFFQIPLPKQFQPYFAFTVPQQCNYGPGTRYAWKVLPQGFKNSPTLFQM |
| | | | | | QLASILQPIRQAFPQCVILQYMDDILLASPSPEDLQQLSEATMASLISHG |
| | | | | | LPVSQDKTQQTPGTIKFLGQIISPNHITYDAVPTVPIRSRWALPELQALL |
| | | | | | GEIQWVSKGTPTLRQPLHSLYCALQGHTDPRDQIYLNPSQVQSLMQLQQA |
| | | | | | LSQNCRSRLAQTLPLLGAIMLTLTGTTTVVFQSKQQWPLVWLHAPLPHTS |
| | | | | | QCPWGQLLASAVLLLDKYTLQSYGLLCQTIHHNISIQTFNQFIQTSDHPS |
| | | | | | VPILLHHSHRFKNLGAQTGELWNTFLKTAAPLAPVKALTPVFTLSPIIIN |
| | | | | | TAPCLFSDGSTSQAAYILWDKHILSQRSFPLPPPHKSAQQAELLGLLHGL |
| | | | | | SSARSWHCLNIFLDSKYLYHYLRTLAWGTFQGKSSQAPFQALLPRLLAHK |
| | | | | | VIYLHHVRSHTNLPDPISKLNALTDALLITPIL |
| HTLIL_ | HTL1L | POC211 | derivative | 3174 | GLEHLPRPPEISQFPLNPERLQALQHLVRKALEAGHIEPYTGPGNNPVFP |
| P0C211_2 | | | | | VKKANGTWRFIHDLRATNSLTVDLSSSSPGPPDLSSPPTTLAHLQTIDLK |
| mutB | | | | | DAFFQIPLPKQFQPYFAFTVPQQCNYGPGTRYAWKVLPQGFKNSPTLFQM |
| | | | | | QLASILQPIRQAFPQCVILQYMDDILLASPSPEDLQQLSEATMASLISHG |
| | | | | | LPVSQDKTQQTPGTIKFLGQIISPNHITYDAVPTVPIRSRWALPELQALL |
| | | | | | GEIQWVSKGTPTLRQPLHSLYCALQGHTDPRDQIYLNPSQVQSLMQLQQA |
| | | | | | LSQNCRSRLAQTLPLLGAIMLTLTGTTTVVFQSKQQWPLVWLHAPLPHTS |
| | | | | | QCPWGQLLASAVLLLDKYTLQSYGLLCQTIHHNISIQTFNQFIQTSDHPS |
| | | | | | VPILLHHSHRFKNLGAQTGELWNTFLKTAAPLAPVKALTPVFTLSPIIIN |
| | | | | | TAPCLFSDGSTSQAAYILWDKHILSQRSFPLPPPHKSAQQAE |
| | | | | | LLGLLHGLSSARSWHCLNIFLDSKYLYHYLRTLAWGTFQGKSSQAPFQAL |
| | | | | | LPRLLAHKVIYLHHVRSHTNLPDPISKLNALTDALLITPIL |
| HTL32_ | HTL32 | Q0R5R2 | root | 3175 | GLEHLPPPPEVSQFPLNPERLQALTDLVSRALEAKHIEPYQGPGNNPIFP |
| Q0R5R2 | | | | | VKKPNGKWRFIHDLRATNSVTRDLASPSPGPPDLTSLPQGLPHLRTIDLT |
| | | | | | DAFFQIPLPTIFQPYFAFTLPQPNNYGPGTRYSWRVLPQGFKNSPTLFEQ |
| | | | | | QLSHILTPVRKTFPNSLIIQYMDDILLASPAPGELAALTDKVTNALTKEG |
| | | | | | LPLSPEKTQATPGPIHFLGQVISQDCITYETLPSINVKSTWSLAELQSML |
| | | | | | GELQWVSKGTPVLRSSLHQLYLALRGHRDPRDTIKLTSIQVQALRTIQKA |
| | | | | | LTLNCRSRLVNQLPILALIMLRPTGTTAVLFQTKQKWPLVWLHTPHPATS |
| | | | | | LRPWGQLLANAVIILDKYSLQHYGQVCKSFHHNISNQALTYYLHTSDQSS |
| | | | | | VAILLQHSHRFHNLGAQPSGPWRSLLQMPQIFQNIDVLRPPFTISPVVIN |
| | | | | | HAPCLFSDGSASKAAFIIWDRQVIHQQVLSLPSTCSAQAGELFGLLAGLQ |
| | | | | | KSQPWVALNIFLDSKFLIGHLRRMALGAFPGPSTQCELHTQLLPLLQGKT |
| | | | | | VYVHHVRSHTLLQDPISRLNEATDALMLAPLLPL |
| HTL32_ | HTL32 | Q0R5R2 | derivative | 3176 | GLEHLPPPPEVSQFPLNPERLQALTDLVSRALEAKHIEPYQGPGNNPIFP |
| Q0R5R2_2 | | | | | VKKPNGKWRFIHDLRATNSVTRDLASPSPGPPDLTSLPQGLPHLRTIDLT |
| mut | | | | | DAFFQIPLPTIFQPYFAFTLPQPNNYGPGTRYSWRVLPQGFKNSPTLFQQ |
| | | | | | QLSHILTPVRKTFPNSLIIQYMDDILLASPAPGELAALTDKVTNALTKEG |
| | | | | | LPLSPEKTQATPGPIHFLGQVISQDCITYETLPSINVKSTWSLAELQSML |
| | | | | | GELQWVSKGTPVLRSSLHQLYLALRGHRDPRDTIKLTSIQVQALRTIQKA |
| | | | | | LTLNCRSRLVNQLPILALIMLRPTGTTAVLFQTKQKWPLVWLHTPHPATS |
| | | | | | LRPWGQLLANAVIILDKYSLQHYGQVCKSFHHNISNQALTYYLHTSDQSS |
| | | | | | VAILLQHSHRFHNLGAQPSGPWRSLLQMPQIFQNIDVLRPPFTISPVVIN |
| | | | | | HAPCLFSDGSASKAAFIIWDRQVIHQQVLSLPSTCSAQAGELFGLLAGLQ |
| | | | | | KSQPWVALNIFLDSKFLIGHLRRMAWGAFPGPSTQCELHTQLLPLLQGKT |
| | | | | | VYVHHVRSHTLLQDPISRLNEATDALMLAPLLPL |
| HTL32_ | HTL32 | Q0R5R2 | derivative | 3177 | GLEHLPPPPEVSQFPLNPERLQALTDLVSRALEAKHIEPYQGPGNNPIFP |
| Q0R5R2_2 | | | | | VKKPNGKWRFIHDLRATNSVTRDLASPSPGPPDLTSPPQGLPHLRTIDLT |
| mutB | | | | | DAFFQIPLPTIFQPYFAFTLPQPNNYGPGTRYSWRVLPQGFKNSPTLFQQ |
| | | | | | QLSHILTPVRKTFPNSLIIQYMDDILLASPAPGELAALTDKVTNALTKEG |
| | | | | | LPLSPEKTQATPGPIHFLGQVISQDCITYETLPSINVKSTWSLAELQSML |
| | | | | | GELQWVSKGTPVLRSSLHQLYLALRGHRDPRDTIKLTSIQVQALRTIQKA |
| | | | | | LTLNCRSRLVNQLPILALIMLRPTGTTAVLFQTKQKWPLVWLHTPHPATS |
| | | | | | LRPWGQLLANAVIILDKYSLQHYGQVCKSFHHNISNQALTYYLHTSDQSS |
| | | | | | VAILLQHSHRFHNLGAQPSGPWRSLLQMPQIFQNIDVLRPPFTISPVVIN |
| | | | | | HAPCLFSDGSASKAAFIIWDRQVIHQQVLSLPSTCSAQAGELFGLLAGLQ |
| | | | | | KSQPWVALNIFLDSKFLIGHLRRMAWGAFPGPSTQCELHTQLLPLLQGKT |
| | | | | | VYVHHVRSHTLLQDPISRLNEATDALMLAPLLPL |
| HTL3P_ | HTL3P | Q4U0X6 | root | 3178 | GLEHLPPPPEVSQFPLNPERLQALTDLVSRALEAKHIEPYQGPGNNPIFP |
| Q4U0X6 | | | | | VKKPNGKWRFIHDLRATNSLTRDLASPSPGPPDLTSLPQDLPHLRTIDLT |
| | | | | | DAFFQIPLPAVFQPYFAFTLPQPNNHGPGTRYSWRVLPQGFKNSPTLFEQ |
| | | | | | QLSHILAPVRKAFPNSLIIQYMDDILLASPALRELTALTDKVTNALTKEG |
| | | | | | LPMSLEKTQATPGSIHFLGQVISPDCITYETLPSIHVKSIWSLAELQSML |
| | | | | | GELQWVSKGTPVLRSSLHQLYLALRGHRDPRDTIELTSTQVQALKTIQKA |
| | | | | | LALNCRSRLVSQLPILALIILRPTGTTAVLFQTKQKWPLVWLHTPHPATS |
| | | | | | LRPWGQLLANAIITLDKYSLQHYGQICKSFHHNISNQALTYYLHTSDQSS |
| | | | | | VAILLQHSHRFHNLGAQPSGPWRSLLQVPQIFQNIDVLRPPFIISPVVID |
| | | | | | HAPCLFSDGATSKAAFILWDKQVIHQQVLPLPSTCSAQAGELFGLLAGLQ |
| | | | | | KSKPWPALNIFLDSKFLIGHLRRMALGAFLGPSTQCDLHARLFPLLQGKT |
| | | | | | VYVHHVRSHTLLQDPISRLNEATDALMLAPLLPL |
| HTL3P_ | HTL3P | Q4U0X6 | derivative | 3179 | GLEHLPPPPEVSQFPLNPERLQALTDLVSRALEAKHIEPYQGPGNNPIFP |
| Q4U0X6_2 | | | | | VKKPNGKWRFIHDLRATNSLTRDLASPSPGPPDLTSLPQDLPHLRTIDLT |
| mut | | | | | DAFFQIPLPAVFQPYFAFTLPQPNNHGPGTRYSWRVLPQGFKNSPTLFQQ |
| | | | | | QLSHILAPVRKAFPNSLIIQYMDDILLASPALRELTALTDKVTNALTKE |
| | | | | | GLPMSLEKTQATPGSIHFLGQVISPDCITYETLPSIHVKSIWSLAELQSM |
| | | | | | LGELQWVSKGTPVLRSSLHQLYLALRGHRDPRDTIELTSTQVQALKTIQK |
| | | | | | ALALNCRSRLVSQLPILALIILRPTGTTAVLFQTKQKWPLVWLHTPHPAT |
| | | | | | SLRPWGQLLANAIITLDKYSLQHYGQICKSFHHNISNQALTYYLHTSDQS |
| | | | | | SVAILLQHSHRFHNLGAQPSGPWRSLLQVPQIFQNIDVLRPPFIISPVVI |
| | | | | | DHAPCLFSDGATSKAAFILWDKQVIHQQVLPLPSTCSAQAGELFGLLAGL |
| | | | | | QKSKPWPALNIFLDSKFLIGHLRRMAWGAFLGPSTQCDLHARLFPLLQGK |
| | | | | | TVYVHHVRSHTLLQDPISRLNEATDALMLAPLLPL |
| HTL3P_ | HTL3P | Q4U0X6 | derivative | 3180 | GLEHLPPPPEVSQFPLNPERLQALTDLVSRALEAKHIEPYQGPGNNPIFP |
| Q4U0X6_ | | | | | VKKPNGKWRFIHDLRATNSLTRDLASPSPGPPDLTSPPQDLPHLRTIDLT |
| 2mutB | | | | | DAFFQIPLPAVFQPYFAFTLPQPNNHGPGTRYSWRVLPQGFKNSPTLFQQ |
| | | | | | QLSHILAPVRKAFPNSLIIQYMDDILLASPALRELTALTDKVTNALTKEG |
| | | | | | LPMSLEKTQATPGSIHFLGQVISPDCITYETLPSIHVKSIWSLAELQSML |
| | | | | | GELQWVSKGTPVLRSSLHQLYLALRGHRDPRDTIELTSTQVQALKTIQKA |
| | | | | | LALNCRSRLVSQLPILALIILRPTGTTAVLFQTKQKWPLVWLHTPHPATS |
| | | | | | LRPWGQLLANAIITLDKYSLQHYGQICKSFHHNISNQALTYYLHTSDQSS |
| | | | | | VAILLQHSHRFHNLGAQPSGPWRSLLQVPQIFQNIDVLRPPFIISPVVID |
| | | | | | HAPCLFSDGATSKAAFILWDKQVIHQQVLPLPSTCSAQAGELFGLLAGLQ |
| | | | | | KSKPWPALNIFLDSKFLIGHLRRMAWGAFLGPSTQCDLHARLFPLLQGKT |
| | | | | | VYVHHVRSHTLLQDPISRLNEATDALMLAPLLPL |
| HTLV2_ | HTLV2 | P03363 | root | 3181 | HLPPPPQVDQFPLNLPERLQALNDLVSKALEAGHIEPYSGPGNNPVFPVK |
| P03363 | | | | | KPNGKWRFIHDLRATNAITTTLTSPSPGPPDLTSLPTALPHLQTIDLTDA |
| | | | | | FFQIPLPKQYQPYFAFTIPQPCNYGPGTRYAWTVLPQGFKNSPTLFEQQL |
| | | | | | AAVLNPMRKMFPTSTIVQYMDDILLASPTNEELQQLSQLTLQALTTHGLP |
| | | | | | ISQEKTQQTPGQIRFLGQVISPNHITYESTPTIPIKSQWTLTELQVILGE |
| | | | | | IQWVSKGTPILRKHLQSLYSALHGYRDPRACITLTPQQLHALHAIQQALO |
| | | | | | HNCRGRLNPALPLLGLISLSTSGTTSVIFQPKQNWPLAWLHTPHPPTSLC |
| | | | | | PWGHLLACTILTLDKYTLQHYGQLCQSFHHNMSKQALCDFLRNSPHPSVG |
| | | | | | ILIHHMGRFHNLGSQPSGPWKTLLHLPTLLQEPRLLRPIFTLSPVVLDTA |
| | | | | | PCLFSDGSPQKAAYVLWDQTILQQDITPLPSHETHSAQKGELLALICGLR |
| | | | | | AAKPWPSLNIFLDSKYLIKYLHSLAIGAFLGTSAHQTLQAALPPLLQGKT |
| | | | | | IYLHHVRSHTNLPDPISTFNEYTDSLILAPLVPL |
| HTLV2_ | HTLV2 | P03363 | derivative | 3182 | HLPPPPQVDQFPLNLPERLQALNDLVSKALEAGHIEPYSGPGNNPVFPVK |
| P03363_ | | | | | KPNGKWRFIHDLRATNAITTTLTSPSPGPPDLTSLPTALPHLQTIDLTDA |
| 2mut | | | | | FFQIPLPKQYQPYFAFTIPQPCNYGPGTRYAWTVLPQGFKNSPTLFQQQL |
| | | | | | AAVLNPMRKMFPTSTIVQYMDDILLASPTNEELQQLSQLTLQALTTHGLP |
| | | | | | ISQEKTQQTPGQIRFLGQVISPNHITYESTPTIPIKSQWTLTELQVILGE |
| | | | | | IQWVSKGTPILRKHLQSLYSALHPYRDPRACITLTPQQLHALHAIQQALQ |
| | | | | | HNCRGRLNPALPLLGLISLSTSGTTSVIFQPKQNWPLAWLHTPHPPTSLC |
| | | | | | PWGHLLACTILTLDKYTLQHYGQLCQSFHHNMSKQALCDFLRNSPHPSVG |
| | | | | | ILIHHMGRFHNLGSQPSGPWKTLLHLPTLLQEPRLLRPIFTLSPVVLDTA |
| | | | | | PCLFSDGSPQKAAYVLWDQTILQQDITPLPSHETHSAQKGELLALICGLR |
| | | | | | AAKPWPSLNIFLDSKYLIKYLHSLAIGAFLGTSAHQTLQAALPPLLQGKT |
| | | | | | IYLHHVRSHTNLPDPISTFNEYTDSLILAPLVPL |
| HTLV2_ | HTLV2 | P03363 | derivative | 3183 | HLPPPPQVDQFPLNLPERLQALNDLVSKALEAGHIEPYSGPGNNPVFPVK |
| P03363_ | | | | | KPNGKWRFIHDLRATNAITTTLTSPSPGPPDLTSPPTALPHLQTIDLTDA |
| 2mutB | | | | | FFQIPLPKQYQPYFAFTIPQPCNYGPGTRYAWTVLPQGFKNSPTLFQQQL |
| | | | | | AAVLNPMRKMFPTSTIVQYMDDILLASPTNEELQQLSQLTLQALTTHGLP |
| | | | | | ISQEKTQQTPGQIRFLGQVISPNHITYESTPTIPIKSQWTLTELQVILGE |
| | | | | | IQWVSKGTPILRKHLQSLYSALHPYRDPRACITLTPQQLHALHAIQQALQ |
| | | | | | HNCRGRLNPALPLLGLISLSTSGTTSVIFQPKQNWPLAWLHTPHPPTSLC |
| | | | | | PWGHLLACTILTLDKYTLQHYGQLCQSFHHNMSKQALCDFLRNSPHPSVG |
| | | | | | ILIHHMGRFHNLGSQPSGPWKTLLHLPTLLQEPRLLRPIFTLSPVVLDTA |
| | | | | | PCLFSDGSPQKAAYVLWDQTILQQDITPLPSHETHSAQKGELL |
| | | | | | ALICGLRAAKPWPSLNIFLDSKYLIKYLHSLAIGAFLGTSAHQTLQAALP |
| | | | | | PLLQGKTIYLHHVRSHTNLPDPISTFNEYTDSLILAPLVPL |
| JSRV_ | JSRV | P31623 | root | 3184 | PLGTSDSPVTHADPIDWKSEEPVWVDQWPLTQEKLSAAQQLVQEQLRLGH |
| P31623 | | | | | IEPSTSAWNSPIFVIKKKSGKWRLLQDLRKVNETMMHMGALQPGLPTPSA |
| | | | | | IPDKSYIIVIDLKDCFYTIPLAPQDCKRFAFSLPSVNFKEPMQRYQWRVL |
| | | | | | PQGMTNSPTLCQKFVATAIAPVRQRFPQLYLVHYMDDILLAHTDEHLLYQ |
| | | | | | AFSILKQHLSLNGLVIADEKIQTHFPYNYLGFSLYPRVYNTQLVKLQTDH |
| | | | | | LKTLNDFQKLLGDINWIRPYLKLPTYTLQPLFDILKGDSDPASPRTLSLE |
| | | | | | GRTALQSIEEAIRQQQITYCDYQRSWGLYILPTPRAPTGVLYQDKPLRWI |
| | | | | | YLSATPTKHLLPYYELVAKIIAKGRHEAIQYFGMEPPFICVPYALEQQDW |
| | | | | | LFQFSDNWSIAFANYPGQITHHYPSDKLLQFASSHAFIFPKIVRRQPIPE |
| | | | | | ATLIFTDGSSNGTAALIINHQTYYAQTSFSSAQVVELFAVHQALLTVPTS |
| | | | | | FNLFTDSSYVVGALQMIETVPIIGTTSPEVLNLFTLIQQVLHCRQHPCFF |
| | | | | | GHIRAHSTLPGALVQGNHTADVLTKQVFFQS |
| JSRV_ | JSRV | P31623 | derivative | 3185 | PLGTSDSPVTHADPIDWKSEEPVWVDQWPLTQEKLSAAQQLVQEQLRLGH |
| P31623_ | | | | | IEPSTSAWNSPIFVIKKKSGKWRLLQDLRKVNETMMHMGALQPGLPTPSP |
| 2mutB | | | | | IPDKSYIIVIDLKDCFYTIPLAPQDCKRFAFSLPSVNFKEPMQRYQWRVL |
| | | | | | PQGMTNSPTLCQKFVATAIAPVRQRFPQLYLVHYMDDILLAHTDEHLLYQ |
| | | | | | AFSILKQHLSLNGLVIADEKIQTHFPYNYLGFSLYPRVYNTQLVKLQTDH |
| | | | | | LKTLNDFQKLLGDINWIRPYLKLPTYTLQPLFDILKGDSDPASPRTLSLE |
| | | | | | GRTALQSIEEAIRQQQITYCDYQRSWGLYILPTPRAPTGVLYQDKPLRWI |
| | | | | | YLSATPTKHLLPYYELVAKIIAKGRHEAIQYFGMEPPFICVPYALEQQDW |
| | | | | | LFQFSDNWSIAFANYPGQITHHYPSDKLLQFASSHAFIFPKIVRRQPIPE |
| | | | | | ATLIFTDGSSNGTAALIINHQTYYAQTSFSSAQVVELFAVHQALLTVPTS |
| | | | | | FNLFTDSSYVVGALQMIETVPIIGTTSPEVLNLFTLIQQVLHCRQHPCFF |
| | | | | | GHIRAHSTLPGALVQGNHTADVLTKQVFFQS |
| KORV_ | KORV | Q9TTC1 | root | 3186 | TLGDQGSRGSDPLPEPRVTLTVEGIPTEFLVNTGAEHSVLTKPMGKMGSK |
| Q9TTC1 | | | | | RTVVAGATGSKVYPWTTKRLLKIGQKQVTHSFLVIPECPAPLLGRDLLTK |
| | | | | | LKAQIQFSTEGPQVTWEDRPAMCLVLNLEEEYRLHEKPVPPSIDPSWLQL |
| | | | | | FPMVWAEKAGMGLANQVPPVVVELKSDASPVAVRQYPMSKEAREGIRPHI |
| | | | | | QRFLDLGILVPCQSPWNTPLLPVKKPGTNDYRPVQDLREVNKRVQDIHPT |
| | | | | | VPNPYNLLSSLPPSHTWYSVLDLKDAFFCLKLHPNSQPLFAFEWRDPEKG |
| | | | | | NTGQLTWTRLPQGFKNSPTLFDEALHRDLASFRALNPQVVMLQYVDDLLV |
| | | | | | AAPTYRDCKEGTRRLLQELSKLGYRVSAKKAQLCREEVTYLGYLLKGGKR |
| | | | | | WLTPARKATVMKIPTPTTPRQVREFLGTAGFCRLWIPGFASLAAPLYPLT |
| | | | | | REKVPFTWTEAHQEAFGRIKEALLSAPALALPDLTKPFALYVDEKEGVAR |
| | | | | | GVLTQTLGPWRRPVAYLSKKLDPVASGWPTCLKAIAAVALLLKDADKLTL |
| | | | | | GQNVLVIAPHNLESIVRQPPDRWMTNARMTHYQSLLLNERVSFAPPAILN |
| | | | | | PATLLPVESDDTPIHICSEILAEETGTRPDLRDQPLPGVPAWYTDGSSFI |
| | | | | | MDGRRQAGAAIVDNKRTVWASNLPEGTSAQKAELIALTQALRLAEGKSIN |
| | | | | | IYTDSRYAFATAHVHGAIYKQRGLLTSAGKDIKNKEEILALLEAIHLPKR |
| | | | | | VAIIHCPGHQRGTDPVATGNRKADEAAKQAAQSTRILTETTKN |
| KORV_ | KORV | Q9TTC1 | derivative | 3187 | LLGRDLLTKLKAQIQFSTEGPQVTWEDRPAMCLVLNLEEEYRLHEKPVPP |
| Q9TTC1- | | | | | SIDPSWLQLFPMVWAEKAGMGLANQVPPVVVELKSDASPVAVRQYPMSKE |
| Pro | | | | | AREGIRPHIQRFLDLGILVPCQSPWNTPLLPVKKPGTNDYRPVQDLREVN |
| | | | | | KRVQDIHPTVPNPYNLLSSLPPSHTWYSVLDLKDAFFCLKLHPNSQPLFA |
| | | | | | FEWRDPEKGNTGQLTWTRLPQGFKNSPTLFDEALHRDLASFRALNPQVVM |
| | | | | | LQYVDDLLVAAPTYRDCKEGTRRLLQELSKLGYRVSAKKAQLCREEVTYL |
| | | | | | GYLLKGGKRWLTPARKATVMKIPTPTTPRQVREFLGTAGFCRLWIPGFAS |
| | | | | | LAAPLYPLTREKVPFTWTEAHQEAFGRIKEALLSAPALALPDLTKPFALY |
| | | | | | VDEKEGVARGVLTQTLGPWRRPVAYLSKKLDPVASGWPTCLKAIAAVALL |
| | | | | | LKDADKLTLGQNVLVIAPHNLESIVRQPPD |
| | | | | | RWMTNARMTHYQSLLLNERVSFAPPAILNPATLLPVESDDTPIHICSEIL |
| | | | | | AEETGTRPDLRDQPLPGVPAWYTDGSSFIMDGRRQAGAAIVDNKRTVWAS |
| | | | | | NLPEGTSAQKAELIALTQALRLAEGKSINIYTDSRYAFATAHVHGAIYKQ |
| | | | | | RGLLTSAGKDIKNKEEILALLEAIHLPKRVAIIHCPGHQRGTDPVATGNR |
| | | | | | KADEAAKQAAQSTRILTETTKN |
| KORV_ | KORV | Q9TTC1 | derivative | 3188 | LLGRDLLTKLKAQIQFSTEGPQVTWEDRPAMCLVLNLEEEYRLHEKPVPP |
| | | | | | SIDPSWLQLFPMVWAEKAGMGLANQVPPVVVELKSDASPVAVRQYPMSKE |
| Q9TTC1- | | | | | AREGIRPHIQRFLDLGILVPCQSPWNTPLLPVKKPGTNDYRPVQDLREVN |
| Pro3_mut | | | | | KRVQDIHPTVPNPYNLLSSLPPSHTWYSVLDLKDAFFCLKLHPNSQPLFA |
| | | | | | FEWRDPEKGNTGQLTWTRLPQGFKNSPTLFNEALHRDLASFRALNPQVVM |
| | | | | | LQYVDDLLVAAPTYRDCKEGTRRLLQELSKLGYRVSAKKAQLCREEVTYL |
| | | | | | GYLLKGGKRWLTPARKATVMKIPTPTTPRQVREFLGTAGFCRLWIPGFAS |
| | | | | | LAAPLYPLTRPKVPFTWTEAHQEAFGRIKEALLSAPALALPDLTKPFALY |
| | | | | | VDEKEGVARGVLTQTLGPWRRPVAYLSKKLDPVASGWPTCLKAIAAVALL |
| | | | | | LKDADKLTLGQNVLVIAPHNLESIVRQPPDRWMTNARMTHYQSLLLNERV |
| | | | | | SFAPPAILNPATLLPVESDDTPIHICSEILAEETGTRPDLRDQPLPGVPA |
| | | | | | WYTDGSSFIMDGRRQAGAAIVDNKRTVWASNLPEGTSAQKAELIALTQAL |
| | | | | | RLAEGKSINIYTDSRYAFATAHVHGAIYKQRGWLTSAGKDIKNKEEILAL |
| | | | | | LEAIHLPKRVAIIHCPGHQRGTDPVATGNRKADEAAKQAAQSTRILTETT |
| | | | | | KN |
| KORV_ | KORV | Q9TTC1 | derivative | 3189 | LLGRDLLTKLKAQIQFSTEGPQVTWEDRPAMCLVLNLEEEYRLHEKPVPP |
| Q9TTC1- | | | | | SIDPSWLQLFPMVWAEKAGMGLANQVPPVVVELKSDASPVAVRQYPMSKE |
| Pro3_ | | | | | AREGIRPHIQRFLDLGILVPCQSPWNTPLLPVKKPGTNDYRPVQDLREVN |
| mutA | | | | | KRVQDIHPTVPNPYNLLSSLPPSHTWYSVLDLKDAFFCLKLHPNSQPLFA |
| | | | | | FEWRDPEKGNTGQLTWTRLPQGFKNSPTLFNEALHRDLASFRALNPQVVM |
| | | | | | LQYVDDLLVAAPTYRDCKEGTRRLLQELSKLGYRVSAKKAQLCREEVTYL |
| | | | | | GYLLKGGKRWLTPARKATVMKIPTPTTPRQVREFLGKAGFCRLFIPGFAS |
| | | | | | LAAPLYPLTRPKVPFTWTEAHQEAFGRIKEALLSAPALALPDLTKPFALY |
| | | | | | VDEKEGVARGVLTQTLGPWRRPVAYLSKKLDPVASGWPTCLKAIAAVALL |
| | | | | | LKDADKLTLGQNVLVIAPHNLESIVRQPPDRWMTNARMTHYQSLLLNERV |
| | | | | | SFAPPAILNPATLLPVESDDTPIHICSEILAEETGTRPDLRDQPLPGVPA |
| | | | | | WYTDGSSFIMDGRRQAGAAIVDNKRTVWASNLPEGTSAQKAELIALTQAL |
| | | | | | RLAEGKSINIYTDSRYAFATAHVHGAIYKQRGWLTSAGKDIKNKEEILAL |
| | | | | | LEAIHLPKRVAIIHCPGHQRGTDPVATGNRKADEAAKQAAQSTRILTETT |
| | | | | | KN |
| KORV_ | KORV | Q9TTC1 | derivative | 3190 | TLGDQGSRGSDPLPEPRVTLTVEGIPTEFLVNTGAEHSVLTKPMGKMGSK |
| Q9TTC1_ | | | | | RTVVAGATGSKVYPWTTKRLLKIGQKQVTHSFLVIPECPAPLLGRDLLTK |
| 3mut | | | | | LKAQIQFSTEGPQVTWEDRPAMCLVLNLEEEYRLHEKPVPPSIDPSWLQL |
| | | | | | FPMVWAEKAGMGLANQVPPVVVELKSDASPVAVRQYPMSKEAREGIRPHI |
| | | | | | QRFLDLGILVPCQSPWNTPLLPVKKPGTNDYRPVQDLREVNKRVQDIHPT |
| | | | | | VPNPYNLLSSLPPSHTWYSVLDLKDAFFCLKLHPNSQPLFAFEWRDPEKG |
| | | | | | NTGQLTWTRLPQGFKNSPTLFNEALHRDLASFRALNPQVVMLQYVDDLLV |
| | | | | | AAPTYRDCKEGTRRLLQELSKLGYRVSAKKAQLCREEVTYLGYLLKGGKR |
| | | | | | WLTPARKATVMKIPTPTTPRQVREFLGTAGFCRLWIPGFASLAAPLYPLT |
| | | | | | RPKVPFTWTEAHQEAFGRIKEALLSAPALALPDLTKPFALYVDEKEGVAR |
| | | | | | GVLTQTLGPWRRPVAYLSKKLDPVASGWPTCLKAIAAVALLLKDADKLTL |
| | | | | | GQNVLVIAPHNLESIVRQPPDRWMTNARMTHYQSLLLNERVSFAPPAILN |
| | | | | | PATLLPVESDDTPIHICSEILAEETGTRPDLRDQPLPGVPAWYTDGSSFI |
| | | | | | MDGRRQAGAAIVDNKRTVWASNLPEGTSAQKAELIALTQALRLAEGKSIN |
| | | | | | IYTDSRYAFATAHVHGAIYKQRGWLTSAGKDIKNKEEILALLEAIHLPKR |
| | | | | | VAIIHCPGHQRGTDPVATGNRKADEAAKQAAQSTRILTETTKN |
| KORV_ | KORV | Q9TTC1 | derivative | 3191 | TLGDQGSRGSDPLPEPRVTLTVEGIPTEFLVNTGAEHSVLTKPMGKMGSK |
| Q9TTC1_ | | | | | RTVVAGATGSKVYPWTTKRLLKIGQKQVTHSFLVIPECPAPLLGRDLLTK |
| 3_mutA | | | | | LKAQIQFSTEGPQVTWEDRPAMCLVLNLEEEYRLHEKPVPPSIDPSWLQL |
| | | | | | FPMVWAEKAGMGLANQVPPVVVELKSDASPVAVRQYPMSKEAREGIRPHI |
| | | | | | QRFLDLGILVPCQSPWNTPLLPVKKPGTNDYRPVQDLREVNKRVQDIHPT |
| | | | | | VPNPYNLLSSLPPSHTWYSVLDLKDAFFCLKLHPNSQPLFAFEWRDPEKG |
| | | | | | NTGQLTWTRLPQGFKNSPTLFNEALHRDLASFRALNPQVVMLQYVDDLLV |
| | | | | | AAPTYRDCKEGTRRLLQELSKLGYRVSAKKAQLCREEVTYLGYLLKGGKR |
| | | | | | WLTPARKATVMKIPTPTTPRQVREFLGKAGFCRLFIPGFASLAAPLYPLT |
| | | | | | RPKVPFTWTEAHQEAFGRIKEALLSAPALALPDLTKPFALYVDEKEGVAR |
| | | | | | GVLTQTLGPWRRPVAYLSKKLDPVASGWPTCLKAIAAVALLLKDADKLTL |
| | | | | | GQNVLVIAPHNLESIVRQPPDRWMTNARMTHYQSLLLNERVSFAPPAILN |
| | | | | | PATLLPVESDDTPIHICSEILAEETGTRPDLRDQPLPGVPAWYTDGSSFI |
| | | | | | MDGRRQAGAAIVDNKRTVWASNLPEGTSAQKAELIALTQALRLAEGKSIN |
| | | | | | IYTDSRYAFATAHVHGAIYKQRGWLTSAGKDIKNKEEILALLEAIHLPKR |
| | | | | | VAIIHCPGHQRGTDPVATGNRKADEAAKQAAQSTRILTETTKN |
| MLVAV_ | MLVAV | P03356 | root | 3192 | TLNLEDEYRLYETSAEPEVSPGSTWLSDFPQAWAETGGMGLAVRQAPLII |
| P03356 | | | | | PLKATSTPVSIKQYPMSQEAKLGIKPHIQRLLDQGILVPCQSPWNTPLLP |
| | | | | | VKKPGTNDYRPVQDLREVNKRVEDIHPTVPNPYNLLSGLPPSHRWYTVLD |
| | | | | | LKDAFFCLRLHPTSQPLFAFEWRDPGMGISGQLTWTRLPQGFKNSPTLFD |
| | | | | | EALHRDLADFRIQHPDLILLQYVDDILLAATSELDCQQGTRALLLTLGNL |
| | | | | | GYRASAKKAQLCQKQVKYLGYLLKEGQRWLTEARKETVMGQPTPKTPRQL |
| | | | | | REFLGTAGFCRLWIPGFAEMAAPLYPLTKTGTLFNWGPDQQKAYQEIKQA |
| | | | | | LLTAPALGLPDLTKPFELFVDEKQGYAKGVLTQKLGPWRRPVAYLSKKLD |
| | | | | | PVAAGWPPCLRMVAAIAVLRKDAGKLTMGQPLVILAPHAVEALVKQPPDR |
| | | | | | WLSNARMTHYQAMLLDTDRVQFGPVVALNPATLLPLPEEGAPHDCLEILA |
| | | | | | ETHGTRPDLTDQPIPDADHTWYTDGSSFLQEGQRKAGAAVTTETEVIWAR |
| | | | | | ALPAGTSAQRAELIALTQALKMAEGKRLNVYTDSRYAFATAHIHGEIYRR |
| | | | | | RGLLTSEGREIKNKSEILALLKALFLPKRLSIIHCLGHQKGDSAEARGNR |
| | | | | | LADQAAREAAIKTPPDTSTLL |
| MLVAV_ | MLVAV | P03356 | derivative | 3193 | TLNLEDEYRLYETSAEPEVSPGSTWLSDFPQAWAETGGMGLAVRQAPLII |
| P03356_ | | | | | PLKATSTPVSIKQYPMSQEAKLGIKPHIQRLLDQGILVPCQSPWNTPLLP |
| 3mut | | | | | VKKPGTNDYRPVQDLREVNKRVEDIHPTVPNPYNLLSGLPPSHRWYTVLD |
| | | | | | LKDAFFCLRLHPTSQPLFAFEWRDPGMGISGQLTWTRLPQGFKNSPTLFN |
| | | | | | EALHRDLADFRIQHPDLILLQYVDDILLAATSELDCQQGTRALLLTLGNL |
| | | | | | GYRASAKKAQLCQKQVKYLGYLLKEGQRWLTEARKETVMGQPTPKTPRQL |
| | | | | | REFLGTAGFCRLWIPGFAEMAAPLYPLTKPGTLFNWGPDQQKAYQEIKQA |
| | | | | | LLTAPALGLPDLTKPFELFVDEKQGYAKGVLTQKLGPWRRPVAYLSKKLD |
| | | | | | PVAAGWPPCLRMVAAIAVLRKDAGKLTMGQPLVILAPHAVEALVKQPPDR |
| | | | | | WLSNARMTHYQAMLLDTDRVQFGPVVALNPATLLPLPEEGAPHDCLEILA |
| | | | | | ETHGTRPDLTDQPIPDADHTWYTDGSSFLQEGQRKAGAAVTTETEVIWAR |
| | | | | | ALPAGTSAQRAELIALTQALKMAEGKRLNVYTDSRYAFATAHIHGEIYRR |
| | | | | | RGWLTSEGREIKNKSEILALLKALFLPKRLSIIHCLGHQKGDSAEARGNR |
| | | | | | LADQAAREAAIKTPPDTSTLL |
| MLVAV_ | MLVAV | P0335 | derivative | 3194 | TLNLEDEYRLYETSAEPEVSPGSTWLSDFPQAWAETGGMGLAVRQAPLII |
| P03356_ | | | | | PLKATSTPVSIKQYPMSQEAKLGIKPHIQRLLDQGILVPCQSPWNTPLLP |
| 3mutA | | | | | VKKPGTNDYRPVQDLREVNKRVEDIHPTVPNPYNLLSGLPPSHRWYTVLD |
| | | | | | LKDAFFCLRLHPTSQPLFAFEWRDPGMGISGQLTWTRLPQGFKNSPTLFN |
| | | | | | EALHRDLADFRIQHPDLILLQYVDDILLAATSELDCQQGTRALLLTLGNL |
| | | | | | GYRASAKKAQLCQKQVKYLGYLLKEGQRWLTEARKETVMGQPTPKTPRQL |
| | | | | | REFLGKAGFCRLFIPGFAEMAAPLYPLTKPGTLFNWGPDQQKAYQEIKQA |
| | | | | | LLTAPALGLPDLTKPFELFVDEKQGYAKGVLTQKLGPWRRPVAYLSKKLD |
| | | | | | PVAAGWPPCLRMVAAIAVLRKDAGKLTMGQPLVILAPHAVEALVKQPPDR |
| | | | | | WLSNARMTHYQAMLLDTDRVQFGPVVALNPATLLPLPEEGAPHDCLEILA |
| | | | | | ETHGTRPDLTDQPIPDADHTWYTDGSSFLQEGQRKAGAAVTTETEVIWAR |
| | | | | | ALPAGTSAQRAELIALTQALKMAEGKRLNVYTDSRYAFATAHIHGEIYRR |
| | | | | | RGWLTSEGREIKNKSEILALLKALFLPKRLSIIHCLGHQKGDSAEARGNR |
| | | | | | LADQAAREAAIKTPPDTSTLL |
| MLVBM_ | MLVBM | Q7SVK7 | root | 3195 | LGIEDEYRLHETSTEPDVSLGSTWLSDFPQAWAETGGMGLAVRQAPLIIP |
| Q7SVK7_3 | | | | | LKATSTPVSIQQYPMSHEARLGIKPHIQRLLDQGILVPCQSPWNTPLLPV |
| mutA_WS | | | | | KKPGTNDYRPVQDLREVNKRVEDIHPTVPNPYNLLSGLPPSHQWYTVLDL |
| | | | | | KDAFFCLRLHPTSQPLFAFEWRDPGMGISGQLTWTRLPQGFKNSPTLFNE |
| | | | | | ALHRDLADFRIQHPDLILLQYVDDILLAATSELDCQQGTRALLQTLGDLG |
| | | | | | YRASAKKAQICQKQVKYLGYLLREGQRWLTEARKETVMGQPVPKTPRQLR |
| | | | | | EFLGKAGFCRLFIPGFAEMAAPLYPLTKPGTLFSWGPDQQKAYQEIKQAL |
| | | | | | LTAPALGLPDLTKPFELFVDEKQGYAKGVLTQKLGPWRRPVAYLSKKLDP |
| | | | | | VAAGWPPCLRMVAAIAVLTKDAGKLTMGQPLVILAPHAVEALVKQPPDRW |
| | | | | | LSNARMTHYQAMLLDTDRVQFGPVVALNPATLLPLPEEGAPHDCLEILAE |
| | | | | | THGTRPDLTDQPIPDADHTWYTDGSSFLQEGQRKAGAAVTTETEVIWAGA |
| | | | | | LPAGTSAQRAELIALTQALKMAEGKRLNVYTDSRYAFATAHIHGEIYRRR |
| | | | | | GWLTSEGREIKNKSEILALLKALFLPKRLSIIHCLGHQKGDSAEARGNRL |
| | | | | | ADQAAREAAIKTPPDTSTLLI |
| MLVBM_ | MLVBM | Q7SVK7 | derivative | 3196 | TLGIEDEYRLHETSTEPDVSLGSTWLSDFPQAWAETGGMGLAVRQAPLII |
| Q7SVK7 | | | | | PLKATSTPVSIQQYPMSHEARLGIKPHIQRLLDQGILVPCQSPWNTPLLP |
| | | | | | VKKPGTNDYRPVQDLREVNKRVEDIHPTVPNPYNLLSGLPPSHQWYTVLD |
| | | | | | LKDAFFCLRLHPTSQPLFAFEWRDPGMGISGQLTWTRLPQGFKNSPTLFD |
| | | | | | EALHRDLADFRIQHPDLILLQYVDDILLAATSELDCQQGTRALLQTLGDL |
| | | | | | GYRASAKKAQICQKQVKYLGYLLREGQRWLTEARKETVMGQPVPKTPRQL |
| | | | | | REFLGTAGFCRLWIPGFAEMAAPLYPLTKTGTLFSWGPDQQKAYQEIKQA |
| | | | | | LLTAPALGLPDLTKPFELFVDEKQGYAKGVLTQKLGPWRRPVAYLSKKLD |
| | | | | | PVAAGWPPCLRMVAAIAVLTKDAGKLTMGQPLVILAPHAVEALVKQPPDR |
| | | | | | WLSNARMTHYQAMLLDTDRVQFGPVVALNPATLLPLPEEGAPHDCLEILA |
| | | | | | ETHGTRPDLTDQPIPDADHTWYTDGSSFLQEGQRKAGAAVTTETEVIWAG |
| | | | | | ALPAGTSAQRAELIALTQALKMAEGKRLNVYTDSRYAFATAHIHGEIYRR |
| | | | | | RGLLTSEGREIKNKSEILALLKALFLPKRLSIIHCLGHQKGDSAEARGNR |
| | | | | | LADQAAREAAIKTPPDTSTLL |
| MLVBM_ | MLVBM | Q7SVK7 | derivative | 3197 | TLGIEDEYRLHETSTEPDVSLGSTWLSDFPQAWAETGGMGLAVRQAPLII |
| Q7SVK7_ | | | | | PLKATSTPVSIQQYPMSHEARLGIKPHIQRLLDQGILVPCQSPWNTPLLP |
| 3mut | | | | | VKKPGTNDYRPVQDLREVNKRVEDIHPTVPNPYNLLSGLPPSHQWYTVLD |
| | | | | | LKDAFFCLRLHPTSQPLFAFEWRDPGMGISGQLTWTRLPQGFKNSPTLFN |
| | | | | | EALHRDLADFRIQHPDLILLQYVDDILLAATSELDCQQGTRALLQTLGDL |
| | | | | | GYRASAKKAQICQKQVKYLGYLLREGQRWLTEARKETVMGQPVPKTPRQL |
| | | | | | REFLGTAGFCRLWIPGFAEMAAPLYPLTKPGTLFSWGPDQQKAYQEIKQA |
| | | | | | LLTAPALGLPDLTKPFELFVDEKQGYAKGVLTQKLGPWRRPVAYLSKKLD |
| | | | | | PVAAGWPPCLRMVAAIAVLTKDAGKLTMGQPLVILAPHAVEALVKQPPDR |
| | | | | | WLSNARMTHYQAMLLDTDRVQFGPVVALNPATLLPLPEEGAPHDCLEILA |
| | | | | | ETHGTRPDLTDQPIPDADHTWYTDGSSFLQEGQRKAGAAVTTETEVIWAG |
| | | | | | ALPAGTSAQRAELIALTQALKMAEGKRLNVYTDSRYAFATAHIHGEIYRR |
| | | | | | RGWLTSEGREIKNKSEILALLKALFLPKRLSIIHCLGHQKGDSAEARGNR |
| | | | | | LADQAAREAAIKTPPDTSTLL |
| MLVBM_ | MLVBM | Q7SVK7 | root | 3195 | LGIEDEYRLHETSTEPDVSLGSTWLSDFPQAWAETGGMGLAVRQAPLIIP |
| Q7SVK7_3 | | | | | LKATSTPVSIQQYPMSHEARLGIKPHIQRLLDQGILVPCQSPWNTPLLPV |
| mutAWS | | | | | KKPGTNDYRPVQDLREVNKRVEDIHPTVPNPYNLLSGLPPSHQWYTVLDL |
| | | | | | KDAFFCLRLHPTSQPLFAFEWRDPGMGISGQLTWTRLPQGFKNSPTLFNE |
| | | | | | ALHRDLADFRIQHPDLILLQYVDDILLAATSELDCQQGTRALLQTLGDLG |
| | | | | | YRASAKKAQICQKQVKYLGYLLREGQRWLTEARKETVMGQPVPKTPRQLR |
| | | | | | EFLGKAGFCRLFIPGFAEMAAPLYPLTKPGTLFSWGPDQQKAYQEIKQAL |
| | | | | | LTAPALGLPDLTKPFELFVDEKQGYAKGVLTQKLGPWRRPVAYLSKKLDP |
| | | | | | VAAGWPPCLRMVAAIAVLTKDAGKLTMGQPLVILAPHAVEALVKQPPDRW |
| | | | | | LSNARMTHYQAMLLDTDRVQFGPVVALNPATLLPLPEEGAPHDCLEILAE |
| | | | | | THGTRPDLTDQPIPDADHTWYTDGSSFLQEGQRKAGAAVTTETEVIWAGA |
| | | | | | LPAGTSAQRAELIALTQALKMAEGKRLNVYTDSRYAFATAHIHGEIYRRR |
| | | | | | GWLTSEGREIKNKSEILALLKALFLPKRLSIIHCLGHQKGDSAEARGNRL |
| | | | | | ADQAAREAAIKTPPDTSTLLI |
| MLVBM_ | MLVBM | Q7SVK7 | derivative | 3196 | TLGIEDEYRLHETSTEPDVSLGSTWLSDFPQAWAETGGMGLAVRQAPLII |
| Q7SVK7 | | | | | PLKATSTPVSIQQYPMSHEARLGIKPHIQRLLDQGILVPCQSPWNTPLLP |
| | | | | | VKKPGTNDYRPVQDLREVNKRVEDIHPTVPNPYNLLSGLPPSHQWYTVLD |
| | | | | | LKDAFFCLRLHPTSQPLFAFEWRDPGMGISGQLTWTRLPQGFKNSPTLFD |
| | | | | | EALHRDLADFRIQHPDLILLQYVDDILLAATSELDCQQGTRALLQTLGDL |
| | | | | | GYRASAKKAQICQKQVKYLGYLLREGQRWLTEARKETVMGQPVPKTPRQL |
| | | | | | REFLGTAGFCRLWIPGFAEMAAPLYPLTKTGTLFSWGPDQQKAYQEIKQA |
| | | | | | LLTAPALGLPDLTKPFELFVDEKQGYAKGVLTQKLGPWRRPVAYLSKKLD |
| | | | | | PVAAGWPPCLRMVAAIAVLTKDAGKLTMGQPLVILAPHAVEALVKQPPDR |
| | | | | | WLSNARMTHYQAMLLDTDRVQFGPVVALNPATLLPLPEEGAPHDCLEILA |
| | | | | | ETHGTRPDLTDQPIPDADHTWYTDGSSFLQEGQRKAGAAVTTETEVIWAG |
| | | | | | ALPAGTSAQRAELIALTQALKMAEGKRLNVYTDSRYAFATAHIHGEIYRR |
| | | | | | RGLLTSEGREIKNKSEILALLKALFLPKRLSIIHCLGHQKGDSAEARGNR |
| | | | | | LADQAAREAAIKTPPDTSTLL |
| MLVBM_ | MLVBM | Q7SVK7 | derivative | 3197 | TLGIEDEYRLHETSTEPDVSLGSTWLSDFPQAWAETGGMGLAVRQAPLII |
| Q7SVK7_ | | | | | PLKATSTPVSIQQYPMSHEARLGIKPHIQRLLDQGILVPCQSPWNTPLLP |
| 3mut | | | | | VKKPGTNDYRPVQDLREVNKRVEDIHPTVPNPYNLLSGLPPSHQWYTVLD |
| | | | | | LKDAFFCLRLHPTSQPLFAFEWRDPGMGISGQLTWTRLPQGFKNSPTLFN |
| | | | | | EALHRDLADFRIQHPDLILLQYVDDILLAATSELDCQQGTRALLQTLGDL |
| | | | | | GYRASAKKAQICQKQVKYLGYLLREGQRWLTEARKETVMGQPVPKTPRQL |
| | | | | | REFLGTAGFCRLWIPGFAEMAAPLYPLTKPGTLFSWGPDQQKAYQEIKQA |
| | | | | | LLTAPALGLPDLTKPFELFVDEKQGYAKGVLTQKLGPATLLPLPEEGAPH |
| | | | | | DCLEILAETHGTRPDLTDQPIPDADHTWYTDGSSFLQEGQRKAGAAVTTE |
| | | | | | TEVIWAGALPAGTSAQRAELIALTQALKMAEGKRLNVYTDSRYAFATAHI |
| | | | | | HGEIYRRRGWLTSEGREIKNKSEILALLKALFLPKRLSIIHCLGHQKGDS |
| | | | | | AEARGNRLADQAAREAAIKTPPDTSTLL |
| MLVCB_ | MLVCB | P08361 | root | 3198 | TLNIEDEYRLHETSKEPDVSLGSTWLSDFPQAWAETGGMGLAVRQAPLII |
| P08361 | | | | | PLKATSTPVSIKQYPMSQEARLGIKPHIQRLLDQGILVPCQSPWNTPLLP |
| | | | | | VKKPGTNDYRPVQDLREVNKRVEDIHPTVPNPYNLLSGLPPSHQWYTVLD |
| | | | | | LKDAFFCLRLHPTSQPLFAFEWRDPEMGISGQLTWTRLPQGFKNSPTLFD |
| | | | | | EALHRDLAGFRIQHPDLILLQYVDDLLLAATSELDCQQGTRALLQTLGDL |
| | | | | | GYRASAKKAQICQKQVKYLGYLLKEGQRWLTEARKETVMGQPIPKTPRQL |
| | | | | | REFLGTAGFCRLWIPGFAEMAAPLYPLTKTGTLFNWGPDQQKAFQEIKQA |
| | | | | | LLTAPALGLPDLTKPFELFVDEKQGYAKGVLTQKLGPWRRPVAYLSKKLD |
| | | | | | PVAAGWPPCLRMVAAIAVLTKDAGKLTMGQPLVILAPHAVEALVKQPPDR |
| | | | | | WLSNARMTHYQALLLDTDRVQFGPVVALNPATLLPLPEEGLQHDCLDILA |
| | | | | | EAHGTRSDLMDQPLPDADHTWYTDGSSFLQEGQRKAGAAVTTETEVIWAR |
| | | | | | ALPAGTSAQRAELIALTQALKMAEGKKLNVYTDSRYAFATAHIHGEIYRR |
| | | | | | RGLLTSEGKEIKNKDEILALLKALFLPKRLSIIHCPGHQKGNSAEARGNR |
| | | | | | MADQAAREVATRETPETSTLL |
| MLVCB_ | MLVCB | P08361 | derivative | 3199 | TLNIEDEYRLHETSKEPDVSLGSTWLSDFPQAWAETGGMGLAVRQAPLII |
| P08361_3 | | | | | PLKATSTPVSIKQYPMSQEARLGIKPHIQRLLDQGILVPCQSPWNTPLLP |
| mut | | | | | VKKPGTNDYRPVQDLREVNKRVEDIHPTVPNPYNLLSGLPPSHQWYTVLD |
| | | | | | LKDAFFCLRLHPTSQPLFAFEWRDPEMGISGQLTWTRLPQGFKNSPTLFN |
| | | | | | EALHRDLAGFRIQHPDLILLQYVDDLLLAATSELDCQQGTRALLQTLGDL |
| | | | | | GYRASAKKAQICQKQVKYLGYLLKEGQRWLTEARKETVMGQPIPKTPRQL |
| | | | | | REFLGTAGFCRLWIPGFAEMAAPLYPLTKPGTLFNWGPDQQKAFQEIKQA |
| | | | | | LLTAPALGLPDLTKPFELFVDEKQGYAKGVLTQKLGPWRRPVAYLSKKLD |
| | | | | | PVAAGWPPCLRMVAAIAVLTKDAGKLTMGQPLVILAPHAVEALVKQPPDR |
| | | | | | WLSNARMTHYQALLLDTDRVQFGPVVALNPATLLPLPEEGLQHDCLDILA |
| | | | | | EAHGTRSDLMDQPLPDADHTWYTDGSSFLQEGQRKAGAAVTTETEVIWAR |
| | | | | | ALPAGTSAQRAELIALTQALKMAEGKKLNVYTDSRYAFATAHIHGEIYRR |
| | | | | | RGWLTSEGKEIKNKDEILALLKALFLPKRLSIIHCPGHQKGNSAEARGNR |
| | | | | | MADQAAREVATRETPETSTLL |
| MLVCB_ | MLVCB | P08361 | derivative | 3200 | TLNIEDEYRLHETSKEPDVSLGSTWLSDFPQAWAETGGMGLAVRQAPLII |
| P08361_3 | | | | | PLKATSTPVSIKQYPMSQEARLGIKPHIQRLLDQGILVPCQSPWNTPLLP |
| mutA | | | | | VKKPGTNDYRPVQDLREVNKRVEDIHPTVPNPYNLLSGLPPSHQWYTVLD |
| | | | | | LKDAFFCLRLHPTSQPLFAFEWRDPEMGISGQLTWTRLPQGFKNSPTLFN |
| | | | | | EALHRDLAGFRIQHPDLILLQYVDDLLLAATSELDCQQGTRALLQTLGDL |
| | | | | | GYRASAKKAQICQKQVKYLGYLLKEGQRWLTEARKETVMGQPIPKTPRQL |
| | | | | | REFLGKAGFCRLFIPGFAEMAAPLYPLTKPGTLFNWGPDQQKAFQEIKQA |
| | | | | | LLTAPALGLPDLTKPFELFVDEKQGYAKGVLTQKLGPWRRPVAYLSKKLD |
| | | | | | PVAAGWPPCLRMVAAIAVLTKDAGKLTMGQPLVILAPHAVEALVKQPPDR |
| | | | | | WLSNARMTHYQALLLDTDRVQFGPVVALNPATLLPLPEEGLQHDCLDILA |
| | | | | | EAHGTRSDLMDQPLPDADHTWYTDGSSFLQEGQRKAGAAVTTETEVIWAR |
| | | | | | ALPAGTSAQRAELIALTQALKMAEGKKLNVYTDSRYAFATAHIHGEIYRR |
| | | | | | RGWLTSEGKEIKNKDEILALLKALFLPKRLSIIHCPGHQKGNSAEARGNR |
| | | | | | MADQAAREVATRETPETSTLL |
| MLVF5_ | MLVF5 | P26810 | root | 3201 | TLNIEDEYRLHETSKGPDVPLGSTWLSDFPQAWAETGGMGLAFRQAPLII |
| P26810 | | | | | SLKATSTPVSIKQYPMSQEARLGIKPHIQRLLDQGILVPCQSPWNTPLLP |
| | | | | | VKKPGTNDYRPVQDLREVNKRVEDIHPTVPNPYNLLSGLPPSHQWYTVLD |
| | | | | | LKDAFFCLRLHPTSQSLFAFEWKDPEMGISGQLTWTRLPQGFKNSPTLFD |
| | | | | | EALHRDLADFRIQHPDLILLQYVDDLLLAATSELDCQQGTRALLQTLGDL |
| | | | | | GYRASAKKAQICQKQVKYLGYLLKEGQRWLTEARKETVMGQPTPKTPRQL |
| | | | | | REFLGTAGLCRLWIPGFAEMAAPLYPLTKTGTLFKWGPDQQKAYQEIKQA |
| | | | | | LLTAPALGLPDLTKPFELFVDEKQGYAKGVLTQKLGPWRRPVAYLSKKLD |
| | | | | | PVAAGWPPCLRMVAAIAVLTKDVGKLTMGQPLVILAPHAVEALVKQPPDR |
| | | | | | WLSNARMTHYQALLLDTDRVQFGPIVALNPATLLPLPEEGLQHDCLDILA |
| | | | | | EAHGTRPDLTDQPLPDADHTWYTDGSSFLQEGQRRAGAAVTTETEVIWAK |
| | | | | | ALPAGTSAQRAELIALTQALKMAAGKKLNVYTDSRYAFATAHIHGEIYRR |
| | | | | | RGLLTSEGKEIKNKDEILALLKALFLPKRLSIIHCPGHQKGNHAEARGNR |
| | | | | | MADQAAREVATRETPETSTLL |
| MLVF5_ | MLVF5 | P26810 | derivative | 3202 | TLNIEDEYRLHETSKGPDVPLGSTWLSDFPQAWAETGGMGLAFRQAPLII |
| P26810_ | | | | | SLKATSTPVSIKQYPMSQEARLGIKPHIQRLLDQGILVPCQSPWNTPLLP |
| 3mut | | | | | VKKPGTNDYRPVQDLREVNKRVEDIHPTVPNPYNLLSGLPPSHQWYTVLD |
| | | | | | LKDAFFCLRLHPTSQSLFAFEWKDPEMGISGQLTWTRLPQGFKNSPTLFN |
| | | | | | EALHRDLADFRIQHPDLILLQYVDDLLLAATSELDCQQGTRALLQTLGDL |
| | | | | | GYRASAKKAQICQKQVKYLGYLLKEGQRWLTEARKETVMGQPTPKTPRQL |
| | | | | | REFLGTAGLCRLWIPGFAEMAAPLYPLTKPGTLFKWGPDQQKAYQEIKQA |
| | | | | | LLTAPALGLPDLTKPFELFVDEKQGYAKGVLTQKLGPWRRPVAYLSKKLD |
| | | | | | PVAAGWPPCLRMVAAIAVLTKDVGKLTMGQPLVILAPHAVEALVKQPPDR |
| | | | | | WLSNARMTHYQALLLDTDRVQFGPIVALNPATLLPLPEEGLQHDCLDILA |
| | | | | | EAHGTRPDLTDQPLPDADHTWYTDGSSFLQEGQRRAGAAVTTETEVIWAK |
| | | | | | ALPAGTSAQRAELIALTQALKMAAGKKLNVYTDSRYAFATAHIHGEIYRR |
| | | | | | RGWLTSEGKEIKNKDEILALLKALFLPKRLSIIHCPGHQKGNHAEARGNR |
| | | | | | MADQAAREVATRETPETSTLL |
| MLVF5_ | MLVF5 | P26810 | derivative | 3203 | TLNIEDEYRLHETSKGPDVPLGSTWLSDFPQAWAETGGMGLAFRQAPLII |
| P26810_3 | | | | | SLKATSTPVSIKQYPMSQEARLGIKPHIQRLLDQGILVPCQSPWNTPLLP |
| mutA | | | | | VKKPGTNDYRPVQDLREVNKRVEDIHPTVPNPYNLLSGLPPSHQWYTVLD |
| | | | | | LKDAFFCLRLHPTSQSLFAFEWKDPEMGISGQLTWTRLPQGFKNSPTLFN |
| | | | | | EALHRDLADFRIQHPDLILLQYVDDLLLAATSELDCQQGTRALLQTLGDL |
| | | | | | GYRASAKKAQICQKQVKYLGYLLKEGQRWLTEARKETVMGQPTPKTPRQL |
| | | | | | REFLGKAGLCRLFIPGFAEMAAPLYPLTKPGTLFKWGPDQQKAYQEIKQA |
| | | | | | LLTAPALGLPDLTKPFELFVDEKQGYAKGVLTQKLGPWRRPVAYLSKKLD |
| | | | | | PVAAGWPPCLRMVAAIAVLTKDVGKLTMGQPLVILAPHAVEALVKQPPDR |
| | | | | | WLSNARMTHYQALLLDTDRVQFGPIVALNPATLLPLPEEGLQHDCLDILA |
| | | | | | EAHGTRPDLTDQPLPDADHTWYTDGSSFLQEGQRRAGAAVTTETEVIWAK |
| | | | | | ALPAGTSAQRAELIALTQALKMAAGKKLNVYTDSRYAFATAHIHGEIYRR |
| | | | | | RGWLTSEGKEIKNKDEILALLKALFLPKRLSIIHCPGHQKGNHAEARGNR |
| | | | | | MADQAAREVATRETPETSTLL |
| MLVFF_ | MLVFF | P26809 | root | 3204 | TLNIEDEYRLHETSKGPDVPLGSTWLSDFPQAWAETGGMGLAVRQAPLII |
| P26809 | | | | | PLKATSTPVSIKQYPMSQEARLGIKPHIQRLLDQGILVPCQSPWNTPLLP |
| | | | | | VKKPGTNDYRPVQDLREVNKRVEDIHPTVPNPYNLLSGLPPSHQWYTVLD |
| | | | | | LKDAFFCLRLHPTSQSLFAFEWRDPEMGISGQLTWTRLPQGFKNSPTLFD |
| | | | | | EALHRDLADFRIQHPDLILLQYVDDLLLAATSELDCQQGTRALLQTLGDL |
| | | | | | GYRASAKKAQICQKQVKYLGYLLKEGQRWLTEARKETVMGQPTPKTPRQL |
| | | | | | REFLGTAGFCRLWIPGFAEMAAPLYPLTKTGTLFEWGPDQQKAYQEIKQA |
| | | | | | LLTAPALGLPDLTKPFELFVDEKQGYAKGVLTQKLGPWRRPVAYLSKKLD |
| | | | | | PVAAGWPPCLRMVAAIAVLTKDAGKLTMGQPLVILAPHAVEALVKQPPDR |
| | | | | | WLSNARMTHYQALLLDTDRVQFGPIVALNPATLLPLPEEGLQHDCLDILA |
| | | | | | EAHGTRPDLTDQPLPDADHTWYTDGSSFLQEGQRKAGAAVTTETEVVWAK |
| | | | | | ALPAGTSAQRAELIALTQALKMAEGKKLNVYTDSRYAFATAHIHGEIYRR |
| | | | | | RGLLTSEGKEIKNKDEILALLKALFLPKRLSIIHCPGHQKGNRAEARGNR |
| | | | | | MADQAAREVATRETPETSTLL |
| MLVFF_ | MLVFF | P26809 | derivative | 3205 | TLNIEDEYRLHETSKGPDVPLGSTWLSDFPQAWAETGGMGLAVRQAPLII |
| P26809_ | | | | | PLKATSTPVSIKQYPMSQEARLGIKPHIQRLLDQGILVPCQSPWNTPLLP |
| 3mut | | | | | VKKPGTNDYRPVQDLREVNKRVEDIHPTVPNPYNLLSGLPPSHQWYTVLD |
| | | | | | LKDAFFCLRLHPTSQSLFAFEWRDPEMGISGQLTWTRLPQGFKNSPTLFN |
| | | | | | EALHRDLADFRIQHPDLILLQYVDDLLLAATSELDCQQGTRALLQTLGDL |
| | | | | | GYRASAKKAQICQKQVKYLGYLLKEGQRWLTEARKETVMGQPTPKTPRQL |
| | | | | | REFLGTAGFCRLWIPGFAEMAAPLYPLTKPGTLFEWGPDQQKAYQEIKQA |
| | | | | | LLTAPALGLPDLTKPFELFVDEKQGYAKGVLTQKLGPWRRPVAYLSKKLD |
| | | | | | PVAAGWPPCLRMVAAIAVLTKDAGKLTMGQPLVILAPHAVEALVKQPPDR |
| | | | | | WLSNARMTHYQALLLDTDRVQFGPIVALNPATLLPLPEEGLQHDCLDILA |
| | | | | | EAHGTRPDLTDQPLPDADHTWYTDGSSFLQEGQRKAGAAVTTETEVVWAK |
| | | | | | ALPAGTSAQRAELIALTQALKMAEGKKLNVYTDSRYAFATAHIHGEIYRR |
| | | | | | RGWLTSEGKEIKNKDEILALLKALFLPKRLSIIHCPGHQKGNRAEARGNR |
| | | | | | MADQAAREVATRETPETSTLL |
| MLVFF_ | MLVEF | P26809 | derivative | 3206 | TLNIEDEYRLHETSKGPDVPLGSTWLSDFPQAWAETGGMGLAVRQAPLII |
| P26809_ | | | | | PLKATSTPVSIKQYPMSQEARLGIKPHIQRLLDQGILVPCQSPWNTPLLP |
| 3mutA | | | | | VKKPGTNDYRPVQDLREVNKRVEDIHPTVPNPYNLLSGLPPSHQWYTVLD |
| | | | | | LKDAFFCLRLHPTSQSLFAFEWRDPEMGISGQLTWTRLPQGFKNSPTLFN |
| | | | | | EALHRDLADFRIQHPDLILLQYVDDLLLAATSELDCQQGTRALLQTLGDL |
| | | | | | GYRASAKKAQICQKQVKYLGYLLKEGQRWLTEARKETVMGQPTPKTPRQL |
| | | | | | REFLGKAGFCRLFIPGFAEMAAPLYPLTKPGTLFEWGPDQQKAYQEIKQA |
| | | | | | LLTAPALGLPDLTKPFELFVDEKQGYAKGVLTQKLGPWRRPVAYLSKKLD |
| | | | | | PVAAGWPPCLRMVAAIAVLTKDAGKLTMGQPLVILAPHAVEALVKQPPDR |
| | | | | | WLSNARMTHYQALLLDTDRVQFGPIVALNPATLLPLPEEGLQHDCLDILA |
| | | | | | EAHGTRPDLTDQPLPDADHTWYTDGSSFLQEGQRKAGAAVTTETEVVWAK |
| | | | | | ALPAGTSAQRAELIALTQALKMAEGKKLNVYTDSRYAFATAHIHGEIYRR |
| | | | | | RGWLTSEGKEIKNKDEILALLKALFLPKRLSIIHCPGHQKGNRAEARGNR |
| | | | | | MADQAAREVATRETPETSTLL |
| MLVMS_ | MLVMS | P03355 | root | 3207 | TLNIEDEYRLHETSKEPDVSLGSTWLSDFPQAWAETGGMGLAVRQAPLII |
| P03355_ | | | | | PLKATSTPVSIKQYPMSQEARLGIKPHIQRLLDQGILVPCQSPWNTPLLP |
| PLV919 | | | | | VKKPGTNDYRPVQDLREVNKRVEDIHPTVPNPYNLLSGLPPSHQWYTVLD |
| | | | | | LKDAFFCLRLHPTSQPLFAFEWRDPEMGISGQLTWTRLPQGFKNSPTLFN |
| | | | | | EALHRDLADFRIQHPDLILLQYVDDLLLAATSELDCQQGTRALLQTLGNL |
| | | | | | GYRASAKKAQICQKQVKYLGYLLKEGQRWLTEARKETVMGQPTPKTPRQL |
| | | | | | REFLGKAGFCRLFIPGFAEMAAPLYPLTKPGTLFNWGPDQQKAYQEIKQA |
| | | | | | LLTAPALGLPDLTKPFELFVDEKQGYAKGVLTQKLGPWRRPVAYLSKKLD |
| | | | | | PVAAGWPPCLRMVAAIAVLTKDAGKLTMGQPLVILAPHAVEALVKQPPDR |
| | | | | | WLSNARMTHYQALLLDTDRVQFGPVVALNPATLLPLPEEGLQHNCLDILA |
| | | | | | EAHGTRPDLTDQPLPDADHTWYTDGSSLLQEGQRKAGAAVTTETEVIWAK |
| | | | | | ALPAGTSAQRAELIALTQALKMAEGKKLNVYTDSRYAFATAHIHGEIYRR |
| | | | | | RGWLTSEGKEIKNKDEILALLKALFLPKRLSIIHCPGHQKGHSAEARGNR |
| | | | | | MADQAARKAAITETPDTSTLLIENSSPSGGSKRTADGSEFE |
| MLVMS_ | MLVMS | P03355 | derivative | 1548 | TLNIEDEHRLHETSKEPDVSLGSTWLSDFPQAWAETGGMGLAVRQAPLII |
| P03355 | | | | | PLKATSTPVSIKQYPMSQEARLGIKPHIQRLLDQGILVPCQSPWNTPLLP |
| | | | | | VKKPGTNDYRPVQDLREVNKRVEDIHPTVPNPYNLLSGLPPSHQWYTVLD |
| | | | | | LKDAFFCLRLHPTSQPLFAFEWRDPEMGISGQLTWTRLPQGFKNSPTLFD |
| | | | | | EALHRDLADFRIQHPDLILLQYVDDLLLAATSELDCQQGTRALLQTLGNL |
| | | | | | GYRASAKKAQICQKQVKYLGYLLKEGQRWLTEARKETVMGQPTPKTPRQL |
| | | | | | REFLGTAGFCRLWIPGFAEMAAPLYPLTKTGTLFNWGPDQQKAYQEIKQA |
| | | | | | LLTAPALGLPDLTKPFELFVDEKQGYAKGVLTQKLGPWRRPVAYLSKKLD |
| | | | | | PVAAGWPPCLRMVAAIAVLTKDAGKLTMGQPLVILAPHAVEALVKQPPDR |
| | | | | | WLSNARMTHYQALLLDTDRVQFGPVVALNPATLLPLPEEGLQHNCLDILA |
| | | | | | EAHGTRPDLTDQPLPDADHTWYTDGSSLLQEGQRKAGAAVTTETEVIWAK |
| | | | | | ALPAGTSAQRAELIALTQALKMAEGKKLNVYTDSRYAFATAHIHGEIYRR |
| | | | | | RGLLTSEGKEIKNKDEILALLKALFLPKRLSIIHCPGHQKGHSAEARGNR |
| | | | | | MADQAARKAAITETPDTSTLL |
| MLVMS_ | MLVMS | P03355 | derivative | 3208 | TLNIEDEHRLHETSKEPDVSLGSTWLSDFPQAWAETGGMGLAVRQAPLII |
| P03355_3 | | | | | PLKATSTPVSIKQYPMSQEARLGIKPHIQRLLDQGILVPCQSPWNTPLLP |
| mut | | | | | VKKPGTNDYRPVQDLREVNKRVEDIHPTVPNPYNLLSGLPPSHQWYTVLD |
| | | | | | LKDAFFCLRLHPTSQPLFAFEWRDPEMGISGQLTWTRLPQGFKNSPTLFN |
| | | | | | EALHRDLADFRIQHPDLILLQYVDDLLLAATSELDCQQGTRALLQTLGNL |
| | | | | | GYRASAKKAQICQKQVKYLGYLLKEGQRWLTEARKETVMGQPTPKTPRQL |
| | | | | | REFLGTAGFCRLWIPGFAEMAAPLYPLTKPGTLFNWGPDQQKAYQEIKQA |
| | | | | | LLTAPALGLPDLTKPFELFVDEKQGYAKGVLTQKLGPWRRPVAYLSKKLD |
| | | | | | PVAAGWPPCLRMVAAIAVLTKDAGKLTMGQPLVILAPHAVEALVKQPPDR |
| | | | | | WLSNARMTHYQALLLDTDRVQFGPVVALNPATLLPLPEEGLQHNCLDILA |
| | | | | | EAHGTRPDLTDQPLPDADHTWYTDGSSLLQEGQRKAGAAVTTETEVIWAK |
| | | | | | ALPAGTSAQRAELIALTQALKMAEGKKLNVYTDSRYAFATAHIHGEIYRR |
| | | | | | RGWLTSEGKEIKNKDEILALLKALFLPKRLSIIHCPGHQKGHSAEARGNR |
| | | | | | MADQAARKAAITETPDTSTLL |
| MLVMS_ | MLVMS | P03355 | derivative | 3209 | TLNIEDEHRLHETSKEPDVSLGSTWLSDFPQAWAETGGMGLAVRQAPLII |
| P03355_ | | | | | PLKATSTPVSIKQYPMSQEARLGIKPHIQRLLDQGILVPCQSPWNTPLLP |
| 3mutA_ | | | | | VKKPGTNDYRPVQDLREVNKRVEDIHPTVPNPYNLLSGLPPSHQWYTVLD |
| WS | | | | | LKDAFFCLRLHPTSQPLFAFEWRDPEMGISGQLTWTRLPQGFKNSPTLFN |
| | | | | | EALHRDLADFRIQHPDLILLQYVDDLLLAATSELDCQQGTRALLQTLGNL |
| | | | | | GYRASAKKAQICQKQVKYLGYLLKEGQRWLTEARKETVMGQPTPKTPRQL |
| | | | | | REFLGKAGFCRLFIPGFAEMAAPLYPLTKPGTLFNWGPDQQKAYQEIKQA |
| | | | | | LLTAPALGLPDLTKPFELFVDEKQGYAKGVLTQKLGPWRRPVAYLSKKLD |
| | | | | | PVAAGWPPCLRMVAAIAVLTKDAGKLTMGQPLVILAPHAVEALVKQPPDR |
| | | | | | WLSNARMTHYQALLLDTDRVQFGPVVALNPATLLPLPEEGLQHNCLDILA |
| | | | | | EAHGTRPDLTDQPLPDADHTWYTDGSSLLQEGQRKAGAAVTTETEVIWAK |
| | | | | | ALPAGTSAQRAELIALTQALKMAEGKKLNVYTDSRYAFATAHIHGEIYRR |
| | | | | | RGWLTSEGKEIKNKDEILALLKALFLPKRLSIIHCPGHQKGHSAEARGNR |
| | | | | | MADQAARKAAITETPDTSTLL |
| MLVRD_ | MLVRD | P11227 | root | 3210 | TLNIEDEYRLHEISTEPDVSPGSTWLSDFPQAWAETGGMGLAVRQAPLII |
| P11227 | | | | | PLKATSTPVSIKQYPMSQEAKLGIKPHIQRLLDQGILVPCQSPWNTPLL |
| | | | | | PVKKPGTNDYRPVQGLREVNKRVEDIHPTVPNPYNLLSGLPTSHRWYTVL |
| | | | | | DLKDAFFCLRLHPTSQPLFASEWRDPGMGISGQLTWTRLPQGFKNSPTLF |
| | | | | | DEALHRGLADFRIQHPDLILLQYVDDLLLAATSELDCQQGTRALLKTLGN |
| | | | | | LGYRASAKKAQICQKQVKYLGYLLREGQRWLTEARKETVMGQPTPKTPRQ |
| | | | | | LREFLGTAGFCRLWIPRFAEMAAPLYPLTKTGTLFNWGPDQQKAYHEIKQ |
| | | | | | ALLTAPALGLPDLTKPFELFVDEKQGYAKGVLTQKLGPWRRPVAYLSKKL |
| | | | | | DPVAAGWPPCLRMVAAIAVLTKDAGKLTMGQPLVILAPHAVEALVKQPPD |
| | | | | | RWLSNARMTHYQAMLLDTDRVQFGPVVALNPATLLPLPEEGAPHDCLEIL |
| | | | | | AETHGTEPDLTDQPIPDADHTWYTDGSSFLQEGQRKAGAAVTTETEVIWA |
| | | | | | RALPAGTSAQRAELIALTQALKMAEGKRLNVYTDSRYAFATAHIHGEIYK |
| | | | | | RRGLLTSEGREIKNKSEILALLKALFLPKRLSIIHCLGHQKGDSAEARGN |
| | | | | | RLADQAAREAAIKTPPDTSTLL |
| MLVRD_ | MLVRD | P11227 | derivative | 3211 | TLNIEDEYRLHEISTEPDVSPGSTWLSDFPQAWAETGGMGLAVRQAPLII |
| P11227_ | | | | | PLKATSTPVSIKQYPMSQEAKLGIKPHIQRLLDQGILVPCQSPWNTPLLP |
| 3mut | | | | | VKKPGTNDYRPVQGLREVNKRVEDIHPTVPNPYNLLSGLPTSHRWYTVLD |
| | | | | | LKDAFFCLRLHPTSQPLFASEWRDPGMGISGQLTWTRLPQGFKNSPTLFN |
| | | | | | EALHRGLADFRIQHPDLILLQYVDDLLLAATSELDCQQGTRALLKTLGNL |
| | | | | | GYRASAKKAQICQKQVKYLGYLLREGQRWLTEARKETVMGQPTPKTPRQL |
| | | | | | REFLGTAGFCRLWIPRFAEMAAPLYPLTKPGTLFNWGPDQQKAYHEIKQA |
| | | | | | LLTAPALGLPDLTKPFELFVDEKQGYAKGVLTQKLGPWRRPVAYLSKKLD |
| | | | | | PVAAGWPPCLRMVAAIAVLTKDAGKLTMGQPLVILAPHAVEALVKQPPDR |
| | | | | | WLSNARMTHYQAMLLDTDRVQFGPVVALNPATLLPLPEEGAPHDCLEILA |
| | | | | | ETHGTEPDLTDQPIPDADHTWYTDGSSFLQEGQRKAGAAVTTETEVIWAR |
| | | | | | ALPAGTSAQRAELIALTQALKMAEGKRLNVYTDSRYAFATAHIHGEIYKR |
| | | | | | RGWLTSEGREIKNKSEILALLKALFLPKRLSIIHCLGHQKGDSAEARGNR |
| | | | | | LADQAAREAAIKTPPDTSTLL |
| MLVRD_ | MLVRD | P11227 | derivative | 3212 | TLNIEDEYRLHEISTEPDVSPGSTWLSDFPQAWAETGGMGLAVRQAPLII |
| P11227_ | | | | | PLKATSTPVSIKQYPMSQEAKLGIKPHIQRLLDQGILVPCQSPWNTPLLP |
| 3mutA | | | | | VKKPGTNDYRPVQGLREVNKRVEDIHPTVPNPYNLLSGLPTSHRWYTVLD |
| | | | | | LKDAFFCLRLHPTSQPLFASEWRDPGMGISGQLTWTRLPQGFKNSPTLFN |
| | | | | | EALHRGLADFRIQHPDLILLQYVDDLLLAATSELDCQQGTRALLKTLGNL |
| | | | | | GYRASAKKAQICQKQVKYLGYLLREGQRWLTEARKETVMGQPTPKTPRQL |
| | | | | | REFLGKAGFCRLFIPRFAEMAAPLYPLTKPGTLFNWGPDQQKAYHEIKQA |
| | | | | | LLTAPALGLPDLTKPFELFVDEKQGYAKGVLTQKLGPWRRPVAYLSKKLD |
| | | | | | PVAAGWPPCLRMVAAIAVLTKDAGKLTMGQPLVILAPHAVEALVKQPPDR |
| | | | | | WLSNARMTHYQAMLLDTDRVQFGPVVALNPATLLPLPEEGAPHDCLEILA |
| | | | | | ETHGTEPDLTDQPIPDADHTWYTDGSSFLQEGQRKAGAAVTTETEVIWAR |
| | | | | | ALPAGTSAQRAELIALTQALKMAEGKRLNVYTDSRYAFATAHIHGEIYKR |
| | | | | | RGWLTSEGREIKNKSEILALLKALFLPKRLSIIHCLGHQKGDSAEARGNR |
| | | | | | LADQAAREAAIKTPPDTSTLL |
| MMTVB_ | MMTVB | P03365 | root | 3213 | VQEISDSRPMLHIYLNGRRFLGLLDTGADKTCIAGRDWPANWPIHQTESS |
| P03365_WS | | | | | LQGLGMACGVARSSQPLRWQHEDKSGIIHPFVIPTLPFTLWGRDIMKDIK |
| | | | | | VRLMTDSPDDSQDLMIGAIESNLFADQISWKSDQPVWLNQWPLKQEKLQA |
| | | | | | LQQLVTEQLQLGHLEESNSPWNTPVFVIKKKSGKWRLLQDLRAVNATMHD |
| | | | | | MGALQPGLPSPVAVPKGWEIIIIDLQDCFFNIKLHPEDCKRFAFSVPSPN |
| | | | | | FKRPYQRFQWKVLPQGMKNSPTLCQKFVDKAILTVRDKYQDSYIVHYMDD |
| | | | | | ILLAHPSRSIVDEILTSMIQALNKHGLVVSTEKIQKYDNLKYLGTHIQGD |
| | | | | | SVSYQKLQIRTDKLRTLNDFQKLLGNINWIRPFLKLTTGELKPLFEILNG |
| | | | | | DSNPISTRKLTPEACKALQLMNERLSTARVKRLDLSQPWSLCILKTEYTP |
| | | | | | TACLWQDGVVEWIHLPHISPKVITPYDIFCTQLIIKGRHRSKELFSKDPD |
| | | | | | YIVVPYTKVQFDLLLQEKEDWPISLLGFLGEVHFHLPKDPLLTFTLQTAI |
| | | | | | IFPHMTSTTPLEKGIVIFTDGSANGRSVTYIQGREPIIKENTQNTAQQAE |
| | | | | | IVAVITAFEEVSQPFNLYTDSKYVTGLFPEIETATLSPRTKIYTELKHLQ |
| | | | | | RLIHKRQEKFYIGHIRGHTGLPGPLAQGNAYADSLTRILTA |
| MMTVB_ | MMTVB | P03365 | derivative | 3214 | WVQEISDSRPMLHIYLNGRRFLGLLNTGADKTCIAGRDWPANWPIHQTES |
| P03365 | | | | | SLQGLGMACGVARSSQPLRWQHEDKSGIIHPFVIPTLPFTLWGRDIMKDI |
| | | | | | KVRLMTDSPDDSQDLMIGAIESNLFADQISWKSDQPVWLNQWPLKQEKLQ |
| | | | | | ALQQLVTEQLQLGHLEESNSPWNTPVFVIKKKSGKWRLLQDLRAVNATMH |
| | | | | | DMGALQPGLPSPVAVPKGWEIIIIDLQDCFFNIKLHPEDCKRFAFSVPSP |
| | | | | | NFKRPYQRFQWKVLPQGMKNSPTLCQKFVDKAILTVRDKYQDSYIVHYMD |
| | | | | | DILLAHPSRSIVDEILTSMIQALNKHGLVVSTEKIQKYDNLKYLGTHIQG |
| | | | | | DSVSYQKLQIRTDKLRTLNDFQKLLGNINWIRPFLKLTTGELKPLFEILN |
| | | | | | GDSNPISTRKLTPEACKALQLMNERLSTARVKRLDLSQPWSLCILKTEYT |
| | | | | | PTACLWQDGVVEWIHLPHISPKVITPYDIFCTQLIIKGRHRSKELFSKDP |
| | | | | | DYIVVPYTKVQFDLLLQEKEDWPISLLGFLGEVHFHLPKDPLLTFTLQTA |
| | | | | | IIFPHMTSTTPLEKGIVIFTDGSANGRSVTYIQGREPIIKENTQNTAQQA |
| | | | | | EIVAVITAFEEVSQPFNLYTDSKYVTGLFPEIETATLSPRTKIYTELKHL |
| | | | | | QRLIHKRQEKFYIGHIRGHTGLPGPLAQGNAYADSLTRILT |
| MMTVB_ | MMTVB | P03365 | derivative | 3215 | GRDIMKDIKVRLMTDSPDDSQDLMIGAIESNLFADQISWKSDQPVWLNQW |
| P03365- | | | | | PLKQEKLQALQQLVTEQLQLGHLEESNSPWNTPVFVIKKKSGKWRLLQDL |
| Pro | | | | | RAVNATMHDMGALQPGLPSPVAVPKGWEIIIIDLQDCFFNIKLHPEDCKR |
| | | | | | FAFSVPSPNFKRPYQRFQWKVLPQGMKNSPTLCQKFVDKAILTVRDKYQD |
| | | | | | SYIVHYMDDILLAHPSRSIVDEILTSMIQALNKHGLVVSTEKIQKYDNLK |
| | | | | | YLGTHIQGDSVSYQKLQIRTDKLRTLNDFQKLLGNINWIRPFLKLTTGEL |
| | | | | | KPLFEILNGDSNPISTRKLTPEACKALQLMNERLSTARVKRLDLSQPWSL |
| | | | | | CILKTEYTPTACLWQDGVVEWIHLPHISPKVITPYDIFCTQLIIKGRHRS |
| | | | | | KELFSKDPDYIVVPYTKVQFDLLLQEKEDWPISLLGFLGEVHFHLPKDPL |
| | | | | | LTFTLQTAIIFPHMTSTTPLEKGIVIFTDGSANGRSVTYIQGREPIIKEN |
| | | | | | TQNTAQQAEIVAVITAFEEVSQPFNLYTDSKYVTGLFPEIETATLSPRTK |
| | | | | | IYTELKHLQRLIHKRQEKFYIGHIRGHTGLPGPLAQGNAYADSLTRILT |
| MMTVB_ | MMTVB | P03365 | derivative | 3216 | GRDIMKDIKVRLMTDSPDDSQDLMIGAIESNLFADQISWKSDQPVWLNQW |
| P03365- | | | | | PLKQEKLQALQQLVTEQLQLGHLEESNSPWNTPVFVIKKKSGKWRLLQDL |
| Pro_2mut | | | | | RAVNATMHDMGALQPGLPSPVAVPKGWEIIIIDLQDCFFNIKLHPEDCKR |
| | | | | | FAFSVPSPNFKRPYQRFQWKVLPQGMKNSPTLCQKFVDKAILTVRDKYQD |
| | | | | | SYIVHYMDDILLAHPSRSIVDEILTSMIQALNKHGLVVSTEKIQKYDNLK |
| | | | | | YLGTHIQGDSVSYQKLQIRTDKLRTLNDFQKLLGNINWIRPFLKLTTGEL |
| | | | | | KPLFEILNPDSNPISTRKLTPEACKALQLMNERLSTARVKRLDLSQPWSL |
| | | | | | CILKTEYTPTACLWQDGVVEWIHLPHISPKVITPYDIFCTQLIIKGRHRS |
| | | | | | KELFSKDPDYIVVPYTKVQFDLLLQEKEDWPISLLGFLGEVHFHLPKDPL |
| | | | | | LTFTLQTAIIFPHMTSTTPLEKGIVIFTDGSANGRSVTYIQGREPIIKEN |
| | | | | | TQNTAQQAEIVAVITAFEEVSQPFNLYTDSKYVTGLFPEIETATLSPRTK |
| | | | | | IYTELKHLQRLIHKRQEKFYIGHIRGHTGLPGPLAQGNAYADSLTRILT |
| MMTVB_ | MMTVB | P03365 | derivative | 3217 | GRDIMKDIKVRLMTDSPDDSQDLMIGAIESNLFADQISWKSDQPVWLNQW |
| P03365- | | | | | PLKQEKLQALQQLVTEQLQLGHLEESNSPWNTPVFVIKKKSGKWRLLQDL |
| Pro_ | | | | | RAVNATMHDMGALQPGLPSPVAPPKGWEIIIIDLQDCFFNIKLHPEDCKR |
| 2mutB | | | | | FAFSVPSPNFKRPYQRFQWKVLPQGMKNSPTLCQKFVDKAILTVRDKYQD |
| | | | | | SYIVHYMDDILLAHPSRSIVDEILTSMIQALNKHGLVVSTEKIQKYDNLK |
| | | | | | YLGTHIQGDSVSYQKLQIRTDKLRTLNDFQKLLGNINWIRPFLKLTTGEL |
| | | | | | KPLFEILNPDSNPISTRKLTPEACKALQLMNERLSTARVKRLDLSQPWSL |
| | | | | | CILKTEYTPTACLWQDGVVEWIHLPHISPKVITPYDIFCTQLIIKGRHRS |
| | | | | | KELFSKDPDYIVVPYTKVQFDLLLQEKEDWPISLLGFLGEVHFHLPKDPL |
| | | | | | LTFTLQTAIIFPHMTSTTPLEKGIVIFTDGSANGRSVTYIQGREPIIKEN |
| | | | | | TQNTAQQAEIVAVITAFEEVSQPFNLYTDSKYVTGLFPEIETATLSPRTK |
| | | | | | IYTELKHLQRLIHKRQEKFYIGHIRGHTGLPGPLAQGNAYADSLTRILT |
| MMTVB_ | MMTVB | P03365 | derivative | 3218 | WVQEISDSRPMLHIYLNGRRFLGLLNTGADKTCIAGRDWPANWPIHQTES |
| P03365_ | | | | | SLQGLGMACGVARSSQPLRWQHEDKSGIIHPFVIPTLPFTLWGRDIMKDI |
| | | | | | KVRLMTDSPDDSQDLMIGAIESNLFADQISWKSDQPVWLNQWPLKQEKLQ |
| | | | | | ALQQLVTEQLQLGHLEESNSPWNTPVFVIKKKSGKWRLLQDLRAVNATMH |
| 2mut | | | | | DMGALQPGLPSPVAVPKGWEIIIIDLQDCFFNIKLHPEDCKRFAFSVPSP |
| | | | | | NFKRPYQRFQWKVLPQGMKNSPTLCQKFVDKAILTVRDKYQDSYIVHYMD |
| | | | | | DILLAHPSRSIVDEILTSMIQALNKHGLVVSTEKIQKYDNLKYLGTHIQG |
| | | | | | DSVSYQKLQIRTDKLRTLNDFQKLLGNINWIRPFLKLTTGELKPLFEILN |
| | | | | | PDSNPISTRKLTPEACKALQLMNERLSTARVKRLDLSQPWSLCILKTEYT |
| | | | | | PTACLWQDGVVEWIHLPHISPKVITPYDIFCTQLIIKGRHRSKELFSKDP |
| | | | | | DYIVVPYTKVQFDLLLQEKEDWPISLLGFLGEVHFHLPKDPLLTFTLQTA |
| | | | | | IIFPHMTSTTPLEKGIVIFTDGSANGRSVTYIQGREPIIKENTQNTAQQA |
| | | | | | EIVAVITAFEEVSQPFNLYTDSKYVTGLFPEIETATLSPRTKIYTELKHL |
| | | | | | QRLIHKRQEKFYIGHIRGHTGLPGPLAQGNAYADSLTRILT |
| MMTVB_ | MMTVB | P03365 | derivative | 3219 | WVQEISDSRPMLHIYLNGRRFLGLLNTGADKTCIAGRDWPANWPIHQTES |
| P03365_ | | | | | SLQGLGMACGVARSSQPLRWQHEDKSGIIHPFVIPTLPFTLWGRDIMKDI |
| 2mutB | | | | | KVRLMTDSPDDSQDLMIGAIESNLFADQISWKSDQPVWLNQWPLKQEKLQ |
| | | | | | ALQQLVTEQLQLGHLEESNSPWNTPVFVIKKKSGKWRLLQDLRAVNATMH |
| | | | | | DMGALQPGLPSPVAPPKGWEIIIIDLQDCFFNIKLHPEDCKRFAFSVPSP |
| | | | | | NFKRPYQRFQWKVLPQGMKNSPTLCQKFVDKAILTVRDKYQDSYIVHYMD |
| | | | | | DILLAHPSRSIVDEILTSMIQALNKHGLVVSTEKIQKYDNLKYLGTHIQG |
| | | | | | DSVSYQKLQIRTDKLRTLNDFQKLLGNINWIRPFLKLTTGELKPLFEILN |
| | | | | | PDSNPISTRKLTPEACKALQLMNERLSTARVKRLDLSQPWSLCILKTEYT |
| | | | | | PTACLWQDGVVEWIHLPHISPKVITPYDIFCTQLIIKGRHRSKELFSKDP |
| | | | | | DYIVVPYTKVQFDLLLQEKEDWPISLLGFLGEVHFHLPKDPLLTFTLQTA |
| | | | | | IIFPHMTSTTPLEKGIVIFTDGSANGRSVTYIQGREPIIKENTQNTAQQA |
| | | | | | EIVAVITAFEEVSQPFNLYTDSKYVTGLFPEIETATLSPRTKIYTELKHL |
| | | | | | QRLIHKRQEKFYIGHIRGHTGLPGPLAQGNAYADSLTRILT |
| MMTVB_ | MMTVB | P03365 | derivative | 3220 | VQEISDSRPMLHIYLNGRRFLGLLDTGADKTCIAGRDWPANWPIHQTESS |
| P03365_ | | | | | LQGLGMACGVARSSQPLRWQHEDKSGIIHPFVIPTLPFTLWGRDIMKDIK |
| 2mutB_ | | | | | VRLMTDSPDDSQDLMIGAIESNLFADQISWKSDQPVWLNQWPLKQEKLQA |
| WS | | | | | LQQLVTEQLQLGHLEESNSPWNTPVFVIKKKSGKWRLLQDLRAVNATMHD |
| | | | | | MGALQPGLPSPPAVPKGWEIIIIDLQDCFFNIKLHPEDCKRFAFSVPSPN |
| | | | | | FKRPYQRFQWKVLPQGMKNSPTLCQKFVDKAILTVRDKYQDSYIVHYMDD |
| | | | | | ILLAHPSRSIVDEILTSMIQALNKHGLVVSTEKIQKYDNLKYLGTHIQGD |
| | | | | | SVSYQKLQIRTDKLRTLNDFQKLLGNINWIRPFLKLTTGELKPLFEILNP |
| | | | | | DSNPISTRKLTPEACKALQLMNERLSTARVKRLDLSQPWSLCILKTEYTP |
| | | | | | TACLWQDGVVEWIHLPHISPKVITPYDIFCTQLIIKGRHRSKELFSKDPD |
| | | | | | YIVVPYTKVQFDLLLQEKEDWPISLLGFLGEVHFHLPKDPLLTFTLQTAI |
| | | | | | IFPHMTSTTPLEKGIVIFTDGSANGRSVTYIQGREPIIKENTQNTAQQAE |
| | | | | | IVAVITAFEEVSQPFNLYTDSKYVTGLFPEIETATLSPRTKIYTELKHLQ |
| | | | | | RLIHKRQEKFYIGHIRGHTGLPGPLAQGNAYADSLTRILTA |
| MMTVB_ | MMTVB | P03365 | derivative | 3221 | VQEISDSRPMLHIYLNGRRFLGLLDTGADKTCIAGRDWPANWPIHQTESS |
| P03365_ | | | | | LQGLGMACGVARSSQPLRWQHEDKSGIIHPFVIPTLPFTLWGRDIMKDIK |
| 2mut_ | | | | | VRLMTDSPDDSQDLMIGAIESNLFADQISWKSDQPVWLNQWPLKQEKLQA |
| WS | | | | | LQQLVTEQLQLGHLEESNSPWNTPVFVIKKKSGKWRLLQDLRAVNATMHD |
| | | | | | MGALQPGLPSPVAVPKGWEIIIIDLQDCFFNIKLHPEDCKRFAFSVPSPN |
| | | | | | FKRPYQRFQWKVLPQGMKNSPTLCQKFVDKAILTVRDKYQDSYIVHYMDD |
| | | | | | ILLAHPSRSIVDEILTSMIQALNKHGLVVSTEKIQKYDNLKYLGTHIQGD |
| | | | | | SVSYQKLQIRTDKLRTLNDFQKLLGNINWIRPFLKLTTGELKPLFEILNP |
| | | | | | DSNPISTRKLTPEACKALQLMNERLSTARVKRLDLSQPWSLCILKTEYTP |
| | | | | | TACLWQDGVVEWIHLPHISPKVITPYDIFCTQLIIKGRHRSKELFSKDPD |
| | | | | | YIVVPYTKVQFDLLLQEKEDWPISLLGFLGEVHFHLPKDPLLTFTLQTAI |
| | | | | | IFPHMTSTTPLEKGIVIFTDGSANGRSVTYIQGREP |
| | | | | | IIKENTQNTAQQAEIVAVITAFEEVSQPFNLYTDSKYVTGLFPEIETATL |
| | | | | | SPRTKIYTELKHLQRLIHKRQEKFYIGHIRGHTGLPGPLAQGNAYADSLT |
| | | | | | RILTA |
| MMTVB_ | MMTVB | P03365 | root | 3213 | VQEISDSRPMLHIYLNGRRFLGLLDTGADKTCIAGRDWPANWPIHQTESS |
| P03365_ | | | | | LQGLGMACGVARSSQPLRWQHEDKSGIIHPFVIPTLPFTLWGRDIMKDIK |
| WS | | | | | VRLMTDSPDDSQDLMIGAIESNLFADQISWKSDQPVWLNQWPLKQEKLQA |
| | | | | | LQQLVTEQLQLGHLEESNSPWNTPVFVIKKKSGKWRLLQDLRAVNATMHD |
| | | | | | MGALQPGLPSPVAVPKGWEIIIIDLQDCFFNIKLHPEDCKRFAFSVPSPN |
| | | | | | FKRPYQRFQWKVLPQGMKNSPTLCQKFVDKAILTVRDKYQDSYIVHYMDD |
| | | | | | ILLAHPSRSIVDEILTSMIQALNKHGLVVSTEKIQKYDNLKYLGTHIQGD |
| | | | | | SVSYQKLQIRTDKLRTLNDFQKLLGNINWIRPFLKLTTGELKPLFEILNG |
| | | | | | DSNPISTRKLTPEACKALQLMNERLSTARVKRLDLSQPWSLCILKTEYTP |
| | | | | | TACLWQDGVVEWIHLPHISPKVITPYDIFCTQLIIKGRHRSKELFSKDPD |
| | | | | | YIVVPYTKVQFDLLLQEKEDWPISLLGFLGEVHFHLPKDPLLTFTLQTAI |
| | | | | | IFPHMTSTTPLEKGIVIFTDGSANGRSVTYIQGREPIIKENTQNTAQQAE |
| | | | | | IVAVITAFEEVSQPFNLYTDSKYVTGLFPEIETATLSPRTKIYTELKHLQ |
| | | | | | RLIHKRQEKFYIGHIRGHTGLPGPLAQGNAYADSLTRILTA |
| MMTVB_ | MMTVB | P03365 | derivative | 3214 | WVQEISDSRPMLHIYLNGRRFLGLLNTGADKTCIAGRDWPANWPIHQTES |
| P03365 | | | | | SLQGLGMACGVARSSQPLRWQHEDKSGIIHPFVIPTLPFTLWGRDIMKDI |
| | | | | | KVRLMTDSPDDSQDLMIGAIESNLFADQISWKSDQPVWLNQWPLKQEKLQ |
| | | | | | ALQQLVTEQLQLGHLEESNSPWNTPVFVIKKKSGKWRLLQDLRAVNATMH |
| | | | | | DMGALQPGLPSPVAVPKGWEIIIIDLQDCFFNIKLHPEDCKRFAFSVPSP |
| | | | | | NFKRPYQRFQWKVLPQGMKNSPTLCQKFVDKAILTVRDKYQDSYIVHYMD |
| | | | | | DILLAHPSRSIVDEILTSMIQALNKHGLVVSTEKIQKYDNLKYLGTHIQG |
| | | | | | DSVSYQKLQIRTDKLRTLNDFQKLLGNINWIRPFLKLTTGELKPLFEILN |
| | | | | | GDSNPISTRKLTPEACKALQLMNERLSTARVKRLDLSQPWSLCILKTEYT |
| | | | | | PTACLWQDGVVEWIHLPHISPKVITPYDIFCTQLIIKGRHRSKELFSKDP |
| | | | | | DYIVVPYTKVQFDLLLQEKEDWPISLLGFLGEVHFHLPKDPLLTFTLQTA |
| | | | | | IIFPHMTSTTPLEKGIVIFTDGSANGRSVTYIQGREPIIKENTQNTAQQA |
| | | | | | EIVAVITAFEEVSQPFNLYTDSKYVTGLFPEIETATLSPRTKIYTELKHL |
| | | | | | QRLIHKRQEKFYIGHIRGHTGLPGPLAQGNAYADSLTRILT |
| MMTVB_ | MMTVB | P03365 | derivative | 3215 | GRDIMKDIKVRLMTDSPDDSQDLMIGAIESNLFADQISWKSDQPVWLNQW |
| P03365- | | | | | PLKQEKLQALQQLVTEQLQLGHLEESNSPWNTPVFVIKKKSGKWRLLQDL |
| Pro | | | | | RAVNATMHDMGALQPGLPSPVAVPKGWEIIIIDLQDCFFNIKLHPEDCKR |
| | | | | | FAFSVPSPNFKRPYQRFQWKVLPQGMKNSPTLCQKFVDKAILTVRDKYQD |
| | | | | | SYIVHYMDDILLAHPSRSIVDEILTSMIQALNKHGLVVSTEKIQKYDNLK |
| | | | | | YLGTHIQGDSVSYQKLQIRTDKLRTLNDFQKLLGNINWIRPFLKLTTGEL |
| | | | | | KPLFEILNGDSNPISTRKLTPEACKALQLMNERLSTARVKRLDLSQPWSL |
| | | | | | CILKTEYTPTACLWQDGVVEWIHLPHISPKVITPYDIFCTQLIIKGRHRS |
| | | | | | KELFSKDPDYIVVPYTKVQFDLLLQEKEDWPISLLGFLGEVHFHLPKDPL |
| | | | | | LTFTLQTAIIFPHMTSTTPLEKGIVIFTDGSANGRSVTYIQGREPIIKEN |
| | | | | | TQNTAQQAEIVAVITAFEEVSQPFNLYTDSKYVTGLFPEIETATLSPRTK |
| | | | | | IYTELKHLQRLIHKRQEKFYIGHIRGHTGLPGPLAQGNAYADSLTRILT |
| MMTVB_ | MMTVB | P03365 | derivative | 3216 | GRDIMKDIKVRLMTDSPDDSQDLMIGAIESNLFADQISWKSDQPVWLNQW |
| P03365- | | | | | PLKQEKLQALQQLVTEQLQLGHLEESNSPWNTPVFVIKKKSGKWRLLQDL |
| Pro_ | | | | | RAVNATMHDMGALQPGLPSPVAVPKGWEIIIIDLQDCFFNIKLHPEDCKR |
| 2mut | | | | | FAFSVPSPNFKRPYQRFQWKVLPQGMKNSPTLCQKFVDKAILTVRDKYQD |
| | | | | | SYIVHYMDDILLAHPSRSIVDEILTSMIQALNKHGLVVSTEKIQKYDNLK |
| | | | | | YLGTHIQGDSVSYQKLQIRTDKLRTLNDFQKLLGNINWIRPFLKLTTGEL |
| | | | | | KPLFEILNPDSNPISTRKLTPEACKALQLMNERLSTARVKRLDLSQPWSL |
| | | | | | CILKTEYTPTACLWQDGVVEWIHLPHISPKVITPYDIFCTQLIIKGRHRS |
| | | | | | KELFSKDPDYIVVPYTKVQFDLLLQEKEDWPISLLGFLGEVHFHLPKDPL |
| | | | | | LTFTLQTAIIFPHMTSTTPLEKGIVIFTDGSANGRSVTYIQGREPIIKEN |
| | | | | | TQNTAQQAEIVAVITAFEEVSQPFNLYTDSKYVTGLFPEIETATLSPRTK |
| | | | | | IYTELKHLQRLIHKRQEKFYIGHIRGHTGLPGPLAQGNAYADSLTRILT |
| MMTVB_ | MMTVB | P03365 | derivative | 3217 | GRDIMKDIKVRLMTDSPDDSQDLMIGAIESNLFADQISWKSDQPVWLNQW |
| P03365- | | | | | PLKQEKLQALQQLVTEQLQLGHLEESNSPWNTPVFVIKKKSGKWRLLQDL |
| Pro_ | | | | | RAVNATMHDMGALQPGLPSPVAPPKGWEIIIIDLQDCFFNIKLHPEDCKR |
| 2mutB | | | | | FAFSVPSPNFKRPYQRFQWKVLPQGMKNSPTLCQKFVDKAILTVRDKYQD |
| | | | | | SYIVHYMDDILLAHPSRSIVDEILTSMIQALNKHGLVVSTEKIQKYDNLK |
| | | | | | YLGTHIQGDSVSYQKLQIRTDKLRTLNDFQKLLGNINWIRPFLKLTTGEL |
| | | | | | KPLFEILNPDSNPISTRKLTPEACKALQLMNERLSTARVKRLDLSQPWSL |
| | | | | | CILKTEYTPTACLWQDGVVEWIHLPHISPKVITPYDIFCTQLIIKGRHRS |
| | | | | | KELFSKDPDYIVVPYTKVQFDLLLQEKEDWPISLLGFLGEVHFHLPKDPL |
| | | | | | LTFTLQTAIIFPHMTSTTPLEKGIVIFTDGSANGRSVTYIQGREPIIKEN |
| | | | | | TQNTAQQAEIVAVITAFEEVSQPFNLYTDSKYVTGLFPEIETATLSPRTK |
| | | | | | IYTELKHLQRLIHKRQEKFYIGHIRGHTGLPGPLAQGNAYADSLTRILT |
| MMTVB_ | MMTVB | P03365 | derivative | 3218 | WVQEISDSRPMLHIYLNGRRFLGLLNTGADKTCIAGRDWPANWPIHQTES |
| P03365_ | | | | | SLQGLGMACGVARSSQPLRWQHEDKSGIIHPFVIPTLPFTLWGRDIMKDI |
| 2mut | | | | | KVRLMTDSPDDSQDLMIGAIESNLFADQISWKSDQPVWLNQWPLKQEKLQ |
| | | | | | ALQQLVTEQLQLGHLEESNSPWNTPVFVIKKKSGKWRLLQDLRAVNATMH |
| | | | | | DMGALQPGLPSPVAVPKGWEIIIIDLQDCFFNIKLHPEDCKRFAFSVPSP |
| | | | | | NFKRPYQRFQWKVLPQGMKNSPTLCQKFVDKAILTVRDKYQDSYIVHYMD |
| | | | | | DILLAHPSRSIVDEILTSMIQALNKHGLVVSTEKIQKYDNLKYLGTHIQG |
| | | | | | DSVSYQKLQIRTDKLRTLNDFQKLLGNINWIRPFLKLTTGELKPLFEILN |
| | | | | | PDSNPISTRKLTPEACKALQLMNERLSTARVKRLDLSQPWSLCILKTEYT |
| | | | | | PTACLWQDGVVEWIHLPHISPKVITPYDIFCTQLIIKGRHRSKELFSKDP |
| | | | | | DYIVVPYTKVQFDLLLQEKEDWPISLLGFLGEVHFHLPKDPLLTFTLQTA |
| | | | | | IIFPHMTSTTPLEKGIVIFTDGSANGRSVTYIQGREPIIKENTQNTAQQA |
| | | | | | EIVAVITAFEEVSQPFNLYTDSKYVTGLFPEIETATLSPRTKIYTELKHL |
| | | | | | QRLIHKRQEKFYIGHIRGHTGLPGPLAQGNAYADSLTRILT |
| MMTVB_ | MMTVB | P03365 | derivative | 3219 | WVQEISDSRPMLHIYLNGRRFLGLLNTGADKTCIAGRDWPANWPIHQTES |
| P03365_ | | | | | SLQGLGMACGVARSSQPLRWQHEDKSGIIHPFVIPTLPFTLWGRDIMKDI |
| 2mutB | | | | | KVRLMTDSPDDSQDLMIGAIESNLFADQISWKSDQPVWLNOWPLKQEKLQ |
| | | | | | ALQQLVTEQLQLGHLEESNSPWNTPVFVIKKKSGKWRLLQDLRAVNATMH |
| | | | | | DMGALQPGLPSPVAPPKGWEIIIIDLQDCFFNIKLHPEDCKRFAFSVPSP |
| | | | | | NFKRPYQRFQWKVLPQGMKNSPTLCQKFVDKAILTVRDKYQDSYIVHYMD |
| | | | | | DILLAHPSRSIVDEILTSMIQALNKHGLVVSTEKIQKYDNLKYLGTHIQG |
| | | | | | DSVSYQKLQIRTDKLRTLNDFQKLLGNINWIRPFLKLTTGELKPLFEILN |
| | | | | | PDSNPISTRKLTPEACKALQLMNERLSTARVKRLDLSQPWSLCILKTEYT |
| | | | | | PTACLWQDGVVEWIHLPHISPKVITPYDIFCTQLIIKGRHRSKELFSKDP |
| | | | | | DYIVVPYTKVQFDLLLQEKEDWPISLLGFLGEVHFHLPKDPLLTFTLQTA |
| | | | | | IIFPHMTSTTPLEKGIVIFTDGSANGRSVTYIQGREPIIKENTQNTAQQA |
| | | | | | EIVAVITAFEEVSQPFNLYTDSKYVTGLFPEIETATLSPRTKIYTELKHL |
| | | | | | QRLIHKRQEKFYIGHIRGHTGLPGPLAQGNAYADSLTRILT |
| MMTVB_ | MMTVB | P03365 | derivative | 3220 | VQEISDSRPMLHIYLNGRRFLGLLDTGADKTCIAGRDWPANWPIHQTESS |
| P03365_ | | | | | LQGLGMACGVARSSQPLRWQHEDKSGIIHPFVIPTLPFTLWGRDIMKDIK |
| 2mutB_ | | | | | VRLMTDSPDDSQDLMIGAIESNLFADQISWKSDQPVWLNQWPLKQEKLQA |
| WS | | | | | LQQLVTEQLQLGHLEESNSPWNTPVFVIKKKSGKWRLLQDLRAVNATMHD |
| | | | | | MGALQPGLPSPPAVPKGWEIIIIDLQDCFFNIKLHPEDCKRFAFSVPSPN |
| | | | | | FKRPYQRFQWKVLPQGMKNSPTLCQKFVDKAILTVRDKYQDSYIVHYMDD |
| | | | | | ILLAHPSRSIVDEILTSMIQALNKHGLVVSTEKIQKYDNLKYLGTHIQGD |
| | | | | | SVSYQKLQIRTDKLRTLNDFQKLLGNINWIRPFLKLTTGELKPLFEILNP |
| | | | | | DSNPISTRKLTPEACKALQLMNERLSTARVKRLDLSQPWSLCILKTEYTP |
| | | | | | TACLWQDGVVEWIHLPHISPKVITPYDIFCTQLIIKGRHRSKELFSKDPD |
| | | | | | YIVVPYTKVQFDLLLQEKEDWPISLLGFLGEVHFHLPKDPLLTFTLQTAI |
| | | | | | IFPHMTSTTPLEKGIVIFTDGSANGRSVTYIQGREPIIKENTQNTAQQAE |
| | | | | | IVAVITAFEEVSQPFNLYTDSKYVTGLFPEIETATLSPRTKIYTELKHLQ |
| | | | | | RLIHKRQEKFYIGHIRGHTGLPGPLAQGNAYADSLTRILTA |
| MMTVB_ | MMTVB | P03365 | derivative | 3221 | VQEISDSRPMLHIYLNGRRFLGLLDTGADKTCIAGRDWPANWPIHQTESS |
| P03365_ | | | | | LQGLGMACGVARSSQPLRWQHEDKSGIIHPFVIPTLPFTLWGRDIMKDIK |
| 2mut_ | | | | | VRLMTDSPDDSQDLMIGAIESNLFADQISWKSDQPVWLNQWPLKQEKLQA |
| WS | | | | | LQQLVTEQLQLGHLEESNSPWNTPVFVIKKKSGKWRLLQDLRAVNATMHD |
| | | | | | MGALQPGLPSPVAVPKGWEIIIIDLQDCFFNIKLHPEDCKRFAFSVPSPN |
| | | | | | FKRPYQRFQWKVLPQGMKNSPTLCQKFVDKAILTVRDKYQDSYIVHYMDD |
| | | | | | ILLAHPSRSIVDEILTSMIQALNKHGLVVSTEKIQKYDNLKYLGTHIQGD |
| | | | | | SVSYQKLQIRTDKLRTLNDFQKLLGNINWIRPFLKLTTGELKPLFEILNP |
| | | | | | DSNPISTRKLTPEACKALQLMNERLSTARVKRLDLSQPWSLCILKTEYTP |
| | | | | | TACLWQDGVVEWIHLPHISPKVITPYDIFCTQLIIKGRHRSKELFSKDPD |
| | | | | | YIVVPYTKVQFDLLLQEKEDWPISLLGFLGEVHFHLPKDPLLTFTLQTAI |
| | | | | | IFPHMTSTTPLEKGIVIFTDGSANGRSVTYIQGREPIIKENTQNTAQQAE |
| | | | | | IVAVITAFEEVSQPFNLYTDSKYVTGLFPEIETATLSPRTKIYTELKHLQ |
| | | | | | RLIHKRQEKFYIGHIRGHTGLPGPLAQGNAYADSLTRILTA |
| MPMV_ | MPMV | P07572 | root | 3222 | LTAAIDILAPQQCAEPITWKSDEPVWVDQWPLTNDKLAAAQQLVQEQLEA |
| P07572 | | | | | GHITESSSPWNTPIFVIKKKSGKWRLLQDLRAVNATMVLMGALQPGLPSP |
| | | | | | VAIPQGYLKIIIDLKDCFFSIPLHPSDQKRFAFSLPSTNFKEPMQRFQWK |
| | | | | | VLPQGMANSPTLCQKYVATAIHKVRHAWKQMYIIHYMDDILIAGKDGQQV |
| | | | | | LQCFDQLKQELTAAGLHIAPEKVQLQDPYTYLGFELNGPKITNQKAVIRK |
| | | | | | DKLQTLNDFQKLLGDINWLRPYLKLTTGDLKPLFDTLKGDSDPNSHRSLS |
| | | | | | KEALASLEKVETAIAEQFVTHINYSLPLIFLIFNTALTPTGLFWQDNPIM |
| | | | | | WIHLPASPKKVLLPYYDAIADLIILGRDHSKKYFGIEPSTIIQPYSKSQI |
| | | | | | DWLMQNTEMWPIACASFVGILDNHYPPNKLIQFCKLHTFVFPQIISKTPL |
| | | | | | NNALLVFTDGSSTGMAAYTLTDTTIKFQTNLNSAQLVELQALIAVLSAFP |
| | | | | | NQPLNIYTDSAYLAHSIPLLETVAQIKHISETAKLFLQCQQLIYNRSIPF |
| | | | | | YIGHVRAHSGLPGPIAQGNQRADLATKIVASNINT |
| MPMV_ | MPMV | P07572 | derivative | 3223 | LTAAIDILAPQQCAEPITWKSDEPVWVDQWPLTNDKLAAAQQLVQEQLEA |
| P07572_ | | | | | GHITESSSPWNTPIFVIKKKSGKWRLLQDLRAVNATMVLMGALQPGLPSP |
| 2mut | | | | | VAIPQGYLKIIIDLKDCFFSIPLHPSDQKRFAFSLPSTNFKEPMQRFQWK |
| | | | | | VLPQGMANSPTLCQKYVATAIHKVRHAWKQMYIIHYMDDILIAGKDGQQV |
| | | | | | LQCFDQLKQELTAAGLHIAPEKVQLQDPYTYLGFELNGPKITNQKAVIRK |
| | | | | | DKLQTLNDFQKLLGDINWLRPYLKLTTGDLKPLFDTLKPDSDPNSHRSLS |
| | | | | | KEALASLEKVETAIAEQFVTHINYSLPLIFLIFNTALTPTGLFWQDNPIM |
| | | | | | WIHLPASPKKVLLPYYDAIADLIILGRDHSKKYFGIEPSTIIQPYSKSQI |
| | | | | | DWLMQNTEMWPIACASFVGILDNHYPPNKLIQFCKLHTFVFPQIISKTPL |
| | | | | | NNALLVFTDGSSTGMAAYTLTDTTIKFQTNLNSAQLVELQALIAVLSAFP |
| | | | | | NQPLNIYTDSAYLAHSIPLLETVAQIKHISETAKLFLQCQQLIYNRSIPF |
| | | | | | YIGHVRAHSGLPGPIAQGNQRADLATKIVASNINT |
| MPMV_ | MPMV | P07572 | derivative | 3224 | LTAAIDILAPQQCAEPITWKSDEPVWVDQWPLTNDKLAAAQQLVQEQLEA |
| P07572_ | | | | | GHITESSSPWNTPIFVIKKKSGKWRLLQDLRAVNATMVLMGALQPGLPSP |
| 2mutB | | | | | VAPPQGYLKIIIDLKDCFFSIPLHPSDQKRFAFSLPSTNFKEPMQRFQWK |
| | | | | | VLPQGMANSPTLCQKYVATAIHKVRHAWKQMYIIHYMDDILIAGKDGQQV |
| | | | | | LQCFDQLKQELTAAGLHIAPEKVQLQDPYTYLGFELNGPKITNQKAVIRK |
| | | | | | DKLQTLNDFQKLLGDINWLRPYLKLTTGDLKPLFDTLKPDSDPNSHRSLS |
| | | | | | KEALASLEKVETAIAEQFVTHINYSLPLIFLIFNTALTPTGLFWQDNPIM |
| | | | | | WIHLPASPKKVLLPYYDAIADLIILGRDHSKKYFGIEPSTIIQPYSKSQI |
| | | | | | DWLMQNTEMWPIACASFVGILDNHYPPNKLIQFCKLHTFVFPQIISKTPL |
| | | | | | NNALLVFTDGSSTGMAAYTLTDTTIKFQTNLNSAQLVELQALIAVLSAFP |
| | | | | | NQPLNIYTDSAYLAHSIPLLETVAQIKHISETAKLFLQCQQLIYNRSIPF |
| | | | | | YIGHVRAHSGLPGPIAQGNQRADLATKIVASNINT |
| PERV_ | PERV | Q4VFZ2 | root | 3225 | LDDEYRLYSPLVKPDQNIQFWLEQFPQAWAETAGMGLAKQVPPQVIQLKA |
| Q4VFZ2_ | | | | | SATPVSVRQYPLSKEAQEGIRPHVQRLIQQGILVPVQSPWNTPLLPVRKP |
| 3mutA_ | | | | | GTNDYRPVQDLREVNKRVQDIHPTVPNPYNLLCALPPQRSWYTVLDLKDA |
| WS | | | | | FFCLRLHPTSQPLFAFEWRDPGTGRTGQLTWTRLPQGFKNSPTIFNEALH |
| | | | | | RDLANFRIQHPQVTLLQYVDDLLLAGATKQDCLEGTKALLLELSDLGYRA |
| | | | | | SAKKAQICRREVTYLGYSLRDGQRWLTEARKKTVVQIPAPTTAKQVREFL |
| | | | | | GKAGFCRLFIPGFATLAAPLYPLTKPKGEFSWAPEHQKAFDAIKKALLSA |
| | | | | | PALALPDVTKPFTLYVDERKGVARGVLTQTLGPWRRPVAYLSKKLDPVAS |
| | | | | | GWPVCLKAIAAVAILVKDADKLTLGQNITVIAPHALENIVRQPPDRWMTN |
| | | | | | ARMTHYQSLLLTERVTFAPPAALNPATLLPEETDEPVTHDCHQLLIEETG |
| | | | | | VRKDLTDIPLTGEVLTWFTDGSSYVVEGKRMAGAAVVDGTRTIWASSLPE |
| | | | | | GTSAQKAELMALTQALRLAEGKSINIYTDSRYAFATAHVHGAIYKQRGWL |
| | | | | | TSAGREIKNKEEILSLLEALHLPKRLAIIHCPGHQKAKDPISRGNQMADR |
| | | | | | VAKQAAQGVNLLP |
| PERV_ | PERV | Q4VFZ2 | derivative | 3226 | TLQLDDEYRLYSPLVKPDQNIQFWLEQFPQAWAETAGMGLAKQVPPQVIQ |
| Q4VFZ2 | | | | | LKASATPVSVRQYPLSKEAQEGIRPHVQRLIQQGILVPVQSPWNTPLLPV |
| | | | | | RKPGTNDYRPVQDLREVNKRVQDIHPTVPNPYNLLCALPPQRSWYTVLDL |
| | | | | | KDAFFCLRLHPTSQPLFAFEWRDPGTGRTGQLTWTRLPQGFKNSPTIFDE |
| | | | | | ALHRDLANFRIQHPQVTLLQYVDDLLLAGATKQDCLEGTKALLLELSDLG |
| | | | | | YRASAKKAQICRREVTYLGYSLRDGQRWLTEARKKTVVQIPAPTTAKQVR |
| | | | | | EFLGTAGFCRLWIPGFATLAAPLYPLTKEKGEFSWAPEHQKAFDAIKKAL |
| | | | | | LSAPALALPDVTKPFTLYVDERKGVARGVLTQTLGPWRRPVAYLSKKLDP |
| | | | | | VASGWPVCLKAIAAVAILVKDADKLTLGQNITVIAPHALENIVRQPPDRW |
| | | | | | MTNARMTHYQSLLLTERVTFAPPAALNPATL |
| | | | | | LPEETDEPVTHDCHQLLIEETGVRKDLTDIPLTGEVLTWFTDGSSYVVEG |
| | | | | | KRMAGAAVVDGTRTIWASSLPEGTSAQKAELMALTQALRLAEGKSINIYT |
| | | | | | DSRYAFATAHVHGAIYKQRGLLTSAGREIKNKEEILSLLEALHLPKRLAI |
| | | | | | IHCPGHQKAKDPISRGNQMADRVAKQAAQGVNLL |
| PERV_ | PERV | Q4VFZ2 | derivative | 3227 | TLQLDDEYRLYSPLVKPDQNIQFWLEQFPQAWAETAGMGLAKQVPPQVIQ |
| Q4VFZ2_ | | | | | LKASATPVSVRQYPLSKEAQEGIRPHVQRLIQQGILVPVQSPWNTPLLPV |
| 3mut | | | | | RKPGTNDYRPVQDLREVNKRVQDIHPTVPNPYNLLCALPPQRSWYTVLDL |
| | | | | | KDAFFCLRLHPTSQPLFAFEWRDPGTGRTGQLTWTRLPQGFKNSPTIFNE |
| | | | | | ALHRDLANFRIQHPQVTLLQYVDDLLLAGATKQDCLEGTKALLLELSDLG |
| | | | | | YRASAKKAQICRREVTYLGYSLRDGQRWLTEARKKTVVQIPAPTTAKQVR |
| | | | | | EFLGTAGFCRLWIPGFATLAAPLYPLTKPKGEFSWAPEHQKAFDAIKKAL |
| | | | | | LSAPALALPDVTKPFTLYVDERKGVARGVLTQTLGPWRRPVAYLSKKLDP |
| | | | | | VASGWPVCLKAIAAVAILVKDADKLTLGQNITVIAPHALENIVRQPPDRW |
| | | | | | MTNARMTHYQSLLLTERVTFAPPAALNPATLLPEETDEPVTHDCHQLLIE |
| | | | | | ETGVRKDLTDIPLTGEVLTWFTDGSSYVVEGKRMAGAAVVDGTRTIWASS |
| | | | | | LPEGTSAQKAELMALTQALRLAEGKSINIYTDSRYAFATAHVHGAIYKQR |
| | | | | | GWLTSAGREIKNKEEILSLLEALHLPKRLAIIHCPGHQKAKDPISRGNQM |
| | | | | | ADRVAKQAAQGVNLL |
| PERV_ | PERV | Q4VFZ2 | root | 3225 | LDDEYRLYSPLVKPDQNIQFWLEQFPQAWAETAGMGLAKQVPPQVIQLKA |
| Q4VFZ2_ | | | | | SATPVSVRQYPLSKEAQEGIRPHVQRLIQQGILVPVQSPWNTPLLPVRKP |
| 3mutA_ | | | | | GTNDYRPVQDLREVNKRVQDIHPTVPNPYNLLCALPPQRSWYTVLDLKDA |
| WS | | | | | FFCLRLHPTSQPLFAFEWRDPGTGRTGQLTWTRLPQGFKNSPTIFNEALH |
| | | | | | RDLANFRIQHPQVTLLQYVDDLLLAGATKQDCLEGTKALLLELSDLGYRA |
| | | | | | SAKKAQICRREVTYLGYSLRDGQRWLTEARKKTVVQIPAPTTAKQVREFL |
| | | | | | GKAGFCRLFIPGFATLAAPLYPLTKPKGEFSWAPEHQKAFDAIKKALLSA |
| | | | | | PALALPDVTKPFTLYVDERKGVARGVLTQTLGPWRRPVAYLSKKLDPVAS |
| | | | | | GWPVCLKAIAAVAILVKDADKLTLGQNITVIAPHALENIVRQPPDRWMTN |
| | | | | | ARMTHYQSLLLTERVTFAPPAALNPATLLPEETDEPVTHDCHQLLIEETG |
| | | | | | VRKDLTDIPLTGEVLTWFTDGSSYVVEGKRMAGAAVVDGTRTIWASSLPE |
| | | | | | GTSAQKAELMALTQALRLAEGKSINIYTDSRYAFATAHVHGAIYKQRGWL |
| | | | | | TSAGREIKNKEEILSLLEALHLPKRLAIIHCPGHQKAKDPISRGNQMADR |
| | | | | | VAKQAAQGVNLLP |
| PERV_ | PERV | Q4VFZ2 | derivative | 3226 | TLQLDDEYRLYSPLVKPDQNIQFWLEQFPQAWAETAGMGLAKQVPPQVIQ |
| Q4VFZ2 | | | | | LKASATPVSVRQYPLSKEAQEGIRPHVQRLIQQGILVPVQSPWNTPLLPV |
| | | | | | RKPGTNDYRPVQDLREVNKRVQDIHPTVPNPYNLLCALPPQRSWYTVLDL |
| | | | | | KDAFFCLRLHPTSQPLFAFEWRDPGTGRTGQLTWTRLPQGFKNSPTIFDE |
| | | | | | ALHRDLANFRIQHPQVTLLQYVDDLLLAGATKQDCLEGTKALLLELSDLG |
| | | | | | YRASAKKAQICRREVTYLGYSLRDGQRWLTEARKKTVVQIPAPTTAKQVR |
| | | | | | EFLGTAGFCRLWIPGFATLAAPLYPLTKEKGEFSWAPEHQKAFDAIKKAL |
| | | | | | LSAPALALPDVTKPFTLYVDERKGVARGVLTQTLGPWRRPVAYLSKKLDP |
| | | | | | VASGWPVCLKAIAAVAILVKDADKLTLGQNITVIAPHALENIVRQPPDRW |
| | | | | | MTNARMTHYQSLLLTERVTFAPPAALNPATLLPEETDEPVTHDCHQLLIE |
| | | | | | ETGVRKDLTDIPLTGEVLTWFTDGSSYVVEGKRMAGAAVVDGTRTIWASS |
| | | | | | LPEGTSAQKAELMALTQALRLAEGKSINIYTDSRYAFATAHVHGAIYKQR |
| | | | | | GLLTSAGREIKNKEEILSLLEALHLPKRLAIIHCPGHQKAKDPISRGNQM |
| | | | | | ADRVAKQAAQGVNLL |
| PERV_ | PERV | Q4VFZ2 | derivative | 3227 | TLQLDDEYRLYSPLVKPDQNIQFWLEQFPQAWAETAGMGLAKQVPPQVIQ |
| Q4VFZ2_ | | | | | LKASATPVSVRQYPLSKEAQEGIRPHVQRLIQQGILVPVQSPWNTPLLPV |
| 3mut | | | | | RKPGTNDYRPVQDLREVNKRVQDIHPTVPNPYNLLCALPPQRSWYTVLDL |
| | | | | | KDAFFCLRLHPTSQPLFAFEWRDPGTGRTGQLTWTRLPQGFKNSPTIFNE |
| | | | | | ALHRDLANFRIQHPQVTLLQYVDDLLLAGATKQDCLEGTKALLLELSDLG |
| | | | | | YRASAKKAQICRREVTYLGYSLRDGQRWLTEARKKTVVQIPAPTTAKQVR |
| | | | | | EFLGTAGFCRLWIPGFATLAAPLYPLTKPKGEFSWAPEHQKAFDAIKKAL |
| | | | | | LSAPALALPDVTKPFTLYVDERKGVARGVLTQTLGPWRRPVAYLSKKLDP |
| | | | | | VASGWPVCLKAIAAVAILVKDADKLTLGQNITVIAPHALENIVRQPPDRW |
| | | | | | MTNARMTHYQSLLLTERVTFAPPAALNPATLLPEETDEPVTHDCHQLLIE |
| | | | | | ETGVRKDLTDIPLTGEVLTWFTDGSSYVVEGKRMAGAAVVDGTRTIWASS |
| | | | | | LPEGTSAQKAELMALTQALRLAEGKSINIYTDSRYAFATAHVHGAIYKQR |
| | | | | | GWLTSAGREIKNKEEILSLLEALHLPKRLAIIHCPGHQKAKDPISRGNQM |
| | | | | | ADRVAKQAAQGVNLL |
| SFV1_ | SFV1 | P23074 | root | 3228 | MDPLQLLQPLEAEIKGTKLKAHWNSGATITCVPEAFLEDERPIQTMLIKT |
| P23074 | | | | | IHGEKQQDVYYLTFKVQGRKVEAEVLASPYDYILLNPSDVPWLMKKPLQL |
| | | | | | TVLVPLHEYQERLLQQTALPKEQKELLQKLFLKYDALWQHWENQVGHRRI |
| | | | | | KPHNIATGTLAPRPQKQYPINPKAKPSIQIVIDDLLKQGVLIQQNSTMNT |
| | | | | | PVYPVPKPDGKWRMVLDYREVNKTIPLIAAQNQHSAGILSSIYRGKYKTT |
| | | | | | LDLTNGFWAHPITPESYWLTAFTWQGKQYCWTRLPQGFLNSPALFTADVV |
| | | | | | DLLKEIPNVQAYVDDIYISHDDPQEHLEQLEKIFSILLNAGYVVSLKKSE |
| | | | | | IAQREVEFLGFNITKEGRGLTDTFKQKLLNITPPKDLKQLQSILGLLNFA |
| | | | | | RNFIPNYSELVKPLYTIVANANGKFISWTEDNSNQLQHIISVLNQADNLE |
| | | | | | ERNPETRLIIKVNSSPSAGYIRYYNEGSKRPIMYVNYIFSKAEAKFTQTE |
| | | | | | KLLTTMHKGLIKAMDLAMGQEILVYSPIVSMTKIQRTPLPERKALPVRWI |
| | | | | | TWMTYLEDPRIQFHYDKSLPELQQIPNVTEDVIAKTKHPSEFAMVFYTDG |
| | | | | | SAIKHPDVNKSHSAGMGIAQVQFIPEYKIVHQWSIPLGDHTAQLAEIAAV |
| | | | | | EFACKKALKISGPVLIVTDSFYVAESANKELPYWKSNGFLNNKKKPLRHV |
| | | | | | SKWKSIAECLQLKPDIIIMHEKGHQQPMTTLHTEGNNLADKLATQGSYVV |
| | | | | | H |
| SFV1_ | SFV1 | P23074 | derivative | 3229 | VPWLMKKPLQLTVLVPLHEYQERLLQQTALPKEQKELLQKLFLKYDALWQ |
| P23074- | | | | | HWENQVGHRRIKPHNIATGTLAPRPQKQYPINPKAKPSIQIVIDDLLKQG |
| Pro | | | | | VLIQQNSTMNTPVYPVPKPDGKWRMVLDYREVNKTIPLIAAQNQHSAGIL |
| | | | | | SSIYRGKYKTTLDLTNGFWAHPITPESYWLTAFTWQGKQYCWTRLPQGFL |
| | | | | | NSPALFTADVVDLLKEIPNVQAYVDDIYISHDDPQEHLEQLEKIFSILLN |
| | | | | | AGYVVSLKKSEIAQREVEFLGFNITKEGRGLTDTFKQKLLNITPPKDLKQ |
| | | | | | LQSILGLLNFARNFIPNYSELVKPLYTIVANANGKFISWTEDNSNQLQHI |
| | | | | | ISVLNQADNLEERNPETRLIIKVNSSPSAGYIRYYNEGSKRPIMYVNYIF |
| | | | | | SKAEAKFTQTEKLLTTMHKGLIKAMDLAMGQEILVYSPIVSMTKIQRTPL |
| | | | | | PERKALPVRWITWMTYLEDPRIQFHYDKSLPELQQIPNVTEDVIAKTKHP |
| | | | | | SEFAMVFYTDGSAIKHPDVNKSHSAGMGIAQVQFIPEYKIVHQWSIPLGD |
| | | | | | HTAQLAEIAAVEFACKKALKISGPVLIVTDSFYVAESANKELPYWKSNGF |
| | | | | | LNNKKKPLRHVSKWKSIAECLQLKPDIIIMHEKGHQQPMTTLHTEGNNLA |
| | | | | | DKLATQGSYVVH |
| SFV1_ | SFV1 | P23074 | derivative | 3230 | VPWLMKKPLQLTVLVPLHEYQERLLQQTALPKEQKELLQKLFLKYDALWQ |
| P23074- | | | | | HWENQVGHRRIKPHNIATGTLAPRPQKQYPINPKAKPSIQIVIDDLLKQG |
| Pro_ | | | | | VLIQQNSTMNTPVYPVPKPDGKWRMVLDYREVNKTIPLIAAQNQHSAGIL |
| 2mut | | | | | SSIYRGKYKTTLDLTNGFWAHPITPESYWLTAFTWQGKQYCWTRLPQGFL |
| | | | | | NSPALFNADVVDLLKEIPNVQAYVDDIYISHDDPQEHLEQLEKIFSILLN |
| | | | | | AGYVVSLKKSEIAQREVEFLGFNITKEGRGLTDTFKQKLLNITPPKDLKQ |
| | | | | | LQSILGLLNFARNFIPNYSELVKPLYTIVAPANGKFISWTEDNSNQLQHI |
| | | | | | ISVLNQADNLEERNPETRLIIKVNSSPSAGYIRYYNEGSKRPIMYVNYIF |
| | | | | | SKAEAKFTQTEKLLTTMHKGLIKAMDLAMGQEILVYSPIVSMTKIQRTPL |
| | | | | | PERKALPVRWITWMTYLEDPRIQFHYDKSLPELQQIPNVTEDVIAKTKHP |
| | | | | | SEFAMVFYTDGSAIKHPDVNKSHSAGMGIAQVQFIPEYKIVHQWSIPLGD |
| | | | | | HTAQLAEIAAVEFACKKALKISGPVLIVTDSFYVAESANKELPYWKSNGF |
| | | | | | LNNKKKPLRHVSKWKSIAECLQLKPDIIIMHEKGHQQPMTTLHTEGNNLA |
| | | | | | DKLATQGSYVVH |
| SFV1_ | SFV1 | P23074 | derivative | 3231 | VPWLMKKPLQLTVLVPLHEYQERLLQQTALPKEQKELLQKLFLKYDALWQ |
| P23074- | | | | | HWENQVGHRRIKPHNIATGTLAPRPQKQYPINPKAKPSIQIVIDDLLKQG |
| Pro_ | | | | | VLIQQNSTMNTPVYPVPKPDGKWRMVLDYREVNKTIPLIAAQNQHSAGIL |
| 2mutA | | | | | SSIYRGKYKTTLDLTNGFWAHPITPESYWLTAFTWQGKQYCWTRLPQGFL |
| | | | | | NSPALFNADVVDLLKEIPNVQAYVDDIYISHDDPQEHLEQLEKIFSILLN |
| | | | | | AGYVVSLKKSEIAQREVEFLGFNITKEGRGLTDTFKQKLLNITPPKDLKQ |
| | | | | | LQSILGKLNFARNFIPNYSELVKPLYTIVAPANGKFISWTEDNSNQLQHI |
| | | | | | ISVLNQADNLEERNPETRLIIKVNSSPSAGYIRYYNEGSKRPIMYVNYIF |
| | | | | | SKAEAKFTQTEKLLTTMHKGLIKAMDLAMGQEILVYSPIVSMTKIQRTPL |
| | | | | | PERKALPVRWITWMTYLEDPRIQFHYDKSLPELQQIPNVTEDVIAKTKHP |
| | | | | | SEFAMVFYTDGSAIKHPDVNKSHSAGMGIAQVQFIPEYKIVHQWSIPLGD |
| | | | | | HTAQLAEIAAVEFACKKALKISGPVLIVTDSFYVAESANKELPYWKSNGF |
| | | | | | LNNKKKPLRHVSKWKSIAECLQLKPDIIIMHEKGHQQPMTTLHTEGNNLA |
| | | | | | DKLATQGSYVVH |
| SFV1_ | SFV1 | P23074 | derivative | 3232 | MDPLQLLQPLEAEIKGTKLKAHWNSGATITCVPEAFLEDERPIQTMLIKT |
| P23074_ | | | | | IHGEKQQDVYYLTFKVQGRKVEAEVLASPYDYILLNPSDVPWLMKKPLQL |
| 2mut | | | | | TVLVPLHEYQERLLQQTALPKEQKELLQKLFLKYDALWQHWENQVGHRRI |
| | | | | | KPHNIATGTLAPRPQKQYPINPKAKPSIQIVIDDLLKQGVLIQQNSTMNT |
| | | | | | PVYPVPKPDGKWRMVLDYREVNKTIPLIAAQNQHSAGILSSIYRGKYKTT |
| | | | | | LDLTNGFWAHPITPESYWLTAFTWQGKQYCWTRLPQGFLNSPALFNADVV |
| | | | | | DLLKEIPNVQAYVDDIYISHDDPQEHLEQLEKIFSILLNAGYVVSLKKSE |
| | | | | | IAQREVEFLGFNITKEGRGLTDTFKQKLLNITPPKDLKQLQSILGLLNFA |
| | | | | | RNFIPNYSELVKPLYTIVAPANGKFISWTEDNSNQLQHIISVLNQADNLE |
| | | | | | ERNPETRLIIKVNSSPSAGYIRYYNEGSKRPIMYVNYIFSKAEAKFTQTE |
| | | | | | KLLTTMHKGLIKAMDLAMGQEILVYSPIVSMTKIQRTPLPERKALPVRWI |
| | | | | | TWMTYLEDPRIQFHYDKSLPELQQIPNVTEDVIAKTKHPSEFAMVFYTDG |
| | | | | | SAIKHPDVNKSHSAGMGIAQVQFIPEYKIVHQWSIPLGDHTAQLAEIAAV |
| | | | | | EFACKKALKISGPVLIVTDSFYVAESANKELPYWKSNGFLNNKKKPLRHV |
| | | | | | SKWKSIAECLQLKPDIIIMHEKGHQQPMTTLHTEGNNLADKLATQGSYVV |
| | | | | | H |
| SFV1_ | SFV1 | P23074 | derivative | 3233 | MDPLQLLQPLEAEIKGTKLKAHWNSGATITCVPEAFLEDERPIQTMLIKT |
| P23074_ | | | | | IHGEKQQDVYYLTFKVQGRKVEAEVLASPYDYILLNPSDVPWLMKKPLQL |
| 2mutA | | | | | TVLVPLHEYQERLLQQTALPKEQKELLQKLFLKYDALWQHWENQVGHRRI |
| | | | | | KPHNIATGTLAPRPQKQYPINPKAKPSIQIVIDDLLKQGVLIQQNSTMNT |
| | | | | | PVYPVPKPDGKWRMVLDYREVNKTIPLIAAQNQHSAGILSSIYRGKYKTT |
| | | | | | LDLTNGFWAHPITPESYWLTAFTWQGKQYCWTRLPQGFLNSPALFNADVV |
| | | | | | DLLKEIPNVQAYVDDIYISHDDPQEHLEQLEKIFSILLNAGYVVSLKKSE |
| | | | | | IAQREVEFLGFNITKEGRGLTDTFKQKLLNITPPKDLKQLQSILGKLNFA |
| | | | | | RNFIPNYSELVKPLYTIVAPANGKFISWTEDNSNQLQHIISVLNQADNLE |
| | | | | | ERNPETRLIIKVNSSPSAGYIRYYNEGSKRPIMYVNYIFSKAEAKFTQTE |
| | | | | | KLLTTMHKGLIKAMDLAMGQEILVYSPIVSMTKIQRTPLPERKALPVRWI |
| | | | | | TWMTYLEDPRIQFHYDKSLPELQQIPNVTEDVIAKTKHPSEFAMVFYTDG |
| | | | | | SAIKHPDVNKSHSAGMGIAQVQFIPEYKIVHQWSIPLGDHTAQLAEIAAV |
| | | | | | EFACKKALKISGPVLIVTDSFYVAESANKELPYWKSNGFLNNKKKPLRHV |
| | | | | | SKWKSIAECLQLKPDIIIMHEKGHQQPMTTLHTEGNNLADKLATQGSYVV |
| | | | | | H |
| SFV3L_ | SFV3L | P27401 | root | 3234 | MDPLQLLQPLEAEIKGTKLKAHWNSGATITCVPQAFLEEEVPIKNIWIKT |
| P27401 | | | | | IHGEKEQPVYYLTFKIQGRKVEAEVISSPYDYILVSPSDIPWLMKKPLQL |
| | | | | | TTLVPLQEYEERLLKQTMLTGSYKEKLQSLFLKYDALWQHWENQVGHRRI |
| | | | | | KPHHIATGTVNPRPQKQYPINPKAKASIQTVINDLLKQGVLIQQNSIMNT |
| | | | | | PVYPVPKPDGKWRMVLDYREVNKTIPLIAAQNQHSAGILSSIFRGKYKTT |
| | | | | | LDLSNGFWAHSITPESYWLTAFTWLGQQYCWTRLPQGFLNSPALFTADVV |
| | | | | | DLLKEVPNVQVYVDDIYISHDDPREHLEQLEKVFSLLLNAGYVVSLKKSE |
| | | | | | IAQHEVEFLGFNITKEGRGLTETFKQKLLNITPPRDLKQLQSILGLLNFA |
| | | | | | RNFIPNFSELVKPLYNIIATANGKYITWTTDNSQQLQNIISMLNSAENLE |
| | | | | | ERNPEVRLIMKVNTSPSAGYIRFYNEFAKRPIMYLNYVYTKAEVKFTNTE |
| | | | | | KLLTTIHKGLIKALDLGMGQEILVYSPIVSMTKIQKTPLPERKALPIRWI |
| | | | | | TWMSYLEDPRIQFHYDKTLPELQQVPTVTDDIIAKIKHPSEFSMVFYTDG |
| | | | | | SAIKHPNVNKSHNAGMGIAQVQFKPEFTVINTWSIPLGDHTAQLAEVAAV |
| | | | | | EFACKKALKIDGPVLIVTDSFYVAESVNKELPYWQSNGFFNNKKKPLKHV |
| | | | | | SKWKSIADCIQLKPDIIIIHEKGHQPTASTFHTEGNNLADKLATQGSYVV |
| | | | | | N |
| SFV3L_ | SFV3L | P27401 | derivative | 3235 | IPWLMKKPLQLTTLVPLQEYEERLLKQTMLTGSYKEKLQSLFLKYDALWQ |
| P27401- | | | | | HWENQVGHRRIKPHHIATGTVNPRPQKQYPINPKAKASIQTVINDLLKQG |
| Pro | | | | | VLIQQNSIMNTPVYPVPKPDGKWRMVLDYREVNKTIPLIAAQNQHSAGIL |
| | | | | | SSIFRGKYKTTLDLSNGFWAHSITPESYWLTAFTWLGQQYCWTRLPQGFL |
| | | | | | NSPALFTADVVDLLKEVPNVQVYVDDIYISHDDPREHLEQLEKVFSLLLN |
| | | | | | AGYVVSLKKSEIAQHEVEFLGFNITKEGRGLTETFKQKLLNITPPRDLKQ |
| | | | | | LQSILGLLNFARNFIPNFSELVKPLYNIIATANGKYITWTTDNSQQLQNI |
| | | | | | ISMLNSAENLEERNPEVRLIMKVNTSPSAGYIRFYNEFAKRPIMYLNYVY |
| | | | | | TKAEVKFTNTEKLLTTIHKGLIKALDLGMGQEILVYSPIVSMTKIQKTPL |
| | | | | | PERKALPIRWITWMSYLEDPRIQFHYDKTLPELQQVPTVTDDIIAKIKHP |
| | | | | | SEFSMVFYTDGSAIKHPNVNKSHNAGMGIAQVQFKPEFTVINTWSIPLGD |
| | | | | | HTAQLAEVAAVEFACKKALKIDGPVLIVTDSFYVAESVNKELPYWQSNGF |
| | | | | | FNNKKKPLKHVSKWKSIADCIQLKPDIIIIHEKGHQPTASTFHTEGNNLA |
| | | | | | DKLATQGSYVVN |
| SFV3L_ | SFV3L | P27401 | derivative | 3236 | IPWLMKKPLQLTTLVPLQEYEERLLKQTMLTGSYKEKLQSLFLKYDALWQ |
| P27401- | | | | | HWENQVGHRRIKPHHIATGTVNPRPQKQYPINPKAKASIQTVINDLLKQG |
| Pro_ | | | | | VLIQQNSIMNTPVYPVPKPDGKWRMVLDYREVNKTIPLIAAQNQHSAGIL |
| 2mut | | | | | SSIFRGKYKTTLDLSNGFWAHSITPESYWLTAFTWLGQQYCWTRLPQGFL |
| | | | | | NSPALFNADVVDLLKEVPNVQVYVDDIYISHDDPREHLEQLEKVFSLLLN |
| | | | | | AGYVVSLKKSEIAQHEVEFLGFNITKEGRGLTETFKQKLLNITPPRDLKQ |
| | | | | | LQSILGLLNFARNFIPNFSELVKPLYNIIATAPGKYITWTTDNSQQLQNI |
| | | | | | ISMLNSAENLEERNPEVRLIMKVNTSPSAGYIRFYNEFAKRPIMYLNYVY |
| | | | | | TKAEVKFTNTEKLLTTIHKGLIKALDLGMGQEILVYSPIVSMTKIQKTPL |
| | | | | | PERKALPIRWITWMSYLEDPRIQFHYDKTLPELQQVPTVTDDIIAKIKHP |
| | | | | | SEFSMVFYTDGSAIKHPNVNKSHNAGMGIAQVQFKPEFTVINTWSIPLGD |
| | | | | | HTAQLAEVAAVEFACKKALKIDGPVLIVTDSFYVAESVNKELPYWQSNGF |
| | | | | | FNNKKKPLKHVSKWKSIADCIQLKPDIIIIHEKGHQPTASTFHTEGNNLA |
| | | | | | DKLATQGSYVVN |
| SFV3L_ | SFV3L | P27401 | derivative | 3237 | IPWLMKKPLQLTTLVPLQEYEERLLKQTMLTGSYKEKLQSLFLKYDALWQ |
| P27401- | | | | | HWENQVGHRRIKPHHIATGTVNPRPQKQYPINPKAKASIQTVINDLLKQG |
| Pro_ | | | | | VLIQQNSIMNTPVYPVPKPDGKWRMVLDYREVNKTIPLIAAQNQHSAGIL |
| 2mutA | | | | | SSIFRGKYKTTLDLSNGFWAHSITPESYWLTAFTWLGQQYCWTRLPQGFL |
| | | | | | NSPALFNADVVDLLKEVPNVQVYVDDIYISHDDPREHLEQLEKVFSLLLN |
| | | | | | AGYVVSLKKSEIAQHEVEFLGFNITKEGRGLTETFKQKLLNITPPRDLKQ |
| | | | | | LQSILGKLNFARNFIPNFSELVKPLYNIIATAPGKYITWTTDNSQQLQNI |
| | | | | | ISMLNSAENLEERNPEVRLIMKVNTSPSAGYIRFYNEFAKRPIMYLNYVY |
| | | | | | TKAEVKFTNTEKLLTTIHKGLIKALDLGMGQEILVYSPIVSMTKIQKTPL |
| | | | | | PERKALPIRWITWMSYLEDPRIQFHYDKTLPELQQVPTVTDDIIAKIKHP |
| | | | | | SEFSMVFYTDGSAIKHPNVNKSHNAGMGIAQVQFKPEFTVINTWSIPLGD |
| | | | | | HTAQLAEVAAVEFACKKALKIDGPVLIVTDSFYVAESVNKELPYWQSNGF |
| | | | | | FNNKKKPLKHVSKWKSIADCIQLKPDIIIIHEKGHQPTASTFHTEGNNLA |
| | | | | | DKLATQGSYVVN |
| SFV3L_ | SFV3L | P27401 | derivative | 3238 | MDPLQLLQPLEAEIKGTKLKAHWNSGATITCVPQAFLEEEVPIKNIWIKT |
| P27401_ | | | | | IHGEKEQPVYYLTFKIQGRKVEAEVISSPYDYILVSPSDIPWLMKKPLQL |
| 2mut | | | | | TTLVPLQEYEERLLKQTMLTGSYKEKLQSLFLKYDALWQHWENQVGHRRI |
| | | | | | KPHHIATGTVNPRPQKQYPINPKAKASIQTVINDLLKQGVLIQQNSIMNT |
| | | | | | PVYPVPKPDGKWRMVLDYREVNKTIPLIAAQNQHSAGILSSIFRGKYKTT |
| | | | | | LDLSNGFWAHSITPESYWLTAFTWLGQQYCWTRLPQGFLNSPALFNADVV |
| | | | | | DLLKEVPNVQVYVDDIYISHDDPREHLEQLEKVFSLLLNAGYVVSLKKSE |
| | | | | | IAQHEVEFLGFNITKEGRGLTETFKQKLLNITPPRDLKQLQSILGLLNFA |
| | | | | | RNFIPNFSELVKPLYNIIATAPGKYITWTTDNSQQLQNIISMLNSAENLE |
| | | | | | ERNPEVRLIMKVNTSPSAGYIRFYNEFAKRPIMYLNYVYTKAEVKFTNTE |
| | | | | | KLLTTIHKGLIKALDLGMGQEILVYSPIVSMTKIQKTPLPERKALPIRWI |
| | | | | | TWMSYLEDPRIQFHYDKTLPELQQVPTVTDDIIAKIKHPSEFSMVFYTDG |
| | | | | | SAIKHPNVNKSHNAGMGIAQVQFKPEFTVINTWSIPLGDHTAQLAEVAAV |
| | | | | | EFACKKALKIDGPVLIVTDSFYVAESVNKELPYWQSNGFFNNKKKPLKHV |
| | | | | | SKWKSIADCIQLKPDIIIIHEKGHQPTASTFHTEGNNLADKLATQGSYVV |
| | | | | | N |
| SFV3L_ | SFV3L | P27401 | derivative | 3239 | MDPLQLLQPLEAEIKGTKLKAHWNSGATITCVPQAFLEEEVPIKNIWIKT |
| P27401_ | | | | | IHGEKEQPVYYLTFKIQGRKVEAEVISSPYDYILVSPSDIPWLMKKPLQL |
| 2mutA | | | | | TTLVPLQEYEERLLKQTMLTGSYKEKLQSLFLKYDALWQHWENQVGHRRI |
| | | | | | KPHHIATGTVNPRPQKQYPINPKAKASIQTVINDLLKQGVLIQQNSIMNT |
| | | | | | PVYPVPKPDGKWRMVLDYREVNKTIPLIAAQNQHSAGILSSIFRGKYKTT |
| | | | | | LDLSNGFWAHSITPESYWLTAFTWLGQQYCWTRLPQGFLNSPALFNADVV |
| | | | | | DLLKEVPNVQVYVDDIYISHDDPREHLEQLEKVFSLLLNAGYVVSLKKSE |
| | | | | | IAQHEVEFLGFNITKEGRGLTETFKQKLLNITPPRDLKQLQSILGKLNFA |
| | | | | | RNFIPNFSELVKPLYNIIATAPGKYITWTTDNSQQLQNIISMLNSAENLE |
| | | | | | ERNPEVRLIMKVNTSPSAGYIRFYNEFAKRPIMYLNYVYTKAEVKFTNTE |
| | | | | | KLLTTIHKGLIKALDLGMGQEILVYSPIVSMTKIQKTPLPERKALPIRWI |
| | | | | | TWMSYLEDPRIQFHYDKTLPELQQVPTVTDDIIAKIKHPSEFSMVFYTDG |
| | | | | | SAIKHPNVNKSHNAGMGIAQVQFKPEFTVINTWSIPLGDHTAQLAEVAAV |
| | | | | | EFACKKALKIDGPVLIVTDSFYVAESVNKELPYWQSNGFFNNKKKPLKHV |
| | | | | | SKWKSIADCIQLKPDIIIIHEKGHQPTASTFHTEGNNLADKLATQGSYVV |
| | | | | | N |
| SFVCP_ | SFVCP | 087040 | root | 3240 | MNPLQLLQPLPAEVKGTKLLAHWNSGATITCIPESFLEDEQPIKQTLIKT |
| Q87040 | | | | | IHGEKQQNVYYLTFKVKGRKVEAEVIASPYEYILLSPTDVPWLTQQPLQL |
| | | | | | TILVPLQEYQDRILNKTALPEEQKQQLKALFTKYDNLWQHWENQVGHRKI |
| | | | | | RPHNIATGDYPPRPQKQYPINPKAKPSIQIVIDDLLKQGVLTPQNSTMNT |
| | | | | | PVYPVPKPDGRWRMVLDYREVNKTIPLTAAQNQHSAGILATIVRQKYKTT |
| | | | | | LDLANGFWAHPITPDSYWLTAFTWQGKQYCWTRLPQGFLNSPALFTADAV |
| | | | | | DLLKEVPNVQVYVDDIYLSHDNPHEHIQQLEKVFQILLQAGYVVSLKKSE |
| | | | | | IGQRTVEFLGFNITKEGRGLTDTFKTKLLNVTPPKDLKQLQSILGLLNFA |
| | | | | | RNFIPNFAELVQTLYNLIASSKGKYIEWTEDNTKQLNKVIEALNTASNLE |
| | | | | | ERLPDQRLVIKVNTSPSAGYVRYYNESGKKPIMYLNYVFSKAELKFSMLE |
| | | | | | KLLTTMHKALIKAMDLAMGQEILVYSPIVSMTKIQKTPLPERKALPIRWI |
| | | | | | TWMTYLEDPRIQFHYDKTLPELKHIPDVYTSSIPPLKHPSQYEGVFCTDG |
| | | | | | SAIKSPDPTKSNNAGMGIVHAIYNPEYKILNQWSIPLGHHTAQMAEIAAV |
| | | | | | EFACKKALKVPGPVLVITDSFYVAESANKELPYWKSNGFVNNKKEPLKHI |
| | | | | | SKWKSIAECLSIKPDITIQHEKGHQPINTSIHTEGNALADKLATQGSYVV |
| | | | | | N |
| SFVCP_ | SFVCP | Q87040 | derivative | 3241 | VPWLTQQPLQLTILVPLQEYQDRILNKTALPEEQKQQLKALFTKYDNLWQ |
| Q87040- | | | | | HWENQVGHRKIRPHNIATGDYPPRPQKQYPINPKAKPSIQIVIDDLLKQG |
| Pro | | | | | VLTPQNSTMNTPVYPVPKPDGRWRMVLDYREVNKTIPLTAAQNQHSAGIL |
| | | | | | ATIVRQKYKTTLDLANGFWAHPITPDSYWLTAFTWQGKQYCWTRLPQGFL |
| | | | | | NSPALFTADAVDLLKEVPNVQVYVDDIYLSHDNPHEHIQQLEKVFQILLQ |
| | | | | | AGYVVSLKKSEIGQRTVEFLGFNITKEGRGLTDTFKTKLLNVTPPKDLKQ |
| | | | | | LQSILGLLNFARNFIPNFAELVQTLYNLIASSKGKYIEWTEDNTKQLNKV |
| | | | | | IEALNTASNLEERLPDQRLVIKVNTSPSAGYVRYYNESGKKPIMYLNYVF |
| | | | | | SKAELKFSMLEKLLTTMHKALIKAMDLAMGQEILVYSPIVSMTKIQKTPL |
| | | | | | PERKALPIRWITWMTYLEDPRIQFHYDKTLPELKHIPDVYTSSIPPLKHP |
| | | | | | SQYEGVFCTDGSAIKSPDPTKSNNAGMGIVHAIYNPEYKILNQWSIPLGH |
| | | | | | HTAQMAEIAAVEFACKKALKVPGPVLVITDSFYVAESANKELPYWKSNGF |
| | | | | | VNNKKEPLKHISKWKSIAECLSIKPDITIQHEKGHQPINTSIHTEGNALA |
| | | | | | DKLATQGSYVVN |
| SFVCP_ | SFVCP | Q87040 | derivative | 3242 | VPWLTQQPLQLTILVPLQEYQDRILNKTALPEEQKQQLKALFTKYDNLWQ |
| Q87040- | | | | | HWENQVGHRKIRPHNIATGDYPPRPQKQYPINPKAKPSIQIVIDDLLKQG |
| Pro_ | | | | | VLTPQNSTMNTPVYPVPKPDGRWRMVLDYREVNKTIPLTAAQNQHSAGIL |
| 2mut | | | | | ATIVRQKYKTTLDLANGFWAHPITPDSYWLTAFTWQGKQYCWTRLPQGFL |
| | | | | | NSPALFNADAVDLLKEVPNVQVYVDDIYLSHDNPHEHIQQLEKVFQILLQ |
| | | | | | AGYVVSLKKSEIGQRTVEFLGFNITKEGRGLTDTFKTKLLNVTPPKDLKQ |
| | | | | | LQSILGLLNFARNFIPNFAELVQTLYNLIASSPGKYIEWTEDNTKQLNKV |
| | | | | | IEALNTASNLEERLPDQRLVIKVNTSPSAGYVRYYNESGKKPIMYLNYVF |
| | | | | | SKAELKFSMLEKLLTTMHKALIKAMDLAMGQEILVYSPIVSMTKIQKTPL |
| | | | | | PERKALPIRWITWMTYLEDPRIQFHYDKTLPELKHIPDVYTSSIPPLKHP |
| | | | | | SQYEGVFCTDGSAIKSPDPTKSNNAGMGIVHAIYNPEYKILNQWSIPLGH |
| | | | | | HTAQMAEIAAVEFACKKALKVPGPVLVITDSFYVAESANKELPYWKSNGF |
| | | | | | VNNKKEPLKHISKWKSIAECLSIKPDITIQHEKGHQPINTSIHTEGNALA |
| | | | | | DKLATQGSYVVN |
| SFVCP_ | SFVCP | 087040 | derivative | 3243 | VPWLTQQPLQLTILVPLQEYQDRILNKTALPEEQKQQLKALFTKYDNLWQ |
| Q87040- | | | | | HWENQVGHRKIRPHNIATGDYPPRPQKQYPINPKAKPSIQIVIDDLLKQG |
| Pro_ | | | | | VLTPQNSTMNTPVYPVPKPDGRWRMVLDYREVNKTIPLTAAQNQHSAGIL |
| 2mutA | | | | | ATIVRQKYKTTLDLANGFWAHPITPDSYWLTAFTWQGKQYCWTRLPQGFL |
| | | | | | NSPALFNADAVDLLKEVPNVQVYVDDIYLSHDNPHEHIQQLEKVFQILLQ |
| | | | | | AGYVVSLKKSEIGQRTVEFLGFNITKEGRGLTDTFKTK |
| | | | | | LLNVTPPKDLKQLQSILGKLNFARNFIPNFAELVQTLYNLIASSPGKYIE |
| | | | | | WTEDNTKQLNKVIEALNTASNLEERLPDQRLVIKVNTSPSAGYVRYYNES |
| | | | | | GKKPIMYLNYVFSKAELKFSMLEKLLTTMHKALIKAMDLAMGQEILVYSP |
| | | | | | IVSMTKIQKTPLPERKALPIRWITWMTYLEDPRIQFHYDKTLPELKHIPD |
| | | | | | VYTSSIPPLKHPSQYEGVFCTDGSAIKSPDPTKSNNAGMGIVHAIYNPEY |
| | | | | | KILNQWSIPLGHHTAQMAEIAAVEFACKKALKVPGPVLVITDSFYVAESA |
| | | | | | NKELPYWKSNGFVNNKKEPLKHISKWKSIAECLSIKPDITIQHEKGHQPI |
| | | | | | NTSIHTEGNALADKLATQGSYVVN |
| SFVCP_ | SFVCP | Q87040 | derivative | 3244 | MNPLQLLQPLPAEVKGTKLLAHWNSGATITCIPESFLEDEQPIKQTLIKT |
| Q87040_ | | | | | IHGEKQQNVYYLTFKVKGRKVEAEVIASPYEYILLSPTDVPWLTQQPLQL |
| 2mut | | | | | TILVPLQEYQDRILNKTALPEEQKQQLKALFTKYDNLWQHWENQVGHRKI |
| | | | | | RPHNIATGDYPPRPQKQYPINPKAKPSIQIVIDDLLKQGVLTPQNSTMNT |
| | | | | | PVYPVPKPDGRWRMVLDYREVNKTIPLTAAQNQHSAGILATIVRQKYKTT |
| | | | | | LDLANGFWAHPITPDSYWLTAFTWQGKQYCWTRLPQGFLNSPALFNADAV |
| | | | | | DLLKEVPNVQVYVDDIYLSHDNPHEHIQQLEKVFQILLQAGYVVSLKKSE |
| | | | | | IGQRTVEFLGFNITKEGRGLTDTFKTKLLNVTPPKDLKQLQSILGLLNFA |
| | | | | | RNFIPNFAELVQTLYNLIASSPGKYIEWTEDNTKQLNKVIEALNTASNLE |
| | | | | | ERLPDQRLVIKVNTSPSAGYVRYYNESGKKPIMYLNYVFSKAELKFSMLE |
| | | | | | KLLTTMHKALIKAMDLAMGQEILVYSPIVSMTKIQKTPLPERKALPIRWI |
| | | | | | TWMTYLEDPRIQFHYDKTLPELKHIPDVYTSSIPPLKHPSQYEGVFCTDG |
| | | | | | SAIKSPDPTKSNNAGMGIVHAIYNPEYKILNQWSIPLGHHTAQMAEIAAV |
| | | | | | EFACKKALKVPGPVLVITDSFYVAESANKELPYWKSNGFVNNKKEPLKHI |
| | | | | | SKWKSIAECLSIKPDITIQHEKGHQPINTSIHTEGNALADKLATQGSYVV |
| | | | | | N |
| SFVCP_ | SFVCP | Q87040 | derivative | 3245 | MNPLQLLQPLPAEVKGTKLLAHWNSGATITCIPESFLEDEQPIKQTLIKT |
| Q87040_ | | | | | IHGEKQQNVYYLTFKVKGRKVEAEVIASPYEYILLSPTDVPWLTQQPLQL |
| | | | | | TILVPLQEYQDRILNKTALPEEQKQQLKALFTKYDNLWQHWENQVGHRKI |
| | | | | | RPHNIATGDYPPRPQKQYPINPKAKPSIQIVIDDLLKQGVLTPQNSTMNT |
| 2mutA | | | | | PVYPVPKPDGRWRMVLDYREVNKTIPLTAAQNQHSAGILATIVRQKYKTT |
| | | | | | LDLANGFWAHPITPDSYWLTAFTWQGKQYCWTRLPQGFLNSPALFNADAV |
| | | | | | DLLKEVPNVQVYVDDIYLSHDNPHEHIQQLEKVFQILLQAGYVVSLKKSE |
| | | | | | IGQRTVEFLGFNITKEGRGLTDTFKTKLLNVTPPKDLKQLQSILGKLNFA |
| | | | | | RNFIPNFAELVQTLYNLIASSPGKYIEWTEDNTKQLNKVIEALNTASNLE |
| | | | | | ERLPDQRLVIKVNTSPSAGYVRYYNESGKKPIMYLNYVFSKAELKFSMLE |
| | | | | | KLLTTMHKALIKAMDLAMGQEILVYSPIVSMTKIQKTPLPERKALPIRWI |
| | | | | | TWMTYLEDPRIQFHYDKTLPELKHIPDVYTSSIPPLKHPSQYEGVFCTDG |
| | | | | | SAIKSPDPTKSNNAGMGIVHAIYNPEYKILNQWSIPLGHHTAQMAEIAAV |
| | | | | | EFACKKALKVPGPVLVITDSFYVAESANKELPYWKSNGFVNNKKEPLKHI |
| | | | | | SKWKSIAECLSIKPDITIQHEKGHQPINTSIHTEGNALADKLATQGSYVV |
| | | | | | N |
| SMRVH_ | SMRVH | P03364 | root | 3246 | PRSRAIDIPVPHADKISWKITDPVWVDQWPLTYEKTLAAIALVQEQLAAG |
| P03364 | | | | | HIEPTNSPWNTPIFIIKKKSGSWRLLQDLRAVNKVMVPMGALQPGLPSPV |
| | | | | | AIPLNYHKIVIDLKDCFFTIPLHPEDRPYFAFSVPQINFQSPMPRYQWKV |
| | | | | | LPQGMANSPTLCQKFVAAAIAPVRSQWPEAYILHYMDDILLACDSAEAAK |
| | | | | | ACYAHIISCLTSYGLKIAPDKVQVSEPFSYLGFELHHQQVFTPRVCLKTD |
| | | | | | HLKTLNDFQKLLGDIQWLRPYLKLPTSALVPLNNILKGDPNPLSVRALTP |
| | | | | | EAKQSLALINKAIQNQSVQQISYNLPLVLLLLPTPHTPTAVFWQPNGTDP |
| | | | | | TKNGSPLLWLHLPASPSKVLLTYPSLLAMLIIKGRYTGRQLFGRDPHSII |
| | | | | | IPYTQDQLTWLLQTSDEWAIALSSFTGDIDNHYPSDPVIQFAKLHQFIFP |
| | | | | | KITKCAPIPQATLVFTDGSSNGIAAYVIDNQPISIKSPYLSAQLVELYAI |
| | | | | | LQVFTVLAHQPFNLYTDSAYIAQSVPLLETVPFIKSSTNATPLFSKLQQL |
| | | | | | ILNRQHPFFIGHLRAHLNLPGPLAEGNALADAATQIFPIISD |
| SMRVH_ | SMRVH | P03364 | derivative | 3247 | PRSRAIDIPVPHADKISWKITDPVWVDQWPLTYEKTLAAIALVQEQLAAG |
| P03364_ | | | | | HIEPTNSPWNTPIFIIKKKSGSWRLLQDLRAVNKVMVPMGALQPGLPSPV |
| 2mut | | | | | AIPLNYHKIVIDLKDCFFTIPLHPEDRPYFAFSVPQINFQSPMPRYQWKV |
| | | | | | LPQGMANSPTLCQKFVAAAIAPVRSQWPEAYILHYMDDILLACDS |
| | | | | | AEAAKACYAHIISCLTSYGLKIAPDKVQVSEPFSYLGFELHHQQVFTPRV |
| | | | | | CLKTDHLKTLNDFQKLLGDIQWLRPYLKLPTSALVPLNNILKPDPNPLSV |
| | | | | | RALTPEAKQSLALINKAIQNQSVQQISYNLPLVLLLLPTPHTPTAVFWQP |
| | | | | | NGTDPTKNGSPLLWLHLPASPSKVLLTYPSLLAMLIIKGRYTGRQLFGRD |
| | | | | | PHSIIIPYTQDQLTWLLQTSDEWAIALSSFTGDIDNHYPSDPVIQFAKLH |
| | | | | | QFIFPKITKCAPIPQATLVFTDGSSNGIAAYVIDNQPISIKSPYLSAQLV |
| | | | | | ELYAILQVFTVLAHQPFNLYTDSAYIAQSVPLLETVPFIKSSTNATPLFS |
| | | | | | KLQQLILNRQHPFFIGHLRAHLNLPGPLAEGNALADAATQIFPIISD |
| SMRVH_ | SMRVH | P03364 | derivative | 3248 | PRSRAIDIPVPHADKISWKITDPVWVDQWPLTYEKTLAAIALVQEQLAAG |
| P03364_2 | | | | | HIEPTNSPWNTPIFIIKKKSGSWRLLQDLRAVNKVMVPMGALQPGLPSPV |
| mutB | | | | | APPLNYHKIVIDLKDCFFTIPLHPEDRPYFAFSVPQINFQSPMPRYQWKV |
| | | | | | LPQGMANSPTLCQKFVAAAIAPVRSQWPEAYILHYMDDILLACDSAEAAK |
| | | | | | ACYAHIISCLTSYGLKIAPDKVQVSEPFSYLGFELHHQQVFTPRVCLKTD |
| | | | | | HLKTLNDFQKLLGDIQWLRPYLKLPTSALVPLNNILKPDPNPLSVRALTP |
| | | | | | EAKQSLALINKAIQNQSVQQISYNLPLVLLLLPTPHTPTAVFWQPNGTDP |
| | | | | | TKNGSPLLWLHLPASPSKVLLTYPSLLAMLIIKGRYTGRQLFGRDPHSII |
| | | | | | IPYTQDQLTWLLQTSDEWAIALSSFTGDIDNHYPSDPVIQFAKLHQFIFP |
| | | | | | KITKCAPIPQATLVFTDGSSNGIAAYVIDNQPISIKSPYLSAQLVELYAI |
| | | | | | LQVFTVLAHQPFNLYTDSAYIAQSVPLLETVPFIKSSTNATPLFSKLQQL |
| | | | | | ILNRQHPFFIGHLRAHLNLPGPLAEGNALADAATQIFPIISD |
| SRV1_ | SRV1 | P04025 | root | 3249 | LTAAIDMLAPQQCAEPITWKSDEPVWVDQWPLTSEKLAAAQQLVQEQLEA |
| P04025 | | | | | GHITESNSPWNTPIFVIKKKSGKWRLLQDLRAVNATMVLMGALQPGLPSP |
| | | | | | VAIPQGYLKIIIDLKDCFFSIPLHPSDQKRFAFSLPSTNFKEPMQRFQWK |
| | | | | | VLPQRMANSPTLCQKYVATAIHKVRHAWKQMYIIHYMDDILIAGKDGQQV |
| | | | | | LQCFDQLKQELTIAGLHIAPEKIQLQDPYTYLGFELNGPKITNQKAVIRK |
| | | | | | DKLQTLNDFQKLLGDINWLRPYLKLTTADLKPLFDTLKGDSNPNSHRSLS |
| | | | | | KEALALLDKVETAIAEQFVTHINYSLPLMFLIFNTALTPTGLFWQNNPIM |
| | | | | | WVHLPASPKKVLLPYYDAIADLIILGRDHSKKYFGIEPSVIIQPYSKSQI |
| | | | | | DWLMQNTEMWPIACASYVGILDNHYPPNKLIQFCKLHAFIFPQIISKTPL |
| | | | | | NNALLVFTDGSSTGMAAYTLADTTIKFQTNLNSAQLVELQALIAVLSAFP |
| | | | | | NQPLNIYTDSAYLAHSIPLLETVAQIKHISETAKLFLQCQQLIYNRSIPF |
| | | | | | YIGHVRAHSGLPGPIAHGNQKADLATKTVASNINT |
| SRV1_ | SRV1 | P04025 | derivative | 3250 | LTAAIDMLAPQQCAEPITWKSDEPVWVDQWPLTSEKLAAAQQLVQEQLEA |
| P04025_ | | | | | GHITESNSPWNTPIFVIKKKSGKWRLLQDLRAVNATMVLMGALQPGLPSP |
| 2mutB | | | | | VAPPQGYLKIIIDLKDCFFSIPLHPSDQKRFAFSLPSTNFKEPMQRFQWK |
| | | | | | VLPQRMANSPTLCQKYVATAIHKVRHAWKQMYIIHYMDDILIAGKDGQQV |
| | | | | | LQCFDQLKQELTIAGLHIAPEKIQLQDPYTYLGFELNGPKITNQKAVIRK |
| | | | | | DKLQTLNDFQKLLGDINWLRPYLKLTTADLKPLFDTLKGDSNPNSHRSLS |
| | | | | | KEALALLDKVETAIAEQFVTHINYSLPLMFLIFNTALTPTGLFWQNNPIM |
| | | | | | WVHLPASPKKVLLPYYDAIADLIILGRDHSKKYFGIEPSVIIQPYSKSQI |
| | | | | | DWLMQNTEMWPIACASYVGILDNHYPPNKLIQFCKLHAFIFPQIISKTPL |
| | | | | | NNALLVFTDGSSTGMAAYTLADTTIKFQTNLNSAQLVELQALIAVLSAFP |
| | | | | | NQPLNIYTDSAYLAHSIPLLETVAQIKHISETAKLFLQCQQLIYNRSIPF |
| | | | | | YIGHVRAHSGLPGPIAHGNQKADLATKTVASNINT |
| SRV2_ | SRV2 | P51517 | root | 3251 | LATAVDILAPQRYADPITWKSDEPVWVDQWPLTQEKLAAAQQLVQEQLQA |
| P51517 | | | | | GHIIESNSPWNTPIFVIKKKSGKWRLLQDLRAVNATMVLMGALQPGLPSP |
| | | | | | VAIPQGYFKIVIDLKDCFFTIPLQPVDQKRFAFSLPSTNFKQPMKRYQWK |
| | | | | | VLPQGMANSPTLCQKYVAAAIEPVRKSWAQMYIIHYMDDILIAGKLGEQV |
| | | | | | LQCFAQLKQALTTTGLQIAPEKVQLQDPYTYLGFQINGPKITNQKAVIRR |
| | | | | | DKLQTLNDFQKLLGDINWLRPYLHLTTGDLKPLFDILKGDSNPNSPRSLS |
| | | | | | EAALASLQKVETAIAEQFVTQIDYTQPLTFLIFNTTLTPTGLFWQNNPVM |
| | | | | | WVHLPASPKKVLLPYYDAIADLIILGRDNSKKYFGLEPSTIIQPYSKSQI |
| | | | | | HWLMQNTETWPIACASYAGNIDNHYPPNKLIQFCKLHAVVFPRIISKPLD |
| | | | | | NALLVFTDGSSTGIAAYTFEKTTVRFKTSHTSAQLVELQALIAVLSAFPH |
| | | | | | RALNVYTDSAYLAHSIPLLETVSHIKHISDTAKFFLQCQQLIYNRSIPFY |
| | | | | | LGHIRAHSGLPGPLSQGNHITDLATKVVATTLTT |
| SRV2_ | SRV2 | P51517 | derivative | 3252 | LATAVDILAPQRYADPITWKSDEPVWVDQWPLTQEKLAAAQQLVQEQLQA |
| P51517_ | | | | | GHIIESNSPWNTPIFVIKKKSGKWRLLQDLRAVNATMVLMGALQPGLPSP |
| 2mutB | | | | | VAPPQGYFKIVIDLKDCFFTIPLQPVDQKRFAFSLPSTNFKQPMKRYQWK |
| | | | | | VLPQGMANSPTLCQKYVAAAIEPVRKSWAQMYIIHYMDDILIAGKLGEQV |
| | | | | | LQCFAQLKQALTTTGLQIAPEKVQLQDPYTYLGFQINGPKITNQKAVIRR |
| | | | | | DKLQTLNDFQKLLGDINWLRPYLHLTTGDLKPLFDILKGDSNPNSPRSLS |
| | | | | | EAALASLQKVETAIAEQFVTQIDYTQPLTFLIFNTTLTPTGLFWQNNPVM |
| | | | | | WVHLPASPKKVLLPYYDAIADLIILGRDNSKKYFGLEPSTIIQPYSKSQI |
| | | | | | HWLMQNTETWPIACASYAGNIDNHYPPNKLIQFCKLHAVVFPRIISKTPL |
| | | | | | DNALLVFTDGSSTGIAAYTFEKTTVRFKTSHTSAQLVELQALIAVLSAFP |
| | | | | | HRALNVYTDSAYLAHSIPLLETVSHIKHISDTAKFFLQCQQLIYNRSIPF |
| | | | | | YLGHIRAHSGLPGPLSQGNHITDLATKVVATTLTT |
| WDSV_ | WDSV | O92815 | root | 3253 | SCQTKNTLNIDEYLLQFPDQLWASLPTDIGRMLVPPITIKIKDNASLPSI |
| O92815 | | | | | RQYPLPKDKTEGLRPLISSLENQGILIKCHSPCNTPIFPIKKAGRDEYRM |
| | | | | | IHDLRAINNIVAPLTAVVASPTTVLSNLAPSLHWFTVIDLSNAFFSVPIH |
| | | | | | KDSQYLFAFTFEGHQYTWTVLPQGFIHSPTLFSQALYQSLHKIKFKISSE |
| | | | | | ICIYMDDVLIASKDRDTNLKDTAVMLQHLASEGHKVSKKKLQLCQQEVVY |
| | | | | | LGQLLTPEGRKILPDRKVTVSQFQQPTTIRQIRAFLGLVGYCRHWIPEFS |
| | | | | | IHSKFLEKQLKKDTAEPFQLDDQQVEAFNKLKHAITTAPVLVVPDPAKPF |
| | | | | | QLYTSHSEHASIAVLTQKHAGRTRPIAFLSSKFDAIESGLPPCLKACASI |
| | | | | | HRSLTQADSFILGAPLIIYTTHAICTLLQRDRSQLVTASRFSKWEADLLR |
| | | | | | PELTFVACSAVSPAHLYMQSCENNIPPHDCVLLTHTISRPRPDLSDLPIP |
| | | | | | DPDMTLFSDGSYTTGRGGAAVVMHRPVTDDFIIIHQQPGGASAQTAELLA |
| | | | | | LAAACHLATDKTVNIYTDSRYAYGVVHDFGHLWMHRGFVTSAGTPIKNHK |
| | | | | | EIEYLLKQIMKPKQVSVIKIEAHTKGVSMEVRGNAAADEAAKNAVFLVQR |
| WDSV_ | WDSV | O92815 | derivative | 3254 | SCQTKNTLNIDEYLLQFPDQLWASLPTDIGRMLVPPITIKIKDNASLPSI |
| O92815_ | | | | | RQYPLPKDKTEGLRPLISSLENQGILIKCHSPCNTPIFPIKKAGRDEYRM |
| 2mut | | | | | IHDLRAINNIVAPLTAVVASPTTVLSNLAPSLHWFTVIDLSNAFFSVPIH |
| | | | | | KDSQYLFAFTFEGHQYTWTVLPQGFIHSPTLFNQALYQSLHKIKFKISSE |
| | | | | | ICIYMDDVLIASKDRDTNLKDTAVMLQHLASEGHKVSKKKLQLCQQEVVY |
| | | | | | LGQLLTPEGRKILPDRKVTVSQFQQPTTIRQIRAFLGLVGYCRHWIPEFS |
| | | | | | IHSKFLEKQLKPDTAEPFQLDDQQVEAFNKLKHAITTAPVLVVPDPAKPF |
| | | | | | QLYTSHSEHASIAVLTQKHAGRTRPIAFLSSKFDAIESGLPPCLKACASI |
| | | | | | HRSLTQADSFILGAPLIIYTTHAICTLLQRDRSQLVTASRFSKWEADLLR |
| | | | | | PELTFVACSAVSPAHLYMQSCENNIPPHDCVLLTHTISRPRPDLSDLPIP |
| | | | | | DPDMTLFSDGSYTTGRGGAAVVMHRPVTDDFIIIHQQPGGASAQTAELLA |
| | | | | | LAAACHLATDKTVNIYTDSRYAYGVVHDFGHLWMHRGFVTSAGTPIKNHK |
| | | | | | EIEYLLKQIMKPKQVSVIKIEAHTKGVSMEVRGNAAADEAAKNAVFLVQR |
| WDSV_ | WDSV | O92815 | derivative | 3255 | SCQTKNTLNIDEYLLQFPDQLWASLPTDIGRMLVPPITIKIKDNASLPSI |
| O92815_ | | | | | RQYPLPKDKTEGLRPLISSLENQGILIKCHSPCNTPIFPIKKAGRDEYRM |
| 2mutA | | | | | IHDLRAINNIVAPLTAVVASPTTVLSNLAPSLHWFTVIDLSNAFFSVPIH |
| | | | | | KDSQYLFAFTFEGHQYTWTVLPQGFIHSPTLFNQALYQSLHKIKFKISSE |
| | | | | | ICIYMDDVLIASKDRDTNLKDTAVMLQHLASEGHKVSKKKLQLCQQEVVY |
| | | | | | LGQLLTPEGRKILPDRKVTVSQFQQPTTIRQIRAFLGKVGYCRHFIPEFS |
| | | | | | IHSKFLEKQLKPDTAEPFQLDDQQVEAFNKLKHAITTAPVLVVPDPAKPF |
| | | | | | QLYTSHSEHASIAVLTQKHAGRTRPIAFLSSKFDAIESGLPPCLKACASI |
| | | | | | HRSLTQADSFILGAPLIIYTTHAICTLLQRDRSQLVTASRFSKWEADLLR |
| | | | | | PELTFVACSAVSPAHLYMQSCENNIPPHDCVLLTHTISRPRPDLSDLPIP |
| | | | | | DPDMTLFSDGSYTTGRGGAAVVMHRPVTDDFIIIHQQPGGASAQTAELLA |
| | | | | | LAAACHLATDKTVNIYTDSRYAYGVVHDFGHLWMHRGFVTSAGTPIKNHK |
| | | | | | EIEYLLKQIMKPKQVSVIKIEAHTKGVSMEVRGNAAADEAAKNAVFLVQR |
| WMSV_ | WMSV | P03359 | root | 3256 | VLNLEEEYRLHEKPVPSSIDPSWLQLFPTVWAERAGMGLANQVPPVVVEL |
| P03359 | | | | | RSGASPVAVRQYPMSKEAREGIRPHIQRFLDLGVLVPCQSPWNTPLLPVK |
| | | | | | KPGTNDYRPVQDLREINKRVQDIHPTVPNPYNLLSSLPPSHTWYSVLDLK |
| | | | | | DAFFCLKLHPNSQPLFAFEWRDPEKGNTGQLTWTRLPQGFKNSPTLFDEA |
| | | | | | LHRDLAPFRALNPQVVLLQYVDDLLVAAPTYRDCKEGTQKLLQELSKLGY |
| | | | | | RVSAKKAQLCQKEVTYLGYLLKEGKRWLTPARKATVMKIPPPTTPRQVRE |
| | | | | | FLGTAGFCRLWIPGFASLAAPLYPLTKESIPFIWTEEHQKAFDRIKEALL |
| | | | | | SAPALALPDLTKPFTLYVDERAGVARGVLTQTLGPWRRPVAYLSKKLDPV |
| | | | | | ASGWPTCLKAVAAVALLLKDADKLTLGQNVTVIASHSLESIVRQPPDRWM |
| | | | | | TNARMTHYQSLLLNERVSFAPPAVLNPATLLPVESEATPVHRCSEILAEE |
| | | | | | TGTRRDLKDQPLPGVPAWYTDGSSFIAEGKRRAGAAIVDGKRTVWASSLP |
| | | | | | EGTSAQKAELVALTQALRLAEGKDINIYTDSRYAFATAHIHGAIYKQRGL |
| | | | | | LTSAGKDIKNKEEILALLEAIHLPKRVAIIHCPGHQKGNDPVATGNRRAD |
| | | | | | EAAKQAALSTRVLAETTKP |
| WMSV_ | WMSV | P03359 | derivative | 3257 | VLNLEEEYRLHEKPVPSSIDPSWLQLFPTVWAERAGMGLANQVPPVVVEL |
| P03359_ | | | | | RSGASPVAVRQYPMSKEAREGIRPHIQRFLDLGVLVPCQSPWNTPLLPVK |
| 3mut | | | | | KPGTNDYRPVQDLREINKRVQDIHPTVPNPYNLLSSLPPSHTWYSVLDLK |
| | | | | | DAFFCLKLHPNSQPLFAFEWRDPEKGNTGQLTWTRLPQGFKNSPTLFNEA |
| | | | | | LHRDLAPFRALNPQVVLLQYVDDLLVAAPTYRDCKEGTQKLLQELSKLGY |
| | | | | | RVSAKKAQLCQKEVTYLGYLLKEGKRWLTPARKATVMKIPPPTTPRQVRE |
| | | | | | FLGTAGFCRLWIPGFASLAAPLYPLTKPSIPFIWTEEHQKAFDRIKEALL |
| | | | | | SAPALALPDLTKPFTLYVDERAGVARGVLTQTLGPWRRPVAYLSKKLDPV |
| | | | | | ASGWPTCLKAVAAVALLLKDADKLTLGQNVTVIASHSLESIVRQPPDRWM |
| | | | | | TNARMTHYQSLLLNERVSFAPPAVLNPATLLPVESEATPVHRCSEILAEE |
| | | | | | TGTRRDLKDQPLPGVPAWYTDGSSFIAEGKRRAGAAIVDGKRTVWASSLP |
| | | | | | EGTSAQKAELVALTQALRLAEGKDINIYTDSRYAFATAHIHGAIYKQRGW |
| | | | | | LTSAGKDIKNKEEILALLEAIHLPKRVAIIHCPGHQKGNDPVATGNRRAD |
| | | | | | EAAKQAALSTRVLAETTKP |
| WMSV_ | WMSV | P03359 | derivative | 3258 | VLNLEEEYRLHEKPVPSSIDPSWLQLFPTVWAERAGMGLANQVPPVVVEL |
| P03359_ | | | | | RSGASPVAVRQYPMSKEAREGIRPHIQRFLDLGVLVPCQSPWNTPLLPVK |
| 3mutA | | | | | KPGTNDYRPVQDLREINKRVQDIHPTVPNPYNLLSSLPPSHTWYSVLDLK |
| | | | | | DAFFCLKLHPNSQPLFAFEWRDPEKGNTGQLTWTRLPQGFKNSPTLFNEA |
| | | | | | LHRDLAPFRALNPQVVLLQYVDDLLVAAPTYRDCKEGTQKLLQELSKLGY |
| | | | | | RVSAKKAQLCQKEVTYLGYLLKEGKRWLTPARKATVMKIPPPTTPRQVRE |
| | | | | | FLGKAGFCRLFIPGFASLAAPLYPLTKPSIPFIWTEEHQKAFDRIKEALL |
| | | | | | SAPALALPDLTKPFTLYVDERAGVARGVLTQTLGPWRRPVAYLSKKLDPV |
| | | | | | ASGWPTCLKAVAAVALLLKDADKLTLGQNVTVIASHSLESIVRQPPDRWM |
| | | | | | TNARMTHYQSLLLNERVSFAPPAVLNPATLLPVESEATPVHRCSEILAEE |
| | | | | | TGTRRDLKDQPLPGVPAWYTDGSSFIAEGKRRAGAAIVDGKRTVWASSLP |
| | | | | | EGTSAQKAELVALTQALRLAEGKDINIYTDSRYAFATAHIHGAIYKQRGW |
| | | | | | LTSAGKDIKNKEEILALLEAIHLPKRVAIIHCPGHQKGNDPVATGNRRAD |
| | | | | | EAAKQAALSTRVLAETTKP |
| XMRV6_ | XMRV6 | A1Z651 | root | 3259 | TLNIEDEYRLHETSKEPDVPLGSTWLSDFPQAWAETGGMGLAVRQAPLII |
| A1Z651 | | | | | PLKATSTPVSIKQYPMSQEARLGIKPHIQRLLDQGILVPCQSPWNTPLLP |
| | | | | | VKKPGTNDYRPVQDLREVNKRVEDIHPTVPNPYNLLSGLPPSHQWYTVLD |
| | | | | | LKDAFFCLRLHPTSQPLFAFEWRDPEMGISGQLTWTRLPQGFKNSPTLFD |
| | | | | | EALHRDLADFRIQHPDLILLQYVDDLLLAATSEQDCQRGTRALLQTLGNL |
| | | | | | GYRASAKKAQICQKQVKYLGYLLKEGQRWLTEARKETVMGQPTPKTPRQL |
| | | | | | REFLGTAGFCRLWIPGFAEMAAPLYPLTKTGTLFNWGPDQQKAYQEIKQA |
| | | | | | LLTAPALGLPDLTKPFELFVDEKQGYAKGVLTQKLGPWRRPVAYLSKKLD |
| | | | | | PVAAGWPPCLRMVAAIAVLTKDAGKLTMGQPLVILAPHAVEALVKQPPDR |
| | | | | | WLSNARMTHYQAMLLDTDRVQFGPVVAL |
| | | | | | NPATLLPLPEKEAPHDCLEILAETHGTRPDLTDQPIPDADYTWYTDGSSF |
| | | | | | LQEGQRRAGAAVTTETEVIWARALPAGTSAQRAELIALTQALKMAEGKKL |
| | | | | | NVYTDSRYAFATAHVHGEIYRRRGLLTSEGREIKNKNEILALLKALFLPK |
| | | | | | RLSIIHCPGHQKGNSAEARGNRMADQAAREAAMKAVLETSTLL |
| XMRV6_ | XMRV6 | A1Z651 | derivative | 3260 | TLNIEDEYRLHETSKEPDVPLGSTWLSDFPQAWAETGGMGLAVRQAPLII |
| A1Z651_ | | | | | PLKATSTPVSIKQYPMSQEARLGIKPHIQRLLDQGILVPCQSPWNTPLLP |
| 3mut | | | | | VKKPGTNDYRPVQDLREVNKRVEDIHPTVPNPYNLLSGLPPSHQWYTVLD |
| | | | | | LKDAFFCLRLHPTSQPLFAFEWRDPEMGISGQLTWTRLPQGFKNSPTLFN |
| | | | | | EALHRDLADFRIQHPDLILLQYVDDLLLAATSEQDCQRGTRALLQTLGNL |
| | | | | | GYRASAKKAQICQKQVKYLGYLLKEGQRWLTEARKETVMGQPTPKTPRQL |
| | | | | | REFLGTAGFCRLWIPGFAEMAAPLYPLTKPGTLFNWGPDQQKAYQEIKQA |
| | | | | | LLTAPALGLPDLTKPFELFVDEKQGYAKGVLTQKLGPWRRPVAYLSKKLD |
| | | | | | PVAAGWPPCLRMVAAIAVLTKDAGKLTMGQPLVILAPHAVEALVKQPPDR |
| | | | | | WLSNARMTHYQAMLLDTDRVQFGPVVALNPATLLPLPEKEAPHDCLEILA |
| | | | | | ETHGTRPDLTDQPIPDADYTWYTDGSSFLQEGQRRAGAAVTTETEVIWAR |
| | | | | | ALPAGTSAQRAELIALTQALKMAEGKKLNVYTDSRYAFATAHVHGEIYRR |
| | | | | | RGWLTSEGREIKNKNEILALLKALFLPKRLSIIHCPGHQKGNSAEARGNR |
| | | | | | MADQAAREAAMKAVLETSTLL |
| XMRV6_ | XMRV6 | A1Z651 | derivative | 3261 | TLNIEDEYRLHETSKEPDVPLGSTWLSDFPQAWAETGGMGLAVRQAPLIIP |
| A1Z651_ | | | | | LKATSTPVSIKQYPMSQEARLGIKPHIQRLLDQGILVPCQSPWNTPLLPV |
| 3mut | | | | | KKPGTNDYRPVQDLREVNKRVEDIHPTVPNPYNLLSGLPPSHQWYTVLDL |
| | | | | | KDAFFCLRLHPTSQPLFAFEWRDPEMGISGQLTWTRLPQGFKNSPTLFNE |
| | | | | | ALHRDLADFRIQHPDLILLQYVDDLLLAATSEQDCQRGTRALLQTLGNLG |
| | | | | | YRASAKKAQICQKQVKYLGYLLKEGQRWLTEARKETVMGQPTPKTPRQLR |
| | | | | | EFLGKAGFCRLFIPGFAEMAAPLYPLTKPGTLFNWGPDQQKAYQEIKQAL |
| | | | | | LTAPALGLPDLTKPFELFVDEKQGYAKGVLTQKLGPWRRPVAYLSKKLDP |
| | | | | | VAAGWPPCLRMVAAIAVLTKDAGKLTMGQPLVILAPHAVEALVKQPPDRW |
| | | | | | LSNARMTHYQAMLLDTDRVQFGPVVALNPATLLPLPEKEAPHDCLEILAE |
| | | | | | THGTRPDLTDQPIPDADYTWYTDGSSFLQEGQRRAGAAVTTETEVIWARA |
| | | | | | LPAGTSAQRAELIALTQALKMAEGKKLNVYTDSRYAFATAHVHGEIYRRR |
| | | | | | GWLTSEGREIKNKNEILALLKALFLPKRLSIIHCPGHQKGNSAEARGNRM |
| | | | | | ADQAAREAAMKAVLETSTLL |

[0551] In some embodiments, reverse transcriptase domains are modified, for example by site-specific mutation. In some embodiments, reverse transcriptase domains are engineered to have improved properties, e.g. SuperScript IV (SSIV) reverse transcriptase derived from the MMLV RT. In some embodiments, the reverse transcriptase domain may be engineered to have lower error rates, e.g., as described in WO2001068895, incorporated herein by reference. In some embodiments, the reverse transcriptase domain may be engineered to be more thermostable. In some embodiments, the reverse transcriptase domain may be engineered to be more processive. In some embodiments, the reverse transcriptase domain may be engineered to have tolerance to inhibitors. In some embodiments, the reverse transcriptase domain may be engineered to be faster. In some embodiments, the reverse transcriptase domain may be engineered to better tolerate modified nucleotides in the RNA template. In some embodiments, the reverse transcriptase domain may be engineered to insert modified DNA nucleotides. In some embodiments, the reverse transcriptase domain is engineered to bind a template RNA. In some embodiments, one or more mutations are chosen from D200N, L603W, T330P, D524G, E562Q, D583N, P51L, S67R, E67K, T197A, H204R, E302K, F309N, W313F, L435G, N454K, H594Q, L671P, E69K, or D653N in the RT domain of murine leukemia virus reverse transcriptase or a corresponding mutation at a corresponding position of another RT domain. In some embodiments, one or more mutations are chosen as described in WO2018089860A1, incorporated herein by reference (e.g., a C952S, and/or C956S, and/or C952S, C956S (double mutant), and/or C969S, and/or H970Y, and/or R979Q, and/or R976Q, and/or R1071S, and/or R328A, and/or R329A, and/or Q336A, and/or R328A, R329A, Q336A (triple mutant), and/or G426A, and/or D428A, and/or G426A, D428A (double mutant) mutation, and/or any combination thereof; positions relative to WO2018089860A1 SEQ ID NO: 52), in the RT domain of R2Bm retrotransposase or a corresponding mutation at a corresponding position of another RT domain.

[0552] In some embodiments, the RT domain possesses proofreading activity. In some embodiments, the RT domain is evolved from a DNA-dependent DNA polymerase and has gained RNA-dependent DNA polymerase activity. The synthetic evolved proofreading RT known as reverse transcription xenopolymerase (RTX, Genbank: QFN49000.1) was previously generated by taking a DNA-dependent DNA polymerase (KOD, Genbank: ABN15964.1) and selecting for RNA-dependent DNA polymerase activity (Ellefson et al 2016). In some embodiments, the engineered RT may comprise DNA-dependent DNA polymerase signatures as the result of the wild-type enzyme, e.g., IPR006134, PF00136, cd05536.

[0553] In some embodiments, the reverse transcription domain only recognizes and reverse transcribes a specific template. In some embodiments, the template comprises of specific sequences. In some embodiments, the template comprises inclusion of a UTR that associates the nucleic acid with the reverse transcriptase domain (e.g. an untranslated region (UTR) from a retrotransposon, e.g. the 3′ UTR of an R2 retrotransposon).

[0554] The writing domain may also comprise DNA-dependent DNA polymerase activity, e.g., comprise enzymatic activity capable of writing DNA into the genome from a template DNA sequence. In some embodiments, the DNA-dependent DNA polymerase activity is provided by a DNA polymerase domain in the polypeptide. In some embodiments, the DNA-dependent DNA polymerase activity is provided by a reverse transcriptase domain that is also capable of DNA-dependent DNA polymerization, e.g., second strand synthesis.

[0555] In some embodiments, a writing domain (e.g., RT domain) comprises an RNA-binding domain, e.g., that specifically binds to an RNA sequence. In some embodiments, a template RNA comprises an RNA sequence that is specifically bound by the RNA-binding domain of the writing domain.

[0556] In contrast to other types of reverse transcription machines, e.g., retroviral RTs and LTR retrotransposons, reverse transcription in non-LTR retrotransposons like R2 is performed only on RNA templates containing specific recognition sequences. The R2 retrotransposase requires its template to contain a minimal 3′ UTR region in order to initiate TPRT (Luan and Eickbush Mol Cell Biol 15, 3882-91 (1995)). In some embodiments, the Gene Writer polypeptide is derived from a retrotransposase with a required binding motif and the template RNA is designed to contain said binding motif, such that there is specific retrotransposition of only the desired template. In some embodiments, the Gene Writer polypeptide is derived from a retrotransposon selected from Table 3 and the 3′ UTR on the RNA template comprises the 3′ UTR from the same retrotransposon in Table 3.

[0557] Template Nucleic Acid Binding Domain:

[0558] The Gene Writer™ polypeptide typically contains regions capable of associating with the Gene Writer™ template nucleic acid (e.g., template RNA). In some embodiments, the template nucleic acid binding domain is an RNA binding domain. In some embodiments, the RNA binding domain is a modular domain that can associate with RNA molecules containing specific signatures, e.g., structural motifs, e.g., secondary structures present in the 3′ UTR in non-LTR retrotransposons. In other embodiments, the template nucleic acid binding domain (e.g., RNA binding domain) is contained within the reverse transcription domain, e.g., the reverse transcriptase-derived component has a known signature for RNA preference, e.g., secondary structures present in the 3′ UTR in non-LTR retrotransposons. In other embodiments, the template nucleic acid binding domain (e.g., RNA binding domain) is contained within the DNA binding domain. For example, in some embodiments, the DNA binding domain is a CRISPR-associated protein that recognizes the structure of a template nucleic acid (e.g., template RNA) comprising a gRNA. In some embodiments, the gRNA is a short synthetic RNA composed of a scaffold sequence that participates in CRISPR-associated protein binding and a user-defined ˜20 nucleotide targeting sequence for a genomic target. The structure of a complete gRNA was described by Nishimasu et al. Cell 156, P 935-949 (2014). The gRNA (also referred to as sgRNA for single-guide RNA) consists of crRNA- and tracrRNA-derived sequences connected by an artificial tetraloop. The crRNA sequence can be divided into guide (20 nt) and repeat (12 nt) regions, whereas the tracrRNA sequence can be divided into anti-repeat (14 nt) and three tracrRNA stem loops (Nishimasu et al. Cell 156, P 935-949 (2014)). In practice, guide RNA sequences are generally designed to have a length of between 17-24 nucleotides (e.g., 19, 20, or 21 nucleotides) and be complementary to a targeted nucleic acid sequence. Custom gRNA generators and algorithms are available commercially for use in the design of effective guide RNAs. In some embodiments, the gRNA comprises two RNA components from the native CRISPR system, e.g. crRNA and tracrRNA. As is well known in the art, the gRNA may also comprise a chimeric, single guide RNA (sgRNA) containing sequence from both a tracrRNA (for binding the nuclease) and at least one crRNA (to guide the nuclease to the sequence targeted for editing/binding). Chemically modified sgRNAs have also been demonstrated to be effective for use with CRISPR-associated proteins; see, for example, Hendel et al. (2015) Nature Biotechnol., 985-991. In some embodiments, a gRNA comprises a nucleic acid sequence that is complementary to a DNA sequence associated with a target gene. In some embodiments, a polypeptide comprises a DNA-binding domain comprising a CRISPR-associated protein that associates with a gRNA that allows the DNA-binding domain to bind a target genomic DNA sequence. In some embodiments, the gRNA is comprised within the template nucleic acid (e.g., template RNA), thus the DNA-binding domain is also the template nucleic acid binding domain. In some embodiments, the polypeptide possesses RNA binding function in multiple domains, e.g., can bind a gRNA structure in a CRISPR-associated DNA binding domain and a 3′ UTR structure in a non-LTR retrotransposon derived reverse transcription domain.

[0559] Endonuclease Domain:

[0560] In some embodiments, a Gene Writer™ polypeptide possesses the function of DNA target site cleavage via an endonuclease domain. In some embodiments, the endonuclease domain is also a DNA-binding domain. In some embodiments, the endonuclease domain is also a template nucleic acid (e.g., template RNA) binding domain. For example, in some embodiments a polypeptide comprises a CRISPR-associated endonuclease domain that binds a template RNA comprising a gRNA, binds a target DNA sequence (e.g., with complementarity to a portion of the gRNA), and cuts the target DNA sequence. In certain embodiments, the endonuclease/DNA binding domain of an APE-type retrotransposon or the endonuclease domain of an RLE-type retrotransposon can be used or can be modified (e.g., by insertion, deletion, or substitution of one or more residues) in a Gene Writer™ system described herein. In some embodiments the endonuclease domain or endonuclease/DNA binding domain is altered from its natural sequence to have altered codon usage, e.g. improved for human cells. In some embodiments the endonuclease element is a heterologous endonuclease element, such as Fok1 nuclease, a type-II restriction 1-like endonuclease (RLE-type nuclease), or another RLE-type endonuclease (also known as REL). In some embodiments the heterologous endonuclease activity has nickase activity and does not form double stranded breaks. The amino acid sequence of an endonuclease domain of a Gene Writer™ system described herein may be at least about 50%, at least about 60%, at least about 70%, at least about 80%, at least about 85%, at least about 90%, at least about 95%, at least about 96%, at least about 97%, at least about 98%, at least about 99% identical to the amino acid sequence of an endonuclease domain of a retrotransposon whose DNA sequence is referenced in Table 1 or 3. A person having ordinary skill in the art is capable of identifying endonuclease domains based upon homology to other known endonuclease domains using tools such as Basic Local Alignment Search Tool (BLAST). In certain embodiments, the heterologous endonuclease is Fok1 or a functional fragment thereof. In certain embodiments, the heterologous endonuclease is a Holliday junction resolvase or homolog thereof, such as the Holliday junction resolving enzyme from Sulfolobus solfataricus—Ssol Hje (Govindaraju et al., Nucleic Acids Research 44:7, 2016). In certain embodiments, the heterologous endonuclease is the endonuclease of the large fragment of a spliceosomal protein, such as Prp8 (Mahbub et al., Mobile DNA 8:16, 2017). In certain embodiments, the heterologous endonuclease is derived from a CRISPR-associated protein, e.g., Cas9. In certain embodiments, the heterologous endonuclease is engineered to have only ssDNA cleavage activity, e.g., only nickase activity, e.g., be a Cas9 nickase. For example, a Gene Writer™ polypeptide described herein may comprise a reverse transcriptase domain from an APE- or RLE-type retrotransposon and an endonuclease domain that comprises Fok1 or a functional fragment thereof. In still other embodiments, homologous endonuclease domains are modified, for example by site-specific mutation, to alter DNA endonuclease activity. In still other embodiments, endonuclease domains are modified to remove any latent DNA-sequence specificity.

[0561] In some embodiments the endonuclease domain has nickase activity and does not form double stranded breaks. In some embodiments, the endonuclease domain forms single stranded breaks at a higher frequency than double stranded breaks, e.g., at least 90%, 95%, 96%, 97%, 98%, or 99% of the breaks are single stranded breaks, or less than 10%, 5%, 4%, 3%, 2%, or 1% of the breaks are double stranded breaks. In some embodiments, the endonuclease forms substantially no double stranded breaks. In some embodiments, the endonuclease does not form detectable levels of double stranded breaks.

[0562] In some embodiments, the endonuclease domain has nickase activity that nicks the target site DNA of the first strand; e.g., in some embodiments, the endonuclease domain cuts the genomic DNA of the target site near to the site of alteration on the strand that will be extended by the writing domain. In some embodiments, the endonuclease domain has nickase activity that nicks the target site DNA of the first strand and does not nick the target site DNA of the second strand. For example, when a polypeptide comprises a CRISPR-associated endonuclease domain having nickase activity and that does not form double stranded breaks, in some embodiments said CRISPR-associated endonuclease domain nicks the target site DNA strand containing the PAM site (e.g., and does not nick the target site DNA strand that does not contain the PAM site). As a further example, when a polypeptide comprises a CRISPR-associated endonuclease domain having nickase activity and that does not form double stranded breaks, in some embodiments said CRISPR-associated endonuclease domain nicks the target site DNA strand not containing the PAM site (e.g., and does not nick the target site DNA strand that contains the PAM site).

[0563] In some other embodiments, the endonuclease domain has nickase activity that nicks the target site DNA of the first strand and the second strand. Without wishing to be bound by theory, after a writing domain (e.g., RT domain) of a polypeptide described herein polymerizes (e.g., reverse transcribes) from the heterologous object sequence of a template nucleic acid (e.g., template RNA), the cellular DNA repair machinery must repair the nick on the first DNA strand. The target site DNA now contains two different sequences for the first DNA strand: one corresponding to the original genomic DNA and a second corresponding to that polymerized from the heterologous object sequence. It is thought that the two different sequences equilibrate with one another, first one hybridizing the second strand, then the other, and which the cellular DNA repair apparatus incorporates into its repaired target site is thought to be random. Without wishing to be bound by theory, it is thought that introducing an additional nick to the second strand may bias the cellular DNA repair machinery to adopt the heterologous object sequence-based sequence more frequently than the original genomic sequence. In some embodiments, the additional nick is positioned at least 10, 15, 20, 25, 30, 35, 40, 45, 50, 55, 60, 65, 70, 75, 80, 85, 90, 95, 100, 105, 110, 115, 120, 125, 130, 135, 140, 145, or 150 nucleotides 5′ or 3′ of the target site modification (e.g., the insertion, deletion, or substitution) or to the nick on the first strand.

[0564] Alternatively or additionally, without wishing to be bound by theory, it is thought that an additional nick to the second strand may promote second strand synthesis. In some embodiments, where the Gene Writer™ has inserted or substituted a portion of the first strand, synthesis of a new sequence corresponding to the insertion/substitution in the second strand is necessary.

[0565] In some embodiments, the polypeptide comprises a single domain having endonuclease activity (e.g., a single endonuclease domain) and said domain nicks both the first strand and the second strand. For example, in such an embodiment the endonuclease domain may be a CRISPR-associated endonuclease domain, and the template nucleic acid (e.g., template RNA) comprises a gRNA that directs nicking of the first strand and an additional gRNA that directs nicking of the second strand. In some embodiments, the polypeptide comprises a plurality of domains having endonuclease activity, and a first endonuclease domain nicks the first strand and a second endonuclease domain nicks the second strand (optionally, the first endonuclease domain does not (e.g., cannot) nick the second strand and the second endonuclease domain does not (e.g., cannot) nick the first strand).

[0566] In some embodiments, the endonuclease domain is capable of nicking a first strand and a second strand. In some embodiments, the first and second strand nicks occur at the same position in the target site but on opposite strands. In some embodiments, the second strand nick occurs in a staggered location, e.g., upstream or downstream, from the first nick. In some embodiments, the endonuclease domain generates a target site deletion if the second strand nick is upstream of the first strand nick. In some embodiments, the endonuclease domain generates a target site duplication if the second strand nick is downstream of the first strand nick. In some embodiments, the endonuclease domain generates no duplication and/or deletion if the first and second strand nicks occur in the same position of the target site (e.g., as described in Gladyshev and Arkhipova Gene 2009, incorporated by reference herein in its entirety). In some embodiments, the endonuclease domain has altered activity depending on protein conformation or RNA-binding status, e.g., which promotes the nicking of the first or second strand (e.g., as described in Christensen et al. PNAS 2006; incorporated by reference herein in its entirety).

[0567] In some embodiments, a Gene Writer polypeptide comprises a modification to an endonuclease domain, e.g., relative to the wild-type polypeptide. In some embodiments, the endonuclease domain comprises an addition, deletion, replacement, or modification to the amino acid sequence of the original endonuclease domain. In some embodiments, the endonuclease domain is modified to include a heterologous functional domain that binds specifically to and/or induces endonuclease cleavage of a target nucleic acid (e.g., DNA) sequence of interest. In some embodiments, the endonuclease domain comprises a zinc finger. In some embodiments, the endonuclease domain comprises a Cas domain (e.g., a Cas9 or a mutant or variant thereof). In embodiments, the endonuclease domain comprising the Cas domain is associated with a guide RNA (gRNA), e.g., as described herein. In some embodiments, the endonuclease domain is modified to include a functional domain that does not target a specific target nucleic acid (e.g., DNA) sequence. In embodiments, the endonuclease domain comprises a FokI domain.

[0568] In some embodiments, the endonuclease domain comprises a meganuclease, or a functional fragment thereof. In some embodiments, the endonuclease domain comprises a homing endonuclease, or a functional fragment thereof. In some embodiments, the endonuclease domain comprises a meganuclease from the LAGLIDADG (SEQ ID NO: 1577), GIY-YIG, HNH, His-Cys Box, or PD-(D/E) XK families, or a functional fragment or variant thereof, e.g., which possess conserved amino acid motifs, e.g., as indicated in the family names. In some embodiments, the endonuclease domain comprises a meganuclease, or fragment thereof, chosen from, e.g., I-SmaMI (Uniprot F7WD42), I-SceI (Uniprot P03882), I-AniI (Uniprot P03880), I-DmoI (Uniprot P21505), I-CreI (Uniprot P05725), I-TevI (Uniprot P13299), I-OnuI (Uniprot Q4VWW5), or I-BmoI (Uniprot Q9ANR6). In some embodiments, the meganuclease is naturally monomeric, e.g., I-SceI, I-TevI, or dimeric, e.g., I-CreI, in its functional form. For example, the LAGLIDADG (SEQ ID NO: 1577) meganucleases with a single copy of the LAGLIDADG motif (SEQ ID NO: 1577) generally form homodimers, whereas members with two copies of the LAGLIDADG motif (SEQ ID NO: 1577) are generally found as monomers. In some embodiments, a meganuclease that normally forms as a dimer is expressed as a fusion, e.g., the two subunits are expressed as a single ORF and, optionally, connected by a linker, e.g., an I-CreI dimer fusion (Rodriguez-Fornes et al. Gene Therapy 2020; incorporated by reference herein in its entirety). In some embodiments, a meganuclease, or a functional fragment thereof, is altered to favor nickase activity for one strand of a double-stranded DNA molecule, e.g., I-SceI (K122I and/or K223I) (Niu et al. J Mol Biol 2008), I-AniI (K227M) (McConnell Smith et al. PNAS 2009), I-DmoI (Q42A and/or K120M) (Molina et al. J Biol Chem 2015). In some embodiments, a meganuclease or functional fragment thereof possessing this preference for single-strand cleavage is used as an endonuclease domain, e.g., with nickase activity. In some embodiments, an endonuclease domain comprises a meganuclease, or a functional fragment thereof, which naturally targets or is engineered to target a safe harbor site, e.g., an I-CreI targeting SH6 site (Rodriguez-Fornes et al., supra). In some embodiments, an endonuclease domain comprises a meganuclease, or a functional fragment thereof, with a sequence tolerant catalytic domain, e.g., I-TevI recognizing the minimal motif CNNNG (Kleinstiver et al. PNAS 2012). In some embodiments, a target sequence tolerant catalytic domain is fused to a DNA binding domain, e.g., to direct activity, e.g., by fusing I-TevI to: (i) zinc fingers to create Tev-ZFEs (Kleinstiver et al. PNAS 2012), (ii) other meganucleases to create MegaTevs (Wolfs et al. Nucleic Acids Res 2014), and/or (iii) Cas9 to create TevCas9 (Wolfs et al. PNAS 2016).

[0569] In some embodiments, the endonuclease domain comprises a restriction enzyme, e.g., a Type IIS or Type IIP restriction enzyme. In some embodiments, the endonuclease domain comprises a Type IIS restriction enzyme, e.g., FokI, or a fragment or variant thereof. In some embodiments, the endonuclease domain comprises a Type IIP restriction enzyme, e.g., PvuII, or a fragment or variant thereof. In some embodiments, a dimeric restriction enzyme is expressed as a fusion such that it functions as a single chain, e.g., a FokI dimer fusion (Minczuk et al. Nucleic Acids Res 36(12):3926-3938 (2008)).

[0570] The use of additional endonuclease domains is described, for example, in Guha and Edgell Int J Mol Sci 18(22):2565 (2017), which is incorporated herein by reference in its entirety.

[0571] In some embodiments, an endonuclease domain comprises a CRISPR/Cas domain (also referred to herein as a CRISPR-associated protein). In some embodiments, a DNA-binding domain comprises a CRISPR/Cas domain. In some embodiments, a CRISPR/Cas domain comprises a protein involved in the clustered regulatory interspaced short palindromic repeat (CRISPR) system, e.g., a Cas protein, and optionally binds a guide RNA, e.g., single guide RNA (sgRNA).

[0572] CRISPR systems are adaptive defense systems originally discovered in bacteria and archaea. CRISPR systems use RNA-guided nucleases termed CRISPR-associated or “Cas” endonucleases (e. g., Cas9 or Cpf1) to cleave foreign DNA. For example, in a typical CRISPR/Cas system, an endonuclease is directed to a target nucleotide sequence (e. g., a site in the genome that is to be sequence-edited) by sequence-specific, non-coding “guide RNAs” that target single- or double-stranded DNA sequences. Three classes (I-III) of CRISPR systems have been identified. The class II CRISPR systems use a single Cas endonuclease (rather than multiple Cas proteins). One class II CRISPR system includes a type II Cas endonuclease such as Cas9, a CRISPR RNA (“crRNA”), and a trans-activating crRNA (“tracrRNA”). The crRNA contains a “guide RNA”, typically about 20-nucleotide RNA sequence that corresponds to a target DNA sequence. In the wild-type system, and in some engineered systems, crRNA also contains a region that binds to the tracrRNA to form a partially double-stranded structure which is cleaved by RNase III, resulting in a crRNA/tracrRNA hybrid. A crRNA/tracrRNA hybrid then directs Cas9 endonuclease to recognize and cleave a target DNA sequence. A target DNA sequence is generally adjacent to a “protospacer adjacent motif” (“PAM”) that is specific for a given Cas endonuclease; however, PAM sequences appear throughout a given genome. CRISPR endonucleases identified from various prokaryotic species have unique PAM sequence requirements; examples of PAM sequences include 5′-NGG (Streptococcus pyogenes), 5′-NNAGAA (Streptococcus thermophilus CRISPR1), 5′-NGGNG (Streptococcus thermophilus CRISPR3), and 5′-NNNGATT (Neisseria meningitidis). Some endonucleases, e.g., Cas9 endonucleases, are associated with G-rich PAM sites, e. g., 5′-NGG, and perform blunt-end cleaving of the target DNA at a location 3 nucleotides upstream from (5′ from) the PAM site. Another class II CRISPR system includes the type V endonuclease Cpf1, which is smaller than Cas9; examples include AsCpf1 (from Acidaminococcus sp.) and LbCpf1 (from Lachnospiraceae sp.). Cpf1-associated CRISPR arrays are processed into mature crRNAs without the requirement of a tracrRNA; in other words, a Cpf1 system, in some embodiments, comprises only Cpf1 nuclease and a crRNA to cleave a target DNA sequence. Cpf1 endonucleases, are typically associated with T-rich PAM sites, e. g., 5′-TTN. Cpf1 can also recognize a 5′-CTA PAM motif. Cpf1 typically cleaves a target DNA by introducing an offset or staggered double-strand break with a 4- or 5-nucleotide 5′ overhang, for example, cleaving a target DNA with a 5-nucleotide offset or staggered cut located 18 nucleotides downstream from (3′ from) from a PAM site on the coding strand and 23 nucleotides downstream from the PAM site on the complimentary strand; the 5-nucleotide overhang that results from such offset cleavage allows more precise genome editing by DNA insertion by homologous recombination than by insertion at blunt-end cleaved DNA. See, e.g., Zetsche et al. (2015) Cell, 163:759-771.

[0573] A variety of CRISPR associated (Cas) genes or proteins can be used in the technologies provided by the present disclosure and the choice of Cas protein will depend upon the particular conditions of the method. Specific examples of Cas proteins include class II systems including Cas1, Cas2, Cas3, Cas4, Cas5, Cas6, Cas7, Cas8, Cas9, Cas10, Cpf1, C2C1, or C2C3. In some embodiments, a Cas protein, e.g., a Cas9 protein, may be from any of a variety of prokaryotic species. In some embodiments a particular Cas protein, e.g., a particular Cas9 protein, is selected to recognize a particular protospacer-adjacent motif (PAM) sequence. In some embodiments, a DNA-binding domain or endonuclease domain includes a sequence targeting polypeptide, such as a Cas protein, e.g., Cas9. In certain embodiments a Cas protein, e.g., a Cas9 protein, may be obtained from a bacteria or archaea or synthesized using known methods. In certain embodiments, a Cas protein may be from a gram positive bacteria or a gram negative bacteria. In certain embodiments, a Cas protein may be from a Streptococcus (e.g., a S. pyogenes, or a S. thermophilus), a Francisella (e.g., an F. novicida), a Staphylococcus (e.g., an S. aureus), an Acidaminococcus (e.g., an Acidaminococcus sp. BV3L6), a Neisseria (e.g., an N. meningitidis), a Cryptococcus, a Corynebacterium, a Haemophilus, a Eubacterium, a Pasteurella, a Prevotella, a Veillonella, or a Marinobacter.

[0574] In some embodiments, a Cas protein requires a protospacer adjacent motif (PAM) to be present in or adjacent to a target DNA sequence for the Cas protein to bind and/or function. In some embodiments, the PAM is or comprises, from 5′ to 3′, NGG, YG, NNGRRT, NNNRRT, NGA, TYCV, TATV, NTTN, or NNNGATT, where N stands for any nucleotide, Y stands for C or T, R stands for A or G, and V stands for A or C or G. In some embodiments, a Cas protein is a protein listed in Table 4. In some embodiments, a Cas protein comprises one or more mutations altering its PAM. In some embodiments, a Cas protein comprises E1369R, E1449H, and R1556A mutations or analogous substitutions to the amino acids corresponding to said positions. In some embodiments, a Cas protein comprises E782K, N968K, and R1015H mutations or analogous substitutions to the amino acids corresponding to said positions. In some embodiments, a Cas protein comprises D1135V, R1335Q, and T1337R mutations or analogous substitutions to the amino acids corresponding to said positions. In some embodiments, a Cas protein comprises S542R and K607R mutations or analogous substitutions to the amino acids corresponding to said positions. In some embodiments, a Cas protein comprises S542R, K548V, and N552R mutations or analogous substitutions to the amino acids corresponding to said positions.

TABLE 4
CRISPR/Cas Proteins, Species, and Mutations

| | | | # of | | Mutations to alter | Mutations to make |
|---|---|---|---|---|---|---|
| Name | Enzyme | Species | AAs | PAM | PAM recognition | catalytically dead |
| FnCas9 | Cas9 | Francisella | 1629 | 5′-NGG-3′ | Wt | D11A/H969A/N995A |
| | | novicida | | | | |
| FnCas9 | Cas9 | Francisella | 1629 | 5′-YG-3′ | E1369R/E1449H/ | D11A/H969A/N995A |
| RHA | | novicida | | | R1556A | |
| SaCas9 | Cas9 | Staphylococcus | 1053 | 5′-NNGRRT-3′ | Wt | D10A/H557A |
| | | aureus | | | | |
| SaCas9 | Cas9 | Staphylococcus | 1053 | 5′-NNNRRT-3′ | E782K/N968K/ | D10A/H557A |
| KKH | | aureus | | | R1015H | |
| SpCas9 | Cas9 | Streptococcus | 1368 | 5′-NGG-3′ | Wt | D10A/D839A/H840A/ |
| | | pyogenes | | | | N863A |
| SpCas9 | Cas9 | Streptococcus | 1368 | 5′-NGA-3′ | D1135V/R1335Q/ | D10A/D839A/H840A/ |
| VQR | | pyogenes | | | T1337R | N863A |
| AsCpf1 | Cpf1 | Acidaminococcus | 1307 | 5′-TYCV-3′ | S542R/K607R | E993A |
| RR | | sp. BV3L6 | | | | |
| AsCpf1 | Cpf1 | Acidaminococcus | 1307 | 5′-TATV-3′ | S542R/K548V/ | E993A |
| RVR | | sp. BV3L6 | | | N552R | |
| FnCpf1 | Cpf1 | Francisella | 1300 | 5′-NTTN-3′ | Wt | D917A/E1006A/ |
| | | novicida | | | | D1255A |
| NmCas9 | Cas9 | Neisseria | 1082 | 5′-NNNGATT-3′ | Wt | D16A/D587A/H588A/ |
| | | meningitidis | | | | N611A |

[0575] In some embodiments, the Cas protein is catalytically active and cuts one or both strands of the target DNA site. In some embodiments, cutting the target DNA site is followed by formation of an alteration, e.g., an insertion or deletion, e.g., by the cellular repair machinery.

[0576] In some embodiments, the Cas protein is modified to deactivate or partially deactivate the nuclease, e.g., nuclease-deficient Cas9. Whereas wild-type Cas9 generates double-strand breaks (DSBs) at specific DNA sequences targeted by a gRNA, a number of CRISPR endonucleases having modified functionalities are available, for example: a “nickase” version of Cas9 that has been partially deactivated generates only a single-strand break; a catalytically inactive Cas9 (“dCas9”) does not cut target DNA. In some embodiments, dCas9 binding to a DNA sequence may interfere with transcription at that site by steric hindrance. In some embodiments, dCas9 binding to an anchor sequence may interfere with (e.g., decrease or prevent) genomic complex (e.g., ASMC) formation and/or maintenance. In some embodiments, a DNA-binding domain comprises a catalytically inactive Cas9, e.g., dCas9. Many catalytically inactive Cas9 proteins are known in the art. In some embodiments, dCas9 comprises mutations in each endonuclease domain of the Cas protein, e.g., D10A and H840A or N863A mutations. In some embodiments, a catalytically inactive or partially inactive CRISPR/Cas domain comprises a Cas protein comprising one or more mutations, e.g., one or more of the mutations listed in Table 4. In some embodiments, a Cas protein described on a given row of Table 4 comprises one, two, three, or all of the mutations listed in the same row of Table 4. In some embodiments, a Cas protein, e.g., not described in Table 4, comprises one, two, three, or all of the mutations listed in a row of Table 4 or a corresponding mutation at a corresponding site in that Cas protein.

[0577] In some embodiments, a catalytically inactive, e.g., dCas9, or partially deactivated Cas9 protein comprises a D11 mutation (e.g., D11A mutation) or an analogous substitution to the amino acid corresponding to said position. In some embodiments, a catalytically inactive Cas9 protein, e.g., dCas9, or partially deactivated Cas9 protein comprises a H969 mutation (e.g., H969A mutation) or an analogous substitution to the amino acid corresponding to said position. In some embodiments, a catalytically inactive Cas9 protein, e.g., dCas9, or partially deactivated Cas9 protein comprises a N995 mutation (e.g., N995A mutation) or an analogous substitution to the amino acid corresponding to said position. In some embodiments, a catalytically inactive Cas9 protein, e.g., dCas9, comprises mutations at one, two, or three of positions D11, H969, and N995 (e.g., D11A, H969A, and N995A mutations) or analogous substitutions to the amino acids corresponding to said positions.

[0578] In some embodiments, a catalytically inactive Cas9 protein, e.g., dCas9, or partially deactivated Cas9 protein comprises a D10 mutation (e.g., a D10A mutation) or an analogous substitution to the amino acid corresponding to said position. In some embodiments, a catalytically inactive Cas9 protein, e.g., dCas9, or partially deactivated Cas9 protein comprises a H557 mutation (e.g., a H557A mutation) or an analogous substitution to the amino acid corresponding to said position. In some embodiments, a catalytically inactive Cas9 protein, e.g., dCas9, comprises a D10 mutation (e.g., a D10A mutation) and a H557 mutation (e.g., a H557A mutation) or analogous substitutions to the amino acids corresponding to said positions.

[0579] In some embodiments, a catalytically inactive Cas9 protein, e.g., dCas9, or partially deactivated Cas9 protein comprises a D839 mutation (e.g., a D839A mutation) or an analogous substitution to the amino acid corresponding to said position. In some embodiments, a catalytically inactive Cas9 protein, e.g., dCas9, or partially deactivated Cas9 protein comprises a H840 mutation (e.g., a H840A mutation) or an analogous substitution to the amino acid corresponding to said position. In some embodiments, a catalytically inactive Cas9 protein, e.g., dCas9, or partially deactivated Cas9 protein comprises a N863 mutation (e.g., a N863A mutation) or an analogous substitution to the amino acid corresponding to said position. In some embodiments, a catalytically inactive Cas9 protein, e.g., dCas9, comprises a D10 mutation (e.g., D10A), a D839 mutation (e.g., D839A), a H840 mutation (e.g., H840A), and a N863 mutation (e.g., N863A) or analogous substitutions to the amino acids corresponding to said positions.

[0580] In some embodiments, a catalytically inactive Cas9 protein, e.g., dCas9, or partially deactivated Cas9 protein comprises a E993 mutation (e.g., a E993A mutation) or an analogous substitution to the amino acid corresponding to said position.

[0581] In some embodiments, a catalytically inactive Cas9 protein, e.g., dCas9, or partially deactivated Cas9 protein comprises a a D917 mutation (e.g., a D917A mutation) or an analogous substitution to the amino acid corresponding to said position. In some embodiments, a catalytically inactive Cas9 protein, e.g., dCas9, or partially deactivated Cas9 protein comprises a a E1006 mutation (e.g., a E1006A mutation) or an analogous substitution to the amino acid corresponding to said position. In some embodiments, a catalytically inactive Cas9 protein, e.g., dCas9, or partially deactivated Cas9 protein comprises a D1255 mutation (e.g., a D1255A mutation) or an analogous substitution to the amino acid corresponding to said position. In some embodiments, a catalytically inactive Cas9 protein, e.g., dCas9, comprises a D917 mutation (e.g., D917A), a E1006 mutation (e.g., E1006A), and a D1255 mutation (e.g., D1255A) or analogous substitutions to the amino acids corresponding to said positions.

[0582] In some embodiments, a catalytically inactive Cas9 protein, e.g., dCas9, or partially deactivated Cas9 protein comprises a a D16 mutation (e.g., a D16A mutation) or an analogous substitution to the amino acid corresponding to said position. In some embodiments, a catalytically inactive Cas9 protein, e.g., dCas9, or partially deactivated Cas9 protein comprises a D587 mutation (e.g., a D587A mutation) or an analogous substitution to the amino acid corresponding to said position. In some embodiments, a catalytically inactive Cas9 protein, e.g., dCas9, or partially deactivated Cas9 protein comprises a H588 mutation (e.g., a H588A mutation) or an analogous substitution to the amino acid corresponding to said position. In some embodiments, a catalytically inactive Cas9 protein, e.g., dCas9, or partially deactivated Cas9 protein comprises a N611 mutation (e.g., a N611A mutation) or an analogous substitution to the amino acid corresponding to said position. In some embodiments, a catalytically inactive Cas9 protein, e.g., dCas9, comprises a D16 mutation (e.g., D16A), a D587 mutation (e.g., D587A), a H588 mutation (e.g., H588A), and a N611 mutation (e.g., N611A) or analogous substitutions to the amino acids corresponding to said positions.

[0583] In some embodiments, a DNA-binding domain or endonuclease domain may comprise a Cas molecule comprising or linked (e.g., covalently) to a gRNA (e.g., a template nucleic acid, e.g., template RNA, comprising a gRNA).

[0584] In some embodiments, an endonuclease domain or DNA binding domain comprises a Streptococcus pyogenes Cas9 (SpCas9) or a functional fragment or variant thereof. In some embodiments, the endonuclease domain or DNA binding domain comprises a modified SpCas9. In embodiments, the modified SpCas9 comprises a modification that alters protospacer-adjacent motif (PAM) specificity. In embodiments, the PAM has specificity for the nucleic acid sequence 5′-NGT-3′. In embodiments, the modified SpCas9 comprises one or more amino acid substitutions, e.g., at one or more of positions L1111, D1135, G1218, E1219, A1322, of R1335, e.g., selected from L1111R, D1135V, G1218R, E1219F, A1322R, R1335V. In embodiments, the modified SpCas9 comprises the amino acid substitution T1337R and one or more additional amino acid substitutions, e.g., selected from L1111, D1135L, S1136R, G1218S, E1219V, D1332A, D1332S, D1332T, D1332V, D1332L, D1332K, D1332R, R1335Q, T1337, T1337L, T1337Q, T1337I, T1337V, T1337F, T1337S, T1337N, T1337K, T1337H, T1337Q, and T1337M, or corresponding amino acid substitutions thereto. In embodiments, the modified SpCas9 comprises: (i) one or more amino acid substitutions selected from D1135L, S1136R, G1218S, E1219V, A1322R, R1335Q, and T1337; and (ii) one or more amino acid substitutions selected from L1111R, G1218R, E1219F, D1332A, D1332S, D1332T, D1332V, D1332L, D1332K, D1332R, T1337L, T1337I, T1337V, T1337F, T1337S, T1337N, T1337K, T1337R, T1337H, T1337Q, and T1337M, or corresponding amino acid substitutions thereto.

[0585] In some embodiments, a Gene Writer may comprise a Cas protein as listed in Table 40A. The predicted or validated nickase mutations for installing Nickase activity in the Cas protein as shown in Table 40A, are based on the signature of the SpCas9(N863A) mutation. In some embodiments, system described herein comprises a GeneWriter protein of Table 3 and a Cas protein of Table 40A. In some embodiments, a protein or domain of Table 3, 41, or 44 is fused to a Cas protein of Table 40A.

TABLE 40A
CRISPR/Cas Proteins, Species, and Mutations

| | | SEQ | | |
|---|---|---|---|---|
| | Parental | ID | | Nickase |
| Variant | Host | NO: | Protein Sequence | Mutation |
| Nme2Cas9 | Neis- | 3262 | MAAFKPNPINYILGLDIGIASVGWAMVEIDEEENPIRLIDLGVRVFERAEVPKTGDSLAMARRLAR | N611A |
| | seria | | SVRRLTRRRAHRLLRARRLLKREGVLQAADFDENGLIKSLPNTPWQLRAAALDRKLTPLEWSAVL | |
| | menin- | | LHLIKHRGYLSQRKNEGETADKELGALLKGVANNAHALQTGDFRTPAELALNKFEKESGHIRNQR | |
| | gitidis | | GDYSHTFSRKDLQAELILLFEKQKEFGNPHVSGGLKEGIETLLMTQRPALSGDAVQKMLGHCTFE | |
| | | | PAEPKAAKNTYTAERFIWLTKLNNLRILEQGSERPLTDTERATLMDEPYRKSKLTYAQARKLLGL | |
| | | | EDTAFFKGLRYGKDNAEASTLMEMKAYHAISRALEKEGLKDKKSPLNLSSELQDEIGTAFSLFKT | |
| | | | DEDITGRLKDRVQPEILEALLKHISFDKFVQISLKALRRIVPLMEQGKRYDEACAEIYGDHYGKKN | |
| | | | TEEKIYLPPIPADEIRNPVVLRALSQARKVINGVVRRYGSPARIHIETAREVGKSFKDRKEIEKRQEE | |
| | | | NRKDREKAAAKFREYFPNFVGEPKSKDILKLRLYEQQHGKCLYSGKEINLVRLNEKGYVEIDHAL | |
| | | | PFSRTWDDSFNNKVLVLGSENQNKGNQTPYEYFNGKDNSREWQEFKARVETSRFPRSKKQRILLQ | |
| | | | KFDEDGFKECNLNDTRYVNRFLCQFVADHILLTGKGKRRVFASNGQITNLLRGFWGLRKVRAEN | |
| | | | DRHHALDAVVVACSTVAMQQKITRFVRYKEMNAFDGKTIDKETGKVLHQKTHFPQPWEFFAQE | |
| | | | VMIRVFGKPDGKPEFEEADTPEKLRTLLAEKLSSRPEAVHEYVTPLFVSRAPNRKMSGAHKDTLRS | |
| | | | AKRFVKHNEKISVKRVWLTEIKLADLENMVNYKNGREIELYEALKARLEAYGGNAKQAFDPKDN | |
| | | | PFYKKGGQLVKAVRVEKTQESGVLLNKKNAYTIADNGDMVRVDVFCKVDKKGKNQYFIVPIYA | |
| | | | WQVAENILPDIDCKGYRIDDSYTFCFSLHKYDLIAFQKDEKSKVEFAYYINCDSSNGRFYLAWHD | |
| | | | KGSKEQQFRISTQNLVLIQKYQVNELGKEIRPCRLKKRPPVR | |
| PpnCas9 | Pasteur- | 3263 | MQNNPLNYILGLDLGIASIGWAVVEIDEESSPIRLIDVGVRTFERAEVAKTGESLALSRRLARSSRR | N605A |
| | ella | | LIKRRAERLKKAKRLLKAEKILHSIDEKLPINVWQLRVKGLKEKLERQEWAAVLLHLSKHRGYLS | |
| | pneumo- | | QRKNEGKSDNKELGALLSGIASNHQMLQSSEYRTPAEIAVKKFQVEEGHIRNQRGSYTHTFSRLDL | |
| | tropica | | LAEMELLFQRQAELGNSYTSTTLLENLTALLMWQKPALAGDAILKMLGKCTFEPSEYKAAKNSY | |
| | | | SAERFVWLTKLNNLRILENGTERALNDNERFALLEQPYEKSKLTYAQVRAMLALSDNAIFKGVRY | |
| | | | LGEDKKTVESKTTLIEMKFYHQIRKTLGSAELKKEWNELKGNSDLLDEIGTAFSLYKTDDDICRYL | |
| | | | EGKLPERVLNALLENLNFDKFIQLSLKALHQILPLMLQGQRYDEAVSAIYGDHYGKKSTETTRLLP | |
| | | | TIPADEIRNPVVLRTLTQARKVINAVVRLYGSPARIHIETAREVGKSYQDRKKLEKQQEDNRKQRE | |
| | | | SAVKKFKEMFPHFVGEPKGKDILKMRLYELQQAKCLYSGKSLELHRLLEKGYVEVDHALPFSRT | |
| | | | WDDSFNNKVLVLANENQNKGNLTPYEWLDGKNNSERWQHFVVRVQTSGFSYAKKQRILNHKLD | |
| | | | EKGFIERNLNDTRYVARFLCNFIADNMLLVGKGKRNVFASNGQITALLRHRWGLQKVREQNDRH | |
| | | | HALDAVVVACSTVAMQQKITRFVRYNEGNVFSGERIDRETGEIIPLHFPSPWAFFKENVEIRIFSEN | |
| | | | PKLELENRLPDYPQYNHEWVQPLFVSRMPTRKMTGQGHMETVKSAKRLNEGLSVLKVPLTQLKL | |
| | | | SDLERMVNRDREIALYESLKARLEQFGNDPAKAFAEPFYKKGGALVKAVRLEQTQKSGVLVRDG | |
| | | | NGVADNASMVRVDVFTKGGKYFLVPIYTWQVAKGILPNRAATQGKDENDWDIMDEMATFQFSL | |
| | | | CQNDLIKLVTKKKTIFGYFNGLNRATSNINIKEHDLDKSKGKLGIYLEVGVKLAISLEKYQVDELG | |
| | | | KNIRPCRPTKRQHVR | |
| SauCas9 | Staphy- | 3264 | MKRNYILGLDIGITSVGYGIIDYETRDVIDAGVRLFKEANVENNEGRRSKRGARRLKRRRRHRIQR | N580A |
| | lococcus | | VKKLLFDYNLLTDHSELSGINPYEARVKGLSQKLSEEEFSAALLHLAKRRGVHNVNEVEEDTGNE | |
| | aureus | | LSTKEQISRNSKALEEKYVAELQLERLKKDGEVRGSINRFKTSDYVKEAKQLLKVQKAYHQLDQS | |
| | | | FIDTYIDLLETRRTYYEGPGEGSPFGWKDIKEWYEMLMGHCTYFPEELRSVKYAYNADLYNALN | |
| | | | VYHDIKDITARKEIIENAELLDQIAKILTIYQSSEDIQEELTNLNSELTQEEIEQISNLKGYTGTHN | |
| | | | LSLKAINLILDELWHTNDNQIAIFNRLKLVPKKVDLSQQKEIPTTLVDDFILSPVVKRSFIQSIKVI | |
| | | | NAIIKKYGLPNDIIIELAREKNSKDAQKMINEMQKRNRQTNERIEEIIRTTGKENAKYLIEKIKLHDM | |
| | | | QEGKCLYSLEAIPLEDLLNNPFNYEVDHIIPRSVSFDNSFNNKVLVKQEENSKKGNRTPFQYLSSSDS | |
| | | | KISYETFKKHILNLAKGKGRISKTKKEYLLEERDINRFSVQKDFINRNLVDTRYATRGLMNLLRSYFR | |
| | | | VNNLDVKVKSINGGFTSFLRRKWKFKKERNKGYKHHAEDALIIANADFIFKEWKKLDKAKKVMENQ | |
| | | | MFEEKQAESMPEIETEQEYKEIFITPHQIKHIKDFKDYKYSHRVDKKPNRELINDTLYSTRKDDKGN | |
| | | | TLIVNNLNGLYDKDNDKLKKLINKSPEKLLMYHHDPQTYQKLKLIMEQYGDEKNPLYKYYEETG | |
| | | | NYLTKYSKKDNGPVIKKIKYYGNKLNAHLDITDDYPNSRNKVVKLSLKPYRFDVYLDNGVYKFV | |
| | | | TVKNLDVIKKENYYEVNSKCYEEAKKLKKISNQAEFIASFYNNDLIKINGELYRVIGVNNDLLNRI | |
| | | | EVNMIDITYREYLENMNDKRPPRIIKTIASKTQSIKKYSTDILGNLYEVKSKKHPQIIKKG | |
| SauCas9- | Staphy- | 3265 | MKRNYILGLDIGITSVGYGIIDYETRDVIDAGVRLFKEANVENNEGRRSKRGARRLKRRRRHRIQR | N580A |
| KKH | lococcus | | VKKLLFDYNLLTDHSELSGINPYEARVKGLSQKLSEEEFSAALLHLAKRRGVHNVNEVEEDTGNE | |
| | aureus | | LSTKEQISRNSKALEEKYVAELQLERLKKDGEVRGSINRFKTSDYVKEAKQLLKVQKAYHQLDQS | |
| | | | FIDTYIDLLETRRTYYEGPGEGSPFGWKDIKEWYEMLMGHCTYFPEELRSVKYAYNADLYNALN | |
| | | | DLNNLVITRDENEKLEYYEKFQIIENVFKQKKKPTLKQIAKEILVNEEDIKGYRVTSTGKPEFTNLK | |
| | | | VYHDIKDITARKEIIENAELLDQIAKILTIYQSSEDIQEELTNLNSELTQEEIEQISNLKGYTGTHNL | |
| | | | SLKAINLILDELWHTNDNQIAIFNRLKLVPKKVDLSQQKEIPTTLVDDFILSPVVKRSFIQSIKVINA | |
| | | | IIKKYGLPNDIIIELAREKNSKDAQKMINEMQKRNRQTNERIEEIIRTTGKENAKYLIEKIKLHDMQE | |
| | | | GKCLYSLEAIPLEDLLNNPFNYEVDHIIPRSVSFDNSFNNKVLVKQEENSKKGNRTPFQYLSSSDSKI | |
| | | | SYETFKKHILNLAKGKGRISKTKKEYLLEERDINRFSVQKDFINRNLVDTRYATRGLMNLLRSYFRVN | |
| | | | NLDVKVKSINGGFTSFLRRKWKFKKERNKGYKHHAEDALIIANADFIFKEWKKLDKAKKVMENQ | |
| | | | MFEEKQAESMPEIETEQEYKEIFITPHQIKHIKDFKDYKYSHRVDKKPNRKLINDTLYSTRKDDKG | |
| | | | NTLIVNNLNGLYDKDNDKLKKLINKSPEKLLMYHHDPQTYQKLKLIMEQYGDEKNPLYKYYEET | |
| | | | GNYLTKYSKKDNGPVIKKIKYYGNKLNAHLDITDDYPNSRNKVVKLSLKPYRFDVYLDNGVYKF | |
| | | | VTVKNLDVIKKENYYEVNSKCYEEAKKLKKISNQAEFIASFYKNDLIKINGELYRVIGVNNDLLNR | |
| | | | IEVNMIDITYREYLENMNDKRPPHIIKTIASKTQSIKKYSTDILGNLYEVKSKKHPQIIKKG | |
| SauriCas9 | Staphy- | 3266 | MQENQQKQNYILGLDIGITSVGYGLIDSKTREVIDAGVRLFPEADSENNSNRRSKRGARRLKRRRI | N588A |
| | lococcus | | HRLNRVKDLLADYQMIDLNNVPKSTDPYTIRVKGLREPLTKEEFAIALLHIAKRRGLHNISVSMGD | |
| | auri- | | EEQDNELSTKQQLQKNAQQLQDKYVCELQLERLTNINKVRGEKNRFKTEDFVKEVKQLCETQRQ | |
| | cularis | | YHNIDDQFIQQYIDLVSTRREYFEGPGNGSPYGWDGDLLKWYEKLMGRCTYFPEELRSVKYAYS | |
| | | | ADLFNALNDLNNLVVTRDDNPKLEYYEKYHIIENVFKQKKNPTLKQIAKEIGVQDYDIRGYRITKS | |
| | | | GKPQFTSFKLYHDLKNIFEQAKYLEDVEMLDEIAKILTIYQDEISIKKALDQLPELLTESEKSQIAQL | |
| | | | TGYTGTHRLSLKCIHIVIDELWESPENQMEIFTRLNLKPKKVEMSEIDSIPTTLVDEFILSPVVKRAF | |
| | | | IQSIKVINAVINRFGLPEDIIIELAREKNSKDRRKFINKLQKQMEATRKKIEQLLAKYGNTNAKYMIE | |
| | | | KIKLHDMQEGKCLYSLEAIPLEDLLSNPTHYEVDHIIPRSVSFDNSLNNKVLVKQSENSKKGNRTP | |
| | | | YQYLSSNESKISYNQFKQHILNLSKAKDRISKKKRDMLLEERDINKFEVQKEFINRNLVDTRYATR | |
| | | | ELSNLLKTYFSTHDYAVKVKTINGGFTNHLRKVWDFKKHRNHGYKHHAEDALVIANADFLFKTH | |
| | | | KALRRTDKILEQPGLEVNDTTVKVDTEEKYQELFETPKQVKNIKQFRDFKYSHRVDKKPNRQLIN | |
| | | | DTLYSTREIDGETYVVQTLKDLYAKDNEKVKKLFTERPQKILMYQHDPKTFEKLMTILNQYAEAK | |
| | | | NPLAAYYEDKGEYVTKYAKKGNGPAIHKIKYIDKKLGSYLDVSNKYPETQNKLVKLSLKSFRFDI | |
| | | | YKCEQGYKMVSIGYLDVLKKDNYYYIPKDKYEAEKQKKKIKESDLFVGSFYYNDLIMYEDELFR | |
| | | | VIGVNSDINNLVELNMVDITYKDFCEVNNVTGEKRIKKTIGKRVVLIEKYTTDILGNLYKTPLPKKP | |
| | | | QLIFKRGEL | |
| SauriCas9- | Staphy- | 3267 | MQENQQKQNYILGLDIGITSVGYGLIDSKTREVIDAGVRLFPEADSENNSNRRSKRGARRLKRRRI | N588A |
| KKH | lococcus | | HRLNRVKDLLADYQMIDLNNVPKSTDPYTIRVKGLREPLTKEEFAIALLHIAKRRGLHNISVSMGD | |
| | auri- | | EEQDNELSTKQQLQKNAQQLQDKYVCELQLERLTNINKVRGEKNRFKTEDFVKEVKQLCETQRQ | |
| | cularis | | YHNIDDQFIQQYIDLVSTRREYFEGPGNGSPYGWDGDLLKWYEKLMGRCTYFPEELRSVKYAYS | |
| | | | ADLFNALNDLNNLVVTRDDNPKLEYYEKYHIIENVFKQKKNPTLKQIAKEIGVQDYDIRGYRITKS | |
| | | | GKPQFTSFKLYHDLKNIFEQAKYLEDVEMLDEIAKILTIYQDEISIKKALDQLPELLTESEKSQIAQL | |
| | | | TGYTGTHRLSLKCIHIVIDELWESPENQMEIFTRLNLKPKKVEMSEIDSIPTTLVDEFILSPVVKRAF | |
| | | | IQSIKVINAVINRFGLPEDITIELAREKNSKDRRKFINKLQKQNEATRKKIEQLLAKYGNTNAKYMIE | |
| | | | KIKLHDMQEGKCLYSLEAIPLEDLLSNPTHYEVDHIIPRSVSFDNSLNNKVLVKQSENSKKGNRTP | |
| | | | YQYLSSNESKISYNQFKQHILNLSKAKDRISKKKRDMLLEERDINKFEVQKEFINRNLVDTRYATR | |
| | | | ELSNLLKTYFSTHDYAVKVKTINGGFTNHLRKVWDFKKHRNHGYKHHAEDALVIANADFLFKTH | |
| | | | KALRRTDKILEQPGLEVNDTTVKVDTEEKYQELFETPKQVKNIKQFRDFKYSHRVDKKPNRKLIN | |
| | | | DTLYSTREIDGETYVVQTLKDLYAKDNEKVKKLFTERPQKILMYQHDPKTFEKLMTILNQYAEAK | |
| | | | NPLAAYYEDKGEYVTKYAKKGNGPAIHKIKYIDKKLGSYLDVSNKYPETQNKLVKLSLKSFRFDI | |
| | | | YKCEQGYKMVSIGYLDVLKKDNYYYIPKDKYEAEKQKKKIKESDLFVGSFYKNDLIMYEDELFR | |
| | | | VIGVNSDINNLVELNMVDITYKDFCEVNNVTGEKHIKKTIGKRVVLIEKYTTDILGNLYKTPLPKK | |
| | | | PQLIFKRGEL | |
| ScaCas9- | Strep- | 3268 | MEKKYSIGLDIGTNSVGWAVITDDYKVPSKKFKVLGNTNRKSIKKNLMGALLFDSGETAEATRLK | N872A |
| Sc++ | tococcus | | RTARRRYTRRKNRIRYLQEIFANEMAKLDDSFFQRLEESFLVEEDKKNERHPIFGNLADEVAYHRN | |
| | canis | | YPTIYHLRKKLADSPEKADLRLIYLALAHIIKFRGHFLIEGKLNAENSDVAKLFYQLIQTYNQLFEE | |
| | | | SPLDEIEVDAKGILSARLSKSKRLEKLIAVFPNEKKNGLFGNIIALALGLTPNFKSNFDLTEDAKLQL | |
| | | | SKDTYDDDLDELLGQIGDQYADLFSAAKNLSDAILLSDILRSNSEVTKAPLSASMVKRYDEHHQD | |
| | | | LALLKTLVRQQFPEKYAEIFKDDTKNGYAGYVGADKKLRKRSGKLATEEEFYKFIKPILEKMDGA | |
| | | | EELLAKLNRDDLLRKQRTFDNGSIPHQIHLKELHAILRRQEEFYPFLKENREKIEKILTFRIPYYVGP | |
| | | | LARGNSRFAWLTRKSEEAITPWNFEEVVDKGASAQSFIERMTNFDEQLPNKKVLPKHSLLYEYFT | |
| | | | VYNELTKVKYVTERMRKPEFLSGEQKKAIVDLLFKTNRKVTVKQLKEDYFKKIECFDSVEIIGVED | |
| | | | RFNASLGTYHDLLKIIKDKDFLDNEENEDILEDIVLTLTLFEDREMIEERLKTYAHLFDDKVMKQL | |
| | | | KRRHYTGWGRLSRKMINGIRDKQSGKTILDFLKSDGFSNRNFMQLIHDDSLTFKEEIEKAQVSGQG | |
| | | | DSLHEQIADLAGSPAIKKGILQTVKIVDELVKVMGHKPENIVIEMARENQTTTKGLQQSRERKKRI | |
| | | | EEGIKELESQILKENPVENTQLQNEKLYLYYLQNGRDMYVDQELDINRLSDYDVDHIVPQSFIKDD | |
| | | | SIDNKVLTRSVENRGKSDNVPSEEVVKKMKNYWRQLLNAKLITQRKFDNLTKAERGGLSEADKA | |
| | | | GFIKRQLVETRQITKHVARILDSRMNTKRDKNDKPIREVKVITLKSKLVSDFRKDFQLYKVRDINN | |
| | | | YHHAHDAYLNAVVGTALIKKYPKLESEFVYGDYKVYDVRKMIAKSEQEIGKATAKRFFYSNIMN | |
| | | | FFKTEVKLANGEIRKRPLIETNGETGEVVWNKEKDFATVRKVLAMPQVNIVKKTEVQTGGFSKES | |
| | | | ILSKRESAKLIPRKKGWDTRKYGGFGSPTVAYSILVVAKVEKGKAKKLKSVKVLVGITIMEKGSY | |
| | | | EKDPIGFLEAKGYKDIKKELIFKLPKYSLFELENGRRRMLASAKELQKANELVLPQHLVRLLYYTQ | |
| | | | NISATTGSNNLGYIEQHREEFKEIFEKIIDFSEKYILKNKVNSNLKSSFDEQFAVSDSILLSNSFVSL | |
| | | | LKYTSFGASGGFTFLDLDVKQGRLRYQTVTEVLDATLIYQSITGLYETRTDLSQLGGD | |
| SpyCas9 | Strep- | 3269 | MDKKYSIGLDIGTNSVGWAVITDEYKVPSKKFKVLGNTDRHSIKKNLIGALLFDSGETAEATRLKR | N863A |
| | tococcus | | TARRRYTRRKNRICYLQEIFSNEMAKVDDSFFHRLEESFLVEEDKKHERHPIFGNIVDEVAYHEKY | |
| | pyogenes | | PTIYHLRKKLVDSTDKADLRLIYLALAHMIKFRGHFLIEGDLNPDNSDVDKLFIQLVQTYNQLFEE | |
| | | | NPINASGVDAKAILSARLSKSRRLENLIAQLPGEKKNGLFGNLIALSLGLTPNFKSNFDLAEDAKLQ | |
| | | | LSKDTYDDDLDNLLAQIGDQYADLFLAAKNLSDAILLSDILRVNTEITKAPLSASMIKRYDEHHQD | |
| | | | LTLLKALVRQQLPEKYKEIFFDQSKNGYAGYIDGGASQEEFYKFIKPILEKMDGTEELLVKLNRED | |
| | | | LLRKQRTFDNGSIPHQIHLGELHAILRRQEDFYPFLKDNREKIEKILTFRIPYYVGPLARGNSRFAW | |
| | | | MTRKSEETITPWNFEEVVDKGASAQSFIERMTNFDKNLPNEKVLPKHSLLYEYFTVYNELTKVKY | |
| | | | VTEGMRKPAFLSGEQKKAIVDLLFKTNRKVTVKQLKEDYFKKIECFDSVEISGVEDRFNASLGTY | |
| | | | HDLLKIIKDKDFLDNEENEDILEDIVLTLTLFEDREMIEERLKTYAHLFDDKVMKQLKRRRYTGWG | |
| | | | RLSRKLINGIRDKQSGKTILDFLKSDGFANRNFMQLIHDDSLTFKEDIQKAQVSGQGDSLHEHIANL | |
| | | | AGSPAIKKGILQTVKVVDELVKVMGRHKPENIVIEMARENQTTQKGQKNSRERMKRIEEGIKELG | |
| | | | SQILKEHPVENTQLQNEKLYLYYLQNGRDMYVDQELDINRLSDYDVDHIVPQSFLKDDSIDNKVL | |
| | | | TRSDKNRGKSDNVPSEEVVKKMKNYWRQLLNAKLITQRKFDNLTKAERGGLSELDKAGFIKRQL | |
| | | | VETRQITKHVAQILDSRMNTKYDENDKLIREVKVITLKSKLVSDFRKDFQFYKVREINNYHHAHD | |
| | | | AYLNAVVGTALIKKYPKLESEFVYGDYKVYDVRKMIAKSEQEIGKATAKYFFYSNIMNFFKTEITL | |
| | | | ANGEIRKRPLIETNGETGEIVWDKGRDFATVRKVLSMPQVNIVKKTEVQTGGFSKESILPKRNSDK | |
| | | | LIARKKDWDPKKYGGFDSPTVAYSVLVVAKVEKGKSKKLKSVKELLGITIMERSSFEKNPIDFLEA | |
| | | | KGYKEVKKDLIIKLPKYSLFELENGRKRMLASAGELQKGNELALPSKYVNFLYLASHYEKLKGSP | |
| | | | EDNEQKQLFVEQHKHYLDEIIEQISEFSKRVILADANLDKVLSAYNKHRDKPIREQAENIIHLFTLT | |
| | | | NLGAPAAFKYFDTTIDRKRYTSTKEVLDATLIHQSITGLYETRIDLSQLGGD | |
| SpyCas9- | Strep- | 3270 | MDKKYSIGLDIGTNSVGWAVITDEYKVPSKKFKVLGNTDRHSIKKNLIGALLFDSGETAEATRLKR | N863A |
| NG | tococcus | | TARRRYTRRKNRICYLQEIFSNEMAKVDDSFFHRLEESFLVEEDKKHERHPIFGNIVDEVAYHEKY | |
| | pyogenes | | PTIYHLRKKLVDSTDKADLRLIYLALAHMIKFRGHFLIEGDLNPDNSDVDKLFIQLVQTYNQLFEE | |
| | | | NPINASGVDAKAILSARLSKSRRLENLIAQLPGEKKNGLFGNLIALSLGLTPNFKSNFDLAEDAKLQ | |
| | | | LSKDTYDDDLDNLLAQIGDQYADLFLAAKNLSDAILLSDILRVNTEITKAPLSASMIKRYDEHHQD | |
| | | | LTLLKALVRQQLPEKYKEIFFDQSKNGYAGYIDGGASQEEFYKFIKPILEKMDGTEELLVKLNRED | |
| | | | LLRKQRTFDNGSIPHQIHLGELHAILRRQEDFYPFLKDNREKIEKILTFRIPYYVGPLARGNSRFAW | |
| | | | MTRKSEETITPWNFEEVVDKGASAQSFIERMTNFDKNLPNEKVLPKHSLLYEYFTVYNELTKVKY | |
| | | | VTEGMRKPAFLSGEQKKAIVDLLFKTNRKVTVKQLKEDYFKKIECFDSVEISGVEDRFNASLGTY | |
| | | | HDLLKIIKDKDFLDNEENEDILEDIVLTLTLFEDREMIEERLKTYAHLFDDKVMKQLKRRRYTGWG | |
| | | | RLSRKLINGIRDKQSGKTILDFLKSDGFANRNFMQLIHDDSLTFKEDIQKAQVSGQGDSLHEHIANL | |
| | | | AGSPAIKKGILQTVKVVDELVKVMGRHKPENIVIEMARENQTTQKGQKNSRERMKRIEEGIKELG | |
| | | | SQILKEHPVENTQLQNEKLYLYYLQNGRDMYVDQELDINRLSDYDVDHIVPQSFLKDDSIDNKVL | |
| | | | TRSDKNRGKSDNVPSEEVVKKMKNYWRQLLNAKLITQRKFDNLTKAERGGLSELDKAGFIKRQL | |
| | | | VETRQITKHVAQILDSRMNTKYDENDKLIREVKVITLKSKLVSDFRKDFQFYKVREINNYHHAHD | |
| | | | AYLNAVVGTALIKKYPKLESEFVYGDYKVYDVRKMIAKSEQEIGKATAKYFFYSNIMNFFKTEITL | |
| | | | ANGEIRKRPLIETNGETGEIVWDKGRDFATVRKVLSMPQVNIVKKTEVQTGGFSKESIRPKRNSDK | |
| | | | LIARKKDWDPKKYGGFVSPTVAYSVLVVAKVEKGKSKKLKSVKELLGITIMERSSFEKNPIDFLEA | |
| | | | KGYKEVKKDLIIKLPKYSLFELENGRKRMLASARFLQKGNELALPSKYVNFLYLASHYEKLKGSP | |
| | | | EDNEQKQLFVEQHKHYLDEIIEQISEFSKRVILADANLDKVLSAYNKHRDKPIREQAENIIHLFTLT | |
| | | | NLGAPRAFKYFDTTIDRKVYRSTKEVLDATLIHQSITGLYETRIDLSQLGGD | |
| SpyCas9- | Strep- | 3271 | MDKKYSIGLDIGTNSVGWAVITDEYKVPSKKFKVLGNTDRHSIKKNLIGALLFDSGETAERTRLKR | N863A |
| SpRY | tococcus | | TARRRYTRRKNRICYLQEIFSNEMAKVDDSFFHRLEESFLVEEDKKHERHPIFGNIVDEVAYHEKY | |
| | pyogenes | | PTIYHLRKKLVDSTDKADLRLIYLALAHMIKFRGHFLIEGDLNPDNSDVDKLFIQLVQTYNQLFEE | |
| | | | NPINASGVDAKAILSARLSKSRRLENLIAQLPGEKKNGLFGNLIALSLGLTPNFKSNFDLAEDAKLQ | |
| | | | LSKDTYDDDLDNLLAQIGDQYADLFLAAKNLSDAILLSDILRVNTEITKAPLSASMIKRYDEHHQD | |
| | | | LTLLKALVRQQLPEKYKEIFFDQSKNGYAGYIDGGASQEEFYKFIKPILEKMDGTEELLVKLNRED | |
| | | | LLRKQRTFDNGSIPHQIHLGELHAILRRQEDFYPFLKDNREKIEKILTFRIPYYVGPLARGNSRFAW | |
| | | | MTRKSEETITPWNFEEVVDKGASAQSFIERMTNFDKNLPNEKVLPKHSLLYEYFTVYNELTKVKY | |
| | | | VTEGMRKPAFLSGEQKKAIVDLLFKTNRKVTVKQLKEDYFKKIECFDSVEISGVEDRFNASLGTY | |
| | | | HDLLKIIKDKDFLDNEENEDILEDIVLTLTLFEDREMIEERLKTYAHLFDDKVMKQLKRRRYTGWG | |
| | | | RLSRKLINGIRDKQSGKTILDFLKSDGFANRNFMQLIHDDSLTFKEDIQKAQVSGQGDSLHEHIANL | |
| | | | AGSPAIKKGILQTVKVVDELVKVMGRHKPENIVIEMARENQTTQKGQKNSRERMKRIEEGIKELG | |
| | | | SQILKEHPVENTQLQNEKLYLYYLQNGRDMYVDQELDINRLSDYDVDHIVPQSFLKDDSIDNKVL | |
| | | | TRSDKNRGKSDNVPSEEVVKKMKNYWRQLLNAKLITQRKFDNLTKAERGGLSELDKAGFIKRQL | |
| | | | VETRQITKHVAQILDSRMNTKYDENDKLIREVKVITLKSKLVSDFRKDFQFYKVREINNYHHAHD | |
| | | | AYLNAVVGTALIKKYPKLESEFVYGDYKVYDVRKMIAKSEQEIGKATAKYFFYSNIMNFFKTEITL | |
| | | | ANGEIRKRPLIETNGETGEIVWDKGRDFATVRKVLSMPQVNIVKKTEVQTGGFSKESIRPKRNSDK | |
| | | | LIARKKDWDPKKYGGFLWPTVAYSVLVVAKVEKGKSKKLKSVKELLGITIMERSSFEKNPIDFLE | |
| | | | AKGYKEVKKDLIIKLPKYSLFELENGRKRMLASAKQLQKGNELALPSKYVNFLYLASHYEKLKGS | |
| | | | PEDNEQKQLFVEQHKHYLDEIIEQISEFSKRVILADANLDKVLSAYNKHRDKPIREQAENIIHLFTLT | |
| | | | RLGAPRAFKYFDTTIDPKQYRSTKEVLDATLIHQSITGLYETRIDLSQLGGD | |
| St1Cas9 | Strep- | 3272 | MSDLVLGLDIGIGSVGVGILNKVTGEIIHKNSRIFPAAQAENNLVRRTNRQGRRLARRKKHRRVRL | N622A |
| | tococcus | | NRLFEESGLITDFTKISINLNPYQLRVKGLTDELSNEELFIALKNMVKHRGISYLDDASDDGNSSVG | |
| | thermo- | | DYAQIVKENSKQLETKTPGQIQLERYQTYGQLRGDFTVEKDGKKHRLINVFPTSAYRSEALRILQT | |
| | philus | | QQEFNPQITDEFINRYLEILTGKRKYYHGPGNEKSRTDYGRYRTSGETLDNIFGILIGKCTFYPDEFR | |
| | | | AAKASYTAQEFNLLNDLNNLTVPTETKKLSKEQKNQIINYVKNEKAMGPAKLFKYIAKLLSCDVA | |
| | | | DIKGYRIDKSGKAEIHTFEAYRKMKTLETLDIEQMDRETLDKLAYVLTLNTEREGIQEALEHEFAD | |
| | | | GSFSQKQVDELVQFRKANSSIFGKGWHNFSVKLMMELIPELYETSEEQMTILTRLGKQKTTSSSNK | |
| | | | TKYIDEKLLTEEIYNPVVAKSVRQAIKIVNAAIKEYGDFDNIVIEMARETNEDDEKKAIQKIQKANK | |
| | | | DEKDAAMLKAANQYNGKAELPHSVFHGHKQLATKIRLWHQQGERCLYTGKTISIHDLINNSNQF | |
| | | | EVDHILPLSITFDDSLANKVLVYATANQEKGQRTPYQALDSMDDAWSFRELKAFVRESKTLSNKK | |
| | | | KEYLLTEEDISKFDVRKKFIERNLVDTRYASRVVLNALQEHFRAHKIDTKVSVVRGQFTSQLRRH | |
| | | | WGIEKTRDTYHHHAVDALIIAASSQLNLWKKQKNTLVSYSEDQLLDIETGELISDDEYKESVFKAP | |
| | | | YQHFVDTLKSKEFEDSILFSYQVDSKFNRKISDATIYATRQAKVGKDKADETYVLGKIKDIYTQDG | |
| | | | YDAFMKIYKKDKSKFLMYRHDPQTFEKVIEPILENYPNKQINEKGKEVPCNPFLKYKEEHGYIRKY | |
| | | | SKKGNGPEIKSLKYYDSKLGNHIDITPKDSNNKVVLQSVSPWRADVYFNKTTGKYEILGLKYADL | |
| | | | QFEKGTGTYKISQEKYNDIKKKEGVDSDSEFKFTLYKNDLLLVKDTETKEQQLFRFLSRTMPKQK | |
| | | | HYVELKPYDKQKFEGGEALIKVLGNVANSGQCKKGLGKSNISIYKVRTDVLGNQHIIKNEGDKPK | |
| | | | LDF | |
| BlatCas9 | Brevi- | 3273 | MAYTMGIDVGIASCGWAIVDLERQRIIDIGVRTFEKAENPKNGEALAVPRREARSSRRRLRRKKHR | N607A |
| | bacillus | | IERLKHMFVRNGLAVDIQHLEQTLRSQNEIDVWQLRVDGLDRMLTQKEWLRVLIHLAQRRGFQS | |
| | latero- | | NRKTDGSSEDGQVLVNVTENDRLMEEKDYRTVAEMMVKDEKFSDHKRNKNGNYHGVVSRSSL | |
| | sporus | | LVEIHTLFETQRQHHNSLASKDFELEYVNIWSAQRPVATKDQIEKMIGTCTFLPKEKRAPKASWHF | |
| | | | QYFMLLQTINHIRITNVQGTRSLNKEEIEQVVNMALTKSKVSYHDTRKILDLSEEYQFVGLDYGKE | |
| | | | DEKKKVESKETIIKLDDYHKLNKIFNEVELAKGETWEADDYDTVAYALTFFKDDEDIRDYLQNKY | |
| | | | KDSKNRLVKNLANKEYTNELIGKVSTLSFRKVGHLSLKALRKIIPFLEQGMTYDKACQAAGFDFQ | |
| | | | GISKKKRSVVLPVIDQISNPVVNRALTQTRKVINALIKKYGSPETIHIETARELSKTFDERKNITKDY | |
| | | | KENRDKNEHAKKHLSELGIINPTGLDIVKYKLWCEQQGRCMYSNQPISFERLKESGYTEVDHIIPY | |
| | | | SRSMNDSYNNRVLVMTRENREKGNQTPFEYMGNDTQRWYEFEQRVTTNPQIKKEKRQNLLLKG | |
| | | | FTNRRELEMLERNLNDTRYITKYLSHFISTNLEFSPSDKKKKVVNTSGRITSHLRSRWGLEKNRGQ | |
| | | | NDLHHAMDAIVIAVTSDSFIQQVTNYYKRKERRELNGDDKFPLPWKFFREEVIARLSPNPKEQIEA | |
| | | | LPNHFYSEDELADLQPIFVSRMPKRSITGEAHQAQFRRVVGKTKEGKNITAKKTALVDISYDKNGD | |
| | | | FNMYGRETDPATYEAIKERYLEFGGNVKKAFSTDLHKPKKDGTKGPLIKSVRIMENKTLVHPVNK | |
| | | | GKGVVYNSSIVRTDVFQRKEKYYLLPVYVTDVTKGKLPNKVIVAKKGYHDWIEVDDSFTFLFSLY | |
| | | | PNDLIFIRQNPKKKISLKKRIESHSISDSKEVQEIHAYYKGVDSSTAAIEFIIHDGSYYAKGVGVQNL | |
| | | | DCFEKYQVDILGNYFKVKGEKRLELETSDSNHKGKDVNSIKSTSR | |
| cCas9- | Staphy- | 3274 | MKRNYILGLDIGITSVGYGIIDYETRDVIDAGVRLFKEANVENNEGRRSKRGARRLKRRRRHRIQR | N580A |
| v16 | lococcus | | VKKLLFDYNLLTDHSELSGINPYEARVKGLSQKLSEEEFSAALLHLAKRRGVHNVNEVEEDTGNE | |
| | aureus | | LSTKEQISRNSKALEEKYVAELQLERLKKDGEVRGSINRFKTSDYVKEAKQLLKVQKAYHQLDQS | |
| | | | FIDTYIDLLETRRTYYEGPGEGSPFGWKDIKEWYEMLMGHCTYFPEELRSVKYAYNADLYNALN | |
| | | | DLNNLVITRDENEKLEYYEKFQIIENVFKQKKKPTLKQIAKEILVNEEDIKGYRVTSTGKPEFTNLK | |
| | | | VYHDIKDITARKEIIENAELLDQIAKILTIYQSSEDIQEELTNLNSELTQEEIEQISNLKGYTGTHNL | |
| | | | SLKAINLILDELWHTNDNQIAIFNRLKLVPKKVDLSQQKEIPTTLVDDFILSPVVKRSFIQSIKVINA | |
| | | | IIKKYGLPNDIIIELAREKNSKDAQKMINEMQKRNRQTNERIEEIIRTTGKENAKYLIEKIKLHDMQE | |
| | | | GKCLYSLEAIPLEDLLNNPFNYEVDHIIPRSVSFDNSFNNKVLVKQEENSKKGNRTPFQYLSSSDSKI | |
| | | | SYETFKKHILNLAKGKGRISKTKKEYLLEERDINRFSVQKDFINRNLVDTRYATRGLMNLLRSYFRVN | |
| | | | NLDVKVKSINGGFTSFLRRKWKFKKERNKGYKHHAEDALIIANADFIFKEWKKLDKAKKVMENQ | |
| | | | MFEEKQAESMPEIETEQEYKEIFITPHQIKHIKDFKDYKYSHRVDKKPNRKLINDTLYSTRKDDKG | |
| | | | NTLIVNNLNGLYDKDNDKLKKLINKSPEKLLMYHHDPQTYQKLKLIMEQYGDEKNPLYKYYEET | |
| | | | GNYLTKYSKKDNGPVIKKIKYYGNKLNAHLDITDDYPNSRNKVVKLSLKPYRFDVYLDNGVYKF | |
| | | | VTVKNLDVIKKENYYEVNSKCYEEAKKLKKISNQAEFIASFYKNDLIKINGELYRVIGVNSDKNNL | |
| | | | IEVNMIDITYREYLENMNDKRPPHIIKTIASKTQSIKKYSTDILGNLYEVKSKKHPQIIKKG | |
| cCas9- | Staphy- | 3275 | MKRNYILGLDIGITSVGYGIIDYETRDVIDAGVRLFKEANVENNEGRRSKRGARRLKRRRRHRIQR | N580A |
| v17 | lococcus | | VKKLLFDYNLLTDHSELSGINPYEARVKGLSQKLSEEEFSAALLHLAKRRGVHNVNEVEEDTGNE | |
| | aureus | | LSTKEQISRNSKALEEKYVAELQLERLKKDGEVRGSINRFKTSDYVKEAKQLLKVQKAYHQLDQS | |
| | | | FIDTYIDLLETRRTYYEGPGEGSPFGWKDIKEWYEMLMGHCTYFPEELRSVKYAYNADLYNALN | |
| | | | DLNNLVITRDENEKLEYYEKFQIIENVFKQKKKPTLKQIAKEILVNEEDIKGYRVTSTGKPEFTNLK | |
| | | | VYHDIKDITARKEIIENAELLDQIAKILTIYQSSEDIQEELTNLNSELTQEEIEQISNLKGYTGTHNL | |
| | | | SLKAINLILDELWHTNDNQIAIFNRLKLVPKKVDLSQQKEIPTTLVDDFILSPVVKRSFIQSIKVINA | |
| | | | IIKKYGLPNDIIIELAREKNSKDAQKMINEMQKRNRQTNERIEEIIRTTGKENAKYLIEKIKLHDMQE | |
| | | | GKCLYSLEAIPLEDLLNNPFNYEVDHIIPRSVSFDNSFNNKVLVKQEENSKKGNRTPFQYLSSSDSKI | |
| | | | SYETFKKHILNLAKGKGRISKTKKEYLLEERDINRFSVQKDFINRNLVDTRYATRGLMNLLRSYFRVN | |
| | | | NLDVKVKSINGGFTSFLRRKWKFKKERNKGYKHHAEDALIIANADFIFKEWKKLDKAKKVMENQ | |
| | | | MFEEKQAESMPEIETEQEYKEIFITPHQIKHIKDFKDYKYSHRVDKKPNRKLINDTLYSTRKDDKG | |
| | | | NTLIVNNLNGLYDKDNDKLKKLINKSPEKLLMYHHDPQTYQKLKLIMEQYGDEKNPLYKYYEET | |
| | | | GNYLTKYSKKDNGPVIKKIKYYGNKLNAHLDITDDYPNSRNKVVKLSLKPYRFDVYLDNGVYKF | |
| | | | VTVKNLDVIKKENYYEVNSKCYEEAKKLKKISNQAEFIASFYKNDLIKINGELYRVIGVNNSTRNI | |
| | | | VELNMIDITYREYLENMNDKRPPHIIKTIASKTQSIKKYSTDILGNLYEVKSKKHPQIIKKG | |
| cCas9- | Staphy- | 3276 | MKRNYILGLDIGITSVGYGIIDYETRDVIDAGVRLFKEANVENNEGRRSKRGARRLKRRRRHRIQR | N580A |
| v21 | lococcus | | VKKLLFDYNLLTDHSELSGINPYEARVKGLSQKLSEEEFSAALLHLAKRRGVHNVNEVEEDTGNE | |
| | aureus | | LSTKEQISRNSKALEEKYVAELQLERLKKDGEVRGSINRFKTSDYVKEAKQLLKVQKAYHQLDQS | |
| | | | FIDTYIDLLETRRTYYEGPGEGSPFGWKDIKEWYEMLMGHCTYFPEELRSVKYAYNADLYNALN | |
| | | | DLNNLVITRDENEKLEYYEKFQIIENVFKQKKKPTLKQIAKEILVNEEDIKGYRVTSTGKPEFTNLK | |
| | | | VYHDIKDITARKEIIENAELLDQIAKILTIYQSSEDIQEELTNLNSELTQEEIEQISNLKGYTGTHNL | |
| | | | SLKAINLILDELWHTNDNQIAIFNRLKLVPKKVDLSQQKEIPTTLVDDFILSPVVKRSFIQSIKVINA | |
| | | | IIKKYGLPNDIIIELAREKNSKDAQKMINEMQKRNRQTNERIEEIIRTTGKENAKYLIEKIKLHDMQE | |
| | | | GKCLYSLEAIPLEDLLNNPFNYEVDHIIPRSVSFDNSFNNKVLVKQEENSKKGNRTPFQYLSSSDSKI | |
| | | | SYETFKKHILNLAKGKGRISKTKKEYLLEERDINRFSVQKDFINRNLVDTRYATRGLMNLLRSYFRVN | |
| | | | NLDVKVKSINGGFTSFLRRKWKFKKERNKGYKHHAEDALIIANADFIFKEWKKLDKAKKVMENQ | |
| | | | MFEEKQAESMPEIETEQEYKEIFITPHQIKHIKDFKDYKYSHRVDKKPNRKLINDTLYSTRKDDKG | |
| | | | NTLIVNNLNGLYDKDNDKLKKLINKSPEKLLMYHHDPQTYQKLKLIMEQYGDEKNPLYKYYEET | |
| | | | GNYLTKYSKKDNGPVIKKIKYYGNKLNAHLDITDDYPNSRNKVVKLSLKPYRFDVYLDNGVYKF | |
| | | | VTVKNLDVIKKENYYEVNSKCYEEAKKLKKISNQAEFIASFYKNDLIKINGELYRVIGVNSDDRNII | |
| | | | ELNMIDITYREYLENMNDKRPPHIIKTIASKTQSIKKYSTDILGNLYEVKSKKHPQIIKKG | |
| cCas9- | Staphy- | 3277 | MKRNYILGLDIGITSVGYGIIDYETRDVIDAGVRLFKEANVENNEGRRSKRGARRLKRRRRHRIQR | N580A |
| v42 | lococcus | | VKKLLFDYNLLTDHSELSGINPYEARVKGLSQKLSEEEFSAALLHLAKRRGVHNVNEVEEDTGNE | |
| | aureus | | LSTKEQISRNSKALEEKYVAELQLERLKKDGEVRGSINRFKTSDYVKEAKQLLKVQKAYHQLDQS | |
| | | | FIDTYIDLLETRRTYYEGPGEGSPFGWKDIKEWYEMLMGHCTYFPEELRSVKYAYNADLYNALN | |
| | | | DLNNLVITRDENEKLEYYEKFQIIENVFKQKKKPTLKQIAKEILVNEEDIKGYRVTSTGKPEFTNLK | |
| | | | VYHDIKDITARKEIIENAELLDQIAKILTIYQSSEDIQEELTNLNSELTQEEIEQISNLKGYTGTHNL | |
| | | | SLKAINLILDELWHTNDNQIAIFNRLKLVPKKVDLSQQKEIPTTLVDDFILSPVVKRSFIQSIKVINA | |
| | | | IIKKYGLPNDIIIELAREKNSKDAQKMINEMQKRNRQTNERIEEIIRTTGKENAKYLIEKIKLHDMQE | |
| | | | GKCLYSLEAIPLEDLLNNPFNYEVDHIIPRSVSFDNSFNNKVLVKQEENSKKGNRTPFQYLSSSDSKI | |
| | | | SYETFKKHILNLAKGKGRISKTKKEYLLEERDINRFSVQKDFINRNLVDTRYATRGLMNLLRSYFRVN | |
| | | | NLDVKVKSINGGFTSFLRRKWKFKKERNKGYKHHAEDALIIANADFIFKEWKKLDKAKKVMENQ | |
| | | | MFEEKQAESMPEIETEQEYKEIFITPHQIKHIKDFKDYKYSHRVDKKPNRKLINDTLYSTRKDDKG | |
| | | | NTLIVNNLNGLYDKDNDKLKKLINKSPEKLLMYHHDPQTYQKLKLIMEQYGDEKNPLYKYYEET | |
| | | | GNYLTKYSKKDNGPVIKKIKYYGNKLNAHLDITDDYPNSRNKVVKLSLKPYRFDVYLDNGVYKF | |
| | | | VTVKNLDVIKKENYYEVNSKCYEEAKKLKKISNQAEFIASFYKNDLIKINGELYRVIGVNNNRLNK | |
| | | | IELNMIDITYREYLENMNDKRPPHIIKTIASKTQSIKKYSTDILGNLYEVKSKKHPQIIKKG | |
| CdiCas9 | Coryne- | 3278 | MKYHVGIDVGTFSVGLAAIEVDDAGMPIKTLSLVSHIHDSGLDPDEIKSAVTRLASSGIARRTRRL | H573A |
| | bacter- | | YRRKRRRLQQLDKFIQRQGWPVIELEDYSDPLYPWKVRAELAASYIADEKERGEKLSVALRHIAR | (Al- |
| | ium | | HRGWRNPYAKVSSLYLPDGPSDAFKAIREEIKRASGQPVPETATVGQMVTLCELGTLKLRGEGGV | ter- |
| | diph- | | LSARLQQSDYAREIQEICRMQEIGQELYRKIIDVVFAAESPKGSASSRVGKDPLQPGKNRALKASD | nate) |
| | theriae | | AFQRYRIAALIGNLRVRVDGEKRILSVEEKNLVFDHLVNLTPKKEPEWVTIAEILGIDRGQLIGTAT | |
| | | | MTDDGERAGARPPTHDTNRSIVNSRIAPLVDWWKTASALEQHAMVKALSNAEVDDFDSPEGAK | |
| | | | VQAFFADLDDDVHAKLDSLHLPVGRAAYSEDTLVRLTRRMLSDGVDLYTARLQEFGIEPSWTPPT | |
| | | | PRIGEPVGNPAVDRVLKTVSRWLESATKTWGAPERVIIEHVREGFVTEKRAREMDGDMRRRAAR | |
| | | | NAKLFQEMQEKLNVQGKPSRADLWRYQSVQRQNCQCAYCGSPITFSNSEMDHIVPRAGQGSTNT | |
| | | | RENLVAVCHRCNQSKGNTPFAIWAKNTSIEGVSVKEAVERTRHWVTDTGMRSTDFKKFTKAVVE | |
| | | | RFQRATMDEEIDARSMESVAWMANELRSRVAQHFASHGTTVRVYRGSLTAEARRASGISGKLKF | |
| | | | FDGVGKSRLDRRHHAIDAAVIAFTSDYVAETLAVRSNLKQSQAHRQEAPQWREFTGKDAEHRAA | |
| | | | WRVWCQKMEKLSALLTEDLRDDRVVVMSNVRLRLGNGSAHKETIGKLSKVKLSSQLSVSDIDKA | |
| | | | SSEALWCALTREPGFDPKEGLPANPERHIRVNGTHVYAGDNIGLFPVSAGSIALRGGYAELGSSFH | |
| | | | HARVYKITSGKKPAFAMLRVYTIDLLPYRNQDLFSVELKPQTMSMRQAEKKLRDALATGNAEYL | |
| | | | GWLVVDDELVVDTSKIATDQVKAVEAELGTIRRWRVDGFFSPSKLRLRPLQMSKEGIKKESAPEL | |
| | | | SKIIDRPGWLPAVNKLFSDGNVTVVRRDSLGRVRLESTAHLPVTWKVQ | |
| CjeCas9 | Campylo- | 3279 | MARILAFDIGISSIGWAFSENDELKDCGVRIFTKVENPKTGESLALPRRLARSARKRLARRKARLN | N582A |
| | bacter | | HLKHLIANEFKLNYEDYQSFDESLAKAYKGSLISPYELRFRALNELLSKQDFARVILHIAKRRGYD | |
| | jejuni | | DIKNSDDKEKGAILKAIKQNEEKLANYQSVGEYLYKEYFQKFKENSKEFTNVRNKKESYERCIAQ | |
| | | | SFLKDELKLIFKKQREFGFSFSKKFEEEVLSVAFYKRALKDFSHLVGNCSFFTDEKRAPKNSPLAFM | |
| | | | FVALTRIINLLNNLKNTEGILYTKDDLNALLNEVLKNGTLTYKQTKKLLGLSDDYEFKGEKGTYFI | |
| | | | EFKKYKEFIKALGEHNLSQDDLNEIAKDITLIKDEIKLKKALAKYDLNQNQIDSLSKLEFKDHLNIS | |
| | | | FKALKLVTPLMLEGKKYDEACNELNLKVAINEDKKDFLPAFNETYYKDEVTNPVVLRAIKEYRK | |
| | | | VLNALLKKYGKVHKINIELAREVGKNHSQRAKIEKEQNENYKAKKDAELECEKLGLKINSKNILK | |
| | | | LRLFKEQKEFCAYSGEKIKISDLQDEKMLEIDHIYPYSRSFDDSYMNKVLVFTKQNQEKLNQTPFE | |
| | | | AFGNDSAKWQKIEVLAKNLPTKKQKRILDKNYKDKEQKNFKDRNLNDTRYIARLVLNYTKDYLD | |
| | | | FLPLSDDENTKLNDTQKGSKVHVEAKSGMLTSALRHTWGFSAKDRNNHLHHAIDAVIIAYANNSI | |
| | | | VKAFSDFKKEQESNSAELYAKKISELDYKNKRKFFEPFSGFRQKVLDKIDEIFVSKPERKKPSGALH | |
| | | | EETFRKEEEFYQSYGGKEGVLKALELGKIRKVNGKIVKNGDMFRVDIFKHKKTNKFYAVPIYTMD | |
| | | | FALKVLPNKAVARSKKGEIKDWILMDENYEFCFSLYKDSLILIQTKDMQEPEFVYYNAFTSSTVSLI | |
| | | | VSKHDNKFETLSKNQKILFKNANEKEVIAKSIGIQNLKVFEKYIVSALGEVTKAEFRQREDFKK | |
| GeoCas9 | Geo- | 3280 | MRYKIGLDIGITSVGWAVMNLDIPRIEDLGVRIFDRAENPQTGESLALPRRLARSARRRLRRRKHR | N605A |
| | bacillus | | LERIRRLVIREGILTKEELDKLFEEKHEIDVWQLRVEALDRKLNNDELARVLLHLAKRRGFKSNRK | |
| | stearo- | | SERSNKENSTMLKHIEENRAILSSYRTVGEMIVKDPKFALHKRNKGENYTNTIARDDLEREIRLIFS | |
| | ther- | | KQREFGNMSCTEEFENEYITIWASQRPVASKDDIEKKVGFCTFEPKEKRAPKATYTFQSFIAWEHIN | |
| | mophilus | | KLRLISPSGARGLTDEERRLLYEQAFQKNKITYHDIRTLLHLPDDTYFKGIVYDRGESRKQNENIRF | |
| | | | LELDAYHQIRKAVDKVYGKGKSSSFLPIDFDTFGYALTLFKDDADIHSYLRNEYEQNGKRMPNLA | |
| | | | NKVYDNELIEELLNLSFTKFGHLSLKALRSILPYMEQGEVYSSACERAGYTFTGPKKKQKTMLLPN | |
| | | | IPPIANPVVMRALTQARKVVNAIIKKYGSPVSIHIELARDLSQTFDERRKTKKEQDENRKKNETAIR | |
| | | | QLMEYGLTLNPTGHDIVKFKLWSEQNGRCAYSLQPIEIERLLEPGYVEVDHVIPYSRSLDDSYTNK | |
| | | | VLVLTRENREKGNRIPAEYLGVGTERWQQFETFVLTNKQFSKKKRDRLLRLHYDENEETEFKNRN | |
| | | | LNDTRYISRFFANFIREHLKFAESDDKQKVYTVNGRVTAHLRSRWEFNKNREESDLHHAVDAVIV | |
| | | | ACTTPSDIAKVTAFYQRREQNKELAKKTEPHFPQPWPHFADELRARLSKHPKESIKALNLGNYDD | |
| | | | QKLESLQPVFVSRMPKRSVTGAAHQETLRRYVGIDERSGKIQTVVKTKLSEIKLDASGHFPMYGK | |
| | | | ESDPRTYEAIRQRLLEHNNDPKKAFQEPLYKPKKNGEPGPVIRTVKIIDTKNQVIPLNDGKTVAYN | |
| | | | SNIVRVDVFEKDGKYYCVPVYTMDIMKGILPNKAIEPNKPYSEWKEMTEDYTFRFSLYPNDLIRIE | |
| | | | LPREKTVKTAAGEEINVKDVFVYYKTIDSANGGLELISHDHRFSLRGVGSRTLKRFEKYQVDVLG | |
| | | | NIYKVRGEKRVGLASSAHSKPGKTIRPLQSTRD | |
| iSpyMac | Strep- | 3281 | MDKKYSIGLDIGTNSVGWAVITDEYKVPSKKFKVLGNTDRHSIKKNLIGALLFDSGETAEATRLKR | N863A |
| Cas9 | tococcus | | TARRRYTRRKNRICYLQEIFSNEMAKVDDSFFHRLEESFLVEEDKKHERHPIFGNIVDEVAYHEKY | |
| | spp. | | PTIYHLRKKLVDSTDKADLRLIYLALAHMIKFRGHFLIEGDLNPDNSDVDKLFIQLVQTYNQLFEE | |
| | | | NPINASGVDAKAILSARLSKSRKLENLIAQLPGEKKNGLFGNLIALSLGLTPNFKSNFDLAEDAKLQ | |
| | | | LSKDTYDDDLDNLLAQIGDQYADLFLAAKNLSDAILLSDILRVNTEITKAPLSASMIKRYDEHHQD | |
| | | | LTLLKALVRQQLPEKYKEIFFDQSKNGYAGYIDGGASQEEFYKFIKPILEKMDGTEELLVKLKRED | |
| | | | LLRKQRTFDNGSIPHQIHLGELHAILRRQEDFYPFLKDNREKIEKILTFRIPYYVGPLARGNSRFAW | |
| | | | MTRKSEETITPWNFEEVVDKGASAQSFIERMTNFDKNLPNEKVLPKHSLLYEYFTVYNELTKVKY | |
| | | | VTEGMRKPAFLSGEQKKAIVDLLFKTNRKVTVKQLKEDYFKKIECFDSVEISGVEDRFNASLGTY | |
| | | | HDLLKIIKDKDFLDNEENEDILEDIVLTLTLFEDREMIEERLKTYAHLFDDKVMKQLKRRRYTGWG | |
| | | | RLSRKLINGIRDKQSGKTILDFLKSDGFANRNFMQLIHDDSLTFKEDIQKAQVSGQGDSLHEHIANL | |
| | | | AGSPAIKKGILQTVKVVDELVKVMGRHKPENIVIEMARENQTTQKGQKNSRERMKRIEEGIKELG | |
| | | | SQILKEHPVENTQLQNEKLYLYYLQNGRDMYVDQELDINRLSDYDVDHIVPQSFLKDDSIDNKVL | |
| | | | TRSDKNRGKSDNVPSEEVVKKMKNYWRQLLNAKLITQRKFDNLTKAERGGLSELDKAGFIKRQL | |
| | | | VETRQITKHVAQILDSRMNTKYDENDKLIREVKVITLKSKLVSDFRKDFQFYKVREINNYHHAHD | |
| | | | AYLNAVVGTALIKKYPKLESEFVYGDYKVYDVRKMIAKSEQEIGKATAKYFFYSNIMNFFKTEITL | |
| | | | ANGEIRKRPLIETNGETGEIVWDKGRDFATVRKVLSMPQVNIVKKTEIQTVGQNGGLFDDNPKSPL | |
| | | | EVTPSKLVPLKKELNPKKYGGYQKPTTAYPVLLITDTKQLIPISVMNKKQFEQNPVKFLRDRGYQQ | |
| | | | VGKNDFIKLPKYTLVDIGDGIKRLWASSKEIHKGNQLVVSKKSQILLYHAHHLDSDLSNDYLQNH | |
| | | | NQQFDVLFNEIISFSKKCKLGKEHIQKIENVYSNKKNSASIEELAESFIKLLGFTQLGATSPFNFLGV | |
| | | | KLNQKQYKGKKDYILPCTEGTLIRQSITGLYETRVDLSKIGEDSGGSGGSKRTADGSEFES | |
| NmeCas9 | Neis- | 3282 | MAAFKPNSINYILGLDIGIASVGWAMVEIDEEENPIRLIDLGVRVFERAEVPKTGDSLAMARRLAR | N611A |
| | seria | | SVRRLTRRRAHRLLRTRRLLKREGVLQAANFDENGLIKSLPNTPWQLRAAALDRKLTPLEWSAVL | |
| | menin- | | LHLIKHRGYLSQRKNEGETADKELGALLKGVAGNAHALQTGDFRTPAELALNKFEKESGHIRNQR | |
| | gitidis | | SDYSHTFSRKDLQAELILLFEKQKEFGNPHVSGGLKEGIETLLMTQRPALSGDAVQKMLGHCTFEP | |
| | | | AEPKAAKNTYTAERFIWLTKLNNLRILEQGSERPLTDTERATLMDEPYRKSKLTYAQARKLLGLE | |
| | | | DTAFFKGLRYGKDNAEASTLMEMKAYHAISRALEKEGLKDKKSPLNLSPELQDEIGTAFSLFKTD | |
| | | | EDITGRLKDRIQPEILEALLKHISFDKFVQISLKALRRIVPLMEQGKRYDEACAEIYGDHYGKKNTE | |
| | | | EKIYLPPIPADEIRNPVVLRALSQARKVINGVVRRYGSPARIHIETAREVGKSFKDRKEIEKRQEENR | |
| | | | KDREKAAAKFREYFPNFVGEPKSKDILKLRLYEQQHGKCLYSGKEINLGRLNEKGYVEIDHALPFS | |
| | | | RTWDDSFNNKVLVLGSENQNKGNQTPYEYFNGKDNSREWQEFKARVETSRFPRSKKQRILLQKF | |
| | | | DEDGFKERNLNDTRYVNRFLCQFVADRMRLTGKGKKRVFASNGQITNLLRGFWGLRKVRAEND | |
| | | | RHHALDAVVVACSTVAMQQKITRFVRYKEMNAFDGKTIDKETGEVLHQKTHFPQPWEFFAQEV | |
| | | | MIRVFGKPDGKPEFEEADTLEKLRTLLAEKLSSRPEAVHEYVTPLFVSRAPNRKMSGQGHMETVK | |
| | | | SAKRLDEGVSVLRVPLTQLKLKDLEKMVNREREPKLYEALKARLEAHKDDPAKAFAEPFYKYDK | |
| | | | AGNRTQQVKAVRVEQVQKTGVWVRNHNGIADNATMVRVDVFEKGDKYYLVPIYSWQVAKGIL | |
| | | | PDRAVVQGKDEEDWQLIDDSFNFKFSLHPNDLVEVITKKARMFGYFASCHRGTGNINIRIHDLDH | |
| | | | KIGKNGILEGIGVKTALSFQKYQIDELGKEIRPCRLKKRPPVR | |
| ScaCas9 | Strep- | 3283 | MEKKYSIGLDIGTNSVGWAVITDDYKVPSKKFKVLGNTNRKSIKKNLMGALLFDSGETAEATRLK | N872A |
| | tococcus | | RTARRRYTRRKNRIRYLQEIFANEMAKLDDSFFQRLEESFLVEEDKKNERHPIFGNLADEVAYHRN | |
| | canis | | YPTIYHLRKKLADSPEKADLRLIYLALAHIIKFRGHFLIEGKLNAENSDVAKLFYQLIQTYNQLFEE | |
| | | | SPLDEIEVDAKGILSARLSKSKRLEKLIAVFPNEKKNGLFGNIIALALGLTPNFKSNFDLTEDAKLQL | |
| | | | SKDTYDDDLDELLGQIGDQYADLFSAAKNLSDAILLSDILRSNSEVTKAPLSASMVKRYDEHHQD | |
| | | | LALLKTLVRQQFPEKYAEIFKDDTKNGYAGYVGIGIKHRKRTTKLATQEEFYKFIKPILEKMDGAE | |
| | | | ELLAKLNRDDLLRKQRTFDNGSIPHQIHLKELHAILRRQEEFYPFLKENREKIEKILTFRIPYYVGPL | |
| | | | ARGNSRFAWLTRKSEEAITPWNFEEVVDKGASAQSFIERMTNFDEQLPNKKVLPKHSLLYEYFTV | |
| | | | YNELTKVKYVTERMRKPEFLSGEQKKAIVDLLFKTNRKVTVKQLKEDYFKKIECFDSVEIIGVEDR | |
| | | | FNASLGTYHDLLKIIKDKDFLDNEENEDILEDIVLTLTLFEDREMIEERLKTYAHLFDDKVMKQLK | |
| | | | RRHYTGWGRLSRKMINGIRDKQSGKTILDFLKSDGFSNRNFMQLIHDDSLTFKEEIEKAQVSGQGD | |
| | | | SLHEQIADLAGSPAIKKGILQTVKIVDELVKVMGHKPENIVIEMARENQTTTKGLQQSRERKKRIEE | |
| | | | GIKELESQILKENPVENTQLQNEKLYLYYLQNGRDMYVDQELDINRLSDYDVDHIVPQSFIKDDSI | |
| | | | DNKVLTRSVENRGKSDNVPSEEVVKKMKNYWRQLLNAKLITQRKFDNLTKAERGGLSEADKAG | |
| | | | FIKRQLVETRQITKHVARILDSRMNTKRDKNDKPIREVKVITLKSKLVSDFRKDFQLYKVRDINNY | |
| | | | HHAHDAYLNAVVGTALIKKYPKLESEFVYGDYKVYDVRKMIAKSEQEIGKATAKRFFYSNIMNF | |
| | | | FKTEVKLANGEIRKRPLIETNGETGEVVWNKEKDFATVRKVLAMPQVNIVKKTEVQTGGFSKESI | |
| | | | LSKRESAKLIPRKKGWDTRKYGGFGSPTVAYSILVVAKVEKGKAKKLKSVKVLVGITIMEKGSYE | |
| | | | KDPIGFLEAKGYKDIKKELIFKLPKYSLFELENGRRRMLASATELQKANELVLPQHLVRLLYYTQN | |
| | | | ISATTGSNNLGYIEQHREEFKEIFEKIIDFSEKYILKNKVNSNLKSSFDEQFAVSDSILLSNSFVSLL | |
| | | | KYTSFGASGGFTFLDLDVKQGRLRYQTVTEVLDATLIYQSITGLYETRTDLSQLGGD | |
| ScaCas9- | Strep- | 3284 | MEKKYSIGLDIGTNSVGWAVITDDYKVPSKKFKVLGNTNRKSIKKNLMGALLFDSGETAEATRLK | N872A |
| HiFi- | tococcus | | RTARRRYTRRKNRIRYLQEIFANEMAKLDDSFFQRLEESFLVEEDKKNERHPIFGNLADEVAYHRN | |
| Sc++ | canis | | YPTIYHLRKKLADSPEKADLRLIYLALAHIIKFRGHFLIEGKLNAENSDVAKLFYQLIQTYNQLFEE | |
| | | | SPLDEIEVDAKGILSARLSKSKRLEKLIAVFPNEKKNGLFGNIIALALGLTPNFKSNFDLTEDAKLQL | |
| | | | SKDTYDDDLDELLGQIGDQYADLFSAAKNLSDAILLSDILRSNSEVTKAPLSASMVKRYDEHHQD | |
| | | | LALLKTLVRQQFPEKYAEIFKDDTKNGYAGYVGADKKLRKRSGKLATEEEFYKFIKPILEKMDGA | |
| | | | EELLAKLNRDDLLRKQRTFDNGSIPHQIHLKELHAILRRQEEFYPFLKENREKIEKILTFRIPYYVGP | |
| | | | LARGNSRFAWLTRKSEEAITPWNFEEVVDKGASAQSFIERMTNFDEQLPNKKVLPKHSLLYEYFT | |
| | | | VYNELTKVKYVTERMRKPEFLSGEQKKAIVDLLFKTNRKVTVKQLKEDYFKKIECFDSVEIIGVED | |
| | | | RFNASLGTYHDLLKIIKDKDFLDNEENEDILEDIVLTLTLFEDREMIEERLKTYAHLFDDKVMKQL | |
| | | | KRRHYTGWGRLSRKMINGIRDKQSGKTILDFLKSDGFSNANFMQLIHDDSLTFKEEIEKAQVSGQ | |
| | | | GDSLHEQIADLAGSPAIKKGILQTVKIVDELVKVMGHKPENIVIEMARENQTTTKGLQQSRERKKR | |
| | | | IEEGIKELESQILKENPVENTQLQNEKLYLYYLQNGRDMYVDQELDINRLSDYDVDHIVPQSFIKD | |
| | | | DSIDNKVLTRSVENRGKSDNVPSEEVVKKMKNYWRQLLNAKLITQRKFDNLTKAERGGLSEADK | |
| | | | AGFIKRQLVETRQITKHVARILDSRMNTKRDKNDKPIREVKVITLKSKLVSDFRKDFQLYKVRDIN | |
| | | | NYHHAHDAYLNAVVGTALIKKYPKLESEFVYGDYKVYDVRKMIAKSEQEIGKATAKRFFYSNIM | |
| | | | NFFKTEVKLANGEIRKRPLIETNGETGEVVWNKEKDFATVRKVLAMPQVNIVKKTEVQTGGFSKE | |
| | | | SILSKRESAKLIPRKKGWDTRKYGGFGSPTVAYSILVVAKVEKGKAKKLKSVKVLVGITIMEKGSY | |
| | | | EKDPIGFLEAKGYKDIKKELIFKLPKYSLFELENGRRRMLASAKELQKANELVLPQHLVRLLYYTQ | |
| | | | NISATTGSNNLGYIEQHREEFKEIFEKIIDFSEKYILKNKVNSNLKSSFDEQFAVSDSILLSNSFVSL | |
| | | | LKYTSFGASGGFTFLDLDVKQGRLRYQTVTEVLDATLIYQSITGLYETRTDLSQLGGD | |
| SpyCas9- | Strep- | 3285 | MDKKYSIGLDIGTNSVGWAVITDEYKVPSKKFKVLGNTDRHSIKKNLIGALLFDSGETAEATRLKR | N863A |
| 3var- | tococcus | | TARRRYTRRKNRICYLQEIFSNEMAKVDDSFFHRLEESFLVEEDKKHERHPIFGNIVDEVAYHEKY | |
| NRRH | pyogenes | | PTIYHLRKKLVDSTDKADLRLIYLALAHMIKFRGHFLIEGDLNPDNSDVDKLFIQLVQTYNQLFEE | |
| | | | NPINASGVDAKAILSARLSKSRRLENLIAQLPGEKKNGLFGNLIALSLGLTPNFKSNFDLAEDAKLQ | |
| | | | LSKDTYDDDLDNLLAQIGDQYADLFLAAKNLSDAILLSDILRVNTEITKAPLSASMVKRYDEHHQ | |
| | | | DLTLLKALVRQQLPEKYKEIFFDQSKNGYAGYIDGGASQEEFYKFIKPILEKMDGTEELLVKLNRE | |
| | | | DLLRKQRTFDNGIIPHQIHLGELHAILRRQGDFYPFLKDNREKIEKILTFRIPYYVGPLARGNSRFAW | |
| | | | MTRKSEETITPWNFEEVVDKGASAQSFIERMTNFDKNLPNEKVLPKHSLLYEYFTVYNELTKVKY | |
| | | | VTEGMRKPAFLSGEQKKAIVDLLFKTNRKVTVKQLKEDYFKKIECFDSVEISGVEDRFNASLGTY | |
| | | | HDLLKIIKDKDFLDNEENEDILEDIVLTLTLFEDREMIEERLKTYAHLFDDKVMKQLKRLRYTGWG | |
| | | | RLSRKLINGIRDKQSGKTILDFLKSDGFANRNFMQLIHDDSLTFKEDIQKAQVSGQGDSLHEHIANL | |
| | | | AGSPAIKKGILQTVKVVDELVKVMGGHKPENIVIEMARENQTTQKGQKNSRERMKRIEEGIKELG | |
| | | | SQILKEHPVENTQLQNEKLYLYYLQNGRDMYVDQELDINRLSDYDVDHIVPQSFLKDDSIDNKVL | |
| | | | TRSDKNRGKSDNVPSEEVVKKMKNYWRQLLNAKLITQRKFDNLTKAERGGLSELDKAGFIKRQL | |
| | | | VETRQITKHVAQILDSRMNTKYDENDKLIREVKVITLKSKLVSDFRKDFQFYKVREINNYHHAHD | |
| | | | AYLNAVVGTALIKKYPKLESEFVYGDYKVYDVRKMIAKSEQEIGKATAKYFFYSNIMNFFKTEITL | |
| | | | ANGEIRKRPLIETNGETGEIVWDKGRDFATVRKVLSMPQVNIVKKTEVQTGGFSKESILPKGNSDK | |
| | | | LIARKKDWDPKKYGGFNSPTAAYSVLVVAKVEKGKSKKLKSVKELLGITIMERSSFEKNPIGFLEA | |
| | | | KGYKEVKKDLIIKLPKYSLFELENGRKRMLASAGVLHKGNELALPSKYVNFLYLASHYEKLKGSP | |
| | | | EDNEQKQLFVEQHKHYLDEIIEQISEFSKRVILADANLDKVLSAYNKHRDKPIREQAENIIHLFTLT | |
| | | | NLGVPAAFKYFDTTIDKKRYTSTKEVLDATLIHQSITGLYETRIDLSQLGGD | |
| SpyCas9- | Strep- | 3286 | MDKKYSIGLDIGTNSVGWAVITDEYKVPSKKFKVLGNTDRHSIKKNLIGALLFDSGETAEATRLKR | N863A |
| 3var- | tococcus | | TARRRYTRRKNRICYLQEIFSNEMAKVDDSFFHRLEESFLVEEDKKHERHPIFGNIVDEVAYHEKY | |
| NRTH | pyogenes | | PTIYHLRKKLVDSTDKADLRLIYLALAHMIKFRGHFLIEGDLNPDNSDVDKLFIQLVQTYNQLFEE | |
| | | | NPINASGVDAKAILSARLSKSRRLENLIAQLPGEKKNGLFGNLIALSLGLTPNFKSNFDLAEDAKLQ | |
| | | | LSKDTYDDDLDNLLAQIGDQYADLFLAAKNLSDAILLSDILRVNTEITKAPLSASMVKRYDEHHQ | |
| | | | DLTLLKALVRQQLPEKYKEIFFDQSKNGYAGYIDGGASQEEFYKFIKPILEKMDGTEELLVKLNRE | |
| | | | DLLRKQRTFDNGIIPHQIHLGELHAILRRQGDFYPFLKDNREKIEKILTFRIPYYVGPLARGNSRFAW | |
| | | | MTRKSEETITPWNFEEVVDKGASAQSFIERMTNFDKNLPNEKVLPKHSLLYEYFTVYNELTKVKY | |
| | | | VTEGMRKPAFLSGEQKKAIVDLLFKTNRKVTVKQLKEDYFKKIECFDSVEISGVEDRFNASLGTY | |
| | | | HDLLKIIKDKDFLDNEENEDILEDIVLTLTLFEDREMIEERLKTYAHLFDDKVMKQLKRLRYTGWG | |
| | | | RLSRKLINGIRDKQSGKTILDFLKSDGFANRNFMQLIHDDSLTFKEDIQKAQVSGQGDSLHEHIANL | |
| | | | AGSPAIKKGILQTVKVVDELVKVMGGHKPENIVIEMARENQTTQKGQKNSRERMKRIEEGIKELG | |
| | | | SQILKEHPVENTQLQNEKLYLYYLQNGRDMYVDQELDINRLSDYDVDHIVPQSFLKDDSIDNKVL | |
| | | | TRSDKNRGKSDNVPSEEVVKKMKNYWRQLLNAKLITQRKFDNLTKAERGGLSELDKAGFIKRQL | |
| | | | VETRQITKHVAQILDSRMNTKYDENDKLIREVKVITLKSKLVSDFRKDFQFYKVREINNYHHAHD | |
| | | | AYLNAVVGTALIKKYPKLESEFVYGDYKVYDVRKMIAKSEQEIGKATAKYFFYSNIMNFFKTEITL | |
| | | | ANGEIRKRPLIETNGETGEIVWDKGRDFATVRKVLSMPQVNIVKKTEVQTGGFSKESILPKGNSDK | |
| | | | LIARKKDWDPKKYGGFNSPTVAYSVLVVAKVEKGKSKKLKSVKELLGITIMERSSFEKNPIGFLEA | |
| | | | KGYKEVKKDLIIKLPKYSLFELENGRKRMLASASVLHKGNELALPSKYVNFLYLASHYEKLKGSS | |
| | | | EDNKQKQLFVEQHKHYLDEIIEQISEFSKRVILADANLDKVLSAYNKHRDKPIREQAENIIHLFTLT | |
| | | | NLGASAAFKYFDTTIGRKLYTSTKEVLDATLIHQSITGLYETRIDLSQLGGD | |
| SpyCas9- | Strep- | 3287 | MDKKYSIGLDIGTNSVGWAVITDEYKVPSKKFKVLGNTDRHSIKKNLIGALLFDSGETAEATRLKR | N863A |
| 3var- | tococcus | | TARRRYTRRKNRICYLQEIFSNEMAKVDDSFFHRLEESFLVEEDKKHERHPIFGNIVDEVAYHEKY | |
| NRCH | pyogenes | | PTIYHLRKKLVDSTDKADLRLIYLALAHMIKFRGHFLIEGDLNPDNSDVDKLFIQLVQTYNQLFEE | |
| | | | NPINASGVDAKAILSARLSKSRRLENLIAQLPGEKKNGLFGNLIALSLGLTPNFKSNFDLAEDAKLQ | |
| | | | LSKDTYDDDLDNLLAQIGDQYADLFLAAKNLSDAILLSDILRVNTEITKAPLSASMVKRYDEHHQ | |
| | | | DLTLLKALVRQQLPEKYKEIFFDQSKNGYAGYIDGGASQEEFYKFIKPILEKMDGTEELLVKLNRE | |
| | | | DLLRKQRTFDNGIIPHQIHLGELHAILRRQGDFYPFLKDNREKIEKILTFRIPYYVGPLARGNSRFAW | |
| | | | MTRKSEETITPWNFEEVVDKGASAQSFIERMTNFDKNLPNEKVLPKHSLLYEYFTVYNELTKVKY | |
| | | | VTEGMRKPAFLSGEQKKAIVDLLFKTNRKVTVKQLKEDYFKKIECFDSVEISGVEDRFNASLGTY | |
| | | | HDLLKIIKDKDFLDNEENEDILEDIVLTLTLFEDREMIEERLKTYAHLFDDKVMKQLKRLRYTGWG | |
| | | | RLSRKLINGIRDKQSGKTILDFLKSDGFANRNFMQLIHDDSLTFKEDIQKAQVSGQGDSLHEHIANL | |
| | | | AGSPAIKKGILQTVKVVDELVKVMGGHKPENIVIEMARENQTTQKGQKNSRERMKRIEEGIKELG | |
| | | | SQILKEHPVENTQLQNEKLYLYYLQNGRDMYVDQELDINRLSDYDVDHIVPQSFLKDDSIDNKVL | |
| | | | TRSDKNRGKSDNVPSEEVVKKMKNYWRQLLNAKLITQRKFDNLTKAERGGLSELDKAGFIKRQL | |
| | | | VETRQITKHVAQILDSRMNTKYDENDKLIREVKVITLKSKLVSDFRKDFQFYKVREINNYHHAHD | |
| | | | AYLNAVVGTALIKKYPKLESEFVYGDYKVYDVRKMIAKSEQEIGKATAKYFFYSNIMNFFKTEITL | |
| | | | ANGEIRKRPLIETNGETGEIVWDKGRDFATVRKVLSMPQVNIVKKTEVQTGGFSKESILPKGNSDK | |
| | | | LIARKKDWDPKKYGGFNSPTVAYSVLVVAKVEKGKSKKLKSVKELLGITIMERSSFEKNPIDFLEA | |
| | | | KGYKEVKKDLIIKLPKYSLFELENGRKRMLASAGVLQKGNELALPSKYVNFLYLASHYEKLKGSP | |
| | | | EDNEQKQLFVEQHKHYLDEIIEQISEFSKRVILADANLDKVLSAYNKHRDKPIREQAENIIHLFTLT | |
| | | | NLGAPAAFKYFDTTINRKQYNTTKEVLDATLIRQSITGLYETRIDLSQLGGD | |
| SpyCas9- | Strep- | 3269 | MDKKYSIGLDIGTNSVGWAVITDEYKVPSKKFKVLGNTDRHSIKKNLIGALLFDSGETAEATRLKR | N863A |
| HF1 | tococcus | | TARRRYTRRKNRICYLQEIFSNEMAKVDDSFFHRLEESFLVEEDKKHERHPIFGNIVDEVAYHEKY | |
| | pyogenes | | PTIYHLRKKLVDSTDKADLRLIYLALAHMIKFRGHFLIEGDLNPDNSDVDKLFIQLVQTYNQLFEE | |
| | | | NPINASGVDAKAILSARLSKSRRLENLIAQLPGEKKNGLFGNLIALSLGLTPNFKSNFDLAEDAKLQ | |
| | | | LSKDTYDDDLDNLLAQIGDQYADLFLAAKNLSDAILLSDILRVNTEITKAPLSASMIKRYDEHHQD | |
| | | | LTLLKALVRQQLPEKYKEIFFDQSKNGYAGYIDGGASQEEFYKFIKPILEKMDGTEELLVKLNRED | |
| | | | LLRKQRTFDNGSIPHQIHLGELHAILRRQEDFYPFLKDNREKIEKILTFRIPYYVGPLARGNSRFAW | |
| | | | MTRKSEETITPWNFEEVVDKGASAQSFIERMTNFDKNLPNEKVLPKHSLLYEYFTVYNELTKVKY | |
| | | | VTEGMRKPAFLSGEQKKAIVDLLFKTNRKVTVKQLKEDYFKKIECFDSVEISGVEDRFNASLGTY | |
| | | | HDLLKIIKDKDFLDNEENEDILEDIVLTLTLFEDREMIEERLKTYAHLFDDKVMKQLKRRRYTGWG | |
| | | | RLSRKLINGIRDKQSGKTILDFLKSDGFANRNFMQLIHDDSLTFKEDIQKAQVSGQGDSLHEHIANL | |
| | | | AGSPAIKKGILQTVKVVDELVKVMGRHKPENIVIEMARENQTTQKGQKNSRERMKRIEEGIKELG | |
| | | | SQILKEHPVENTQLQNEKLYLYYLQNGRDMYVDQELDINRLSDYDVDHIVPQSFLKDDSIDNKVL | |
| | | | TRSDKNRGKSDNVPSEEVVKKMKNYWRQLLNAKLITQRKFDNLTKAERGGLSELDKAGFIKRQL | |
| | | | VETRQITKHVAQILDSRMNTKYDENDKLIREVKVITLKSKLVSDFRKDFQFYKVREINNYHHAHD | |
| | | | AYLNAVVGTALIKKYPKLESEFVYGDYKVYDVRKMIAKSEQEIGKATAKYFFYSNIMNFFKTEITL | |
| | | | ANGEIRKRPLIETNGETGEIVWDKGRDFATVRKVLSMPQVNIVKKTEVQTGGFSKESILPKRNSDK | |
| | | | LIARKKDWDPKKYGGFDSPTVAYSVLVVAKVEKGKSKKLKSVKELLGITIMERSSFEKNPIDFLEA | |
| | | | KGYKEVKKDLIIKLPKYSLFELENGRKRMLASAGELQKGNELALPSKYVNFLYLASHYEKLKGSP | |
| | | | EDNEQKQLFVEQHKHYLDEIIEQISEFSKRVILADANLDKVLSAYNKHRDKPIREQAENIIHLFTLT | |
| | | | NLGAPAAFKYFDTTIDRKRYTSTKEVLDATLIHQSITGLYETRIDLSQLGGD | |
| SpyCas9- | Strep- | 3288 | MDKKYSIGLDIGTNSVGWAVITDEYKVPSKKFKVLGNTDRHSIKKNLIGALLFDSGETAEATRLKR | N863A |
| QQR1 | tococcus | | TARRRYTRRKNRICYLQEIFSNEMAKVDDSFFHRLEESFLVEEDKKHERHPIFGNIVDEVAYHEKY | |
| | pyogenes | | PTIYHLRKKLVDSTDKADLRLIYLALAHMIKFRGHFLIEGDLNPDNSDVDKLFIQLVQTYNQLFEE | |
| | | | NPINASGVDAKAILSARLSKSRRLENLIAQLPGEKKNGLFGNLIALSLGLTPNFKSNFDLAEDAKLQ | |
| | | | LSKDTYDDDLDNLLAQIGDQYADLFLAAKNLSDAILLSDILRVNTEITKAPLSASMIKRYDEHHQD | |
| | | | LTLLKALVRQQLPEKYKEIFFDQSKNGYAGYIDGGASQEEFYKFIKPILEKMDGTEELLVKLNRED | |
| | | | LLRKQRTFDNGSIPHQIHLGELHAILRRQEDFYPFLKDNREKIEKILTFRIPYYVGPLARGNSRFAW | |
| | | | MTRKSEETITPWNFEEVVDKGASAQSFIERMTNFDKNLPNEKVLPKHSLLYEYFTVYNELTKVKY | |
| | | | VTEGMRKPAFLSGEQKKAIVDLLFKTNRKVTVKQLKEDYFKKIECFDSVEISGVEDRFNASLGTY | |
| | | | HDLLKIIKDKDFLDNEENEDILEDIVLTLTLFEDREMIEERLKTYAHLFDDKVMKQLKRRRYTGWG | |
| | | | RLSRKLINGIRDKQSGKTILDFLKSDGFANRNFMQLIHDDSLTFKEDIQKAQVSGQGDSLHEHIANL | |
| | | | AGSPAIKKGILQTVKVVDELVKVMGRHKPENIVIEMARENQTTQKGQKNSRERMKRIEEGIKELG | |
| | | | SQILKEHPVENTQLQNEKLYLYYLQNGRDMYVDQELDINRLSDYDVDHIVPQSFLKDDSIDNKVL | |
| | | | TRSDKNRGKSDNVPSEEVVKKMKNYWRQLLNAKLITQRKFDNLTKAERGGLSELDKAGFIKRQL | |
| | | | VETRQITKHVAQILDSRMNTKYDENDKLIREVKVITLKSKLVSDFRKDFQFYKVREINNYHHAHD | |
| | | | AYLNAVVGTALIKKYPKLESEFVYGDYKVYDVRKMIAKSEQEIGKATAKYFFYSNIMNFFKTEITL | |
| | | | ANGEIRKRPLIETNGETGEIVWDKGRDFATVRKVLSMPQVNIVKKTEVQTGGFSKESILPKRNSDK | |
| | | | LIARKKDWDPKKYGGFDSPTVAYSVLVVAKVEKGKSKKLKSVKELLGITIMERSSFEKNPIDFLEA | |
| | | | KGYKEVKKDLIIKLPKYSLFELENGRKRMLASARELQKGNELALPSKYVNFLYLASHYEKLKGSP | |
| | | | EDNEQKQLFVEQHKHYLDEIIEQISEFSKRVILADAQLDKVLSAYNKHRDKPIREQAENIIHLFTLT | |
| | | | NLGAPAAFKYFDTTFKQKQYRSTKEVLDATLIHQSITGLYETRIDLSQLGGD | |
| SpyCas9- | Strep- | 3289 | MDKKYSIGLDIGTNSVGWAVITDEYKVPSKKFKVLGNTDRHSIKKNLIGALLFDSGETAEATRLKR | N863A |
| SpG | tococcus | | TARRRYTRRKNRICYLQEIFSNEMAKVDDSFFHRLEESFLVEEDKKHERHPIFGNIVDEVAYHEKY | |
| | pyogenes | | PTIYHLRKKLVDSTDKADLRLIYLALAHMIKFRGHFLIEGDLNPDNSDVDKLFIQLVQTYNQLFEE | |
| | | | NPINASGVDAKAILSARLSKSRRLENLIAQLPGEKKNGLFGNLIALSLGLTPNFKSNFDLAEDAKLQ | |
| | | | LSKDTYDDDLDNLLAQIGDQYADLFLAAKNLSDAILLSDILRVNTEITKAPLSASMIKRYDEHHQD | |
| | | | LTLLKALVRQQLPEKYKEIFFDQSKNGYAGYIDGGASQEEFYKFIKPILEKMDGTEELLVKLNRED | |
| | | | LLRKQRTFDNGSIPHQIHLGELHAILRRQEDFYPFLKDNREKIEKILTFRIPYYVGPLARGNSRFAW | |
| | | | MTRKSEETITPWNFEEVVDKGASAQSFIERMTNFDKNLPNEKVLPKHSLLYEYFTVYNELTKVKY | |
| | | | VTEGMRKPAFLSGEQKKAIVDLLFKTNRKVTVKQLKEDYFKKIECFDSVEISGVEDRFNASLGTY | |
| | | | HDLLKIIKDKDFLDNEENEDILEDIVLTLTLFEDREMIEERLKTYAHLFDDKVMKQLKRRRYTGWG | |
| | | | RLSRKLINGIRDKQSGKTILDFLKSDGFANRNFMQLIHDDSLTFKEDIQKAQVSGQGDSLHEHIANL | |
| | | | AGSPAIKKGILQTVKVVDELVKVMGRHKPENIVIEMARENQTTQKGQKNSRERMKRIEEGIKELG | |
| | | | SQILKEHPVENTQLQNEKLYLYYLQNGRDMYVDQELDINRLSDYDVDHIVPQSFLKDDSIDNKVL | |
| | | | TRSDKNRGKSDNVPSEEVVKKMKNYWRQLLNAKLITQRKFDNLTKAERGGLSELDKAGFIKRQL | |
| | | | VETRQITKHVAQILDSRMNTKYDENDKLIREVKVITLKSKLVSDFRKDFQFYKVREINNYHHAHD | |
| | | | AYLNAVVGTALIKKYPKLESEFVYGDYKVYDVRKMIAKSEQEIGKATAKYFFYSNIMNFFKTEITL | |
| | | | ANGEIRKRPLIETNGETGEIVWDKGRDFATVRKVLSMPQVNIVKKTEVQTGGFSKESILPKRNSDK | |
| | | | LIARKKDWDPKKYGGFLWPTVAYSVLVVAKVEKGKSKKLKSVKELLGITIMERSSFEKNPIDFLE | |
| | | | AKGYKEVKKDLIIKLPKYSLFELENGRKRMLASAKQLQKGNELALPSKYVNFLYLASHYEKLKGS | |
| | | | PEDNEQKQLFVEQHKHYLDEIIEQISEFSKRVILADANLDKVLSAYNKHRDKPIREQAENIIHLFTLT | |
| | | | NLGAPAAFKYFDTTIDRKQYRSTKEVLDATLIHQSITGLYETRIDLSQLGGD | |
| SpyCas9- | Strep- | 3290 | MDKKYSIGLDIGTNSVGWAVITDEYKVPSKKFKVLGNTDRHSIKKNLIGALLFDSGETAEATRLKR | N863A |
| VQR | tococcus | | TARRRYTRRKNRICYLQEIFSNEMAKVDDSFFHRLEESFLVEEDKKHERHPIFGNIVDEVAYHEKY | |
| | pyogenes | | PTIYHLRKKLVDSTDKADLRLIYLALAHMIKFRGHFLIEGDLNPDNSDVDKLFIQLVQTYNQLFEE | |
| | | | NPINASGVDAKAILSARLSKSRRLENLIAQLPGEKKNGLFGNLIALSLGLTPNFKSNFDLAEDAKLQ | |
| | | | LSKDTYDDDLDNLLAQIGDQYADLFLAAKNLSDAILLSDILRVNTEITKAPLSASMIKRYDEHHQD | |
| | | | LTLLKALVRQQLPEKYKEIFFDQSKNGYAGYIDGGASQEEFYKFIKPILEKMDGTEELLVKLNRED | |
| | | | LLRKQRTFDNGSIPHQIHLGELHAILRRQEDFYPFLKDNREKIEKILTFRIPYYVGPLARGNSRFAW | |
| | | | MTRKSEETITPWNFEEVVDKGASAQSFIERMTNFDKNLPNEKVLPKHSLLYEYFTVYNELTKVKY | |
| | | | VTEGMRKPAFLSGEQKKAIVDLLFKTNRKVTVKQLKEDYFKKIECFDSVEISGVEDRFNASLGTY | |
| | | | HDLLKIIKDKDFLDNEENEDILEDIVLTLTLFEDREMIEERLKTYAHLFDDKVMKQLKRRRYTGWG | |
| | | | RLSRKLINGIRDKQSGKTILDFLKSDGFANRNFMQLIHDDSLTFKEDIQKAQVSGQGDSLHEHIANL | |
| | | | AGSPAIKKGILQTVKVVDELVKVMGRHKPENIVIEMARENQTTQKGQKNSRERMKRIEEGIKELG | |
| | | | SQILKEHPVENTQLQNEKLYLYYLQNGRDMYVDQELDINRLSDYDVDHIVPQSFLKDDSIDNKVL | |
| | | | TRSDKNRGKSDNVPSEEVVKKMKNYWRQLLNAKLITQRKFDNLTKAERGGLSELDKAGFIKRQL | |
| | | | VETRQITKHVAQILDSRMNTKYDENDKLIREVKVITLKSKLVSDFRKDFQFYKVREINNYHHAHD | |
| | | | AYLNAVVGTALIKKYPKLESEFVYGDYKVYDVRKMIAKSEQEIGKATAKYFFYSNIMNFFKTEITL | |
| | | | ANGEIRKRPLIETNGETGEIVWDKGRDFATVRKVLSMPQVNIVKKTEVQTGGFSKESILPKRNSDK | |
| | | | LIARKKDWDPKKYGGFVSPTVAYSVLVVAKVEKGKSKKLKSVKELLGITIMERSSFEKNPIDFLEA | |
| | | | KGYKEVKKDLIIKLPKYSLFELENGRKRMLASAGELQKGNELALPSKYVNFLYLASHYEKLKGSP | |
| | | | EDNEQKQLFVEQHKHYLDEIIEQISEFSKRVILADANLDKVLSAYNKHRDKPIREQAENIIHLFTLT | |
| | | | NLGAPAAFKYFDTTIDRKQYRSTKEVLDATLIHQSITGLYETRIDLSQLGGD | |
| SpyCas9- | Strep- | 3291 | MDKKYSIGLDIGTNSVGWAVITDEYKVPSKKFKVLGNTDRHSIKKNLIGALLFDSGETAEATRLKR | N863A |
| VRER | tococcus | | TARRRYTRRKNRICYLQEIFSNEMAKVDDSFFHRLEESFLVEEDKKHERHPIFGNIVDEVAYHEKY | |
| | pyogenes | | PTIYHLRKKLVDSTDKADLRLIYLALAHMIKFRGHFLIEGDLNPDNSDVDKLFIQLVQTYNQLFEE | |
| | | | NPINASGVDAKAILSARLSKSRRLENLIAQLPGEKKNGLFGNLIALSLGLTPNFKSNFDLAEDAKLQ | |
| | | | LSKDTYDDDLDNLLAQIGDQYADLFLAAKNLSDAILLSDILRVNTEITKAPLSASMIKRYDEHHQD | |
| | | | LTLLKALVRQQLPEKYKEIFFDQSKNGYAGYIDGGASQEEFYKFIKPILEKMDGTEELLVKLNRED | |
| | | | LLRKQRTFDNGSIPHQIHLGELHAILRRQEDFYPFLKDNREKIEKILTFRIPYYVGPLARGNSRFAW | |
| | | | MTRKSEETITPWNFEEVVDKGASAQSFIERMTNFDKNLPNEKVLPKHSLLYEYFTVYNELTKVKY | |
| | | | VTEGMRKPAFLSGEQKKAIVDLLFKTNRKVTVKQLKEDYFKKIECFDSVEISGVEDRFNASLGTY | |
| | | | HDLLKIIKDKDFLDNEENEDILEDIVLTLTLFEDREMIEERLKTYAHLFDDKVMKQLKRRRYTGWG | |
| | | | RLSRKLINGIRDKQSGKTILDFLKSDGFANRNFMQLIHDDSLTFKEDIQKAQVSGQGDSLHEHIANL | |
| | | | AGSPAIKKGILQTVKVVDELVKVMGRHKPENIVIEMARENQTTQKGQKNSRERMKRIEEGIKELG | |
| | | | SQILKEHPVENTQLQNEKLYLYYLQNGRDMYVDQELDINRLSDYDVDHIVPQSFLKDDSIDNKVL | |
| | | | TRSDKNRGKSDNVPSEEVVKKMKNYWRQLLNAKLITQRKFDNLTKAERGGLSELDKAGFIKRQL | |
| | | | VETRQITKHVAQILDSRMNTKYDENDKLIREVKVITLKSKLVSDFRKDFQFYKVREINNYHHAHD | |
| | | | AYLNAVVGTALIKKYPKLESEFVYGDYKVYDVRKMIAKSEQEIGKATAKYFFYSNIMNFFKTEITL | |
| | | | ANGEIRKRPLIETNGETGEIVWDKGRDFATVRKVLSMPQVNIVKKTEVQTGGFSKESILPKRNSDK | |
| | | | LIARKKDWDPKKYGGFVSPTVAYSVLVVAKVEKGKSKKLKSVKELLGITIMERSSFEKNPIDFLEA | |
| | | | KGYKEVKKDLIIKLPKYSLFELENGRKRMLASARELQKGNELALPSKYVNFLYLASHYEKLKGSP | |
| | | | EDNEQKQLFVEQHKHYLDEIIEQISEFSKRVILADANLDKVLSAYNKHRDKPIREQAENIIHLFTLT | |
| | | | NLGAPAAFKYFDTTIDRKEYRSTKEVLDATLIHQSITGLYETRIDLSQLGGD | |
| SpyCas9- | Strep- | 3292 | MDKKYSIGLDIGTNSVGWAVITDEYKVPSKKFKVLGNTDRHSIKKNLIGALLFDSGETAEATRLKR | N863A |
| xCas | tococcus | | TARRRYTRRKNRICYLQEIFSNEMAKVDDSFFHRLEESFLVEEDKKHERHPIFGNIVDEVAYHEKY | |
| | pyogenes | | PTIYHLRKKLVDSTDKADLRLIYLALAHMIKFRGHFLIEGDLNPDNSDVDKLFIQLVQTYNQLFEE | |
| | | | NPINASGVDAKAILSARLSKSRRLENLIAQLPGEKKNGLFGNLIALSLGLTPNFKSNFDLAEDTKLQ | |
| | | | LSKDTYDDDLDNLLAQIGDQYADLFLAAKNLSDAILLSDILRVNTEITKAPLSASMIKLYDEHHQD | |
| | | | LTLLKALVRQQLPEKYKEIFFDQSKNGYAGYIDGGASQEEFYKFIKPILEKMDGTEELLVKLNRED | |
| | | | LLRKQRTFDNGIIPHQIHLGELHAILRRQEDFYPFLKDNREKIEKILTFRIPYYVGPLARGNSRFAW | |
| | | | MTRKSEETITPWNFEKVVDKGASAQSFIERMTNFDKNLPNEKVLPKHSLLYEYFTVYNELTKVKY | |
| | | | VTEGMRKPAFLSGDQKKAIVDLLFKTNRKVTVKQLKEDYFKKIECFDSVEISGVEDRFNASLGTY | |
| | | | HDLLKIIKDKDFLDNEENEDILEDIVLTLTLFEDREMIEERLKTYAHLFDDKVMKQLKRRRYTGWG | |
| | | | RLSRKLINGIRDKQSGKTILDFLKSDGFANRNFIQLIHDDSLTFKEDIQKAQVSGQGDSLHEHIANL | |
| | | | AGSPAIKKGILQTVKVVDELVKVMGRHKPENIVIEMARENQTTQKGQKNSRERMKRIEEGIKELG | |
| | | | SQILKEHPVENTQLQNEKLYLYYLQNGRDMYVDQELDINRLSDYDVDHIVPQSFLKDDSIDNKVL | |
| | | | TRSDKNRGKSDNVPSEEVVKKMKNYWRQLLNAKLITQRKFDNLTKAERGGLSELDKAGFIKRQL | |
| | | | VETRQITKHVAQILDSRMNTKYDENDKLIREVKVITLKSKLVSDFRKDFQFYKVREINNYHHAHD | |
| | | | AYLNAVVGTALIKKYPKLESEFVYGDYKVYDVRKMIAKSEQEIGKATAKYFFYSNIMNFFKTEITL | |
| | | | ANGEIRKRPLIETNGETGEIVWDKGRDFATVRKVLSMPQVNIVKKTEVQTGGFSKESILPKRNSDK | |
| | | | LIARKKDWDPKKYGGFDSPTVAYSVLVVAKVEKGKSKKLKSVKELLGITIMERSSFEKNPIDFLEA | |
| | | | KGYKEVKKDLIIKLPKYSLFELENGRKRMLASAGVLQKGNELALPSKYVNFLYLASHYEKLKGSP | |
| | | | EDNEQKQLFVEQHKHYLDEIIEQISEFSKRVILADANLDKVLSAYNKHRDKPIREQAENIIHLFTLT | |
| | | | NLGAPAAFKYFDTTIDRKRYTSTKEVLDATLIHQSITGLYETRIDLSQLGGD | |
| SpyCas9- | Strepto- | 3293 | MDKKYSIGLDIGTNSVGWAVITDEYKVPSKKFKVLGNTDRHSIKKNLIGALLFDSGETAEATRLKR | N863A |
| xCas-NG | coccus | | TARRRYTRRKNRICYLQEIFSNEMAKVDDSFFHRLEESFLVEEDKKHERHPIFGNIVDEVAYHEKY | |
| | pyogenes | | PTIYHLRKKLVDSTDKADLRLIYLALAHMIKFRGHFLIEGDLNPDNSDVDKLFIQLVQTYNQLFEE | |
| | | | NPINASGVDAKAILSARLSKSRRLENLIAQLPGEKKNGLFGNLIALSLGLTPNFKSNFDLAEDTKLQ | |
| | | | LSKDTYDDDLDNLLAQIGDQYADLFLAAKNLSDAILLSDILRVNTEITKAPLSASMIKLYDEHHQD | |
| | | | LTLLKALVRQQLPEKYKEIFFDQSKNGYAGYIDGGASQEEFYKFIKPILEKMDGTEELLVKLNRED | |
| | | | LLRKQRTFDNGIIPHQIHLGELHAILRRQEDFYPFLKDNREKIEKILTFRIPYYVGPLARGNSRFAW | |
| | | | MTRKSEETITPWNFEKVVDKGASAQSFIERMTNFDKNLPNEKVLPKHSLLYEYFTVYNELTKVKY | |
| | | | VTEGMRKPAFLSGDQKKAIVDLLFKTNRKVTVKQLKEDYFKKIECFDSVEISGVEDRFNASLGTY | |
| | | | HDLLKIIKDKDFLDNEENEDILEDIVLTLTLFEDREMIEERLKTYAHLFDDKVMKQLKRRRYTGWG | |
| | | | RLSRKLINGIRDKQSGKTILDFLKSDGFANRNFIQLIHDDSLTFKEDIQKAQVSGQGDSLHEHIANL | |
| | | | AGSPAIKKGILQTVKVVDELVKVMGRHKPENIVIEMARENQTTQKGQKNSRERMKRIEEGIKELG | |
| | | | SQILKEHPVENTQLQNEKLYLYYLQNGRDMYVDQELDINRLSDYDVDHIVPQSFLKDDSIDNKVL | |
| | | | TRSDKNRGKSDNVPSEEVVKKMKNYWRQLLNAKLITQRKFDNLTKAERGGLSELDKAGFIKRQL | |
| | | | VETRQITKHVAQILDSRMNTKYDENDKLIREVKVITLKSKLVSDFRKDFQFYKVREINNYHHAHD | |
| | | | AYLNAVVGTALIKKYPKLESEFVYGDYKVYDVRKMIAKSEQEIGKATAKYFFYSNIMNFFKTEITL | |
| | | | ANGEIRKRPLIETNGETGEIVWDKGRDFATVRKVLSMPQVNIVKKTEVQTGGFSKESIRPKRNSDK | |
| | | | LIARKKDWDPKKYGGFVSPTVAYSVLVVAKVEKGKSKKLKSVKELLGITIMERSSFEKNPIDFLEA | |
| | | | KGYKEVKKDLIIKLPKYSLFELENGRKRMLASARFLQKGNELALPSKYVNFLYLASHYEKLKGSP | |
| | | | EDNEQKQLFVEQHKHYLDEIIEQISEFSKRVILADANLDKVLSAYNKHRDKPIREQAENIIHLFTLT | |
| | | | NLGAPRAFKYFDTTIDRKVYRSTKEVLDATLIHQSITGLYETRIDLSQLGGD | |
| St1Cas9- | Strep- | 3294 | MSDLVLGLDIGIGSVGVGILNKVTGEIIHKNSRIFPAAQAENNLVRRTNRQGRRLARRKKHRRVRL | N622A |
| CNRZ1066 | tococcus | | NRLFEESGLITDFTKISINLNPYQLRVKGLTDELSNEELFIALKNMVKHRGISYLDDASDDGNSSVG | |
| | thermo- | | DYAQIVKENSKQLETKTPGQIQLERYQTYGQLRGDFTVEKDGKKHRLINVFPTSAYRSEALRILQT | |
| | philus | | QQEFNPQITDEFINRYLEILTGKRKYYHGPGNEKSRTDYGRYRTSGETLDNIFGILIGKCTFYPDEFR | |
| | | | AAKASYTAQEFNLLNDLNNLTVPTETKKLSKEQKNQIINYVKNEKAMGPAKLFKYIAKLLSCDVA | |
| | | | DIKGYRIDKSGKAEIHTFEAYRKMKTLETLDIEQMDRETLDKLAYVLTLNTEREGIQEALEHEFAD | |
| | | | GSFSQKQVDELVQFRKANSSIFGKGWHNFSVKLMMELIPELYETSEEQMTILTRLGKQKTTSSSNK | |
| | | | TKYIDEKLLTEEIYNPVVAKSVRQAIKIVNAAIKEYGDFDNIVIEMARETNEDDEKKAIQKIQKANK | |
| | | | DEKDAAMLKAANQYNGKAELPHSVFHGHKQLATKIRLWHQQGERCLYTGKTISIHDLINNSNQF | |
| | | | EVDHILPLSITFDDSLANKVLVYATANQEKGQRTPYQALDSMDDAWSFRELKAFVRESKTLSNKK | |
| | | | KEYLLTEEDISKFDVRKKFIERNLVDTRYASRVVLNALQEHFRAHKIDTKVSVVRGQFTSQLRRH | |
| | | | WGIEKTRDTYHHHAVDALIIAASSQLNLWKKQKNTLVSYSEEQLLDIETGELISDDEYKESVFKAP | |
| | | | YQHFVDTLKSKEFEDSILFSYQVDSKFNRKISDATIYATRQAKVGKDKKDETYVLGKIKDIYTQDG | |
| | | | YDAFMKIYKKDKSKFLMYRHDPQTFEKVIEPILENYPNKQMNEKGKEVPCNPFLKYKEEHGYIRK | |
| | | | YSKKGNGPEIKSLKYYDSKLLGNPIDITPENSKNKVVLQSLKPWRTDVYFNKATGKYEILGLKYA | |
| | | | DLQFEKGTGTYKISQEKYNDIKKKEGVDSDSEFKFTLYKNDLLLVKDTETKEQQLFRFLSRTLPKQ | |
| | | | KHYVELKPYDKQKFEGGEALIKVLGNVANGGQCIKGLAKSNISIYKVRTDVLGNQHIIKNEGDKP | |
| | | | KLDF | |
| St1Cas9- | Strep- | 3295 | MSDLVLGLDIGIGSVGVGILNKVTGEIIHKNSRIFPAAQAENNLVRRTNRQGRRLARRKKHRRVRL | N622A |
| LMG1831 | tococcus | | NRLFEESGLITDFTKISINLNPYQLRVKGLTDELSNEELFIALKNMVKHRGISYLDDASDDGNSSVG | |
| | thermo- | | DYAQIVKENSKQLETKTPGQIQLERYQTYGQLRGDFTVEKDGKKHRLINVFPTSAYRSEALRILQT | |
| | philus | | QQEFNPQITDEFINRYLEILTGKRKYYHGPGNEKSRTDYGRYRTSGETLDNIFGILIGKCTFYPDEFR | |
| | | | AAKASYTAQEFNLLNDLNNLTVPTETKKLSKEQKNQIINYVKNEKAMGPAKLFKYIAKLLSCDVA | |
| | | | DIKGYRIDKSGKAEIHTFEAYRKMKTLETLDIEQMDRETLDKLAYVLTLNTEREGIQEALEHEFAD | |
| | | | GSFSQKQVDELVQFRKANSSIFGKGWHNFSVKLMMELIPELYETSEEQMTILTRLGKQKTTSSSNK | |
| | | | TKYIDEKLLTEEIYNPVVAKSVRQAIKIVNAAIKEYGDFDNIVIEMARETNEDDEKKAIQKIQKANK | |
| | | | DEKDAAMLKAANQYNGKAELPHSVFHGHKQLATKIRLWHQQGERCLYTGKTISIHDLINNSNQF | |
| | | | EVDHILPLSITFDDSLANKVLVYATANQEKGQRTPYQALDSMDDAWSFRELKAFVRESKTLSNKK | |
| | | | KEYLLTEEDISKFDVRKKFIERNLVDTRYASRVVLNALQEHFRAHKIDTKVSVVRGQFTSQLRRH | |
| | | | WGIEKTRDTYHHHAVDALIIAASSQLNLWKKQKNTLVSYSEEQLLDIETGELISDDEYKESVFKAP | |
| | | | YQHFVDTLKSKEFEDSILFSYQVDSKFNRKISDATIYATRQAKVGKDKKDETYVLGKIKDIYTQDG | |
| | | | YDAFMKIYKKDKSKFLMYRHDPQTFEKVIEPILENYPNKQMNEKGKEVPCNPFLKYKEEHGYIRK | |
| | | | YSKKGNGPEIKSLKYYDSKLLGNPIDITPENSKNKVVLQSLKPWRTDVYFNKNTGKYEILGLKYA | |
| | | | DLQFEKKTGTYKISQEKYNGIMKEEGVDSDSEFKFTLYKNDLLLVKDTETKEQQLFRFLSRTMPN | |
| | | | VKYYVELKPYSKDKFEKNESLIEILGSADKSGRCIKGLGKSNISIYKVRTDVLGNQHIIKNEGDKPK | |
| | | | LDF | |
| St1Cas9- | Strep- | 3296 | MSDLVLGLDIGIGSVGVGILNKVTGEIIHKNSRIFPAAQAENNLVRRTNRQGRRLARRKKHRRVRL | N622A |
| MTH17CL396 | tococcus | | NRLFEESGLITDFTKISINLNPYQLRVKGLTDELSNEELFIALKNMVKHRGISYLDDASDDGNSSVG | |
| | thermo- | | DYAQIVKENSKQLETKTPGQIQLERYQTYGQLRGDFTVEKDGKKHRLINVFPTSAYRSEALRILQT | |
| | philus | | QQEFNPQITDEFINRYLEILTGKRKYYHGPGNEKSRTDYGRYRTSGETLDNIFGILIGKCTFYPDEFR | |
| | | | AAKASYTAQEFNLLNDLNNLTVPTETKKLSKEQKNQIINYVKNEKAMGPAKLFKYIAKLLSCDVA | |
| | | | DIKGYRIDKSGKAEIHTFEAYRKMKTLETLDIEQMDRETLDKLAYVLTLNTEREGIQEALEHEFAD | |
| | | | GSFSQKQVDELVQFRKANSSIFGKGWHNFSVKLMMELIPELYETSEEQMTILTRLGKQKTTSSSNK | |
| | | | TKYIDEKLLTEEIYNPVVAKSVRQAIKIVNAAIKEYGDFDNIVIEMARETNEDDEKKAIQKIQKANK | |
| | | | DEKDAAMLKAANQYNGKAELPHSVFHGHKQLATKIRLWHQQGERCLYTGKTISIHDLINNSNQF | |
| | | | EVDHILPLSITFDDSLANKVLVYATANQEKGQRTPYQALDSMDDAWSFRELKAFVRESKTLSNKK | |
| | | | KEYLLTEEDISKFDVRKKFIERNLVDTRYASRVVLNALQEHFRAHKIDTKVSVVRGQFTSQLRRH | |
| | | | WGIEKTRDTYHHHAVDALIIAASSQLNLWKKQKNTLVSYSEDQLLDIETGELISDDEYKESVFKAP | |
| | | | YQHFVDTLKSKEFEDSILFSYQVDSKFNRKISDATIYATRQAKVGKDKADETYVLGKIKDIYTQDG | |
| | | | YDAFMKIYKKDKSKFLMYRHDPQTFEKVIEPILENYPNKQINEKGKEVPCNPFLKYKEEHGYIRKY | |
| | | | SKKGNGPEIKSLKYYDSKLGNHIDITPKDSNNKVVLQSLKPWRTDVYFNKNTGKYEILGLKYSDM | |
| | | | QFEKGTGKYSISKEQYENIKVREGVDENSEFKFTLYKNDLLLLKDSENGEQILLRFTSRNDTSKHY | |
| | | | VELKPYNRQKFEGSEYLIKSLGTVAKGGQCIKGLGKSNISIYKVRTDVLGNQHIIKNEGDKPKLDF | |
| St1Cas9- | Strep- | 3297 | MSDLVLGLDIGIGSVGVGILNKVTGEIIHKNSRIFPAAQAENNLVRRTNRQGRRLARRKKHRRVRL | N622A |
| TH1477 | tococcus | | NRLFEESGLITDFTKISINLNPYQLRVKGLTDELSNEELFIALKNMVKHRGISYLDDASDDGNSSVG | |
| | thermo- | | DYAQIVKENSKQLETKTPGQIQLERYQTYGQLRGDFTVEKDGKKHRLINVFPTSAYRSEALRILQT | |
| | philus | | QQEFNPQITDEFINRYLEILTGKRKYYHGPGNEKSRTDYGRYRTSGETLDNIFGILIGKCTFYPDEFR | |
| | | | AAKASYTAQEFNLLNDLNNLTVPTETKKLSKEQKNQIINYVKNEKAMGPAKLFKYIAKLLSCDVA | |
| | | | DIKGYRIDKSGKAEIHTFEAYRKMKTLETLDIEQMDRETLDKLAYVLTLNTEREGIQEALEHEFAD | |
| | | | GSFSQKQVDELVQFRKANSSIFGKGWHNFSVKLMMELIPELYETSEEQMTILTRLGKQKTTSSSNK | |
| | | | TKYIDEKLLTEEIYNPVVAKSVRQAIKIVNAAIKEYGDFDNIVIEMARETNEDDEKKAIQKIQKANK | |
| | | | DEKDAAMLKAANQYNGKAELPHSVFHGHKQLATKIRLWHQQGERCLYTGKTISIHDLINNSNQF | |
| | | | EVDHILPLSITFDDSLANKVLVYATANQEKGQRTPYQALDSMDDAWSFRELKAFVRESKTLSNKK | |
| | | | KEYLLTEEDISKFDVRKKFIERNLVDTRYASRVVLNALQEHFRAHKIDTKVSVVRGQFTSQLRRH | |
| | | | WGIEKTRDTYHHHAVDALIIAASSQLNLWKKQKNTLVSYSEDQLLDIETGELISDDEYKESVFKAP | |
| | | | YQHFVDTLKSKEFEDSILFSYQVDSKFNRKISDATIYATRQAKVGKDKADETYVLGKIKDIYTQDG | |
| | | | YDAFMKIYKKDKSKFLMYRHDPQTFEKVIEPILENYPNKQINEKGKEVPCNPFLKYKEEHGYIRKY | |
| | | | SKKGNGPEIKSLKYYDSKLGNHIDITPKDSNNKVVLQSLKPWRTDVYFNKNTGKYEILGLKYSDM | |
| | | | QFEKGTGKYSISKEQYENIKVREGVDENSEFKFTLYKNDLLLLKDSENGEQILLRFTSRNDTSKHY | |
| | | | VELKPYNRQKFEGSEYLIKSLGTVVKGGRCIKGLGKSNISIYKVRTDVLGNQHIIKNEGDKPKLDF | |

[0586] In some embodiments, the endonuclease domain or DNA binding domain comprises a Cas domain, e.g., a Cas9 domain. In embodiments, the endonuclease domain or DNA binding domain comprises a nuclease-active Cas domain, a Cas nickase (nCas) domain, or a nuclease-inactive Cas (dCas) domain. In embodiments, the endonuclease domain or DNA binding domain comprises a nuclease-active Cas9 domain, a Cas9 nickase (nCas9) domain, or a nuclease-inactive Cas9 (dCas9) domain. In some embodiments, the endonuclease domain or DNA binding domain comprises a Cas9 domain of Cas9 (e.g., dCas9 and nCas9), Cas12a/Cpf1, Cas12b/C2c1, Cas12c/C2c3, Cas12d/CasY, Cas12e/CasX, Cas12g, Cas12h, or Cas12i. In some embodiments, the endonuclease domain or DNA binding domain comprises a Cas9 (e.g., dCas9 and nCas9), Cas12a/Cpf1, Cas12b/C2c1, Cas12c/C2c3, Cas12d/CasY, Cas12e/CasX, Cas12g, Cas12h, or Cas12i. In some embodiments, the endonuclease domain or DNA binding domain comprises an S. pyogenes or an S. thermophilus Cas9, or a functional fragment thereof. In some embodiments, the endonuclease domain or DNA binding domain comprises a Cas9 sequence, e.g., as described in Chylinski, Rhun, and Charpentier (2013) RNA Biology 10:5, 726-737; incorporated herein by reference. In some embodiments, the endonuclease domain or DNA binding domain comprises the HNH nuclease subdomain and/or the RuvC1 subdomain of a Cas, e.g., Cas9, e.g., as described herein, or a variant thereof. In some embodiments, the endonuclease domain or DNA binding domain comprises Cas12a/Cpf1, Cas12b/C2c1, Cas12c/C2c3, Cas12d/CasY, Cas12e/CasX, Cas12g, Cas12h, or Cas12i. In some embodiments, the endonuclease domain or DNA binding domain comprises a Cas polypeptide (e.g., enzyme), or a functional fragment thereof. In embodiments, the Cas polypeptide (e.g., enzyme) is selected from Cas1, Cas1B, Cas2, Cas3, Cas4, Cas5, Cas5d, Cas5t, Cas5h, Cas5a, Cas6, Cas7, Cas8, Cas8a, Cas8b, Cas8c, Cas9 (e.g., Csn1 or Csx12), Cas10, Cas10d, Cas12a/Cpf1, Cas12b/C2c1, Cas12c/C2c3, Cas12d/CasY, Cas12e/CasX, Cas12g, Cas12h, Cas12i, Csy1, Csy2, Csy3, Csy4, Cse1, Cse2, Cse3, Cse4, Cse5e, Csc1, Csc2, Csa5, Csn1, Csn2, Csm1, Csm2, Csm3, Csm4, Csm5, Csm6, Cmr1, Cmr3, Cmr4, Cmr5, Cmr6, Csb1, Csb2, Csb3, Csx17, Csx14, Csx10, Csx16, CsaX, Csx3, Csx1, Csx1S, Csx11, Csf1, Csf2, CsO, Csf4, Csd1, Csd2, Cst1, Cst2, Csh1, Csh2, Csa1, Csa2, Csa3, Csa4, Csa5, Type II Cas effector proteins, Type V Cas effector proteins, Type VI Cas effector proteins, CARF, DinG, Cpf1, Cas12b/C2c1, Cas12c/C2c3, Cas12b/C2c1, Cas12c/C2c3, SpCas9(K855A), eSpCas9(1.1), SpCas9-HF1, hyper accurate Cas9 variant (HypaCas9), homologues thereof, modified or engineered versions thereof, and/or functional fragments thereof. In embodiments, the Cas9 comprises one or more substitutions, e.g., selected from H840A, D10A, P475A, W476A, N477A, D1125A, W1126A, and D1127A. In embodiments, the Cas9 comprises one or more mutations at positions selected from: D10, G12, G17, E762, H840, N854, N863, H982, H983, A984, D986, and/or A987, e.g., one or more substitutions selected from D10A, G12A, G17A, E762A, H840A, N854A, N863A, H982A, H983A, A984A, and/or D986A. In some embodiments, the endonuclease domain or DNA binding domain comprises a Cas (e.g., Cas9) sequence from Corynebacterium ulcerans, Corynebacterium diphtheria, Spiroplasma syrphidicola, Prevotella intermedia, Spiroplasma taiwanense, Streptococcus iniae, Belliella baltica, Psychroflexus torquis, Streptococcus thermophilus, Listeria innocua, Campylobacter jejuni, Neisseria meningitidis, Streptococcus pyogenes, or Staphylococcus aureus, or a fragment or variant thereof.

[0587] In some embodiments, the endonuclease domain or DNA binding domain comprises a Cpf1 domain, e.g., comprising one or more substitutions, e.g., at position D917, E1006A, D1255 or any combination thereof, e.g., selected from D917A, E1006A, D1255A, D917A/E1006A, D917A/D 1255A, E1006A/D1255A, and D917A/E1006A/D1255A.

[0588] In some embodiments, the endonuclease domain or DNA binding domain comprises spCas9, spCas9-VRQR, spCas9-VRER, xCas9 (sp), saCas9, saCas9-KKH, spCas9-MQKSER, spCas9-LRKIQK, or spCas9-LRVSQL.

[0589] In some embodiments, the endonuclease domain or DNA-binding domain comprises an amino acid sequence as listed in Table 37 below, or an amino acid sequence having at least 80%, 85%, 90%, 95%, 96%, 97%, 98, or 99% sequence identity thereto. In some embodiments, the endonuclease domain or DNA-binding domain comprises an amino acid sequence that has no more than 1, 2, 3, 4, 5, 6, 7, 8, 9, 10, 11, 12, 13, 14, 15, 16, 17, 18, 19, 20, 21, 22, 23, 24, 25, 26, 27, 28, 29, 30, 31, 32, 33, 34, 35, 36, 37, 38, 39, 40, 41, 42, 43, 44, 45, 46, 47, 48, 49, or 50 differences (e.g., mutations) relative to any of the amino acid sequences described herein.

TABLE 37
Each of the Reference Sequences are incorporated by reference in their entirety.

| Name | Amino Acid Sequence or Reference Sequence |
|---|---|
| Streptococcus pyogenes | |
| Cas9 | |
| Exemplary Linker | SGSETPGTSESATPES (SEQ ID NO: 1023) |
| Exemplary Linker Motif | (SGGS)ₙ (SEQ ID NO: 1583) |
| Exemplary Linker Motif | (GGGS)ₙ (SEQ ID NO: 1584) |
| Exemplary Linker Motif | (GGGGS)ₙ (SEQ ID NO: 1535) |
| Exemplary Linker Motif | (G)ₙ |
| Exemplary Linker Motif | (EAAAK)ₙ (SEQ ID NO: 1534) |
| Exemplary Linker Motif | (GGS)ₙ |
| Exemplary Linker Motif | (XP)ₙ |
| Cas9 from Streptococcus | NCBI Reference Sequence: NC_002737.2 and Uniprot |
| pyogenes | Reference Sequence: Q99ZW2 |
| Cas9 from Corynebacterium | NCBI Refs: NC_015683.1, NC_017317.1 |
| ulcerans | |
| Cas9 from Corynebacterium | NCBI Refs: NC_016782.1, NC_016786.1 |
| diphtheria | |
| Cas9 from Spiroplasma | NCBI Ref: NC_021284.1 |
| syrphidicola | |
| Cas9 from Prevotella | NCBI Ref: NC_017861.1 |
| intermedia | |
| Cas9 from Spiroplasma | NCBI Ref: NC_021846.1 |
| taiwanense | |
| Cas9 from Streptococcus | NCBI Ref: NC_021314.1 |
| iniae | |
| Cas9 from Belliella baltica | NCBI Ref: NC_018010.1 |
| Cas9 from Psychroflexus | NCBI Ref: NC_018721.1 |
| torquisI | |
| Cas9 from Streptococcus | NCBI Ref: YP_820832.1 |
| thermophilus | |
| Cas9 from Listeria innocua | NCBI Ref: NP_472073.1 |
| Cas9 from Campylobacter | NCBI Ref: YP_002344900.1 |
| jejuni | |
| Cas9 from Neisseria | NCBI Ref: YP_002342100.1 |
| meningitidis | |
| dCas9 (D10A and H840A) | |
| Catalytically inactive Cas9 | |
| (dCas9) | |
| Cas9 nickase (nCas9) | |
| Catalytically active Cas9 | |
| CasY | ((ncbi.nlm.nih.gov/protein/APG80656.1) |
| | >APG80656.1 CRISPR-associated protein CasY [uncultured |
| | Parcubacteria group bacterium]) |
| CasX | uniprot.org/uniprot/F0NN87; uniprot.org/uniprot/F0NH53 |
| CasX | >tr\|F0NH53\|F0NH53_SULIR CRISPR associated protein, Casx |
| | OS = Sulfolobus islandicus (strain REY15A) GN = SiRe_0771 |
| | PE = 4 SV = 1 |
| Deltaproteobacteria CasX | |
| Cas12b/C2c1 | ((uniprot.org/uniprot/T0D7A2#2) sp\|T0D7A2\|C2C1_ALIAG |
| | CRISPR- associated endonuclease C2c1 OS = Alicyclobacillus |
| | acido-terrestris (strain ATCC 49025/DSM 3922/CIP 106132/ |
| | NCIMB 13137/GD3B) GN = c2c1 PE = 1 SV = 1) |
| BhCas12b ((Bacillus | NCBI Reference Sequence: WP_095142515 |
| hisashii) | |
| BvCas12b (Bacillus sp. V3- | NCBI Reference Sequence: WP_101661451.1 |
| 13) | |
| Wild-type Francisella | |
| novicida Cpf1 | |
| Francisella novicida Cpf1 | |
| D917A | |
| Francisella novicida Cpf1 | |
| E1006A | |
| Francisella novicida Cpf1 | |
| D1255A | |
| Francisella novicida Cpf1 | |
| D917A/E1006A | |
| Francisella novicida Cpf1 | |
| D917A/D1255A | |
| Francisella novicida Cpf1 | |
| E1006A/D1255A | |
| Francisella novicida Cpf1 | |
| D917A/E1006A | |
| SaCas9 | |
| SaCas9n | |
| PAM-binding SpCas9 | |
| PAM-binding SpCas9n | |
| PAM-binding SpEQR Cas9 | |
| PAM-binding SpVQR Cas9 | |
| PAM-binding SpVRER | |
| Cas9 | |
| PAM-binding SpVRQR | |
| Cas9 | |
| SpyMacCas9 | |

[0590] In some embodiments, a Gene Writing polypeptide has an endonuclease domain comprising a Cas9 nickase, e.g., Cas9 H840A. In embodiments, the Cas9 H840A has the following amino acid sequence:

Cas9 nickase (H840A):
(SEQ ID NO: 1585)
DKKYSIGLDIGTNSVGWAVITDEYKVPSKKFKVLGNTDRHSIKKNLIGAL
LFDSGETAEATRLKRTARRRYTRRKNRICYLQEIFSNEMAKVDDSFFHRL
EESFLVEEDKKHERHPIFGNIVDEVAYHEKYPTIYHLRKKLVDSTDKADL
RLIYLALAHMIKFRGHFLIEGDLNPDNSDVDKLFIQLVQTYNQLFEENPI
NASGVDAKAILSARLSKSRRLENLIAQLPGEKKNGLFGNLIALSLGLTPN
FKSNFDLAEDAKLQLSKDTYDDDLDNLLAQIGDQYADLFLAAKNLSDAIL
LSDILRVNTEITKAPLSASMIKRYDEHHQDLTLLKALVRQQLPEKYKEIF
FDQSKNGYAGYIDGGASQEEFYKFIKPILEKMDGTEELLVKLNREDLLRK
QRTFDNGSIPHQIHLGELHAILRRQEDFYPFLKDNREKIEKILTFRIPYY
VGPLARGNSRFAWMTRKSEETITPWNFEEVVDKGASAQSFIERMTNFDKN
LPNEKVLPKHSLLYEYFTVYNELTKVKYVTEGMRKPAFLSGEQKKAIVDL
LFKTNRKVTVKQLKEDYFKKIECFDSVEISGVEDRFNASLGTYHDLLKII
KDKDFLDNEENEDILEDIVLTLTLFEDREMIEERLKTYAHLFDDKVMKQL
KRRRYTGWGRLSRKLINGIRDKQSGKTILDFLKSDGFANRNFMQLIHDDS
LTFKEDIQKAQVSGQGDSLHEHIANLAGSPAIKKGILQTVKVVDELVKVM
GRHKPENIVIEMARENQTTQKGQKNSRERMKRIEEGIKELGSQILKEHPV
ENTQLQNEKLYLYYLQNGRDMYVDQELDINRLSDYDVDAIVPQSFLKDDS
IDNKVLTRSDKNRGKSDNVPSEEVVKKMKNYWRQLLNAKLITQRKFDNLT
KAERGGLSELDKAGFIKRQLVETRQITKHVAQILDSRMNTKYDENDKLIR
EVKVITLKSKLVSDFRKDFQFYKVREINNYHHAHDAYLNAVVGTALIKKY
PKLESEFVYGDYKVYDVRKMIAKSEQEIGKATAKYFFYSNIMNFFKTEIT
LANGEIRKRPLIETNGETGEIVWDKGRDFATVRKVLSMPQVNIVKKTEVQ
TGGFSKESILPKRNSDKLIARKKDWDPKKYGGFDSPTVAYSVLVVAKVEK
GKSKKLKSVKELLGITIMERSSFEKNPIDFLEAKGYKEVKKFTLTNLGAP
AAFKYFDTTIDRKRYTSTKEVLDATLIHQSITGLYETRIDLSQLGGD

[0591] In some embodiments, a Gene Writing polypeptide comprises the RT domain from a retroviral reverse transcriptase, e.g., a wild-type M-MLV RT, e.g., comprising the following sequence:

M-MLV (WT):
(SEQ ID NO: 1586)
TLNIEDEYRLHETSKEPDVSLGSTWLSDFPQAWAETGGMGLAVRQAPLII
PLKATSTPVSIKQYPMSQEARLGIKPHIQRLLDQGILVPCQSPWNTPLLP
VKKPGTNDYRPVQDLREVNKRVEDIHPTVPNPYNLLSGLPPSHQWYTVLD
LKDAFFCLRLHPTSQPLFAFEWRDPEMGISGQLTWTRLPQGFKNSPTLFD
EALHRDLADFRIQHPDLILLQYVDDLLLAATSELDCQQGTRALLQTLGNL
GYRASAKKAQICQKQVKYLGYLLKEGQRWLTEARKETVMGQPTPKTPRQL
REFLGTAGFCRLWIPGFAEMAAPLYPLTKTGTLFNWGPDQQKAYQEIKQA
LLTAPALGLPDLTKPFELFVDEKQGYAKGVLTQKLGPWRRPVAYLSKKLD
PVAAGWPPCLRMVAAIAVLTKDAGKLTMGQPLVILAPHAVEALVKQPPDR
WLSNARMTHYQALLLDTDRVQFGPVVALNPATLLPLPEEGLQHNCLDILA
EAHGTRPDLTDQPLPDADHTWYTDGSSLLQEGQRKAGAAVTTETEVIWAK
ALPAGTSAQRAELIALTQALKMAEGKKLNVYTDSRYAFATAHIHGEIYRR
RGLLTSEGKEIKNKDEILALLKALFLPKRLSIIHCPGHQKGHSAEARGNR
MADQAARKAAITETPDTSTLLI

[0592] In some embodiments, a Gene Writing polypeptide comprises the RT domain from a retroviral reverse transcriptase, e.g., an M-MLV RT, e.g., comprising the following sequence:

(SEQ ID NO: 1548)
TLNIEDEHRLHETSKEPDVSLGSTWLSDFPQAWAETGGMGLAVRQAPLII
PLKATSTPVSIKQYPMSQEARLGIKPHIQRLLDQGILVPCQSPWNTPLLP
VKKPGTNDYRPVQDLREVNKRVEDIHPTVPNPYNLLSGLPPSHQWYTVLD
LKDAFFCLRLHPTSQPLFAFEWRDPEMGISGQLTWTRLPQGFKNSPTLFD
EALHRDLADFRIQHPDLILLQYVDDLLLAATSELDCQQGTRALLQTLGNL
GYRASAKKAQICQKQVKYLGYLLKEGQRWLTEARKETVMGQPTPKTPRQL
REFLGTAGFCRLWIPGFAEMAAPLYPLTKTGTLFNWGPDQQKAYQEIKQA
LLTAPALGLPDLTKPFELFVDEKQGYAKGVLTQKLGPWRRPVAYLSKKLD
PVAAGWPPCLRMVAAIAVLTKDAGKLTMGQPLVILAPHAVEALVKQPPDR
WLSNARMTHYQALLLDTDRVQFGPVVALNPATLLPLPEEGLQHNCLDILA
EAHGTRPDLTDQPLPDADHTWYTDGSSLLQEGQRKAGAAVTTETEVIWAK
ALPAGTSAQRAELIALTQALKMAEGKKLNVYTDSRYAFATAHIHGEIYRR
RGLLTSEGKEIKNKDEILALLKALFLPKRLSIIHCPGHQKGHSAEARGNR
MADQAARKAAITETPDTSTLL

[0593] In some embodiments, a Gene Writing polypeptide comprises the RT domain from a retroviral reverse transcriptase comprising the sequence of amino acids 659-1329 of NP_057933. In embodiments, the Gene Writing polypeptide further comprises one additional amino acid at the N-terminus of the sequence of amino acids 659-1329 of NP_057933, e.g., as shown below:

(SEQ ID NO: 1587)
TLNIEDEHRLHETSKEPDVSLGSTWLSDFPQAWAETGGMGLAVRQAPLII
PLKATSTPVSIKQYPMSQEARLGIKPHIQRLLDQGILVPCQSPWNTPLLP
VKKPGTNDYRPVQDLREVNKRVEDIHPTVPNPYNLLSGLPPSHQWYTVLD
LKDAFFCLRLHPTSQPLFAFEWRDPEMGISGQLTWTRLPQGFKNSPTLFD
EALHRDLADFRIQHPDLILLQYVDDLLLAATSELDCQQGTRALLQTLGNL
GYRASAKKAQICQKQVKYLGYLLKEGQRWLTEARKETVMGQPTPKTPRQL
REFLGTAGFCRLWIPGFAEMAAPLYPLTKTGTLFNWGPDQQKAYQEIKQA
LLTAPALGLPDLTKPFELFVDEKQGYAKGVLTQKLGPWRRPVAYLSKKLD
PVAAGWPPCLRMVAAIAVLTKDAGKLTMGQPLVILAPHAVEALVKQPPDR
WLSNARMTHYQALLLDTDRVQFGPVVALNPATLLPLPEEGLQHNCLDILA
EAHGTRPDLTDQPLPDADHTWYTDGSSLLQEGQRKAGAAVTTETEVIWAK
ALPAGTSAQRAELIALTQALKMAEGKKLNVYTDSRYAFATAHIHGEIYRR
RGLLTSEGKEIKNKDEILALLKALFLPKRLSIIHCPGHQKGHSAEARGNR
MADQAARKAA
Core RT (bold), annotated per above
RNAseH (underlined), annotated per above

Core RT (bold), annotated per above
RNAseH (underlined), annotated per above
In embodiments, the Gene Writing polypeptide further comprises one additional amino acid at the C-terminus of the sequence of amino acids 659-1329 of NP_057933. In embodiments, the Gene Writing polypeptide comprises an RNaseH1 domain (e.g., amino acids 1178-1318 of NP_057933).

[0594] In some embodiments, a retroviral reverse transcriptase domain, e.g., M-MLV RT, may comprise one or more mutations from a wild-type sequence that may improve features of the RT, e.g., thermostability, processivity, and/or template binding. In some embodiments, an M-MLV RT domain comprises, relative to the M-MLV (WT) sequence above, one or more mutations, e.g., selected from D200N, L603W, T330P, T306K, W313F, D524G, E562Q, D583N, P51L, S67R, E67K, T197A, H204R, E302K, F309N, L435G, N454K, H594Q, D653N, R110S, K103L, e.g., a combination of mutations, such as D200N, L603W, and T330P, optionally further including T306K and W313F. In some embodiments, an M-MLV RT used herein comprises the mutations D200N, L603W, T330P, T306K and W313F. In embodiments, the mutant M-MLV RT comprises the following amino acid sequence:

M-MLV (PE2):
(SEQ ID NO: 1588)
TLNIEDEYRLHETSKEPDVSLGSTWLSDFPQAWAETGGMGLAVRQAPLII
PLKATSTPVSIKQYPMSQEARLGIKPHIQRLLDQGILVPCQSPWNTPLLP
VKKPGTNDYRPVQDLREVNKRVEDIHPTVPNPYNLLSGLPPSHQWYTVLD
LKDAFFCLRLHPTSQPLFAFEWRDPEMGISGQLTWTRLPQGFKNSPTLFN
EALHRDLADFRIQHPDLILLQYVDDLLLAATSELDCQQGTRALLQTLGNL
GYRASAKKAQICQKQVKYLGYLLKEGQRWLTEARKETVMGQPTPKTPRQL
REFLGKAGFCRLFIPGFAEMAAPLYPLTKPGTLFNWGPDQQKAYQEIKQA
LLTAPALGLPDLTKPFELFVDEKQGYAKGVLTQKLGPWRRPVAYLSKKLD
PVAAGWPPCLRMVAAIAVLTKDAGKLTMGQPLVILAPHAVEALVKQPPDR
WLSNARMTHYQALLLDTDRVQFGPVVALNPATLLPLPEEGLQHNCLDILA
EAHGTRPDLTDQPLPDADHTWYTDGSSLLQEGQRKAGAAVTTETEVIWAK
ALPAGTSAQRAELIALTQALKMAEGKKLNVYTDSRYAFATAHIHGEIYRR
RGWLTSEGKEIKNKDEILALLKALFLPKRLSIIHCPGHQKGHSAEARGNR
MADQAARKAAITETPDTSTLLI

[0595] In some embodiments, a Gene Writer polypeptide may comprise a linker, e.g., a peptide linker, e.g., a linker as described in Table 38. In some embodiments, a Gene Writer polypeptide comprises a flexible linker between the endonuclease and the RT domain, e.g., a linker comprising the amino acid sequence SGGSSGGSSGSETPGTSESATPESSGGSSGGSS (SEQ ID NO: 1589). In some embodiments, an RT domain of a Gene Writer polypeptide may be located C-terminal to the endonuclease domain. In some embodiments, an RT domain of a Gene Writer polypeptide may be located N-terminal to the endonuclease domain.

TABLE 38
Exemplary linker sequences

| | SEQ |
|---|---|
| | ID |
| Amino Acid Sequence | NO: |
| GGS | |
| GGSGGS | 3298 |
| GGSGGSGGS | 3299 |
| GGSGGSGGSGGS | 3300 |
| GGSGGSGGSGGSGGS | 3301 |
| GGSGGSGGSGGSGGSGGS | 3302 |
| GGGGS | 1535 |
| GGGGSGGGGS | 3303 |
| GGGGSGGGGSGGGGS | 3304 |
| GGGGSGGGGSGGGGSGGGGS | 3305 |
| GGGGSGGGGSGGGGSGGGGSGGGGS | 3306 |
| GGGGSGGGGSGGGGSGGGGSGGGGSGGGGS | 3307 |
| GGG | |
| GGGG | 3308 |
| GGGGG | 3309 |
| GGGGGG | 3310 |
| GGGGGGG | 3311 |
| GGGGGGGG | 3312 |
| GSS | |
| GSSGSS | 1736 |
| GSSGSSGSS | 3313 |
| GSSGSSGSSGSS | 3314 |
| GSSGSSGSSGSSGSS | 3315 |
| GSSGSSGSSGSSGSSGSS | 3316 |
| EAAAK | 1534 |
| EAAAKEAAAK | 3317 |
| EAAAKEAAAKEAAAK | 3318 |
| EAAAKEAAAKEAAAKEAAAK | 3319 |
| EAAAKEAAAKEAAAKEAAAKEAAAK | 3320 |
| EAAAKEAAAKEAAAKEAAAKEAAAKEAAAK | 3321 |
| PAP | |
| PAPAP | 3322 |
| PAPAPAP | 3323 |
| PAPAPAPAP | 3324 |
| PAPAPAPAPAP | 3325 |
| PAPAPAPAPAPAP | 3326 |
| GGSGGG | 3327 |
| GGGGGS | 3328 |
| GGSGSS | 3329 |
| GSSGGS | 3330 |
| GGSEAAAK | 3331 |
| EAAAKGGS | 3332 |
| GGSPAP | 3333 |
| PAPGGS | 3334 |
| GGGGSS | 3335 |
| GSSGGG | 3336 |
| GGGEAAAK | 3337 |
| EAAAKGGG | 3338 |
| GGGPAP | 3339 |
| PAPGGG | 3340 |
| GSSEAAAK | 3341 |
| EAAAKGSS | 3342 |
| GSSPAP | 3343 |
| PAPGSS | 3344 |
| EAAAKPAP | 3345 |
| PAPEAAAK | 3346 |
| GGSGGGGSS | 3347 |
| GGSGSSGGG | 3348 |
| GGGGGSGSS | 3349 |
| GGGGSSGGS | 3350 |
| GSSGGSGGG | 3351 |
| GSSGGGGGS | 3352 |
| GGSGGGEAAAK | 3353 |
| GGSEAAAKGGG | 3354 |
| GGGGGSEAAAK | 3355 |
| GGGEAAAKGGS | 3356 |
| EAAAKGGSGGG | 3357 |
| EAAAKGGGGGS | 3358 |
| GGSGGGPAP | 3359 |
| GGSPAPGGG | 3360 |
| GGGGGSPAP | 3361 |
| GGGPAPGGS | 3362 |
| PAPGGSGGG | 3363 |
| PAPGGGGGS | 3364 |
| GGSGSSEAAAK | 3365 |
| GGSEAAAKGSS | 3366 |
| GSSGGSEAAAK | 3367 |
| GSSEAAAKGGS | 3368 |
| EAAAKGGSGSS | 3369 |
| EAAAKGSSGGS | 3370 |
| GGSGSSPAP | 3371 |
| GGSPAPGSS | 3372 |
| GSSGGSPAP | 3373 |
| GSSPAPGGS | 3374 |
| PAPGGSGSS | 3375 |
| PAPGSSGGS | 3376 |
| GGSEAAAKPAP | 3377 |
| GGSPAPEAAAK | 3378 |
| EAAAKGGSPAP | 3379 |
| EAAAKPAPGGS | 3380 |
| PAPGGSEAAAK | 3381 |
| PAPEAAAKGGS | 3382 |
| GGGGSSEAAAK | 3383 |
| GGGEAAAKGSS | 3384 |
| GSSGGGEAAAK | 3385 |
| GSSEAAAKGGG | 3386 |
| EAAAKGGGGSS | 3387 |
| EAAAKGSSGGG | 3388 |
| GGGGSSPAP | 3389 |
| GGGPAPGSS | 3390 |
| GSSGGGPAP | 3391 |
| GSSPAPGGG | 3392 |
| PAPGGGGSS | 3393 |
| PAPGSSGGG | 3394 |
| GGGEAAAKPAP | 3395 |
| GGGPAPEAAAK | 3396 |
| EAAAKGGGPAP | 3397 |
| EAAAKPAPGGG | 3398 |
| PAPGGGEAAAK | 3399 |
| PAPEAAAKGGG | 3400 |
| GSSEAAAKPAP | 3401 |
| GSSPAPEAAAK | 3402 |
| EAAAKGSSPAP | 3403 |
| EAAAKPAPGSS | 3404 |
| PAPGSSEAAAK | 3405 |
| PAPEAAAKGSS | 3406 |
| AEAAAKEAAAKEAAAKEAAAKALEAEAAAKEAAAKEAAAKEAAAKA | 3407 |
| GGGGSEAAAKGGGGS | 3408 |
| EAAAKGGGGSEAAAK | 3409 |
| SGSETPGTSESATPES | 1023 |
| GSAGSAAGSGEF | 3410 |
| SGGSSGGSSGSETPGTSESATPESSGGSSGGSS | 1589 |

[0596] In some embodiments, a Gene Writer polypeptide comprises a dCas9 sequence comprising a D10A and/or H840A mutation, e.g., the following sequence:

(SEQ ID NO: 1590)
SMDKKYSIGLAIGTNSVGWAVITDDYKVPSKKFKVLGNTDRHSIKKNLIG
ALLFDSGETAEATRLKRTARRRYTRRKNRICYLQEIFSNEMAKVDDSFFH
RLEESFLVEEDKKHERHPIFGNIVDEVAYHEKYPTIYHLRKKLVDSTDKA
DLRLIYLALAHMIKFRGHFLIEGDLNPDNSDVDKLFIQLVQTYNQLFEEN
PINASGVDAKAILSARLSKSRRLENLIAQLPGEKKNGLFGNLIALSLGLT
PNFKSNFDLAEDAKLQLSKDTYDDDLDNLLAQIGDQYADLFLAAKNLSDA
ILLSDILRVNTEITKAPLSASMIKRYDEHHQDLTLLKALVRQQLPEKYKE
IFFDQSKNGYAGYIDGGASQEEFYKFIKPILEKMDGTEELLVKLNREDLL
RKQRTFDNGSIPHQIHLGELHAILRRQEDFYPFLKDNREKIEKILTFRIP
YYVGPLARGNSRFAWMTRKSEETITPWNFEEVVDKGASAQSFIERMTNFD
KNLPNEKVLPKHSLLYEYFTVYNELTKVKYVTEGMRKPAFLSGEQKKAIV
DLLFKTNRKVTVKQLKEDYFKKIECFDSVEISGVEDRFNASLGTYHDLLK
IIKDKDFLDNEENEDILEDIVLTLTLFEDREMIEERLKTYAHLFDDKVMK
QLKRRRYTGWGRLSRKLINGIRDKQSGKTILDFLKSDGFANRNFMQLIHD
DSLTFKEDIQKAQVSGQGDSLHEHIANLAGSPAIKKGILQTVKVVDELVK
VMGRHKPENIVIEMARENQTTQKGQKNSRERMKRIEEGIKELGSQILKEH
PVENTQLQNEKLYLYYLQNGRDMYVDQELDINRLSDYDVDAIVPQSFLKD
DSIDNKVLTRSDKNRGKSDNVPSEEVVKKMKNYWRQLLNAKLITQRKFDN
LTKAERGGLSELDKAGFIKRQLVETRQITKHVAQILDSRMNTKYDENDKL
IREVKVITLKSKLVSDFRKDFQFYKVREINNYHHAHDAYLNAVVGTALIK
KYPKLESEFVYGDYKVYDVRKMIAKSEQEIGKATAKYFFYSNIMNFFKTE
ITLANGEIRKRPLIETNGETGEIVWDKGRDFATVRKVLSMPQVNIVKKTE
VQTGGFSKESILPKRNSDKLIARKKDWDPKKYGGFDSPTVAYSVLVVAKV
EKGKSKKLKSVKELLGITIMERSSFEKNPIDFLEAKGYKEVKKDLIIKLP
KYSLFELENGRKRMLASAGELQKGNELALPSKYVNFLYLASHYEKLKGSP
EDNEQKQLFVEQHKHYLDEIIEQISEFSKRVILADANLDKVLSAYNKHRD
KPIREQAENIIHLFTLTNLGAPAAFKYFDTTIDRKRYTSTKEVLDATLIH
QSITGLYETRIDLSQLGGD

[0597] In some embodiments, a template RNA molecule for use in the system comprises, from 5′ to 3′ (1) a gRNA spacer; (2) a gRNA scaffold; (3) heterologous object sequence (4) 3′ homology domain. In some embodiments:
[0598] (1) Is a Cas9 spacer of ˜18-22 nt, e.g., is 20 nt
[0599] (2) Is a gRNA scaffold comprising one or more hairpin loops, e.g., 1, 2, of 3 looped for associating the template with a nickase Cas9 domain. In some embodiments, the gRNA scaffold carries the sequence, from 5′ to 3′,

(SEQ ID NO: 1591)
GTTTTAGAGCTAGAAATAGCAAGTTAAAATAAGGCTAGTCCGTTATCAAC
TTGAAAAAGTGGGACCGAGTCGGTCC.

[0600] (3) In some embodiments, the heterologous object sequence is, e.g., 7-74, e.g., 10-20, 20-30, 30-40, 40-50, 50-60, 60-70, or 70-80 nt or, 80-90 nt in length. In some embodiments, the first (most 5′) base of the sequence is not C.
[0601] (4) In some embodiments, the 3′ homology domain that binds the target priming sequence after nicking occurs is e.g., 3-20 nt, e.g., 7-15 nt, e.g., 12-14 nt. In some embodiments, the 3′ homology domain has 40-60% GC content.

[0602] A second gRNA associated with the system may help drive complete integration. In some embodiments, the second gRNA may target a location that is 0-200 nt away from the first-strand nick, e.g., 0-50, 50-100, 100-200 nt away from the first-strand nick. In some embodiments, the second gRNA can only bind its target sequence after the edit is made, e.g., the gRNA binds a sequence present in the heterologous object sequence, but not in the initial target sequence.

[0603] In some embodiments, a Gene Writing system described herein is used to make an edit in HEK293, K562, U2OS, or HeLa cells. In some embodiment, a Gene Writing system is used to make an edit in primary cells, e.g., primary cortical neurons from E18.5 mice.

[0604] In some embodiments, a reverse transcriptase or RT domain (e.g., as described herein) comprises a MoMLV RT sequence or variant thereof. In embodiments, the MoMLV RT sequence comprises one or more mutations selected from D200N, L603W, T330P, T306K, W313F, D524G, E562Q, D583N, P51L, S67R, E67K, T197A, H204R, E302K, F309N, L435G, N454K, H594Q, D653N, R110S, and K103L. In embodiments, the MoMLV RT sequence comprises a combination of mutations, such as D200N, L603W, and T330P, optionally further including T306K and/or W313F.

[0605] In some embodiments, an endonuclease domain (e.g., as described herein) comprises nCAS9, e.g., comprising the H840A mutation.

[0606] In some embodiments, the heterologous object sequence (e.g., of a system as described herein) is about 1-50, 50-100, 100-200, 200-300, 300-400, 400-500, 500-600, 600-700, 700-800, 800-900, 900-1000, or more, nucleotides in length.

[0607] In some embodiments, the RT and endonuclease domains are joined by a flexible linker, e.g., comprising the amino acid sequence SGGSSGGSSGSETPGTSESATPESSGGSSGGSS (SEQ ID NO: 1589).

[0608] In some embodiments, the endonuclease domain is N-terminal relative to the RT domain. In some embodiments, the endonuclease domain is C-terminal relative to the RT domain.

[0609] In some embodiments, the system incorporates a heterologous object sequence into a target site by TPRT, e.g., as described herein.

[0610] In some embodiments, a system or method described herein involves a CRISPR DNA targeting enzyme or system described in US Pat. App. Pub. No. 20200063126, 20190002889, or 20190002875 (each of which is incorporated by reference herein in its entirety) or a functional fragment or variant thereof. For instance, in some embodiments, a GeneWriter polypeptide or Cas endonuclease described herein comprises a polypeptide sequence of any of the applications mentioned in this paragraph, and in some embodiments a template RNA or guide RNA comprises a nucleic acid sequence of any of the applications mentioned in this paragraph.

[0611] In some embodiments, an endonuclease domain or DNA-binding domain comprises a TAL effector molecule. A TAL effector molecule, e.g., a TAL effector molecule that specifically binds a DNA sequence, typically comprises a plurality of TAL effector domains or fragments thereof, and optionally one or more additional portions of naturally occurring TAL effectors (e.g., N- and/or C-terminal of the plurality of TAL effector domains). Many TAL effectors are known to those of skill in the art and are commercially available, e.g., from Thermo Fisher Scientific.

[0612] Naturally occurring TALEs are natural effector proteins secreted by numerous species of bacterial pathogens including the plant pathogen Xanthomonas which modulates gene expression in host plants and facilitates bacterial colonization and survival. The specific binding of TAL effectors is based on a central repeat domain of tandemly arranged nearly identical repeats of typically 33 or 34 amino acids (the repeat-variable di-residues, RVD domain).

[0613] Members of the TAL effectors family differ mainly in the number and order of their repeats. The number of repeats typically ranges from 1.5 to 33.5 repeats and the C-terminal repeat is usually shorter in length (e.g., about 20 amino acids) and is generally referred to as a “half-repeat”. Each repeat of the TAL effector generally features a one-repeat-to-one-base-pair correlation with different repeat types exhibiting different base-pair specificity (one repeat recognizes one base-pair on the target gene sequence). Generally, the smaller the number of repeats, the weaker the protein-DNA interactions. A number of 6.5 repeats has been shown to be sufficient to activate transcription of a reporter gene (Scholze et al., 2010).

[0614] Repeat to repeat variations occur predominantly at amino acid positions 12 and 13, which have therefore been termed “hypervariable” and which are responsible for the specificity of the interaction with the target DNA promoter sequence, as shown in Table 5 listing exemplary repeat variable diresidues (RVD) and their correspondence to nucleic acid base targets.

TABLE 5
RVDs and Nucleic Acid Base Specificity

| Target | Possible RVD Amino Acid Combinations | | | | | | | | | | | | |
|---|---|---|---|---|---|---|---|---|---|---|---|---|---|
| A | NI | NN | CI | HI | KI | | | | | | | | |
| G | NN | GN | SN | VN | LN | DN | QN | EN | HN | RH | NK | AN | FN |
| C | HD | RD | KD | ND | AD | | | | | | | | |
| T | NG | HG | VG | IG | EG | MG | YG | AA | EP | VA | QG | KG | RG |

[0615] Accordingly, it is possible to modify the repeats of a TAL effector to target specific DNA sequences. Further studies have shown that the RVD NK can target G. Target sites of TAL effectors also tend to include a T flanking the 5′ base targeted by the first repeat, but the exact mechanism of this recognition is not known. More than 113 TAL effector sequences are known to date. Non-limiting examples of TAL effectors from Xanthomonas include, Hax2, Hax3, Hax4, AvrXa7, AvrXa10 and AvrBs3.

[0616] Accordingly, the TAL effector domain of a TAL effector molecule described herein may be derived from a TAL effector from any bacterial species (e.g., Xanthomonas species such as the African strain of Xanthomonas oryzae pv. Oryzae (Yu et al. 2011), Xanthomonas campestris pv. raphani strain 756C and Xanthomonas oryzae pv. oryzicola strain BLS256 (Bogdanove et al. 2011). In some embodiments, the TAL effector domain comprises an RVD domain as well as flanking sequence(s) (sequences on the N-terminal and/or C-terminal side of the RVD domain) also from the naturally occurring TAL effector. It may comprise more or fewer repeats than the RVD of the naturally occurring TAL effector. The TAL effector molecule can be designed to target a given DNA sequence based on the above code and others known in the art. The number of TAL effector domains (e.g., repeats (monomers or modules)) and their specific sequence can be selected based on the desired DNA target sequence. For example, TAL effector domains, e.g., repeats, may be removed or added in order to suit a specific target sequence. In an embodiment, the TAL effector molecule of the present invention comprises between 6.5 and 33.5 TAL effector domains, e.g., repeats. In an embodiment, TAL effector molecule of the present invention comprises between 8 and 33.5 TAL effector domains, e.g., repeats, e.g., between 10 and 25 TAL effector domains, e.g., repeats, e.g., between 10 and 14 TAL effector domains, e.g., repeats.

[0617] In some embodiments, the TAL effector molecule comprises TAL effector domains that correspond to a perfect match to the DNA target sequence. In some embodiments, a mismatch between a repeat and a target base-pair on the DNA target sequence is permitted as along as it allows for the function of the polypeptide comprising the TAL effector molecule. In general, TALE binding is inversely correlated with the number of mismatches. In some embodiments, the TAL effector molecule of a polypeptide of the present invention comprises no more than 7 mismatches, 6 mismatches, 5 mismatches, 4 mismatches, 3 mismatches, 2 mismatches, or 1 mismatch, and optionally no mismatch, with the target DNA sequence. Without wishing to be bound by theory, in general the smaller the number of TAL effector domains in the TAL effector molecule, the smaller the number of mismatches will be tolerated and still allow for the function of the polypeptide comprising the TAL effector molecule. The binding affinity is thought to depend on the sum of matching repeat-DNA combinations. For example, TAL effector molecules having 25 TAL effector domains or more may be able to tolerate up to 7 mismatches.

[0618] In addition to the TAL effector domains, the TAL effector molecule of the present invention may comprise additional sequences derived from a naturally occurring TAL effector. The length of the C-terminal and/or N-terminal sequence(s) included on each side of the TAL effector domain portion of the TAL effector molecule can vary and be selected by one skilled in the art, for example based on the studies of Zhang et al. (2011). Zhang et al., have characterized a number of C-terminal and N-terminal truncation mutants in Hax3 derived TAL-effector based proteins and have identified key elements, which contribute to optimal binding to the target sequence and thus activation of transcription. Generally, it was found that transcriptional activity is inversely correlated with the length of N-terminus. Regarding the C-terminus, an important element for DNA binding residues within the first 68 amino acids of the Hax 3 sequence was identified. Accordingly, in some embodiments, the first 68 amino acids on the C-terminal side of the TAL effector domains of the naturally occurring TAL effector is included in the TAL effector molecule. Accordingly, in an embodiment, a TAL effector molecule comprises 1) one or more TAL effector domains derived from a naturally occurring TAL effector; 2) at least 70, 80, 90, 100, 110, 120, 130, 140, 150, 170, 180, 190, 200, 220, 230, 240, 250, 260, 270, 280 or more amino acids from the naturally occurring TAL effector on the N-terminal side of the TAL effector domains; and/or 3) at least 68, 80, 90, 100, 110, 120, 130, 140, 150, 170, 180, 190, 200, 220, 230, 240, 250, 260 or more amino acids from the naturally occurring TAL effector on the C-terminal side of the TAL effector domains.

[0619] In some embodiments, an endonuclease domain or DNA-binding domain is or comprises a Zn finger molecule. A Zn finger molecule comprises a Zn finger protein, e.g., a naturally occurring Zn finger protein or engineered Zn finger protein, or fragment thereof. Many Zn finger proteins are known to those of skill in the art and are commercially available, e.g., from Sigma-Aldrich.

[0620] In some embodiments, a Zn finger molecule comprises a non-naturally occurring Zn finger protein that is engineered to bind to a target DNA sequence of choice. See, for example, Beerli, et al. (2002) Nature Biotechnol. 20:135-141; Pabo, et al. (2001) Ann. Rev. Biochem. 70:313-340; Isalan, et al. (2001) Nature Biotechnol. 19:656-660; Segal, et al. (2001) Curr. Opin. Biotechnol. 12:632-637; Choo, et al. (2000) Curr. Opin. Struct. Biol. 10:411-416; U.S. Pat. Nos. 6,453,242; 6,534,261; 6,599,692; 6,503,717; 6,689,558; 7,030,215; 6,794,136; 7,067,317; 7,262,054; 7,070,934; 7,361,635; 7,253,273; and U.S. Patent Publication Nos. 2005/0064474; 2007/0218528; 2005/0267061, all incorporated herein by reference in their entireties.

[0621] An engineered Zn finger protein may have a novel binding specificity, compared to a naturally-occurring Zn finger protein. Engineering methods include, but are not limited to, rational design and various types of selection. Rational design includes, for example, using databases comprising triplet (or quadruplet) nucleotide sequences and individual Zn finger amino acid sequences, in which each triplet or quadruplet nucleotide sequence is associated with one or more amino acid sequences of zinc fingers which bind the particular triplet or quadruplet sequence. See, for example, U.S. Pat. Nos. 6,453,242 and 6,534,261, incorporated by reference herein in their entireties.

[0622] Exemplary selection methods, including phage display and two-hybrid systems, are disclosed in U.S. Pat. Nos. 5,789,538; 5,925,523; 6,007,988; 6,013,453; 6,410,248; 6,140,466; 6,200,759; and 6,242,568; as well as International Patent Publication Nos. WO 98/37186; WO 98/53057; WO 00/27878; and WO 01/88197 and GB 2,338,237. In addition, enhancement of binding specificity for zinc finger proteins has been described, for example, in International Patent Publication No. WO 02/077227.

[0623] In addition, as disclosed in these and other references, zinc finger domains and/or multi-fingered zinc finger proteins may be linked together using any suitable linker sequences, including for example, linkers of 5 or more amino acids in length. See, also, U.S. Pat. Nos. 6,479,626; 6,903,185; and 7,153,949 for exemplary linker sequences 6 or more amino acids in length. The proteins described herein may include any combination of suitable linkers between the individual zinc fingers of the protein. In addition, enhancement of binding specificity for zinc finger binding domains has been described, for example, in co-owned International Patent Publication No. WO 02/077227.

[0624] Zn finger proteins and methods for design and construction of fusion proteins (and polynucleotides encoding same) are known to those of skill in the art and described in detail in U.S. Pat. Nos. 6,140,0815; 789,538; 6,453,242; 6,534,261; 5,925,523; 6,007,988; 6,013,453; and 6,200,759; International Patent Publication Nos. WO 95/19431; WO 96/06166; WO 98/53057; WO 98/54311; WO 00/27878; WO 01/60970; WO 01/88197; WO 02/099084; WO 98/53058; WO 98/53059; WO 98/53060; WO 02/016536; and WO 03/016496.

[0625] In addition, as disclosed in these and other references, Zn finger proteins and/or multi-fingered Zn finger proteins may be linked together, e.g., as a fusion protein, using any suitable linker sequences, including for example, linkers of 5 or more amino acids in length. See, also, U.S. Pat. Nos. 6,479,626; 6,903,185; and 7,153,949 for exemplary linker sequences 6 or more amino acids in length. The Zn finger molecules described herein may include any combination of suitable linkers between the individual zinc finger proteins and/or multi-fingered Zn finger proteins of the Zn finger molecule.

[0626] In certain embodiments, the DNA-binding domain or endonuclease domain comprises a Zn finger molecule comprising an engineered zinc finger protein that binds (in a sequence-specific manner) to a target DNA sequence. In some embodiments, the Zn finger molecule comprises one Zn finger protein or fragment thereof. In other embodiments, the Zn finger molecule comprises a plurality of Zn finger proteins (or fragments thereof), e.g., 2, 3, 4, 5, 6 or more Zn finger proteins (and optionally no more than 12, 11, 10, 9, 8, 7, 6, 5, 4, 3, or 2 Zn finger proteins). In some embodiments, the Zn finger molecule comprises at least three Zn finger proteins. In some embodiments, the Zn finger molecule comprises four, five or six fingers. In some embodiments, the Zn finger molecule comprises 8, 9, 10, 11 or 12 fingers. In some embodiments, a Zn finger molecule comprising three Zn finger proteins recognizes a target DNA sequence comprising 9 or 10 nucleotides. In some embodiments, a Zn finger molecule comprising four Zn finger proteins recognizes a target DNA sequence comprising 12 to 14 nucleotides. In some embodiments, a Zn finger molecule comprising six Zn finger proteins recognizes a target DNA sequence comprising 18 to 21 nucleotides.

[0627] In some embodiments, a Zn finger molecule comprises a two-handed Zn finger protein. Two handed zinc finger proteins are those proteins in which two clusters of zinc finger proteins are separated by intervening amino acids so that the two zinc finger domains bind to two discontinuous target DNA sequences. An example of a two handed type of zinc finger binding protein is SIP1, where a cluster of four zinc finger proteins is located at the amino terminus of the protein and a cluster of three Zn finger proteins is located at the carboxyl terminus (see Remade, et al. (1999) EMBO Journal 18(18):5073-5084). Each cluster of zinc fingers in these proteins is able to bind to a unique target sequence and the spacing between the two target sequences can comprise many nucleotides.

[0628] DNA Binding Domain:

[0629] In certain aspects, the DNA-binding domain of a Gene Writer™ polypeptide described herein is selected, designed, or constructed for binding to a desired host DNA target sequence.

[0630] In some embodiments, a Gene Writer polypeptide comprises a modification to a DNA-binding domain, e.g., relative to the wild-type polypeptide. In some embodiments, the DNA-binding domain comprises an addition, deletion, replacement, or modification to the amino acid sequence of the original DNA-binding domain. In some embodiments, the DNA-binding domain is modified to include a heterologous functional domain that binds specifically to a target nucleic acid (e.g., DNA) sequence of interest. In some embodiments, the functional domain replaces at least a portion (e.g., the entirety of) the prior DNA-binding domain of the polypeptide. In some embodiments, the functional domain comprises a zinc finger (e.g., a zinc finger that specifically binds to the target nucleic acid (e.g., DNA) sequence of interest. In some embodiments, the functional domain comprises a Cas domain (e.g., a Cas domain that specifically binds to the target nucleic acid (e.g., DNA) sequence of interest. In embodiments, the Cas domain comprises a Cas9 or a mutant or variant thereof (e.g., as described herein). In embodiments, the Cas domain is associated with a guide RNA (gRNA), e.g., as described herein. In embodiments, the Cas domain is directed to a target nucleic acid (e.g., DNA) sequence of interest by the gRNA. In embodiments, the Cas domain is encoded in the same nucleic acid (e.g., RNA) molecule as the gRNA. In embodiments, the Cas domain is encoded in a different nucleic acid (e.g., RNA) molecule from the gRNA.

[0631] In certain embodiments, the DNA-binding domain of the polypeptide is a heterologous DNA-binding protein or domain relative to a native retrotransposon sequence. In some embodiments the heterologous DNA binding element is a zinc-finger element or a TAL effector element, e.g., a zinc-finger or TAL polypeptide or functional fragment thereof. In some embodiments the heterologous DNA binding element is a sequence-guided DNA binding element, such as Cas9, Cpf1, or other CRISPR-related protein that has been altered to have no endonuclease activity. In some embodiments the heterologous DNA binding element retains endonuclease activity. In some embodiments, the heterologous DNA binding element retains partial endonuclease activity to cleave ssDNA, e.g., possesses nickase activity. In some embodiments the heterologous DNA binding element replaces the endonuclease element of the polypeptide. In specific embodiments, the heterologous DNA-binding domain can be any one or more of Cas9, TAL domain, ZF domain, Myb domain, combinations thereof, or multiples thereof. In certain embodiments, the heterologous DNA-binding domain is a DNA binding domain of a retrotransposon or virus described in Table 1 or Table 3. A person having ordinary skill in the art is capable of identifying DNA binding domains based upon homology to other known DNA binding domains using tools as Basic Local Alignment Search Tool (BLAST). In still other embodiments, DNA-binding domains are modified, for example by site-specific mutation, increasing or decreasing DNA-binding elements (for example, number and/or specificity of zinc fingers), etc., to alter DNA-binding specificity and affinity. In some embodiments the DNA binding domain is altered from its natural sequence to have altered codon usage, e.g. improved for human cells

[0632] In some embodiments, the DNA binding domain comprises a meganuclease domain (e.g., as described herein, e.g., in the endonuclease domain section), or a functional fragment thereof. In some embodiments, the meganuclease domain possesses endonuclease activity, e.g., double-strand cleavage and/or nickase activity. In other embodiments, the meganuclease domain has reduced activity, e.g., lacks endonuclease activity, e.g., the meganuclease is catalytically inactive. In some embodiments, a catalytically inactive meganuclease is used as a DNA binding domain, e.g., as described in Fonfara et al. Nucleic Acids Res 40(2):847-860 (2012), incorporated herein by reference in its entirety. In embodiments, the DNA binding domain comprises one or more modifications relative to a wild-type DNA binding domain, e.g., a modification via directed evolution, e.g., phage-assisted continuous evolution (PACE).

[0633] In certain aspects of the present invention, the host DNA-binding site integrated into by the Gene Writer™ system can be in a gene, in an intron, in an exon, an ORF, outside of a coding region of any gene, in a regulatory region of a gene, or outside of a regulatory region of a gene. In other aspects, the polypeptide may bind to one or more than one host DNA sequence.

[0634] In some embodiments, a Gene Writing system is used to edit a target locus in multiple alleles. In some embodiments, a Gene Writing system is designed to edit a specific allele. For example, a Gene Writing polypeptide may be directed to a specific sequence that is only present on one allele, e.g., comprises a template RNA with homology to a target allele, e.g., a gRNA or annealing domain, but not to a second cognate allele. In some embodiments, a Gene Writing system can alter a haplotype-specific allele. In some embodiments, a Gene Writing system that targets a specific allele preferentially targets that allele, e.g., has at least a 2, 4, 6, 8, or 10-fold preference for a target allele.

[0635] In certain embodiments, a Gene Writer™ gene editor system RNA further comprises an intracellular localization sequence, e.g., a nuclear localization sequence. The nuclear localization sequence may be an RNA sequence that promotes the import of the RNA into the nucleus. In certain embodiments the nuclear localization signal is located on the template RNA. In certain embodiments, the retrotransposase polypeptide is encoded on a first RNA, and the template RNA is a second, separate, RNA, and the nuclear localization signal is located on the template RNA and not on an RNA encoding the retrotransposase polypeptide. While not wishing to be bound by theory, in some embodiments, the RNA encoding the retrotransposase is targeted primarily to the cytoplasm to promote its translation, while the template RNA is targeted primarily to the nucleus to promote its retrotransposition into the genome. In some embodiments the nuclear localization signal is at the 3′ end, 5′ end, or in an internal region of the template RNA. In some embodiments the nuclear localization signal is 3′ of the heterologous sequence (e.g., is directly 3′ of the heterologous sequence) or is 5′ of the heterologous sequence (e.g., is directly 5′ of the heterologous sequence). In some embodiments the nuclear localization signal is placed outside of the 5′ UTR or outside of the 3′ UTR of the template RNA. In some embodiments the nuclear localization signal is placed between the 5′ UTR and the 3′ UTR, wherein optionally the nuclear localization signal is not transcribed with the transgene (e.g., the nuclear localization signal is an anti-sense orientation or is downstream of a transcriptional termination signal or polyadenylation signal). In some embodiments the nuclear localization sequence is situated inside of an intron. In some embodiments a plurality of the same or different nuclear localization signals are in the RNA, e.g., in the template RNA. In some embodiments the nuclear localization signal is less than 5, 10, 25, 50, 75, 100, 150, 200, 250, 300, 350, 400, 450, 500, 600, 700, 800, 900 or 1000 bp in length. Various RNA nuclear localization sequences can be used. For example, Lubelsky and Ulitsky, Nature 555 (107-111), 2018 describe RNA sequences which drive RNA localization into the nucleus. In some embodiments, the nuclear localization signal is a SINE-derived nuclear RNA localization (SIRLOIN) signal. In some embodiments the nuclear localization signal binds a nuclear-enriched protein. In some embodiments the nuclear localization signal binds the HNRNPK protein. In some embodiments the nuclear localization signal is rich in pyrimidines, e.g., is a C/T rich, C/U rich, C rich, T rich, or U rich region. In some embodiments the nuclear localization signal is derived from a long non-coding RNA. In some embodiments the nuclear localization signal is derived from MALAT1 long non-coding RNA or is the 600 nucleotide M region of MALAT1 (described in Miyagawa et al., RNA 18, (738-751), 2012). In some embodiments the nuclear localization signal is derived from BORG long non-coding RNA or is a AGCCC motif (described in Zhang et al., Molecular and Cellular Biology 34, 2318-2329 (2014). In some embodiments the nuclear localization sequence is described in Shukla et al., The EMBO Journal e98452 (2018). In some embodiments the nuclear localization signal is derived from a non-LTR retrotransposon, an LTR retrotransposon, retrovirus, or an endogenous retrovirus.

[0636] In some embodiments, a polypeptide described herein herein comprises one or more (e.g., 2, 3, 4, 5) nuclear targeting sequences, for example a nuclear localization sequence (NLS). In some embodiments, the NLS is a bipartite NLS. In some embodiments, an NLS facilitates the import of a protein comprising an NLS into the cell nucleus. In some embodiments, the NLS is fused to the N-terminus of a Gene Writer described herein. In some embodiments, the NLS is fused to the C-terminus of the Gene Writer. In some embodiments, the NLS is fused to the N-terminus or the C-terminus of a Cas domain. In some embodiments, a linker sequence is disposed between the NLS and the neighboring domain of the Gene Writer.

[0637] In some embodiments, an NLS comprises the amino acid sequence MDSLLMNRRKFLYQFKNVRWAKGRRETYLC (SEQ ID NO: 1592), PKKRKVEGADKRTADGSEFESPKKKRKV (SEQ ID NO: 1593), RKSGKIAAIWKRPRKPKKKRKV (SEQ ID NO: 1594), KRTADGSEFESPKKKRKV (SEQ ID NO: 1595), KKTELQTTNAENKTKKL (SEQ ID NO: 1596), or KRGINDRNFWRGENGRKTR (SEQ ID NO: 1597), KRPAATKKAGQAKKKK (SEQ ID NO: 1598), or a functional fragment or variant thereof. Exemplary NLS sequences are also described in PCT/EP2000/011690, the contents of which are incorporated herein by reference for their disclosure of exemplary nuclear localization sequences. In some embodiments, an NLS comprises an amino acid sequence as disclosed in Table 39. An NLS of this table may be utilized with one or more copies in a polypeptide in one or more locations in a polypeptide, e.g., 1, 2, 3 or more copies of an NLS in an N-terminal domain, between peptide domains, in a C-terminal domain, or in a combination of locations, in order to improve subcellular localization to the nucleus. Multiple unique sequences may be used within a single polypeptide. Sequences may be naturally monopartite or bipartite, e.g., having one or two stretches of basic amino acids, or may be used as chimeric bipartite sequences. Sequence references correspond to UniProt accession numbers, except where indicated as SeqNLS for sequences mined using a subcellular localization prediction algorithm (Lin et al BMC Bioinformat 13:157 (2012), incorporated herein by reference in its entirety).

TABLE 39
Exemplary nuclear localization signals for use in Gene Writing systems

| | SEQ ID | |
|---|---|---|
| Sequence | NO: | Sequence References |
| AHFKISGEKRPSTDPGKKAK | 3411 | Q76IQ7 |
| NPKKKKKKDP | | |
| AHRAKKMSKTHA | 3412 | P21827 |
| ASPEYVNLPINGNG | 3413 | SeqNLS |
| CTKRPRW | 3414 | O88622, Q86W56, Q9QYM2, O02776 |
| DKAKRVSRNKSEKKRR | 3415 | O15516, Q5RAK8, Q91YB2, Q91YB0, |
| | | Q8QGQ6, O08785, Q9WVS9, Q6YGZ4 |
| EELRLKEELLKGIYA | 3416 | Q9QY16, Q9UHL0, Q2TBP1, Q9QY15 |
| EEQLRRRKNSRLNNTG | 3417 | G5EFF5 |
| EVLKVIRTGKRKKKAWKR | 3418 | SeqNLS |
| MVTKVC | | |
| HHHHHHHHHHHHQPH | 3419 | Q63934, G3V7L5, Q12837 |
| HKKKHPDASVNFSEFSK | 3420 | P10103, Q4R844, P12682, B0CM99, |
| | | A9RA84, Q6YKA4, P09429, P63159, |
| | | Q08IE6, P63158, Q9YH06, B1MTB0 |
| HKRTKK | 3421 | Q2R2D5 |
| IINGRKLKLKKSRRRSSQTS | 3422 | SeqNLS |
| NNSFTSRRS | | |
| KAEQERRK | 3423 | Q8LH59 |
| KEKRKRREELFIEQKKRK | 3424 | SeqNLS |
| KKGKDEWFSRGKKP | 3425 | P30999 |
| KKGPSVQKRKKT | 3426 | Q6ZN17 |
| KKKTVINDLLHYKKEK | 3427 | SeqNLS, P32354 |
| KKNGGKGKNKPSAKIKK | 3428 | SeqNLS |
| KKPKWDDFKKKKK | 3429 | Q15397, Q8BKS9, Q562C7 |
| KKRKKD | 3430 | SeqNLS, Q91Z62, Q1A730, Q969P5, |
| | | Q2KHT6, Q9CPU7 |
| KKRRKRRRK | 3431 | SeqNLS |
| KKRRRRARK | 3432 | Q9UMS6, D4A702, Q91YE8 |
| KKSKRGR | 3433 | Q9UBS0 |
| KKSRKRGS | 3434 | B4FG96 |
| KKSTALSRELGKIMRRR | 3435 | SeqNLS, P32354 |
| KKSYQDPEIIAHSRPRK | 3436 | Q9U7C9 |
| KKTGKNRKLKSKRVKTR | 3437 | Q9Z301, O54943, Q8K3T2 |
| KKVSIAGQSGKLWRWKR | 3438 | Q6YUL8 |
| KKYENVVIKRSPRKRGRPRK | 3439 | SeqNLS |
| KNKKRK | 3440 | SeqNLS |
| KPKKKR | 3441 | SeqNLS |
| KRAMKDDSHGNSTSPKRRK | 3442 | Q0E671 |
| KRANSNLVAAYEKAKKK | 3443 | P23508 |
| KRASEDTTSGSPPKKSSAGPKR | 3444 | Q9BZZ5, Q5R644 |
| KRFKRRWMVRKMKTKK | 3445 | SeqNLS |
| KRGLNSSFETSPKKVK | 3446 | Q8IV63 |
| KRGNSSIGPNDLSKRKQRKK | 3447 | SeqNLS |
| KRIHSVSLSQSQIDPSKKVK | 3448 | SeqNLS |
| RAK | | |
| KRKGKLKNKGSKRKK | 3449 | O15381 |
| KRRRRRRREKRKR | 3450 | Q96GM8 |
| KRSNDRTYSPEEEKQRRA | 3451 | Q91ZF2 |
| KRTVATNGDASGAHRAKK | 3452 | SeqNLS |
| MSK | | |
| KRVYNKGEDEQEHLPKGKK | 3453 | SeqNLS |
| R | | |
| KSGKAPRRRAVSMDNSNK | 3454 | Q9WVH4, O43524 |
| KVNFLDMSLDDIIIYKELE | 3455 | Q9P127 |
| KVQHRIAKKTTRRRR | 3456 | Q9DXE6 |
| LSPSLSPL | 3457 | Q9Y261, P32182, P35583 |
| MDSLLMNRRKFLYQFKNVR | 1735 | Q9GZX7 |
| WAKGRRETYLC | | |
| MPQNEYIELHRKRYGYRLD | 3458 | SeqNLS |
| YHEKKRKKESREAHERSKK | | |
| AKKMIGLKAKLYHK | | |
| MVQLRPRASR | 3459 | SeqNLS |
| NNKLLAKRRKGGASPKDDP | 3460 | Q965G5 |
| MDDIK | | |
| NYKRPMDGTYGPPAKRHEG | 3461 | O14497, A2BH40 |
| E | | |
| PDTKRAKLDSSETTMVKKK | 3462 | SeqNLS |
| PEKRTKI | 3463 | SeqNLS |
| PGGRGKKK | 3464 | Q719N1, Q9UBP0, A2VDN5 |
| PGKMDKGEHRQERRDRPY | 3465 | Q01844, Q61545 |
| PKKGDKYDKTD | 3466 | Q45FA5 |
| PKKKSRK | 3467 | O35914, Q01954 |
| PKKNKPE | 3468 | Q22663 |
| PKKRAKV | 3469 | P04295, P89438 |
| PKPKKLKVE | 3470 | P55263, P55262, P55264, Q64640 |
| PKRGRGR | 3471 | Q9FYS5, Q43386 |
| PKRRLVDDA | 3472 | P0C797 |
| PKRRRTY | 3473 | SeqNLS |
| PLFKRR | 3474 | A8X6H4, Q9TXJ0 |
| PLRKAKR | 3475 | Q86WB0, Q5R8V9 |
| PPAKRKCIF | 3476 | Q6AZ28, O75928, Q8C5D8 |
| PPARRRRL | 3477 | Q8NAG6 |
| PPKKKRKV | 3478 | Q3L6L5, P03070, P14999, P03071 |
| PPNKRMKVKH | 3479 | Q8BN78 |
| PPRIYPQLPSAPT | 3480 | P0C799 |
| PQRSPFPKSSVKR | 3481 | SeqNLS |
| PRPRKVPR | 3482 | P0C799 |
| PRRRVQRKR | 3483 | SeqNLS, Q5R448, Q5TAQ9 |
| PRRVRLK | 3484 | Q58DJ0, P56477, Q13568 |
| PSRKRPR | 3485 | Q62315, Q5F363, Q92833 |
| PSSKKRKV | 3486 | SeqNLS |
| PTKKRVK | 3487 | P07664 |
| QRPGPYDRP | 3488 | SeqNLS |
| RGKGGKGLGKGGAKRHRK | 3489 | SeqNLS |
| RKAGKGGGGHKTTKKRSA | 3490 | B4FG96 |
| KDEKVP | | |
| RKIKLKRAK | 3491 | A1L3G9 |
| RKIKRKRAK | 3492 | B9X187 |
| RKKEAPGPREELRSRGR | 3493 | O35126, P54258, Q5IS70, P54259 |
| RKKRKGK | 3494 | SeqNLS, Q29243, Q62165, Q28685, |
| | | O18738, Q9TSZ6, Q14118 |
| RKKRRQRRR | 3495 | P04326, P69697, P69698, P05907, |
| | | P20879, P04613, P19553, P0C1J9, |
| | | P20893, P12506, P04612, Q73370, |
| | | P0C1K0, P05906, P35965, P04609, |
| | | P04610, P04614, P04608, P05905 |
| RKKSIPLSIKNLKRKHKRKK | 3496 | Q9C0C9 |
| NKITR | | |
| RKLVKPKNTKMKTKLRTNP | 3497 | Q14190 |
| Y | | |
| RKRLILSDKGQLDWKK | 3498 | SeqNLS, Q91Z62, Q1A730, Q2KHT6, |
| | | Q9CPU7 |
| RKRLKSK | 3499 | Q13309 |
| RKRRVRDNM | 3500 | Q8QPH4, Q809M7, A8C8X1, Q2VNC5, |
| | | Q38SQ0, O89749, Q6DNQ9, Q809L9, |
| | | Q0A429, Q20NV3, P16509, P16505, |
| | | Q6DNQ5, P16506, Q6XT06, P26118, |
| | | Q2ICQ2, Q2RCG8, Q0A2D0, Q0A2H9, |
| | | Q9IQ46, Q809M3, Q6J847, Q6J856, |
| | | B4URE4, A4GCM7, Q0A440, P26120, |
| | | P16511, |
| RKRSPKDKKEKDLDGAGKR | 3501 | Q7RTP6 |
| RKT | | |
| RKRTPRVDGQTGENDMNK | 3502 | O94851 |
| RRRK | | |
| RLPVRRRRRR | 3503 | P04499, P12541, P03269, P48313, |
| | | P03270 |
| RLRFRKPKSK | 3504 | P69469 |
| RQQRKR | 3505 | Q14980 |
| RRDLNSSFETSPKKVK | 3506 | Q8K3G5 |
| RRDRAKLR | 3507 | Q9SLB8 |
| RRGDGRRR | 3508 | Q80WE1, Q5R9B4, Q06787, P35922 |
| RRGRKRKAEKQ | 3509 | Q812D1, Q5XXA9, Q99JF8, Q8MJG1, |
| | | Q66T72, O75475 |
| RRKKRR | 3510 | Q0VD86, Q58DS6, Q5R6G2, Q9ERI5, |
| | | Q6AYK2, Q6NYC1 |
| RRKRSKSEDMDSVESKRRR | 3511 | Q7TT18 |
| RRKRSR | 3512 | Q99PU7, D3ZHS6, Q92560, A2VDM8 |
| RRPKGKTLQKRKPK | 3513 | Q6ZN17 |
| RRRGFERFGPDNMGRKRK | 3514 | Q63014, Q9DBR0 |
| RRRGKNKVAAQNCRK | 3515 | SeqNLS |
| RRRKRR | 3516 | Q5FVH8, Q6MZT1, Q08DH5, Q8BQP9 |
| RRRQKQKGGASRRR | 3517 | SeqNLS |
| RRRREGPRARRRR | 3518 | P08313, P10231 |
| RRTIRLKLVYDKCDRSCKIQ | 3519 | SeqNLS |
| KKNRNKCQYCRFHKCLSVG | | |
| MSHNAIRFGRMPRSEKAKL | | |
| KAE | | |
| RRVPQRKEVSRCRKCRK | 3520 | Q5RJN4, Q32L09, Q8CAK3, Q9NUL5 |
| RVGGRRQAVECIEDLLNEP | 3521 | P03255 |
| GQPLDLSCKRPRP | | |
| RVVKLRIAP | 3522 | P52639, Q8JMN0 |
| RVVRRR | 3523 | P70278 |
| SKRKTKISRKTR | 3524 | Q5RAY1, O00443 |
| SYVKTVPNRTRTYIKL | 3525 | P21935 |
| TGKNEAKKRKIA | 3526 | P52739, Q8K3J5, Q5RAU9 |
| TLSPASSPSSVSCPVIPASTD | 3527 | SeqNLS |
| ESPGSALNI | | |
| VSKKQRTGKKIH | 3528 | P52739, Q8K3J5, Q5RAU9 |
| SPKKKRKVE | 3529 | |
| KRTAD GSEFE SPKKKRKVE | 3530 | |
| PAAKRVKLD | 3531 | |
| PKKKRKV | 3532 | |
| MDSLLMNRRKFLYQFKNVR | 1735 | |
| WAKGRRETYLC | | |
| SPKKKRKVEAS | 3533 | |
| MAPKKKRKVGIHRGVP | 3534 | |

[0638] In some embodiments, the NLS is a bipartite NLS. A bipartite NLS typically comprises two basic amino acid clusters separated by a spacer sequence (which may be, e.g., about 10 amino acids in length). A monopartite NLS typically lacks a spacer. An example of a bipartite NLS is the nucleoplasmin NLS, having the sequence KR[PAATKKAGQA]KKKK (SEQ ID NO: 1598), wherein the spacer is bracketed. Another exemplary bipartite NLS has the sequence PKKKRKVEGADKRTADGSEFESPKKKRKV (SEQ ID NO: 1600). Exemplary NLSs are described in International Application WO2020051561, which is herein incorporated by reference in its entirety, including for its disclosures regarding nuclear localization sequences.

[0639] In certain embodiments, a Gene Writer™ gene editor system polypeptide further comprises an intracellular localization sequence, e.g., a nuclear localization sequence and/or a nucleolar localization sequence. The nuclear localization sequence and/or nucleolar localization sequence may be amino acid sequences that promote the import of the protein into the nucleus and/or nucleolus, where it can promote integration of heterologous sequence into the genome. In certain embodiments, a Gene Writer™ gene editor system polypeptide (e.g., a retrotransposase, e.g., a polypeptide according to any of Tables 1 or 3 herein) further comprises a nucleolar localization sequence. In certain embodiments, the retrotransposase polypeptide is encoded on a first RNA, and the template RNA is a second, separate, RNA, and the nucleolar localization signal is encoded on the RNA encoding the retrotransposase polypeptide and not on the template RNA. In some embodiments, the nucleolar localization signal is located at the N-terminus, C-terminus, or in an internal region of the polypeptide. In some embodiments, a plurality of the same or different nucleolar localization signals are used. In some embodiments, the nuclear localization signal is less than 5, 10, 25, 50, 75, or 100 amino acids in length. Various polypeptide nucleolar localization signals can be used. For example, Yang et al., Journal of Biomedical Science 22, 33 (2015), describe a nuclear localization signal that also functions as a nucleolar localization signal. In some embodiments, the nucleolar localization signal may also be a nuclear localization signal. In some embodiments, the nucleolar localization signal may overlap with a nuclear localization signal. In some embodiments, the nucleolar localization signal may comprise a stretch of basic residues. In some embodiments, the nucleolar localization signal may be rich in arginine and lysine residues. In some embodiments, the nucleolar localization signal may be derived from a protein that is enriched in the nucleolus. In some embodiments, the nucleolar localization signal may be derived from a protein enriched at ribosomal RNA loci. In some embodiments, the nucleolar localization signal may be derived from a protein that binds rRNA. In some embodiments, the nucleolar localization signal may be derived from MSP58. In some embodiments, the nucleolar localization signal may be a monopartite motif. In some embodiments, the nucleolar localization signal may be a bipartite motif. In some embodiments, the nucleolar localization signal may consist of a multiple monopartite or bipartite motifs. In some embodiments, the nucleolar localization signal may consist of a mix of monopartite and bipartite motifs. In some embodiments, the nucleolar localization signal may be a dual bipartite motif. In some embodiments, the nucleolar localization motif may be a KRASSQALGTIPKRRSSSRFIKRKK (SEQ ID NO: 1530). In some embodiments, the nucleolar localization signal may be derived from nuclear factor-κB-inducing kinase. In some embodiments, the nucleolar localization signal may be an RKKRKKK motif (SEQ ID NO: 1531) (described in Birbach et al., Journal of Cell Science, 117 (3615-3624), 2004).

[0640] In some embodiments, a nucleic acid described herein (e.g., an RNA encoding a Gene Writer™ polypeptide, or a DNA encoding the RNA) comprises a microRNA binding site. In some embodiments, the microRNA binding site is used to increase the target-cell specificity of a Gene Writer™ system. For instance, the microRNA binding site can be chosen on the basis that is is recognized by a miRNA that is present in a non-target cell type, but that is not present (or is present at a reduced level relative to the non-target cell) in a target cell type. Thus, when the RNA encoding the Gene Writer™ polypeptide is present in a non-target cell, it would be bound by the miRNA, and when the RNA encoding the Gene Writer™ polypeptide is present in a target cell, it would not be bound by the miRNA (or bound but at reduced levels relative to the non-target cell). While not wishing to be bound by theory, binding of the miRNA to the RNA encoding the Gene Writer™ polypeptide may reduce production of the Gene Writer™ polypeptide, e.g., by degrading the mRNA encoding the polypeptide or by interfering with translation. Accordingly, in such embodiments the Gene Writer would add to/edit the genome of target cells more efficiently than it edits the genome of non-target cells, e.g., the heterologous object sequence would be inserted into the genome of target cells more efficiently than into the genome of non-target cells, or an insertion or deletion is produced more efficiently in target cells than in non-target cells. A system having a microRNA binding site in the RNA encoding the Gene Writer™ polypeptide (or encoded in the DNA encoding the RNA) may also be used in combination with a template RNA that is regulated by a second microRNA binding site, e.g., as described herein in the section entitled “Template RNA component of Gene Writer™ gene editor system.” In some embodiments, e.g., for liver indications, a miRNA is selected from Table 4 of WO2020014209, incorporated herein by reference.

[0641] In some embodiments, the DNA encoding a Gene Writer polypeptide comprises a promoter sequence, e.g., a tissue specific promoter sequence. In some embodiments, the tissue-specific promoter is used to increase the target-cell specificity of a Gene Writer™ system. For instance, the promoter can be chosen on the basis that it is active in a target cell type but not active in (or active at a lower level in) a non-target cell type. A system having a tissue-specific promoter sequence in the DNA of the polypeptide may also be used in combination with a microRNA binding site, e.g., in the template RNA or a nucleic acid encoding a Gene Writer™ protein, e.g., as described herein. A system having a tissue-specific promoter sequence in the DNA encoding the Gene Writer polypeptide may also be used in combination with a DNA encoding the RNA template driven by a tissue-specific promoter, e.g., to achieve higher levels of RNA template in target cells than in non-target cells. In some embodiments, e.g., for liver indications, a tissue-specific promoter is selected from Table 3 of WO2020014209, incorporated herein by reference.

[0642] A skilled artisan can, based on the Accession numbers and/or sequences provided in Tables 1 and 3, determine the nucleic acid and corresponding polypeptide sequences of each retrotransposon or virus, and domains thereof, e.g., by using routine sequence analysis tools as Basic Local Alignment Search Tool (BLAST) or CD-Search for conserved domain analysis. Other sequence analysis tools are known and can be found, e.g., at molbiol-tools.ca, for example, at molbiol-tools.ca/Motifs.htm.

[0643] Tables 1 and 3 herein provide the sequences of exemplary transposons or viruses, including the amino acid sequence(s) of the retrotransposase, reverse transcriptase, DNA-binding domain, and/or endonuclease domain; sequences of 5′ and 3′ untranslated regions to allow a polypeptide, e.g., the retrotransposase to bind the template RNA; and/or the full transposon nucleic acid sequence. In some embodiments, a 5′ UTR contained in or referenced by Tables 1 or 3 allows a polypeptide, e.g., the retrotransposase, to bind the template RNA. In some embodiments, a 3′ UTR contained in or referenced by Tables 1 or 3 allows a polypeptide, e.g., the retrotransposase, to bind the template RNA. Thus, in some embodiments, a polypeptide for use in any of the systems described herein can be a polypeptide of any of Tables 1 or 3 herein, or a sequence having at least 70%, 75%, 80%, 85%, 90%, 95%, 96%, 97%, 98%, or 99% identity thereto. In some embodiments, the system further comprises one or both of a 5′ or 3′ untranslated region contained in or referenced by Tables 1 or 3 (or a sequence having at least 70%, 75%, 80%, 85%, 90%, 95%, 96%, 97%, 98%, or 99% identity thereto), e.g., from the same transposon as the polypeptide referred to in the preceding sentence, as indicated in the same row of the same table. In some embodiments, the system comprises one or both of a 5′ or 3′ untranslated region contained in or referenced by Tables 1 or 3, e.g., a segment of the full transposon sequence that encodes an RNA that is capable of binding a retrotransposase, and/or the sub-sequence provided in the column entitled Predicted 5′ UTR or Predicted 3′ UTR.

[0644] In some embodiments, a system or method described herein involves a 3′ UTR, 5′ UTR, or both from a retrotransposon of Table 3. In some embodiments, the 3′ UTR, 5′ UTR, or both, has a sequence comprising a portion of the full retrotransposon DNA sequence shown in column 5 of Table 3 of International Application PCT/US2019/048607, which is incorporated by reference herein in its entirety, including Table 3. In some embodiments, the nucleic acid sequence or amino acid sequence has at least 70%, 75%, 80%, 85%, 90%, 95%, 96%, 97%, 98%, or 99% identity to the sequence in Table 3 of PCT/US2019/048607.

[0645] In some embodiments, a system or method described herein involves a nucleic acid sequence or amino acid sequence of a retrotransposon described in Table 1 or Table 2 of International Application PCT/US2019/048607, which is incorporated by reference herein in its entirety, including Tables 1 and 2. In some embodiments, the nucleic acid sequence or amino acid sequence has at least 70%, 75%, 80%, 85%, 90%, 95%, 96%, 97%, 98%, or 99% identity to the sequence of a retrotransposon described in said Table 1 or Table 2 of PCT/US2019/048607.

[0646] In some embodiments, a polypeptide for use in any of the systems described herein can be a molecular reconstruction or ancestral reconstruction based upon the aligned polypeptide sequence of multiple retrotransposons. In some embodiments, a 5′ or 3′ untranslated region for use in any of the systems described herein can be a molecular reconstruction based upon the aligned 5′ or 3′ untranslated region of multiple retrotransposons. A skilled artisan can, based on the Accession numbers provided herein, align polypeptides or nucleic acid sequences, e.g., by using routine sequence analysis tools as Basic Local Alignment Search Tool (BLAST) or CD-Search for conserved domain analysis. Molecular reconstructions can be created based upon sequence consensus, e.g. using approaches described in Ivics et al., Cell 1997, 501-510; Wagstaff et al., Molecular Biology and Evolution 2013, 88-99. In some embodiments, the retrotransposon from which the 5′ or 3′ untranslated region or polypeptide is derived is a young or a recently active mobile element, as assessed via phylogenetic methods such as those described in Boissinot et al., Molecular Biology and Evolution 2000, 915-928.

[0647] Thermostable Gene Writer™ Systems

[0648] While not wishing to be bound by theory, in some embodiments, retrotransposases that evolved in cold environments may not function as well at human body temperature. This application provides a number of thermostable Gene Writer™ Systems, including proteins derived from avian retrotransposases. Exemplary avian transposase sequences in Table 3 include those of Taeniopygia guttata (zebra finch; transposon name R2-1_TG), Geospiza fortis (medium ground finch; transposon name R2-1_Gfo), Zonotrichia albicollis (white-throated sparrow; transposon name R2-1_ZA), and Tinamus guttatus (white-throated tinamou; transposon name R2-1_TGut).

[0649] Thermostability may be measured, e.g., by testing the ability of a Gene Writer™ to polymerize DNA in vitro at a high temperature (e.g., 37° C.) and a low temperature (e.g., 25° C.). Suitable conditions for assaying in vitro DNA polymerization activity (e.g., processivity) are described, e.g., in Bibillo and Eickbush, “High Processivity of the Reverse Transcriptase from a Non-long Terminal Repeat Retrotransposon” (2002) JBC 277, 34836-34845. In some embodiments, the thermostable Gene Writer™ polypeptide has an activity, e.g., a DNA polymerization activity, at 37° C. that is no less than 70%, 75%, 80%, 85%, 90%, or 95% of its activity at 25° C. under otherwise similar conditions.

[0650] In some embodiments, a Gene Writer™ polypeptide (e.g., a sequence of Table 1 or 3 or a sequence having at least 70%, 75%, 80%, 85%, 90%, 95%, 96%, 97%, 98%, or 99% identity thereto) is stable in a subject chosen from a mammal (e.g., human) or a bird. In some embodiments, a Gene Writer™ polypeptide described herein is functional at 37° C. In some embodiments, a Gene Writer™ polypeptide described herein has greater activity at 37° C. than it does at a lower temperature, e.g., at 30° C., 25° C., or 20° C. In some embodiments, a Gene Writer™ polypeptide described herein has greater activity in a human cell than in a zebrafish cell.

[0651] In some embodiments, a Gene Writer™ polypeptide is active in a human cell cultured at 37° C., e.g., using an assay of Example 6 or Example 7 of PCT/US2019/048607 which are hereby incorporated by reference.

[0652] In some embodiments, the assay comprises steps of: (1) introducing HEK293T cells into one or more wells of 6.4 mm diameter, at 10,000 cells/well, (2) incubating the cells at 37° C. for 24 hr, (3) providing a transfection mixture comprising 0.5 μl if FuGENE® HD transfection reagent and 80 ng DNA (wherein the DNA is a plasmid comprising, in order, (a) CMV promoter, (b) 100 bp of sequence homologous to the 100 bp upstream of the target site, (c) sequence encoding a 5′ untranslated region that binds the Gene Writer™ protein, (d) sequence encoding the Gene Writer™ protein, (e) sequence encoding a 3′ untranslated region that binds the Gene Writer™ protein (f) 100 bp of sequence homologous to the 100 bp downstream of the target site, and (g) BGH polyadenylation sequence) and 10 μl Opti-MEM and incubating for 15 min at room temperature, (4) adding the transfection mixture to the cells, (5) incubating the cells for 3 days, and (6) assaying integration of the exogenous sequence into a target locus (e.g., rDNA) in the cell genome, e.g., wherein one or more of the preceding steps are performed as described in Example 6 of PCT/US2019/048607 which is hereby incorporated by reference.

[0653] In some embodiments, the Gene Writer™ polypeptide results in insertion of the heterologous object sequence (e.g., the GFP gene) into the target locus (e.g., rDNA) at an average copy number of at least 0.01, 0.025, 0.05, 0.075, 0.1, 0.15, 0.2, 0.25, 0.3, 0.4, 0.5, 0.75, 1, 1.25, 1.5, 1.75, 2, 2.5, 3, 4, or 5 copies per genome. In some embodiments, a cell described herein (e.g., a cell comprising a heterologous sequence at a target insertion site) comprises the heterologous object sequence at an average copy number of at least 0.01, 0.025, 0.05, 0.075, 0.1, 0.15, 0.2, 0.25, 0.3, 0.4, 0.5, 0.75, 1, 1.25, 1.5, 1.75, 2, 2.5, 3, 4, or 5 copies per genome.

[0654] In some embodiments, a Gene Writer™ causes integration of a sequence in a target RNA with relatively few truncation events at the terminus. For instance, in some embodiments, a Gene Writer™ protein (e.g., of SEQ ID NO: 1016) results in about 25-100%, 50-100%, 60-100%, 70-100%, 75-95%, 80%-90%, or 86.17% of integrants into the target site being non-truncated, as measured by an assay described herein, e.g., an assay of Example 6 and FIG. 8 of PCT/US2019/048607 which are hereby incorporated by reference. In some embodiments, a Gene Writer™ protein (e.g., of SEQ ID NO: 1016) results in at least about 30%, 40%, 50%, 60%, 70%, 80%, or 90% of integrants into the target site being non-truncated, as measured by an assay described herein. In some embodiments, an integrant is classified as truncated versus non-truncated using an assay comprising amplification with a forward primer situated 565 bp from the end of the element (e.g., a wild-type transposon sequence, e.g., of Taeniopygia guttata) and a reverse primer situated in the genomic DNA of the target insertion site, e.g., rDNA. In some embodiments, the number of full-length integrants in the target insertion site is greater than the number of integrants truncated by 300-565 nucleotides in the target insertion site, e.g., the number of full-length integrants is at least 1.1×, 1.2×, 1.5×, 2×, 3×, 4×, 5×, 6×, 7×, 8×, 9×, or 10× the number of the truncated integrants, or the number of full-length integrants is at least 1.1×-10×, 2×-10×, 3×-10×, or 5×-10× the number of the truncated integrants.

[0655] In some embodiments, a system or method described herein results in insertion of the heterologous object sequence only at one target site in the genome of the target cell. Insertion can be measured, e.g., using a threshold of above 1%, 1.5%, 2%, 2.5%, 3%, 3.5%, 4%, 4.5%, 5%, e.g., as described in Example 8 of PCT/US2019/048607 which is hereby incorporated by reference. In some embodiments, a system or method described herein results in insertion of the heterologous object sequence wherein less than 1%, 1.5%, 2%, 2.5%, 3%, 3.5%, 4%, 4.5%, 5%, 10%, 20%, 30%, 40%, or 50% of insertions are at a site other than the target site, e.g., using an assay described herein, e.g., an assay of Example 8 of PCT/US2019/048607.

[0656] In some embodiments, a system or method described herein results in “scarless” insertion of the heterologous object sequence, while in some embodiments, the target site can show deletions or duplications of endogenous DNA as a result of insertion of the heterologous sequence. The mechanisms of different retrotransposons could result in different patterns of duplications or deletions in the host genome occurring during retrotransposition at the target site. In some embodiments, the system results in a scarless insertion, with no duplications or deletions in the surrounding genomic DNA. In some embodiments, the system results in a deletion of less than 1, 2, 3, 4, 5, 10, 50, or 100 bp of genomic DNA upstream of the insertion. In some embodiments, the system results in a deletion of less than 1, 2, 3, 4, 5, 10, 50, or 100 bp of genomic DNA downstream of the insertion. In some embodiments, the system results in a duplication of less than 1, 2, 3, 4, 5, 10, 50, or 100 bp of genomic DNA upstream of the insertion. In some embodiments, the system results in a duplication of less than 1, 2, 3, 4, 5, 10, 50, or 100 bp of genomic DNA downstream of the insertion.

[0657] In some embodiments, a Gene Writer™ described herein, or a DNA-binding domain thereof, binds to its target site specifically, e.g., as measured using an assay of Example 21 of PCT/US2019/048607 which is hereby incorporated by reference. In some embodiments, the Gene Writer™ or DNA-binding domain thereof binds to its target site more strongly than to any other binding site in the human genome. For example, in some embodiments, in an assay of Example 21 of PCT/US2019/048607, the target site represents more than 50%, 60%, 70%, 80%, 90%, or 95% of binding events of the Gene Writer™ or DNA-binding domain thereof to human genomic DNA.

[0658] Genetically Engineered, e.g., Dimerized Gene Writer™ Systems

[0659] Some non-LTR retrotransposons utilize two subunits to complete retrotransposition (Christensen et al PNAS 2006). In some embodiments, a retrotransposase described herein comprises two connected subunits as a single polypeptide. For instance, two wild-type retrotransposases could be joined with a linker to form a covalently “dimerized” protein. In some embodiments, the nucleic acid coding for the retrotransposase codes for two retrotransposase subunits to be expressed as a single polypeptide. In some embodiments, the subunits are connected by a peptide linker, such as has been described herein in the section entitled “Linker” and, e.g., in Chen et al Adv Drug Deliv Rev 2013. In some embodiments, the two subunits in the polypeptide are connected by a rigid linker. In some embodiments, the rigid linker consists of the motif (EAAAK)ₙ (SEQ ID NO: 1534). In other embodiments, the two subunits in the polypeptide are connected by a flexible linker. In some embodiments, the flexible linker consists of the motif (Gly)ₙ. In some embodiments, the flexible linker consists of the motif (GGGGS)ₙ (SEQ ID NO: 1535). In some embodiments, the rigid or flexible linker consists of 1, 2, 3, 4, 5, 10, 15, or more amino acids in length to enable retrotransposition. In some embodiments, the linker consists of a combination of rigid and flexible linker motifs.

[0660] Based on mechanism, not all functions are required from both retrotransposase subunits. In some embodiments, the fusion protein may consist of a fully functional subunit and a second subunit lacking one or more functional domains. In some embodiments, one subunit may lack reverse transcriptase functionality. In some embodiments, one subunit may lack the reverse transcriptase domain. In some embodiments, one subunit may possess only endonuclease activity. In some embodiments, one subunit may possess only an endonuclease domain. In some embodiments, the two subunits comprising the single polypeptide may provide complimentary functions.

[0661] In some embodiments, one subunit may lack endonuclease functionality. In some embodiments, one subunit may lack the endonuclease domain. In some embodiments, one subunit may possess only reverse transcriptase activity. In some embodiments, one subunit may possess only a reverse transcriptase domain. In some embodiments, one subunit may possess only DNA-dependent DNA synthesis functionality.

[0662] Linkers

[0663] In some embodiments, domains of the compositions and systems described herein (e.g., the endonuclease and reverse transcriptase domains of a polypeptide or the DNA binding domain and reverse transcriptase domains of a polypeptide) may be joined by a linker. A composition described herein comprising a linker element has the general form S1-L-S2, wherein S1 and S2 may be the same or different and represent two domain moieties (e.g., each a polypeptide or nucleic acid domain) associated with one another by the linker. In some embodiments, a linker may connect two polypeptides. In some embodiments, a linker may connect two nucleic acid molecules. In some embodiments, a linker may connect a polypeptide and a nucleic acid molecule. A linker may be a chemical bond, e.g., one or more covalent bonds or non-covalent bonds. A linker may be flexible, rigid, and/or cleavable. In some embodiments, the linker is a peptide linker. Generally, a peptide linker is at least 2, 3, 4, 5, 6, 7, 8, 9, 10 or more amino acids in length, e.g., 2-50 amino acids in length, 2-30 amino acids in length.

[0664] The most commonly used flexible linkers have sequences consisting primarily of stretches of Gly and Ser residues (“GS” linker). Flexible linkers may be useful for joining domains that require a certain degree of movement or interaction and may include small, non-polar (e.g. Gly) or polar (e.g. Ser or Thr) amino acids. Incorporation of Ser or Thr can also maintain the stability of the linker in aqueous solutions by forming hydrogen bonds with the water molecules, and therefore reduce unfavorable interactions between the linker and the other moieties. Examples of such linkers include those having the structure [GGS]^{≥1} or [GGGS]^{≥1} (SEQ ID NO: 1536). Rigid linkers are useful to keep a fixed distance between domains and to maintain their independent functions. Rigid linkers may also be useful when a spatial separation of the domains is critical to preserve the stability or bioactivity of one or more components in the agent. Rigid linkers may have an alpha helix-structure or Pro-rich sequence, (XP)n, with X designating any amino acid, preferably Ala, Lys, or Glu. Cleavable linkers may release free functional domains in vivo. In some embodiments, linkers may be cleaved under specific conditions, such as the presence of reducing reagents or proteases. In vivo cleavable linkers may utilize the reversible nature of a disulfide bond. One example includes a thrombin-sensitive sequence (e.g., PRS) between the two Cys residues. In vitro thrombin treatment of CPRSC (SEQ ID NO: 1537) results in the cleavage of the thrombin-sensitive sequence, while the reversible disulfide linkage remains intact. Such linkers are known and described, e.g., in Chen et al. 2013. Fusion Protein Linkers: Property, Design and Functionality. Adv Drug Deliv Rev. 65(10): 1357-1369. In vivo cleavage of linkers in compositions described herein may also be carried out by proteases that are expressed in vivo under pathological conditions (e.g. cancer or inflammation), in specific cells or tissues, or constrained within certain cellular compartments. The specificity of many proteases offers slower cleavage of the linker in constrained compartments.

[0665] In some embodiments the amino acid linkers are (or are homologous to) the endogenous amino acids that exist between such domains in a native polypeptide. In some embodiments the endogenous amino acids that exist between such domains are substituted but the length is unchanged from the natural length. In some embodiments, additional amino acid residues are added to the naturally existing amino acid residues between domains.

[0666] In some embodiments, the amino acid linkers are designed computationally or screened to maximize protein function (Anad et al., FEBS Letters, 587:19, 2013).

[0667] Additional Domains:

[0668] The Gene Writer™ polypeptide comprises the functions necessary to bind a target DNA sequence and template nucleic acid (e.g., template RNA), nick the target site, and write (e.g., reverse transcribe) the template into DNA, resulting in a modification of the target site. In some embodiments, additional domains may be added to the polypeptide to enhance the efficiency of the process. In some embodiments, the Gene Writer™ polypeptide may contain an additional DNA ligation domain to join reverse transcribed DNA to the DNA of the target site. In some embodiments, the polypeptide may comprise a heterologous RNA-binding domain. In some embodiments, the polypeptide may comprise a domain having 5′ to 3′ exonuclease activity (e.g., wherein the 5′ to 3′ exonuclease activity increases repair of the alteration of the target site, e.g., in favor of alteration over the original genomic sequence). In some embodiments, the polypeptide may comprise a domain having 3′ to 5′ exonuclease activity, e.g., proof-reading activity. In some embodiments, the writing domain, e.g., RT domain, has 3′ to 5′ exonuclease activity, e.g., proof-reading activity.

[0669] In some embodiments, the polypeptide does not comprise an RNase H domain. In some embodiments, the polypeptide comprises an RNaseH domain endogenous to one of the other domains. In some embodiments, the polypeptide comprises an RNase H domain that is heterologous to the other domains. In some embodiments, the polypeptide comprises an inactivated endogenous RNaseH domain.

[0670] In some embodiments, a Gene Writer as described herein comprises a polypeptide associated with a guide RNA (gRNA). In certain embodiments, the gRNA is comprised in the template nucleic acid molecule. In other embodiments, the gRNA is separate from the template nucleic acid molecule. In some embodiments wherein the gRNA is comprised in the template nucleic acid molecule, the template nucleic acid molecule further comprises a gRNA spacer sequence (e.g., at or within 1, 2, 3, 4, 5, 10, 15, 20, 25, 30, 40, 50, 60, 70, 80, 90, or 100 nucleotides of its 5′ end). In embodiments, the gRNA spacer comprises a sequence having at least 85%, 90%, 95%, 96%, 97%, 98%, 99%, or 100% sequence identity to a nucleic acid sequence comprised in the target nucleic acid molecule. In embodiments, the gRNA spacer directs Cas domain (e.g., Cas9) activity at the nucleic acid sequence comprised in the target nucleic acid molecule. In some embodiments wherein the gRNA is comprised in the template nucleic acid molecule, the template nucleic acid molecule further comprises a primer binding site (e.g., at or within 1, 2, 3, 4, 5, 10, 15, 20, 25, 30, 40, 50, 60, 70, 80, 90, or 100 nucleotides of its 3′ end). In embodiments, the primer binding site comprises a nucleic acid sequence comprising at least 85%, 90%, 95%, 96%, 97%, 98%, 99%, or 100% sequence identity to a nucleic acid sequence positioned at the 5′ end (e.g., within 1, 2, 3, 4, 5, 6, 7, 8, 9, 10, 15, 20, 25, 30, 40, or 50 nucleotides) of a nick site on the target nucleic acid molecule. In embodiments, binding of the primer binding site to the target nucleic acid molecule operates to prime TPRT.

### Template Nucleic Acid Component of Gene Writer™ Gene Editor System

[0671] The Gene Writer™ systems described herein can modify a host target DNA site using a template nucleic acid sequence. In some embodiments, the Gene Writer™ systems described herein transcribe an RNA sequence template into host target DNA sites by target-primed reverse transcription (TPRT). By writing DNA sequence(s) via reverse transcription of the RNA sequence template directly into the host genome, the Gene Writer™ system can insert an object sequence into a target genome without the need for exogenous DNA sequences to be introduced into the host cell (unlike, for example, CRISPR systems), as well as eliminate an exogenous DNA insertion step. The Gene Writer™ system can also delete a sequence from the target genome or introduce a substitution using an object sequence. Therefore, the Gene Writer™ system provides a platform for the use of customized RNA sequence templates containing object sequences, e.g., sequences comprising heterologous gene coding and/or function information.

[0672] In some embodiments, a Gene Writer system comprises a template nucleic acid (e.g., RNA or DNA) molecule. In some embodiments, the template nucleic acid molecule comprises a 5′ homology region and/or a 3′ homology region. In some embodiments, the 5′ homology region comprises a nucleic acid sequence having at least 85%, 90%, 95%, 96%, 97%, 98%, 99%, or 100% sequence similarity with a nucleic acid sequence comprised in a target nucleic acid molecule. In embodiments, the nucleic acid sequence in the target nucleic acid molecule is within about 1, 2, 3, 4, 5, 6, 7, 8, 9, 10, 15, 20, 25, 30, 35, 40, 45, 50, 60, 70, 80, 90, or 100 nucleotides of (e.g., 5′ relative to) a target insertion site, e.g., for a heterologous object sequence, e.g., comprised in the template nucleic acid molecule.

[0673] In some embodiments, the 3′ homology region comprises a nucleic acid sequence having at least 85%, 90%, 95%, 96%, 97%, 98%, 99%, or 100% sequence identity with a nucleic acid sequence comprised in a target nucleic acid molecule. In embodiments, the nucleic acid sequence in the target nucleic acid molecule is within about 1, 2, 3, 4, 5, 6, 7, 8, 9, 10, 15, 20, 25, 30, 35, 40, 45, 50, 60, 70, 80, 90, or 100 nucleotides of (e.g., 3′ relative to) a target insertion site, e.g., for a heterologous object sequence, e.g., comprised in the template nucleic acid molecule. In some embodiments, the 5′ homology region is heterologous to the remainder of the template nucleic acid molecule. In some embodiments, the 3′ homology region is heterologous to the remainder of the template nucleic acid molecule.

[0674] In some embodiments, a template nucleic acid (e.g., template RNA) comprises a 3′ target homology domain. In some embodiments, a 3′ target homology domain is disposed 3′ of the heterologous object sequence and is complementary to a sequence adjacent to a site to be modified by a system described herein, or comprises no more than 1, 2, 3, 4, or 5 mismatches to a sequence complementary to the sequence adjacent to a site to be modified by the system/Gene Writer™. In some embodiments, the 3′ homology region binds within 1, 2, 3, 4, 5, 6, 7, 8, 9, or 10 nucleotides of a nick site in the target nucleic acid molecule. In some embodiments, binding of the 3′ homology region to the target nucleic acid molecule permits initiation of target-primed reverse transcription (TPRT), e.g., with the 3′ homology region acting as a primer for TPRT. In some embodiments, the 3′ target homology domain anneals to the target site, which provides a binding site and the 3′ hydroxyl for the initiation of TPRT by a Gene Writer polypeptide. In some embodiments, the 3′ target homology domain is 3-5, 5-10, 10-30, 10-25, 10-20, 10-19, 10-18, 10-17, 10-16, 10-15, 10-14, 10-13, 10-12, 10-11, 11-30, 11-25, 11-20, 11-19, 11-18, 11-17, 11-16, 11-15, 11-14, 11-13, 11-12, 12-30, 12-25, 12-20, 12-19, 12-18, 12-17, 12-16, 12-15, 12-14, 12-13, 13-30, 13-25, 13-20, 13-19, 13-18, 13-17, 13-16, 13-15, 13-14, 14-30, 14-25, 14-20, 14-19, 14-18, 14-17, 14-16, 14-15, 15-30, 15-25, 15-20, 15-19, 15-18, 15-17, 15-16, 16-30, 16-25, 16-20, 16-19, 16-18, 16-17, 17-30, 17-25, 17-20, 17-19, 17-18, 18-30, 18-25, 18-20, 18-19, 19-30, 19-25, 19-20, 20-30, 20-25, or 25-30 nt in length, e.g., 10-17, 12-16, or 12-14 nt in length.

[0675] In some embodiments, a template nucleic acid (e.g., template RNA) comprises a heterologous object sequence. In some embodiments, the heterologous object sequence may be transcribed by the RT domain of a Gene Writer™ polypeptide, e.g., thereby introducing an alteration into a target site in genomic DNA. In some embodiments, the heterologous object sequence is at least 32, 33, 34, 35, 36, 37, 38, 39, 40, 41, 42, 43, 44, 45, 46, 47, 48, 49, 50, 51, 52, 53, 54, 55, 56, 57, 58, 59, 60, 61, 62, 63, 64, 65, 66, 67, 68, 69, 70, 71, 72, 73, 74, 75, 76, 77, 78, 79, 80, 81, 82, 83, 84, 85, 86, 87, 88, 89, 90, 91, 92, 93, 94, 95, 96, 97, 98, 99, 100, 120, 140, 160, 180, 200, 500, or 1,000 nucleotides (nts) in length, or at least 1, 1.5, 2, 2.5, 3, 3.5, 4, 4.5, 5, 5.5, 6, 6.5, 7, 7.5, 8, 8.5, 9, 9.5, or 10 kilobases in length. In some embodiments, the heterologous object sequence is no more than 33, 34, 35, 36, 37, 38, 39, 40, 41, 42, 43, 44, 45, 46, 47, 48, 49, 50, 51, 52, 53, 54, 55, 56, 57, 58, 59, 60, 61, 62, 63, 64, 65, 66, 67, 68, 69, 70, 71, 72, 73, 74, 75, 76, 77, 78, 79, 80, 81, 82, 83, 84, 85, 86, 87, 88, 89, 90, 91, 92, 93, 94, 95, 96, 97, 98, 99, 100, 120, 140, 160, 180, 200, 500, 1,000, or 2000 nucleotides (nts) in length, or no more than 20, 15, 10, 9, 8, 7, 6, 5, 4, or 3 kilobases in length. In some embodiments, the heterologous object sequence is 30-1000, 40-1000, 50-1000, 60-1000, 70-1000, 74-1000, 75-1000, 76-1000, 77-1000, 78-1000, 79-1000, 80-1000, 85-1000, 90-1000, 100-1000, 120-1000, 140-1000, 160-1000, 180-1000, 200-1000, 500-1000, 30-500, 40-500, 50-500, 60-500, 70-500, 74-500, 75-500, 76-500, 77-500, 78-500, 79-500, 80-500, 85-500, 90-500, 100-500, 120-500, 140-500, 160-500, 180-500, 200-500, 30-200, 40-200, 50-200, 60-200, 70-200, 74-200, 75-200, 76-200, 77-200, 78-200, 79-200, 80-200, 85-200, 90-200, 100-200, 120-200, 140-200, 160-200, 180-200, 30-100, 40-100, 50-100, 60-100, 70-100, 74-100, 75-100, 76-100, 77-100, 78-100, 79-100, 80-100, 85-100, or 90-100 nucleotides (nts) in length, or 1-20, 1-15, 1-10, 1-9, 1-8, 1-7, 1-6, 1-5, 1-4, 1-3, 1-2, 2-20, 2-15, 2-10, 2-9, 2-8, 2-7, 2-6, 2-5, 2-4, 2-3, 3-20, 3-15, 3-10, 3-9, 3-8, 3-7, 3-6, 3-5, 3-4, 4-20, 4-15, 4-10, 4-9, 4-8, 4-7, 4-6, 4-5, 5-20, 5-15, 5-10, 5-9, 5-8, 5-7, 5-6, 6-20, 6-15, 6-10, 6-9, 6-8, 6-7, 7-20, 7-15, 7-10, 7-9, 7-8, 8-20, 8-15, 8-10, 8-9, 9-20, 9-15, 9-10, 10-15, 10-20, or 15-20 kilobases in length. In some embodiments, the heterologous object sequence is 10-100, 10-90, 10-80, 10-70, 10-60, 10-50, 10-40, 10-30, or 10-20 nt in length, e.g., 10-80, 10-50, or 10-20 nt in length, e.g., about 10-20 nt in length. In some embodiments, a template RNA comprises a sequence as listed in Table 43, or a sequence with at least 70%, 75%, 80%, 85%, 90%, 95%, 96%, 97%, 98%, or 99% identity thereto.

[0676] In certain embodiments, the template nucleic acid comprises a customized RNA sequence template which can be identified, designed, engineered and constructed to contain sequences altering or specifying host genome function, for example by introducing a heterologous coding region into a genome; affecting or causing exon structure/alternative splicing; causing disruption of an endogenous gene; causing transcriptional activation of an endogenous gene; causing epigenetic regulation of an endogenous DNA; causing up- or down-regulation of operably liked genes, etc. In certain embodiments, a customized RNA sequence template can be engineered to contain sequences coding for exons and/or transgenes, provide for binding sites to transcription factor activators, repressors, enhancers, etc., and combinations of thereof. In other embodiments, the coding sequence can be further customized with splice acceptor sites, poly-A tails. In certain embodiments the RNA sequence can contain sequences coding for an RNA sequence template homologous to the RLE retrotransposase, be engineered to contain heterologous coding sequences, or combinations thereof.

[0677] The template nucleic acid (e.g., template RNA) may have some homology to the target DNA. In some embodiments, the template nucleic acid (e.g., template RNA) 3′ target homology domain may serve as an annealing region to the target DNA, such that the target DNA is positioned to prime the reverse transcription of the template nucleic acid (e.g., template RNA). In some embodiments the template nucleic acid (e.g., template RNA) has at least 2, 3, 4, 5, 6, 7, 8, 9, 10, 11, 12, 13, 14, 15, 20, 25, 30, 35, 40, 45, 50, 60, 70, 80, 90, 100, 110, 120, 130, 140, 150, 175, 200 or more bases of exact homology to the target DNA at the 3′ end of the RNA. In some embodiments the template nucleic acid (e.g., template RNA) has at least 2, 3, 4, 5, 6, 7, 8, 9, 10, 11, 12, 13, 14, 15, 20, 25, 30, 35, 40, 45, 50, 60, 70, 80, 90, 100, 110, 120, 130, 140, 150, 160, 175, 180, or 200 or more bases of at least 50%, 60%, 70%, 80%, 85%, 90%, 95%, 97%, 98%, 99% or 100% homology to the target DNA, e.g., at the 5′ end of the template nucleic acid (e.g., template RNA). In some embodiments the template nucleic acid (e.g., template RNA) has a 3′ region of at least 10, 15, 20, 25, 30, 40, 50, 60, 80, 100, 120, 140, 160, 180, 200 or more bases of at least 50%, 60%, 70%, 80%, 85%, 90%, 95%, 97%, 98%, 99% or 100% homology to the 3′ sequence of a non-LTR retrotransposon, e.g., a non-LTR retrotransposon described herein, e.g. a non-LTR retrotransposon in Table 1 or 3.

[0678] The template nucleic acid (e.g., template RNA) component of a Gene Writer™ genome editing system described herein typically is able to bind the Gene Writer™ genome editing protein of the system. In some embodiments the template nucleic acid (e.g., template RNA) has a 3′ region that is capable of binding a Gene Writer™ genome editing protein. The binding region, e.g., 3′ region, may be a structured RNA region, e.g., having at least 1, 2 or 3 hairpin loops, capable of binding the Gene Writer™ genome editing protein of the system. The binding region may associate the template nucleic acid (e.g., template RNA) with any of the polypeptide modules. In some embodiments, the binding region of the template nucleic acid (e.g., template RNA) may associate with an RNA-binding domain in the polypeptide. In some embodiments, the binding region of the template nucleic acid (e.g., template RNA) may associate with the reverse transcription domain of the polypeptide (e.g., specifically bind to the RT domain). For example, where the reverse transcription domain is derived from a non-LTR retrotransposon, the template nucleic acid (e.g., template RNA) may contain a binding region derived from a non-LTR retrotransposon, e.g., a 3′ UTR from a non-LTR retrotransposon. In some embodiments, the template nucleic acid (e.g., template RNA) may associate with the DNA binding domain of the polypeptide, e.g., a gRNA associating with a Cas9-derived DNA binding domain. In some embodiments, the binding region may also provide DNA target recognition, e.g., a gRNA hybridizing to the target DNA sequence and binding the polypeptide, e.g., a Cas9 domain. In some embodiments, the template nucleic acid (e.g., template RNA) may associate with multiple components of the polypeptide, e.g., DNA binding domain and reverse transcription domain. For example, the template nucleic acid (e.g., template RNA) may comprise a gRNA region that associates with a Cas9-derived DNA binding domain and a 3′ UTR from a non-LTR retrotransposon that associated with a non-LTR retrotransposon-derived reverse transcription domain.

[0679] In some embodiments the template RNA has a poly-A tail at the 3′ end. In some embodiments the template RNA does not have a poly-A tail at the 3′ end. In some embodiments the template nucleic acid (e.g., template RNA) has a 5′ region of at least 10, 15, 20, 25, 30, 40, 50, 60, 80, 100, 120, 140, 160, 180, 200 or more bases of at least 40%, 50%, 60%, 70%, 80%, 90%, 95% or greater homology to the 5′ sequence of a non-LTR retrotransposon, e.g., a non-LTR retrotransposon described herein.

[0680] The template nucleic acid (e.g., template RNA) of the system typically comprises an object sequence (e.g., a heterologous object sequence) for insertion into a target DNA. The object sequence may be coding or non-coding.

[0681] In some embodiments a system or method described herein comprises a single template nucleic acid (e.g., template RNA). In some embodiments a system or method described herein comprises a plurality of template nucleic acids (e.g., template RNAs). For example, a system described herein comprises a first RNA comprising (e.g., from 5′ to 3′) a sequence that binds the Gene Writer™ polypeptide (e.g., the DNA-binding domain and/or the endonuclease domain, e.g., a gRNA) and a sequence that binds a target site (e.g., a second strand of a site in a target genome), and a second RNA (e.g., a template RNA) comprising (e.g., from 5′ to 3′) optionally a sequence that binds the Gene Writer™ polypeptide (e.g., that specifically binds the RT domain), a heterologous object sequence, and a 3′ target homology domain. In some embodiments, when the system comprises a plurality of nucleic acids, each nucleic acid comprises a conjugating domain. In some embodiments, a conjugating domain enables association of nucleic acid molecules, e.g., by hybridization of complementary sequences. For example, in some embodiments a first RNA comprises a first conjugating domain and a second RNA comprises a second conjugating domain, and the first and second conjugating domains are capable of hybridizing to one another, e.g., under stringent conditions. In some embodiments, the stringent conditions for hybridization include hybridization in 4× sodium chloride/sodium citrate (SSC), at about 65° C., followed by a wash in 1×SSC, at about 65° C.

[0682] In some embodiments, the object sequence may contain an open reading frame. In some embodiments the template nucleic acid (e.g., template RNA) has a Kozak sequence. In some embodiments the template RNA has an internal ribosome entry site. In some embodiments the template RNA has a self-cleaving peptide such as a T2A or P2A site. In some embodiments the template RNA has a start codon. In some embodiments the template RNA has a splice acceptor site. In some embodiments the template RNA has a splice donor site. Exemplary splice acceptor and splice donor sites are described in WO2016044416, incorporated herein by reference in its entirety. Exemplary splice acceptor site sequences are known to those of skill in the art and include, by way of example only, CTGACCCTTCTCTCTCTCCCCCAGAG (SEQ ID NO: 1601) (from human HBB gene) and TTTCTCTCCCACAAG (SEQ ID NO: 1602) (from human immunoglobulin-gamma gene). In some embodiments the template RNA has a microRNA binding site downstream of the stop codon. In some embodiments the template RNA has a polyA tail downstream of the stop codon of an open reading frame. In some embodiments the template RNA comprises one or more exons. In some embodiments the template RNA comprises one or more introns. In some embodiments the template RNA comprises a eukaryotic transcriptional terminator. In some embodiments the template RNA comprises an enhanced translation element or a translation enhancing element. In some embodiments the RNA comprises the human T-cell leukemia virus (HTLV-1) R region. In some embodiments the RNA comprises a posttranscriptional regulatory element that enhances nuclear export, such as that of Hepatitis B Virus (HPRE) or Woodchuck Hepatitis Virus (WPRE).

[0683] In some embodiments, a nucleic acid described herein (e.g., a template RNA or a DNA encoding a template RNA) comprises a microRNA binding site. In some embodiments, the microRNA binding site is used to increase the target-cell specificity of a Gene Writer™ system. For instance, the microRNA binding site can be chosen on the basis that is is recognized by a miRNA that is present in a non-target cell type, but that is not present (or is present at a reduced level relative to the non-target cell) in a target cell type. Thus, when the template RNA is present in a non-target cell, it would be bound by the miRNA, and when the template RNA is present in a target cell, it would not be bound by the miRNA (or bound but at reduced levels relative to the non-target cell). While not wishing to be bound by theory, binding of the miRNA to the template RNA may interfere with its activity, e.g., may interfere with insertion of the heterologous object sequence into the genome. Accordingly, the system would edit the genome of target cells more efficiently than it edits the genome of non-target cells, e.g., the heterologous object sequence would be inserted into the genome of target cells more efficiently than into the genome of non-target cells, or an insertion or deletion is produced more efficiently in target cells than in non-target cells. A system having a microRNA binding site in the template RNA (or DNA encoding it) may also be used in combination with a nucleic acid encoding a Gene Writer™ polypeptide, wherein expression of the Gene Writer™ polypeptide is regulated by a second microRNA binding site, e.g., as described herein, e.g., in the section entitled “Polypeptide component of Gene Writer™ gene editor system”. In some embodiments, e.g., for liver indications, a miRNA is selected from Table 4 of WO2020014209, incorporated herein by reference.

[0684] In some embodiments, the object sequence may contain a non-coding sequence. For example, the template nucleic acid (e.g., template RNA) may comprise a regulatory element, e.g., a promoter or enhancer sequence or miRNA binding site. In some embodiments, integration of the object sequence at a target site will result in upregulation of an endogenous gene. In some embodiments, integration of the object sequence at a target site will result in downregulation of an endogenous gene. In some embodiments the template nucleic acid (e.g., template RNA) comprises a tissue specific promoter or enhancer, each of which may be unidirectional or bidirectional. In some embodiments the promoter is an RNA polymerase I promoter, RNA polymerase II promoter, or RNA polymerase III promoter. In some embodiments the promoter comprises a TATA element. In some embodiments the promoter comprises a B recognition element. In some embodiments the promoter has one or more binding sites for transcription factors.

[0685] In some embodiments, a nucleic acid described herein (e.g., a template RNA or a DNA encoding a template RNA) comprises a promoter sequence, e.g., a tissue specific promoter sequence. In some embodiments, the tissue-specific promoter is used to increase the target-cell specificity of a Gene Writer™ system. For instance, the promoter can be chosen on the basis that it is active in a target cell type but not active in (or active at a lower level in) a non-target cell type. Thus, even if the promoter integrated into the genome of a non-target cell, it would not drive expression (or only drive low level expression) of an integrated gene. A system having a tissue-specific promoter sequence in the template RNA may also be used in combination with a microRNA binding site, e.g., in the template RNA or a nucleic acid encoding a Gene Writer™ protein, e.g., as described herein. A system having a tissue-specific promoter sequence in the template RNA may also be used in combination with a DNA encoding a Gene Writer™ polypeptide, driven by a tissue-specific promoter, e.g., to achieve higher levels of Gene Writer™ protein in target cells than in non-target cells. In some embodiments, e.g., for liver indications, a tissue-specific promoter is selected from Table 3 of WO2020014209, incorporated herein by reference.

[0686] In some embodiments, a Gene Writer system, e.g., DNA encoding a Gene Writer polypeptide, DNA encoding a template RNA, or DNA or RNA encoding a heterologous object sequence, is designed such that one or more elements is operably linked to a tissue-specific promoter, e.g., a promoter that is active in T-cells. In further embodiments, the T-cell active promoter is inactive in other cell types, e.g., B-cells, NK cells. In some embodiments, the T-cell active promoter is derived from a promoter for a gene encoding a component of the T-cell receptor, e.g., TRAC, TRBC, TRGC, TRDC. In some embodiments, the T-cell active promoter is derived from a promoter for a gene encoding a component of a T-cell-specific cluster of differentiation protein, e.g., CD3, e.g., CD3D, CD3E, CD3G, CD3Z. In some embodiments, T-cell-specific promoters in Gene Writer systems are discovered by comparing publicly available gene expression data across cell types and selecting promoters from the genes with enhanced expression in T-cells. In some embodiments, promoters may be selecting depending on the desired expression breadth, e.g., promoters that are active in T-cells only, promoters that are active in NK cells only, promoters that are active in both T-cells and NK cells.

[0687] In some embodiments the template RNA comprises a microRNA sequence, a siRNA sequence, a guide RNA sequence, a piwi RNA sequence.

[0688] In some embodiments the template nucleic acid (e.g., template RNA) comprises a site that coordinates epigenetic modification. In some embodiments the template nucleic acid (e.g., template RNA) comprises a chromatin insulator. For example, the template nucleic acid (e.g., template RNA) comprises a CTCF site or a site targeted for DNA methylation.

[0689] In some embodiments the template nucleic acid (e.g., template RNA) comprises a gene expression unit composed of at least one regulatory region operably linked to an effector sequence. The effector sequence may be a sequence that is transcribed into RNA (e.g., a coding sequence or a non-coding sequence such as a sequence encoding a micro RNA).

[0690] In some embodiments the object sequence of the template nucleic acid (e.g., template RNA) is inserted into a target genome in an endogenous intron. In some embodiments the object sequence of the template nucleic acid (e.g., template RNA) is inserted into a target genome and thereby acts as a new exon. In some embodiments the insertion of the object sequence into the target genome results in replacement of a natural exon or the skipping of a natural exon.

[0691] In some embodiments, the object sequence of the template nucleic acid (e.g., template RNA) is inserted into the target genome in a genomic safe harbor site, such as AAVS1, CCR5, ROSA26, or albumin locus. In some embodiments, a Gene Writer is used to integrate a CAR into the T-cell receptor α constant (TRAC) locus (Eyquem et al Nature 543, 113-117 (2017)). In some embodiments, a Gene Writer is used to integrate a CAR into a T-cell receptor β constant (TRBC) locus. Many other safe harbors have been identified by computational approaches (Pellenz et al Hum Gen Ther 30, 814-828 (2019)) and could be used for Gene Writer-mediated integration. In some embodiments, the object sequence of the template nucleic acid (e.g., template RNA) is added to the genome in an intergenic or intragenic region. In some embodiments, the object sequence of the template nucleic acid (e.g., template RNA) is added to the genome 5′ or 3′ within 0.1 kb, 0.25 kb, 0.5 kb, 0.75, kb, 1 kb, 2 kb, 3 kb, 4 kb, 5 kb, 7.5 kb, 10 kb, 15 kb, 20 kb, 25 kb, 50, 75 kb, or 100 kb of an endogenous active gene. In some embodiments, the object sequence of the template nucleic acid (e.g., template RNA) is added to the genome 5′ or 3′ within 0.1 kb, 0.25 kb, 0.5 kb, 0.75, kb, 1 kb, 2 kb, 3 kb, 4 kb, 5 kb, 7.5 kb, 10 kb, 15 kb, 20 kb, 25 kb, 50, 75 kb, or 100 kb of an endogenous promoter or enhancer. In some embodiments, the object sequence of the template nucleic acid (e.g., template RNA) can be, e.g., 50-50,000 base pairs (e.g., between 50-40,000 bp, between 500-30,000 bp between 500-20,000 bp, between 100-15,000 bp, between 500-10,000 bp, between 50-10,000 bp, between 50-5,000 bp.

[0692] The template nucleic acid (e.g., template RNA) can be designed to result in insertions, mutations, or deletions at the target DNA locus. In some embodiments, the template nucleic acid (e.g., template RNA) may be designed to cause an insertion in the target DNA. For example, the template nucleic acid (e.g., template RNA) may contain a heterologous sequence, wherein the reverse transcription will result in insertion of the heterologous sequence into the target DNA. In other embodiments, the RNA template may be designed to write a deletion into the target DNA. For example, the template nucleic acid (e.g., template RNA) may match the target DNA upstream and downstream of the desired deletion, wherein the reverse transcription will result in the copying of the upstream and downstream sequences from the template nucleic acid (e.g., template RNA) without the intervening sequence, e.g., causing deletion of the intervening sequence. In other embodiments, the template nucleic acid (e.g., template RNA) may be designed to write an edit into the target DNA. For example, the template RNA may match the target DNA sequence with the exception of one or more nucleotides, wherein the reverse transcription will result in the copying of these edits into the target DNA, e.g., resulting in mutations, e.g., transition or transversion mutations.

[0693] In some embodiments, the template possesses one or more sequences aiding in association of the template with the Gene Writer™ polypeptide. In some embodiments, these sequences may be derived from retrotransposon UTRs. In some embodiments, the UTRs may be located flanking the desired insertion sequence. In some embodiments, a sequence with target site homology may be located outside of one or both UTRs. In some embodiments, the sequence with target site homology can anneal to the target sequence to prime reverse transcription. In some embodiments, the 5′ and/or 3′ UTR may be located terminal to the target site homology sequence, e.g., such that target primed reverse transcription excludes reverse transcription of the 5′ and/or 3′ UTR. In some embodiments, the Gene Writer™ system may result in the insertion of a desired payload without any additional sequence (e.g. gene expression unit without UTRs used to bind the Gene Writer™ protein).

[0694] Alternative orientations of the template RNA motifs can be employed, e.g., to limit target site integration to the desired genetic payload. In some embodiments, the polypeptide association domains may be located 5′ of the desired template sequence. For example, the heterologous object sequence may be located downstream of the 5′ UTR and 3′ UTR, giving the 5′-3′ orientation 5′UTR-3′UTR-(heterologous object sequence). In other embodiments, only the 3′ UTR is added upstream of the heterologous object sequence. For example, giving the 5′-3′ orientation 3′UTR-(heterologous object sequence). In certain embodiments, the polypeptide coding region and the heterologous object sequence may be encoded on the same molecule, but where the 5′ UTR (e.g., 5′ UTR from R2 retrotransposon) occurs between the two regions, e.g., giving the 5′-3′ orientation (polypeptide coding sequence)-5′UTR-(heterologous object sequence).

[0695] In some embodiments, the template nucleic acid, e.g., template RNA, may comprise a gRNA (e.g., pegRNA). In some embodiments, the template nucleic acid, e.g., template RNA, may bind to the Gene Writer™ polypeptide by interaction of a gRNA portion of the template nucleic acid with a template nucleic acid binding domain, e.g., a RNA binding domain (e.g., a heterologous RNA binding domain). In some embodiments, the heterologous RNA binding domain is a CRISPR/Cas protein, e.g., Cas9.

[0696] In some embodiments, the region of the template nucleic acid, e.g., template RNA, comprising the gRNA adopts an underwound ribbon-like structure of gRNA bound to target DNA (e.g., as described in Mulepati et al. Science 19 Sep. 2014:Vol. 345, Issue 6203, pp. 1479-1484). Without wishing to be bound by theory, this non-canonical structure is thought to be facilitated by rotation of every sixth nucleotide out of the RNA-DNA hybrid. Thus, in some embodiments, the region of the template nucleic acid, e.g., template RNA, comprising the gRNA may tolerate increased mismatching with the target site at some interval, e.g., every sixth base. In some embodiments, the region of the template nucleic acid, e.g., template RNA, comprising the gRNA comprising homology to the target site may possess wobble positions at a regular interval, e.g., every sixth base, that do not need to base pair with the target site.

[0697] gRNAs with Inducible Activity

[0698] In some embodiments, a template nucleic acid, e.g., template RNA, comprises a gRNA with inducible activity. Inducible activity may be achieved by the template nucleic acid, e.g., template RNA, further comprising (in addition to the gRNA) a blocking domain, wherein the sequence of a portion of or all of the blocking domain is at least partially complementary to a portion or all of the gRNA. The blocking domain is thus capable of hybridizing or substantially hybridizing to a portion of or all of the gRNA. In some embodiments, the blocking domain and inducibly active gRNA are disposed on the template nucleic acid, e.g., template RNA, such that the gRNA can adopt a first conformation where the blocking domain is hybridized or substantially hybridized to the gRNA, and a second conformation where the blocking domain is not hybridized or or not substantially hybridized to the gRNA. In some embodiments, in the first conformation the gRNA is unable to bind to the Gene Writer polypeptide (e.g., the template nucleic acid binding domain, DNA binding domain, or endonuclease domain (e.g., a CRISPR/Cas protein)) or binds with substantially decreased affinity compared to an otherwise similar template RNA lacking the blocking domain. In some embodiments, in the second conformation the gRNA is able to bind to the Gene Writer polypeptide (e.g., the template nucleic acid binding domain, DNA binding domain, or endonuclease domain (e.g., a CRISPR/Cas protein)). In some embodiments, whether the gRNA is in the first or second conformation can influence whether the DNA binding or endonuclease activities of the Gene Writer polypeptide (e.g., of the CRISPR/Cas protein the Gene Writer polypeptide comprises) are active. In some embodiments, hybridization of the gRNA to the blocking domain can be disrupted using an opener molecule. In some embodiments, an opener molecule comprises an agent that binds to a portion or all of the gRNA or blocking domain and inhibits hybridization of the gRNA to the blocking domain. In some embodiments, the opener molecule comprises a nucleic acid, e.g., comprising a sequence that is partially or wholly complementary to the gRNA, blocking domain, or both. By choosing or designing an appropriate opener molecule, providing the opener molecule can promote a change in the conformation of the gRNA such that it can associate with a CRISPR/Cas protein and provide the associated functions of the CRISPR/Cas protein (e.g., DNA binding and/or endonuclease activity). Without wishing to be bound by theory, providing the opener molecule at a selected time and/or location may allow for spatial and temporal control of the activity of the gRNA, CRISPR/Cas protein, or Gene Writer system comprising the same. In some embodiments, a Gene Writer may comprise a Cas protein as listed in Table 40 or Table 37 or a functional fragment thereof, or a sequence having at least 70%, 75%, 80%, 85%, 90%, 95%, 96%, 97%, 98%, 99% identity thereto.

TABLE 40
CRISPR/Cas Proteins, Species, and Mutations

| | | | SEQ | |
|---|---|---|---|---|
| | Parental | | ID | Nickase |
| Variant | Host | Protein Sequence | NO: | Mutation |
| Nme2Cas9 | Neisseria | MAAFKPNPINYILGLDIGIASVGWAMVEIDEEENPIRLID | 3262 | N611A |
| | meningitidis | LGVRVFERAEVPKTGDSLAMARRLARSVRRLTRRRAHRLL | | |
| | | RARRLLKREGVLQAADFDENGLIKSLPNTPWQLRAAALDR | | |
| | | KLTPLEWSAVLLHLIKHRGYLSQRKNEGETADKELGALLK | | |
| | | GVANNAHALQTGDFRTPAELALNKFEKESGHIRNQRGDYS | | |
| | | HTFSRKDLQAELILLFEKQKEFGNPHVSGGLKEGIETLLM | | |
| | | TQRPALSGDAVQKMLGHCTFEPAEPKAAKNTYTAERFIWL | | |
| | | TKLNNLRILEQGSERPLTDTERATLMDEPYRKSKLTYAQA | | |
| | | RKLLGLEDTAFFKGLRYGKDNAEASTLMEMKAYHAISRAL | | |
| | | EKEGLKDKKSPLNLSSELQDEIGTAFSLFKTDEDITGRLK | | |
| | | DRVQPEILEALLKHISFDKFVQISLKALRRIVPLMEQGKR | | |
| | | YDEACAEIYGDHYGKKNTEEKIYLPPIPADEIRNPVVLRA | | |
| | | LSQARKVINGVVRRYGSPARIHIETAREVGKSFKDRKEIE | | |
| | | KRQEENRKDREKAAAKFREYFPNFVGEPKSKDILKLRLYE | | |
| | | QQHGKCLYSGKEINLVRLNEKGYVEIDHALPFSRTWDDSF | | |
| | | NNKVLVLGSENQNKGNQTPYEYFNGKDNSREWQEFKARVE | | |
| | | TSRFPRSKKQRILLQKFDEDGFKECNLNDTRYVNRFLCQF | | |
| | | VADHILLTGKGKRRVFASNGQITNLLRGFWGLRKVRAEND | | |
| | | RHHALDAVVVACSTVAMQQKITRFVRYKEMNAFDGKTIDK | | |
| | | ETGKVLHQKTHFPQPWEFFAQEVMIRVFGKPDGKPEFEEA | | |
| | | DTPEKLRTLLAEKLSSRPEAVHEYVTPLFVSRAPNRKMSG | | |
| | | AHKDTLRSAKRFVKHNEKISVKRVWLTEIKLADLENMVNY | | |
| | | KNGREIELYEALKARLEAYGGNAKQAFDPKDNPFYKKGGQ | | |
| | | LVKAVRVEKTQESGVLLNKKNAYTIADNGDMVRVDVFCKV | | |
| | | DKKGKNQYFIVPIYAWQVAENILPDIDCKGYRIDDSYTFC | | |
| | | FSLHKYDLIAFQKDEKSKVEFAYYINCDSSNGRFYLAWHD | | |
| | | KGSKEQQFRISTQNLVLIQKYQVNELGKEIRPCRLKKRPP | | |
| | | VR | | |
| PpnCas9 | Pasteurella | MQNNPLNYILGLDLGIASIGWAVVEIDEESSPIRLIDVGV | 3263 | N605A |
| | pneumotropica | RTFERAEVAKTGESLALSRRLARSSRRLIKRRAERLKKAK | | |
| | | RLLKAEKILHSIDEKLPINVWQLRVKGLKEKLERQEWAAV | | |
| | | LLHLSKHRGYLSQRKNEGKSDNKELGALLSGIASNHQMLQ | | |
| | | SSEYRTPAEIAVKKFQVEEGHIRNQRGSYTHTFSRLDLLA | | |
| | | EMELLFQRQAELGNSYTSTTLLENLTALLMWQKPALAGDA | | |
| | | ILKMLGKCTFEPSEYKAAKNSYSAERFVWLTKLNNLRILE | | |
| | | NGTERALNDNERFALLEQPYEKSKLTYAQVRAMLALSDNA | | |
| | | IFKGVRYLGEDKKTVESKTTLIEMKFYHQIRKTLGSAELK | | |
| | | KEWNELKGNSDLLDEIGTAFSLYKTDDDICRYLEGKLPER | | |
| | | VLNALLENLNFDKFIQLSLKALHQILPLMLQGQRYDEAVS | | |
| | | AIYGDHYGKKSTETTRLLPTIPADEIRNPVVLRTLTQARK | | |
| | | VINAVVRLYGSPARIHIETAREVGKSYQDRKKLEKQQEDN | | |
| | | RKQRESAVKKFKEMFPHFVGEPKGKDILKMRLYELQQAKC | | |
| | | LYSGKSLELHRLLEKGYVEVDHALPFSRTWDDSFNNKVLV | | |
| | | LANENQNKGNLTPYEWLDGKNNSERWQHFVVRVQTSGFSY | | |
| | | AKKQRILNHKLDEKGFIERNLNDTRYVARFLCNFIADNML | | |
| | | LVGKGKRNVFASNGQITALLRHRWGLQKVREQNDRHHALD | | |
| | | AVVVACSTVAMQQKITRFVRYNEGNVFSGERIDRETGEII | | |
| | | PLHFPSPWAFFKENVEIRIFSENPKLELENRLPDYPQYNH | | |
| | | EWVQPLFVSRMPTRKMTGQGHMETVKSAKRLNEGLSVLKV | | |
| | | PLTQLKLSDLERMVNRDREIALYESLKARLEQFGNDPAKA | | |
| | | FAEPFYKKGGALVKAVRLEQTQKSGVLVRDGNGVADNASM | | |
| | | VRVDVFTKGGKYFLVPIYTWQVAKGILPNRAATQGKDEND | | |
| | | WDIMDEMATFQFSLCQNDLIKLVTKKKTIFGYFNGLNRAT | | |
| | | SNINIKEHDLDKSKGKLGIYLEVGVKLAISLEKYQVDELG | | |
| | | KNIRPCRPTKRQHVR | | |
| SauCas9 | Staphylococcus | MKRNYILGLDIGITSVGYGIIDYETRDVIDAGVRLFKEAN | 3264 | N580A |
| | aureus | VENNEGRRSKRGARRLKRRRRHRIQRVKKLLFDYNLLTDH | | |
| | | SELSGINPYEARVKGLSQKLSEEEFSAALLHLAKRRGVHN | | |
| | | VNEVEEDTGNELSTKEQISRNSKALEEKYVAELQLERLKK | | |
| | | DGEVRGSINRFKTSDYVKEAKQLLKVQKAYHQLDQSFIDT | | |
| | | YIDLLETRRTYYEGPGEGSPFGWKDIKEWYEMLMGHCTYF | | |
| | | PEELRSVKYAYNADLYNALNDLNNLVITRDENEKLEYYEK | | |
| | | FQIIENVFKQKKKPTLKQIAKEILVNEEDIKGYRVTSTGK | | |
| | | PEFTNLKVYHDIKDITARKEIIENAELLDQIAKILTIYQS | | |
| | | SEDIQEELTNLNSELTQEEIEQISNLKGYTGTHNLSLKAI | | |
| | | NLILDELWHTNDNQIAIFNRLKLVPKKVDLSQQKEIPTTL | | |
| | | VDDFILSPVVKRSFIQSIKVINAIIKKYGLPNDIIIELAR | | |
| | | EKNSKDAQKMINEMQKRNRQTNERIEEIIRTTGKENAKYL | | |
| | | IEKIKLHDMQEGKCLYSLEAIPLEDLLNNPFNYEVDHIIP | | |
| | | RSVSFDNSFNNKVLVKQEENSKKGNRTPFQYLSSSDSKIS | | |
| | | YETFKKHILNLAKGKGRISKTKKEYLLEERDINRFSVQKD | | |
| | | FINRNLVDTRYATRGLMNLLRSYFRVNNLDVKVKSINGGF | | |
| | | TSFLRRKWKFKKERNKGYKHHAEDALIIANADFIFKEWKK | | |
| | | LDKAKKVMENQMFEEKQAESMPEIETEQEYKEIFITPHQI | | |
| | | KHIKDFKDYKYSHRVDKKPNRELINDTLYSTRKDDKGNTL | | |
| | | IVNNLNGLYDKDNDKLKKLINKSPEKLLMYHHDPQTYQKL | | |
| | | KLIMEQYGDEKNPLYKYYEETGNYLTKYSKKDNGPVIKKI | | |
| | | KYYGNKLNAHLDITDDYPNSRNKVVKLSLKPYRFDVYLDN | | |
| | | GVYKFVTVKNLDVIKKENYYEVNSKCYEEAKKLKKISNQA | | |
| | | EFIASFYNNDLIKINGELYRVIGVNNDLLNRIEVNMIDIT | | |
| | | YREYLENMNDKRPPRIIKTIASKTQSIKKYSTDILGNLYE | | |
| | | VKSKKHPQIIKKG | | |
| SauCas9- | Staphylococcus | MKRNYILGLDIGITSVGYGIIDYETRDVIDAGVRLFKEAN | 3265 | N580A |
| KKH | aureus | VENNEGRRSKRGARRLKRRRRHRIQRVKKLLFDYNLLTDH | | |
| | | SELSGINPYEARVKGLSQKLSEEEFSAALLHLAKRRGVHN | | |
| | | VNEVEEDTGNELSTKEQISRNSKALEEKYVAELQLERLKK | | |
| | | DGEVRGSINRFKTSDYVKEAKQLLKVQKAYHQLDQSFIDT | | |
| | | YIDLLETRRTYYEGPGEGSPFGWKDIKEWYEMLMGHCTYF | | |
| | | PEELRSVKYAYNADLYNALNDLNNLVITRDENEKLEYYEK | | |
| | | FQIIENVFKQKKKPTLKQIAKEILVNEEDIKGYRVTSTGK | | |
| | | PEFTNLKVYHDIKDITARKEIIENAELLDQIAKILTIYQS | | |
| | | SEDIQEELTNLNSELTQEEIEQISNLKGYTGTHNLSLKAI | | |
| | | NLILDELWHTNDNQIAIFNRLKLVPKKVDLSQQKEIPTTL | | |
| | | VDDFILSPVVKRSFIQSIKVINAIIKKYGLPNDIIIELAR | | |
| | | EKNSKDAQKMINEMQKRNRQTNERIEEIIRTTGKENAKYL | | |
| | | IEKIKLHDMQEGKCLYSLEAIPLEDLLNNPFNYEVDHIIP | | |
| | | RSVSFDNSFNNKVLVKQEENSKKGNRTPFQYLSSSDSKIS | | |
| | | YETFKKHILNLAKGKGRISKTKKEYLLEERDINRFSVQKD | | |
| | | FINRNLVDTRYATRGLMNLLRSYFRVNNLDVKVKSINGGF | | |
| | | TSFLRRKWKFKKERNKGYKHHAEDALIIANADFIFKEWKK | | |
| | | LDKAKKVMENQMFEEKQAESMPEIETEQEYKEIFITPHQI | | |
| | | KHIKDFKDYKYSHRVDKKPNRKLINDTLYSTRKDDKGNTL | | |
| | | IVNNLNGLYDKDNDKLKKLINKSPEKLLMYHHDPQTYQKL | | |
| | | KLIMEQYGDEKNPLYKYYEETGNYLTKYSKKDNGPVIKKI | | |
| | | KYYGNKLNAHLDITDDYPNSRNKVVKLSLKPYRFDVYLDN | | |
| | | GVYKFVTVKNLDVIKKENYYEVNSKCYEEAKKLKKISNQA | | |
| | | EFIASFYKNDLIKINGELYRVIGVNNDLLNRIEVNMIDIT | | |
| | | YREYLENMNDKRPPHIIKTIASKTQSIKKYSTDILGNLYE | | |
| | | VKSKKHPQIIKKG | | |
| SauriCas9 | Staphylococcus | MQENQQKQNYILGLDIGITSVGYGLIDSKTREVIDAGVRL | 3266 | N588A |
| | auricularis | FPEADSENNSNRRSKRGARRLKRRRIHRLNRVKDLLADYQ | | |
| | | MIDLNNVPKSTDPYTIRVKGLREPLTKEEFAIALLHIAKR | | |
| | | RGLHNISVSMGDEEQDNELSTKQQLQKNAQQLQDKYVCEL | | |
| | | QLERLTNINKVRGEKNRFKTEDFVKEVKQLCETQRQYHNI | | |
| | | DDQFIQQYIDLVSTRREYFEGPGNGSPYGWDGDLLKWYEK | | |
| | | LMGRCTYFPEELRSVKYAYSADLFNALNDLNNLVVTRDDN | | |
| | | PKLEYYEKYHIIENVFKQKKNPTLKQIAKEIGVQDYDIRG | | |
| | | YRITKSGKPQFTSFKLYHDLKNIFEQAKYLEDVEMLDEIA | | |
| | | KILTIYQDEISIKKALDQLPELLTESEKSQIAQLTGYTGT | | |
| | | HRLSLKCIHIVIDELWESPENQMEIFTRLNLKPKKVEMSE | | |
| | | IDSIPTTLVDEFILSPVVKRAFIQSIKVINAVINRFGLPE | | |
| | | DIIIELAREKNSKDRRKFINKLQKQNEATRKKIEQLLAKY | | |
| | | GNTNAKYMIEKIKLHDMQEGKCLYSLEAIPLEDLLSNPTH | | |
| | | YEVDHIIPRSVSFDNSLNNKVLVKQSENSKKGNRTPYQYL | | |
| | | SSNESKISYNQFKQHILNLSKAKDRISKKKRDMLLEERDI | | |
| | | NKFEVQKEFINRNLVDTRYATRELSNLLKTYFSTHDYAVK | | |
| | | VKTINGGFTNHLRKVWDFKKHRNHGYKHHAEDALVIANAD | | |
| | | FLFKTHKALRRTDKILEQPGLEVNDTTVKVDTEEKYQELF | | |
| | | ETPKQVKNIKQFRDFKYSHRVDKKPNRQLINDTLYSTREI | | |
| | | DGETYVVQTLKDLYAKDNEKVKKLFTERPQKILMYQHDPK | | |
| | | TFEKLMTILNQYAEAKNPLAAYYEDKGEYVTKYAKKGNGP | | |
| | | AIHKIKYIDKKLGSYLDVSNKYPETQNKLVKLSLKSFRFD | | |
| | | IYKCEQGYKMVSIGYLDVLKKDNYYYIPKDKYEAEKQKKK | | |
| | | IKESDLFVGSFYYNDLIMYEDELFRVIGVNSDINNLVELN | | |
| | | MVDITYKDFCEVNNVTGEKRIKKTIGKRVVLIEKYTTDIL | | |
| | | GNLYKTPLPKKPQLIFKRGEL | | |
| SauriCas9- | Staphylococcus | MQENQQKQNYILGLDIGITSVGYGLIDSKTREVIDAGVRL | 3267 | N588A |
| KKH | auricularis | FPEADSENNSNRRSKRGARRLKRRRIHRLNRVKDLLADYQ | | |
| | | MIDLNNVPKSTDPYTIRVKGLREPLTKEEFAIALLHIAKR | | |
| | | RGLHNISVSMGDEEQDNELSTKQQLQKNAQQLQDKYVCEL | | |
| | | QLERLTNINKVRGEKNRFKTEDFVKEVKQLCETQRQYHNI | | |
| | | DDQFIQQYIDLVSTRREYFEGPGNGSPYGWDGDLLKWYEK | | |
| | | LMGRCTYFPEELRSVKYAYSADLFNALNDLNNLVVTRDDN | | |
| | | PKLEYYEKYHIIENVFKQKKNPTLKQIAKEIGVQDYDIRG | | |
| | | YRITKSGKPQFTSFKLYHDLKNIFEQAKYLEDVEMLDEIA | | |
| | | KILTIYQDEISIKKALDQLPELLTESEKSQIAQLTGYTGT | | |
| | | HRLSLKCIHIVIDELWESPENQMEIFTRLNLKPKKVEMSE | | |
| | | IDSIPTTLVDEFILSPVVKRAFIQSIKVINAVINRFGLPE | | |
| | | DIIIELAREKNSKDRRKFINKLQKQNEATRKKIEQLLAKY | | |
| | | GNTNAKYMIEKIKLHDMQEGKCLYSLEAIPLEDLLSNPTH | | |
| | | YEVDHIIPRSVSFDNSLNNKVLVKQSENSKKGNRTPYQYL | | |
| | | SSNESKISYNQFKQHILNLSKAKDRISKKKRDMLLEERDI | | |
| | | NKFEVQKEFINRNLVDTRYATRELSNLLKTYFSTHDYAVK | | |
| | | VKTINGGFTNHLRKVWDFKKHRNHGYKHHAEDALVIANAD | | |
| | | FLFKTHKALRRTDKILEQPGLEVNDTTVKVDTEEKYQELF | | |
| | | ETPKQVKNIKQFRDFKYSHRVDKKPNRKLINDTLYSTREI | | |
| | | DGETYVVQTLKDLYAKDNEKVKKLFTERPQKILMYQHDPK | | |
| | | TFEKLMTILNQYAEAKNPLAAYYEDKGEYVTKYAKKGNGP | | |
| | | AIHKIKYIDKKLGSYLDVSNKYPETQNKLVKLSLKSFRFD | | |
| | | IYKCEQGYKMVSIGYLDVLKKDNYYYIPKDKYEAEKQKKK | | |
| | | IKESDLFVGSFYKNDLIMYEDELFRVIGVNSDINNLVELN | | |
| | | MVDITYKDFCEVNNVTGEKHIKKTIGKRVVLIEKYTTDIL | | |
| | | GNLYKTPLPKKPQLIFKRGEL | | |
| ScaCas9- | Streptococcus | MEKKYSIGLDIGTNSVGWAVITDDYKVPSKKFKVLGNTNR | 3268 | N872A |
| Sc++ | canis | KSIKKNLMGALLFDSGETAEATRLKRTARRRYTRRKNRIR | | |
| | | YLQEIFANEMAKLDDSFFQRLEESFLVEEDKKNERHPIFG | | |
| | | NLADEVAYHRNYPTIYHLRKKLADSPEKADLRLIYLALAH | | |
| | | IIKFRGHFLIEGKLNAENSDVAKLFYQLIQTYNQLFEESP | | |
| | | LDEIEVDAKGILSARLSKSKRLEKLIAVFPNEKKNGLFGN | | |
| | | IIALALGLTPNFKSNFDLTEDAKLQLSKDTYDDDLDELLG | | |
| | | QIGDQYADLFSAAKNLSDAILLSDILRSNSEVTKAPLSAS | | |
| | | MVKRYDEHHQDLALLKTLVRQQFPEKYAEIFKDDTKNGYA | | |
| | | GYVGADKKLRKRSGKLATEEEFYKFIKPILEKMDGAEELL | | |
| | | AKLNRDDLLRKQRTFDNGSIPHQIHLKELHAILRRQEEFY | | |
| | | PFLKENREKIEKILTFRIPYYVGPLARGNSRFAWLTRKSE | | |
| | | EAITPWNFEEVVDKGASAQSFIERMTNFDEQLPNKKVLPK | | |
| | | HSLLYEYFTVYNELTKVKYVTERMRKPEFLSGEQKKAIVD | | |
| | | LLFKTNRKVTVKQLKEDYFKKIECFDSVEIIGVEDRFNAS | | |
| | | LGTYHDLLKIIKDKDFLDNEENEDILEDIVLTLTLFEDRE | | |
| | | MIEERLKTYAHLFDDKVMKQLKRRHYTGWGRLSRKMINGI | | |
| | | RDKQSGKTILDFLKSDGFSNRNFMQLIHDDSLTFKEEIEK | | |
| | | AQVSGQGDSLHEQIADLAGSPAIKKGILQTVKIVDELVKV | | |
| | | MGHKPENIVIEMARENQTTTKGLQQSRERKKRIEEGIKEL | | |
| | | ESQILKENPVENTQLQNEKLYLYYLQNGRDMYVDQELDIN | | |
| | | RLSDYDVDHIVPQSFIKDDSIDNKVLTRSVENRGKSDNVP | | |
| | | SEEVVKKMKNYWRQLLNAKLITQRKFDNLTKAERGGLSEA | | |
| | | DKAGFIKRQLVETRQITKHVARILDSRMNTKRDKNDKPIR | | |
| | | EVKVITLKSKLVSDFRKDFQLYKVRDINNYHHAHDAYLNA | | |
| | | VVGTALIKKYPKLESEFVYGDYKVYDVRKMIAKSEQEIGK | | |
| | | ATAKRFFYSNIMNFFKTEVKLANGEIRKRPLIETNGETGE | | |
| | | VVWNKEKDFATVRKVLAMPQVNIVKKTEVQTGGFSKESIL | | |
| | | SKRESAKLIPRKKGWDTRKYGGFGSPTVAYSILVVAKVEK | | |
| | | GKAKKLKSVKVLVGITIMEKGSYEKDPIGFLEAKGYKDIK | | |
| | | KELIFKLPKYSLFELENGRRRMLASAKELQKANELVLPQH | | |
| | | LVRLLYYTQNISATTGSNNLGYIEQHREEFKEIFEKIIDF | | |
| | | SEKYILKNKVNSNLKSSFDEQFAVSDSILLSNSFVSLLKY | | |
| | | TSFGASGGFTFLDLDVKQGRLRYQTVTEVLDATLIYQSIT | | |
| | | GLYETRTDLSQLGGD | | |
| SpyCas9 | Streptococcus | MDKKYSIGLDIGTNSVGWAVITDEYKVPSKKFKVLGNTDR | 3269 | N863A |
| | pyogenes | HSIKKNLIGALLFDSGETAEATRLKRTARRRYTRRKNRIC | | |
| | | YLQEIFSNEMAKVDDSFFHRLEESFLVEEDKKHERHPIFG | | |
| | | NIVDEVAYHEKYPTIYHLRKKLVDSTDKADLRLIYLALAH | | |
| | | MIKFRGHFLIEGDLNPDNSDVDKLFIQLVQTYNQLFEENP | | |
| | | INASGVDAKAILSARLSKSRRLENLIAQLPGEKKNGLFGN | | |
| | | LIALSLGLTPNFKSNFDLAEDAKLQLSKDTYDDDLDNLLA | | |
| | | QIGDQYADLFLAAKNLSDAILLSDILRVNTEITKAPLSAS | | |
| | | MIKRYDEHHQDLTLLKALVRQQLPEKYKEIFFDQSKNGYA | | |
| | | GYIDGGASQEEFYKFIKPILEKMDGTEELLVKLNREDLLR | | |
| | | KQRTFDNGSIPHQIHLGELHAILRRQEDFYPFLKDNREKI | | |
| | | EKILTFRIPYYVGPLARGNSRFAWMTRKSEETITPWNFEE | | |
| | | VVDKGASAQSFIERMTNFDKNLPNEKVLPKHSLLYEYFTV | | |
| | | YNELTKVKYVTEGMRKPAFLSGEQKKAIVDLLFKTNRKVT | | |
| | | VKQLKEDYFKKIECFDSVEISGVEDRFNASLGTYHDLLKI | | |
| | | IKDKDFLDNEENEDILEDIVLTLTLFEDREMIEERLKTYA | | |
| | | HLFDDKVMKQLKRRRYTGWGRLSRKLINGIRDKQSGKTIL | | |
| | | DFLKSDGFANRNFMQLIHDDSLTFKEDIQKAQVSGQGDSL | | |
| | | HEHIANLAGSPAIKKGILQTVKVVDELVKVMGRHKPENIV | | |
| | | IEMARENQTTQKGQKNSRERMKRIEEGIKELGSQILKEHP | | |
| | | VENTQLQNEKLYLYYLQNGRDMYVDQELDINRLSDYDVDH | | |
| | | IVPQSFLKDDSIDNKVLTRSDKNRGKSDNVPSEEVVKKMK | | |
| | | NYWRQLLNAKLITQRKFDNLTKAERGGLSELDKAGFIKRQ | | |
| | | LVETRQITKHVAQILDSRMNTKYDENDKLIREVKVITLKS | | |
| | | KLVSDFRKDFQFYKVREINNYHHAHDAYLNAVVGTALIKK | | |
| | | YPKLESEFVYGDYKVYDVRKMIAKSEQEIGKATAKYFFYS | | |
| | | NIMNFFKTEITLANGEIRKRPLIETNGETGEIVWDKGRDF | | |
| | | ATVRKVLSMPQVNIVKKTEVQTGGFSKESILPKRNSDKLI | | |
| | | ARKKDWDPKKYGGFDSPTVAYSVLVVAKVEKGKSKKLKSV | | |
| | | KELLGITIMERSSFEKNPIDFLEAKGYKEVKKDLIIKLPK | | |
| | | YSLFELENGRKRMLASAGELQKGNELALPSKYVNFLYLAS | | |
| | | HYEKLKGSPEDNEQKQLFVEQHKHYLDEIIEQISEFSKRV | | |
| | | ILADANLDKVLSAYNKHRDKPIREQAENIIHLFTLTNLGA | | |
| | | PAAFKYFDTTIDRKRYTSTKEVLDATLIHQSITGLYETRI | | |
| | | DLSQLGGD | | |
| SpyCas9- | Streptococcus | MDKKYSIGLDIGTNSVGWAVITDEYKVPSKKFKVLGNTDR | 3270 | N863A |
| NG | pyogenes | HSIKKNLIGALLFDSGETAEATRLKRTARRRYTRRKNRIC | | |
| | | YLQEIFSNEMAKVDDSFFHRLEESFLVEEDKKHERHPIFG | | |
| | | NIVDEVAYHEKYPTIYHLRKKLVDSTDKADLRLIYLALAH | | |
| | | MIKFRGHFLIEGDLNPDNSDVDKLFIQLVQTYNQLFEENP | | |
| | | INASGVDAKAILSARLSKSRRLENLIAQLPGEKKNGLFGN | | |
| | | LIALSLGLTPNFKSNFDLAEDAKLQLSKDTYDDDLDNLLA | | |
| | | QIGDQYADLFLAAKNLSDAILLSDILRVNTEITKAPLSAS | | |
| | | MIKRYDEHHQDLTLLKALVRQQLPEKYKEIFFDQSKNGYA | | |
| | | GYIDGGASQEEFYKFIKPILEKMDGTEELLVKLNREDLLR | | |
| | | KQRTFDNGSIPHQIHLGELHAILRRQEDFYPFLKDNREKI | | |
| | | EKILTFRIPYYVGPLARGNSRFAWMTRKSEETITPWNFEE | | |
| | | VVDKGASAQSFIERMTNFDKNLPNEKVLPKHSLLYEYFTV | | |
| | | YNELTKVKYVTEGMRKPAFLSGEQKKAIVDLLFKTNRKVT | | |
| | | VKQLKEDYFKKIECFDSVEISGVEDRFNASLGTYHDLLKI | | |
| | | IKDKDFLDNEENEDILEDIVLTLTLFEDREMIEERLKTYA | | |
| | | HLFDDKVMKQLKRRRYTGWGRLSRKLINGIRDKQSGKTIL | | |
| | | DFLKSDGFANRNFMQLIHDDSLTFKEDIQKAQVSGQGDSL | | |
| | | HEHIANLAGSPAIKKGILQTVKVVDELVKVMGRHKPENIV | | |
| | | IEMARENQTTQKGQKNSRERMKRIEEGIKELGSQILKEHP | | |
| | | VENTQLQNEKLYLYYLQNGRDMYVDQELDINRLSDYDVDH | | |
| | | IVPQSFLKDDSIDNKVLTRSDKNRGKSDNVPSEEVVKKMK | | |
| | | NYWRQLLNAKLITQRKFDNLTKAERGGLSELDKAGFIKRQ | | |
| | | LVETRQITKHVAQILDSRMNTKYDENDKLIREVKVITLKS | | |
| | | KLVSDFRKDFQFYKVREINNYHHAHDAYLNAVVGTALIKK | | |
| | | YPKLESEFVYGDYKVYDVRKMIAKSEQEIGKATAKYFFYS | | |
| | | NIMNFFKTEITLANGEIRKRPLIETNGETGEIVWDKGRDF | | |
| | | ATVRKVLSMPQVNIVKKTEVQTGGFSKESIRPKRNSDKLI | | |
| | | ARKKDWDPKKYGGFVSPTVAYSVLVVAKVEKGKSKKLKSV | | |
| | | KELLGITIMERSSFEKNPIDFLEAKGYKEVKKDLIIKLPK | | |
| | | YSLFELENGRKRMLASARFLQKGNELALPSKYVNFLYLAS | | |
| | | HYEKLKGSPEDNEQKQLFVEQHKHYLDEIIEQISEFSKRV | | |
| | | ILADANLDKVLSAYNKHRDKPIREQAENIIHLFTLTNLGA | | |
| | | PRAFKYFDTTIDRKVYRSTKEVLDATLIHQSITGLYETRI | | |
| | | DLSQLGGD | | |
| SpyCas9- | Streptococcus | MDKKYSIGLDIGTNSVGWAVITDEYKVPSKKFKVLGNTDR | 3271 | N863A |
| SpRY | pyogenes | HSIKKNLIGALLFDSGETAERTRLKRTARRRYTRRKNRIC | | |
| | | YLQEIFSNEMAKVDDSFFHRLEESFLVEEDKKHERHPIFG | | |
| | | NIVDEVAYHEKYPTIYHLRKKLVDSTDKADLRLIYLALAH | | |
| | | MIKFRGHFLIEGDLNPDNSDVDKLFIQLVQTYNQLFEENP | | |
| | | INASGVDAKAILSARLSKSRRLENLIAQLPGEKKNGLFGN | | |
| | | LIALSLGLTPNFKSNFDLAEDAKLQLSKDTYDDDLDNLLA | | |
| | | QIGDQYADLFLAAKNLSDAILLSDILRVNTEITKAPLSAS | | |
| | | MIKRYDEHHQDLTLLKALVRQQLPEKYKEIFFDQSKNGYA | | |
| | | GYIDGGASQEEFYKFIKPILEKMDGTEELLVKLNREDLLR | | |
| | | KQRTFDNGSIPHQIHLGELHAILRRQEDFYPFLKDNREKI | | |
| | | EKILTFRIPYYVGPLARGNSRFAWMTRKSEETITPWNFEE | | |
| | | VVDKGASAQSFIERMTNFDKNLPNEKVLPKHSLLYEYFTV | | |
| | | YNELTKVKYVTEGMRKPAFLSGEQKKAIVDLLFKTNRKVT | | |
| | | VKQLKEDYFKKIECFDSVEISGVEDRFNASLGTYHDLLKI | | |
| | | IKDKDFLDNEENEDILEDIVLTLTLFEDREMIEERLKTYA | | |
| | | HLFDDKVMKQLKRRRYTGWGRLSRKLINGIRDKQSGKTIL | | |
| | | DFLKSDGFANRNFMQLIHDDSLTFKEDIQKAQVSGQGDSL | | |
| | | HEHIANLAGSPAIKKGILQTVKVVDELVKVMGRHKPENIV | | |
| | | IEMARENQTTQKGQKNSRERMKRIEEGIKELGSQILKEHP | | |
| | | VENTQLQNEKLYLYYLQNGRDMYVDQELDINRLSDYDVDH | | |
| | | IVPQSFLKDDSIDNKVLTRSDKNRGKSDNVPSEEVVKKMK | | |
| | | NYWRQLLNAKLITQRKFDNLTKAERGGLSELDKAGFIKRQ | | |
| | | LVETRQITKHVAQILDSRMNTKYDENDKLIREVKVITLKS | | |
| | | KLVSDFRKDFQFYKVREINNYHHAHDAYLNAVVGTALIKK | | |
| | | YPKLESEFVYGDYKVYDVRKMIAKSEQEIGKATAKYFFYS | | |
| | | NIMNFFKTEITLANGEIRKRPLIETNGETGEIVWDKGRDF | | |
| | | ATVRKVLSMPQVNIVKKTEVQTGGFSKESIRPKRNSDKLI | | |
| | | ARKKDWDPKKYGGFLWPTVAYSVLVVAKVEKGKSKKLKSV | | |
| | | KELLGITIMERSSFEKNPIDFLEAKGYKEVKKDLIIKLPK | | |
| | | YSLFELENGRKRMLASAKQLQKGNELALPSKYVNFLYLAS | | |
| | | HYEKLKGSPEDNEQKQLFVEQHKHYLDEIIEQISEFSKRV | | |
| | | ILADANLDKVLSAYNKHRDKPIREQAENIIHLFTLTRLGA | | |
| | | PRAFKYFDTTIDPKQYRSTKEVLDATLIHQSITGLYETRI | | |
| | | DLSQLGGD | | |
| St1Cas9 | Streptococcus | MSDLVLGLDIGIGSVGVGILNKVTGEIIHKNSRIFPAAQA | 3272 | N622A |
| | thermophilus | ENNLVRRTNRQGRRLARRKKHRRVRLNRLFEESGLITDFT | | |
| | | KISINLNPYQLRVKGLTDELSNEELFIALKNMVKHRGISY | | |
| | | LDDASDDGNSSVGDYAQIVKENSKQLETKTPGQIQLERYQ | | |
| | | TYGQLRGDFTVEKDGKKHRLINVFPTSAYRSEALRILQTQ | | |
| | | QEFNPQITDEFINRYLEILTGKRKYYHGPGNEKSRTDYGR | | |
| | | YRTSGETLDNIFGILIGKCTFYPDEFRAAKASYTAQEFNL | | |
| | | LNDLNNLTVPTETKKLSKEQKNQIINYVKNEKAMGPAKLF | | |
| | | KYIAKLLSCDVADIKGYRIDKSGKAEIHTFEAYRKMKTLE | | |
| | | TLDIEQMDRETLDKLAYVLTLNTEREGIQEALEHEFADGS | | |
| | | FSQKQVDELVQFRKANSSIFGKGWHNFSVKLMMELIPELY | | |
| | | ETSEEQMTILTRLGKQKTTSSSNKTKYIDEKLLTEEIYNP | | |
| | | VVAKSVRQAIKIVNAAIKEYGDFDNIVIEMARETNEDDEK | | |
| | | KAIQKIQKANKDEKDAAMLKAANQYNGKAELPHSVFHGHK | | |
| | | QLATKIRLWHQQGERCLYTGKTISIHDLINNSNQFEVDHI | | |
| | | LPLSITFDDSLANKVLVYATANQEKGQRTPYQALDSMDDA | | |
| | | WSFRELKAFVRESKTLSNKKKEYLLTEEDISKFDVRKKFI | | |
| | | ERNLVDTRYASRVVLNALQEHFRAHKIDTKVSVVRGQFTS | | |
| | | QLRRHWGIEKTRDTYHHHAVDALIIAASSQLNLWKKQKNT | | |
| | | LVSYSEDQLLDIETGELISDDEYKESVFKAPYQHFVDTLK | | |
| | | SKEFEDSILFSYQVDSKFNRKISDATIYATRQAKVGKDKA | | |
| | | DETYVLGKIKDIYTQDGYDAFMKIYKKDKSKFLMYRHDPQ | | |
| | | TFEKVIEPILENYPNKQINEKGKEVPCNPFLKYKEEHGYI | | |
| | | RKYSKKGNGPEIKSLKYYDSKLGNHIDITPKDSNNKVVLQ | | |
| | | SVSPWRADVYFNKTTGKYEILGLKYADLQFEKGTGTYKIS | | |
| | | QEKYNDIKKKEGVDSDSEFKFTLYKNDLLLVKDTETKEQQ | | |
| | | LFRFLSRTMPKQKHYVELKPYDKQKFEGGEALIKVLGNVA | | |
| | | NSGQCKKGLGKSNISIYKVRTDVLGNQHIIKNEGDKPKLD | | |
| | | F | | |
| BlatCas9 | Brevibacillus | MAYTMGIDVGIASCGWAIVDLERQRIIDIGVRTFEKAENP | 3273 | N607A |
| | laterosporus | KNGEALAVPRREARSSRRRLRRKKHRIERLKHMFVRNGLA | | |
| | | VDIQHLEQTLRSQNEIDVWQLRVDGLDRMLTQKEWLRVLI | | |
| | | HLAQRRGFQSNRKTDGSSEDGQVLVNVTENDRLMEEKDYR | | |
| | | TVAEMMVKDEKFSDHKRNKNGNYHGVVSRSSLLVEIHTLF | | |
| | | ETQRQHHNSLASKDFELEYVNIWSAQRPVATKDQIEKMIG | | |
| | | TCTFLPKEKRAPKASWHFQYFMLLQTINHIRITNVQGTRS | | |
| | | LNKEEIEQVVNMALTKSKVSYHDTRKILDLSEEYQFVGLD | | |
| | | YGKEDEKKKVESKETIIKLDDYHKLNKIFNEVELAKGETW | | |
| | | EADDYDTVAYALTFFKDDEDIRDYLQNKYKDSKNRLVKNL | | |
| | | ANKEYTNELIGKVSTLSFRKVGHLSLKALRKIIPFLEQGM | | |
| | | TYDKACQAAGFDFQGISKKKRSVVLPVIDQISNPVVNRAL | | |
| | | TQTRKVINALIKKYGSPETIHIETARELSKTFDERKNITK | | |
| | | DYKENRDKNEHAKKHLSELGIINPTGLDIVKYKLWCEQQG | | |
| | | RCMYSNQPISFERLKESGYTEVDHIIPYSRSMNDSYNNRV | | |
| | | LVMTRENREKGNQTPFEYMGNDTQRWYEFEQRVTTNPQIK | | |
| | | KEKRQNLLLKGFTNRRELEMLERNLNDTRYITKYLSHFIS | | |
| | | TNLEFSPSDKKKKVVNTSGRITSHLRSRWGLEKNRGQNDL | | |
| | | HHAMDAIVIAVTSDSFIQQVTNYYKRKERRELNGDDKFPL | | |
| | | PWKFFREEVIARLSPNPKEQIEALPNHFYSEDELADLQPI | | |
| | | FVSRMPKRSITGEAHQAQFRRVVGKTKEGKNITAKKTALV | | |
| | | DISYDKNGDFNMYGRETDPATYEAIKERYLEFGGNVKKAF | | |
| | | STDLHKPKKDGTKGPLIKSVRIMENKTLVHPVNKGKGVVY | | |
| | | NSSIVRTDVFQRKEKYYLLPVYVTDVTKGKLPNKVIVAKK | | |
| | | GYHDWIEVDDSFTFLFSLYPNDLIFIRQNPKKKISLKKRI | | |
| | | ESHSISDSKEVQEIHAYYKGVDSSTAAIEFIIHDGSYYAK | | |
| | | GVGVQNLDCFEKYQVDILGNYFKVKGEKRLELETSDSNHK | | |
| | | GKDVNSIKSTSR | | |
| cCas9- | Staphylococcus | MKRNYILGLDIGITSVGYGIIDYETRDVIDAGVRLFKEAN | 3274 | N580A |
| v16 | aureus | VENNEGRRSKRGARRLKRRRRHRIQRVKKLLFDYNLLTDH | | |
| | | SELSGINPYEARVKGLSQKLSEEEFSAALLHLAKRRGVHN | | |
| | | VNEVEEDTGNELSTKEQISRNSKALEEKYVAELQLERLKK | | |
| | | DGEVRGSINRFKTSDYVKEAKQLLKVQKAYHQLDQSFIDT | | |
| | | YIDLLETRRTYYEGPGEGSPFGWKDIKEWYEMLMGHCTYF | | |
| | | PEELRSVKYAYNADLYNALNDLNNLVITRDENEKLEYYEK | | |
| | | FQIIENVFKQKKKPTLKQIAKEILVNEEDIKGYRVTSTGK | | |
| | | PEFTNLKVYHDIKDITARKEIIENAELLDQIAKILTIYQS | | |
| | | SEDIQEELTNLNSELTQEEIEQISNLKGYTGTHNLSLKAI | | |
| | | NLILDELWHTNDNQIAIFNRLKLVPKKVDLSQQKEIPTTL | | |
| | | VDDFILSPVVKRSFIQSIKVINAIIKKYGLPNDIIIELAR | | |
| | | EKNSKDAQKMINEMQKRNRQTNERIEEIIRTTGKENAKYL | | |
| | | IEKIKLHDMQEGKCLYSLEAIPLEDLLNNPFNYEVDHIIP | | |
| | | RSVSFDNSFNNKVLVKQEENSKKGNRTPFQYLSSSDSKIS | | |
| | | YETFKKHILNLAKGKGRISKTKKEYLLEERDINRFSVQKD | | |
| | | FINRNLVDTRYATRGLMNLLRSYFRVNNLDVKVKSINGGF | | |
| | | TSFLRRKWKFKKERNKGYKHHAEDALIIANADFIFKEWKK | | |
| | | LDKAKKVMENQMFEEKQAESMPEIETEQEYKEIFITPHQI | | |
| | | KHIKDFKDYKYSHRVDKKPNRKLINDTLYSTRKDDKGNTL | | |
| | | IVNNLNGLYDKDNDKLKKLINKSPEKLLMYHHDPQTYQKL | | |
| | | KLIMEQYGDEKNPLYKYYEETGNYLTKYSKKDNGPVIKKI | | |
| | | KYYGNKLNAHLDITDDYPNSRNKVVKLSLKPYRFDVYLDN | | |
| | | GVYKFVTVKNLDVIKKENYYEVNSKCYEEAKKLKKISNQA | | |
| | | EFIASFYKNDLIKINGELYRVIGVNSDKNNLIEVNMIDIT | | |
| | | YREYLENMNDKRPPHIIKTIASKTQSIKKYSTDILGNLYE | | |
| | | VKSKKHPQIIKKG | | |
| cCas9- | Staphylococcus | MKRNYILGLDIGITSVGYGIIDYETRDVIDAGVRLFKEAN | 3275 | N580A |
| v17 | aureus | VENNEGRRSKRGARRLKRRRRHRIQRVKKLLFDYNLLTDH | | |
| | | SELSGINPYEARVKGLSQKLSEEEFSAALLHLAKRRGVHN | | |
| | | VNEVEEDTGNELSTKEQISRNSKALEEKYVAELQLERLKK | | |
| | | DGEVRGSINRFKTSDYVKEAKQLLKVQKAYHQLDQSFIDT | | |
| | | YIDLLETRRTYYEGPGEGSPFGWKDIKEWYEMLMGHCTYF | | |
| | | PEELRSVKYAYNADLYNALNDLNNLVITRDENEKLEYYEK | | |
| | | FQIIENVFKQKKKPTLKQIAKEILVNEEDIKGYRVTSTGK | | |
| | | PEFTNLKVYHDIKDITARKEIIENAELLDQIAKILTIYQS | | |
| | | SEDIQEELTNLNSELTQEEIEQISNLKGYTGTHNLSLKAI | | |
| | | NLILDELWHTNDNQIAIFNRLKLVPKKVDLSQQKEIPTTL | | |
| | | VDDFILSPVVKRSFIQSIKVINAIIKKYGLPNDIIIELAR | | |
| | | EKNSKDAQKMINEMQKRNRQTNERIEEIIRTTGKENAKYL | | |
| | | IEKIKLHDMQEGKCLYSLEAIPLEDLLNNPFNYEVDHIIP | | |
| | | RSVSFDNSFNNKVLVKQEENSKKGNRTPFQYLSSSDSKIS | | |
| | | YETFKKHILNLAKGKGRISKTKKEYLLEERDINRFSVQKD | | |
| | | FINRNLVDTRYATRGLMNLLRSYFRVNNLDVKVKSINGGF | | |
| | | TSFLRRKWKFKKERNKGYKHHAEDALIIANADFIFKEWKK | | |
| | | LDKAKKVMENQMFEEKQAESMPEIETEQEYKEIFITPHQI | | |
| | | KHIKDFKDYKYSHRVDKKPNRKLINDTLYSTRKDDKGNTL | | |
| | | IVNNLNGLYDKDNDKLKKLINKSPEKLLMYHHDPQTYQKL | | |
| | | KLIMEQYGDEKNPLYKYYEETGNYLTKYSKKDNGPVIKKI | | |
| | | KYYGNKLNAHLDITDDYPNSRNKVVKLSLKPYRFDVYLDN | | |
| | | GVYKFVTVKNLDVIKKENYYEVNSKCYEEAKKLKKISNQA | | |
| | | EFIASFYKNDLIKINGELYRVIGVNNSTRNIVELNMIDIT | | |
| | | YREYLENMNDKRPPHIIKTIASKTQSIKKYSTDILGNLYE | | |
| | | VKSKKHPQIIKKG | | |
| cCas9- | Staphylococcus | MKRNYILGLDIGITSVGYGIIDYETRDVIDAGVRLFKEAN | 3276 | N580A |
| v21 | aureus | VENNEGRRSKRGARRLKRRRRHRIQRVKKLLFDYNLLTDH | | |
| | | SELSGINPYEARVKGLSQKLSEEEFSAALLHLAKRRGVHN | | |
| | | VNEVEEDTGNELSTKEQISRNSKALEEKYVAELQLERLKK | | |
| | | DGEVRGSINRFKTSDYVKEAKQLLKVQKAYHQLDQSFIDT | | |
| | | YIDLLETRRTYYEGPGEGSPFGWKDIKEWYEMLMGHCTYF | | |
| | | PEELRSVKYAYNADLYNALNDLNNLVITRDENEKLEYYEK | | |
| | | FQIIENVFKQKKKPTLKQIAKEILVNEEDIKGYRVTSTGK | | |
| | | PEFTNLKVYHDIKDITARKEIIENAELLDQIAKILTIYQS | | |
| | | SEDIQEELTNLNSELTQEEIEQISNLKGYTGTHNLSLKAI | | |
| | | NLILDELWHTNDNQIAIFNRLKLVPKKVDLSQQKEIPTTL | | |
| | | VDDFILSPVVKRSFIQSIKVINAIIKKYGLPNDIIIELAR | | |
| | | EKNSKDAQKMINEMQKRNRQTNERIEEIIRTTGKENAKYL | | |
| | | IEKIKLHDMQEGKCLYSLEAIPLEDLLNNPFNYEVDHIIP | | |
| | | RSVSFDNSFNNKVLVKQEENSKKGNRTPFQYLSSSDSKIS | | |
| | | YETFKKHILNLAKGKGRISKTKKEYLLEERDINRFSVQKD | | |
| | | FINRNLVDTRYATRGLMNLLRSYFRVNNLDVKVKSINGGF | | |
| | | TSFLRRKWKFKKERNKGYKHHAEDALIIANADFIFKEWKK | | |
| | | LDKAKKVMENQMFEEKQAESMPEIETEQEYKEIFITPHQI | | |
| | | KHIKDFKDYKYSHRVDKKPNRKLINDTLYSTRKDDKGNTL | | |
| | | IVNNLNGLYDKDNDKLKKLINKSPEKLLMYHHDPQTYQKL | | |
| | | KLIMEQYGDEKNPLYKYYEETGNYLTKYSKKDNGPVIKKI | | |
| | | KYYGNKLNAHLDITDDYPNSRNKVVKLSLKPYRFDVYLDN | | |
| | | GVYKFVTVKNLDVIKKENYYEVNSKCYEEAKKLKKISNQA | | |
| | | EFIASFYKNDLIKINGELYRVIGVNSDDRNIIELNMIDIT | | |
| | | YREYLENMNDKRPPHIIKTIASKTQSIKKYSTDILGNLYE | | |
| | | VKSKKHPQIIKKG | | |
| cCas9- | Staphylococcus | MKRNYILGLDIGITSVGYGIIDYETRDVIDAGVRLFKEAN | 3277 | N580A |
| v42 | aureus | VENNEGRRSKRGARRLKRRRRHRIQRVKKLLFDYNLLTDH | | |
| | | SELSGINPYEARVKGLSQKLSEEEFSAALLHLAKRRGVHN | | |
| | | VNEVEEDTGNELSTKEQISRNSKALEEKYVAELQLERLKK | | |
| | | DGEVRGSINRFKTSDYVKEAKQLLKVQKAYHQLDQSFIDT | | |
| | | YIDLLETRRTYYEGPGEGSPFGWKDIKEWYEMLMGHCTYF | | |
| | | PEELRSVKYAYNADLYNALNDLNNLVITRDENEKLEYYEK | | |
| | | FQIIENVFKQKKKPTLKQIAKEILVNEEDIKGYRVTSTGK | | |
| | | PEFTNLKVYHDIKDITARKEIIENAELLDQIAKILTIYQS | | |
| | | SEDIQEELTNLNSELTQEEIEQISNLKGYTGTHNLSLKAI | | |
| | | NLILDELWHTNDNQIAIFNRLKLVPKKVDLSQQKEIPTTL | | |
| | | VDDFILSPVVKRSFIQSIKVINAIIKKYGLPNDIIIELAR | | |
| | | EKNSKDAQKMINEMQKRNRQTNERIEEIIRTTGKENAKYL | | |
| | | IEKIKLHDMQEGKCLYSLEAIPLEDLLNNPFNYEVDHIIP | | |
| | | RSVSFDNSFNNKVLVKQEENSKKGNRTPFQYLSSSDSKIS | | |
| | | YETFKKHILNLAKGKGRISKTKKEYLLEERDINRFSVQKD | | |
| | | FINRNLVDTRYATRGLMNLLRSYFRVNNLDVKVKSINGGF | | |
| | | TSFLRRKWKFKKERNKGYKHHAEDALIIANADFIFKEWKK | | |
| | | LDKAKKVMENQMFEEKQAESMPEIETEQEYKEIFITPHQI | | |
| | | KHIKDFKDYKYSHRVDKKPNRKLINDTLYSTRKDDKGNTL | | |
| | | IVNNLNGLYDKDNDKLKKLINKSPEKLLMYHHDPQTYQKL | | |
| | | KLIMEQYGDEKNPLYKYYEETGNYLTKYSKKDNGPVIKKI | | |
| | | KYYGNKLNAHLDITDDYPNSRNKVVKLSLKPYRFDVYLDN | | |
| | | GVYKFVTVKNLDVIKKENYYEVNSKCYEEAKKLKKISNQA | | |
| | | EFIASFYKNDLIKINGELYRVIGVNNNRLNKIELNMIDIT | | |
| | | YREYLENMNDKRPPHIIKTIASKTQSIKKYSTDILGNLYE | | |
| | | VKSKKHPQIIKKG | | |
| CdiCas9 | Corynebacterium | MKYHVGIDVGTFSVGLAAIEVDDAGMPIKTLSLVSHIHDS | 3278 | H573A |
| | diphtheriae | GLDPDEIKSAVTRLASSGIARRTRRLYRRKRRRLQQLDKF | | (Alter- |
| | | IQRQGWPVIELEDYSDPLYPWKVRAELAASYIADEKERGE | | nate) |
| | | KLSVALRHIARHRGWRNPYAKVSSLYLPDGPSDAFKAIRE | | |
| | | EIKRASGQPVPETATVGQMVTLCELGTLKLRGEGGVLSAR | | |
| | | LQQSDYAREIQEICRMQEIGQELYRKIIDVVFAAESPKGS | | |
| | | ASSRVGKDPLQPGKNRALKASDAFQRYRIAALIGNLRVRV | | |
| | | DGEKRILSVEEKNLVFDHLVNLTPKKEPEWVTIAEILGID | | |
| | | RGQLIGTATMTDDGERAGARPPTHDTNRSIVNSRIAPLVD | | |
| | | WWKTASALEQHAMVKALSNAEVDDFDSPEGAKVQAFFADL | | |
| | | DDDVHAKLDSLHLPVGRAAYSEDTLVRLTRRMLSDGVDLY | | |
| | | TARLQEFGIEPSWTPPTPRIGEPVGNPAVDRVLKTVSRWL | | |
| | | ESATKTWGAPERVIIEHVREGFVTEKRAREMDGDMRRRAA | | |
| | | RNAKLFQEMQEKLNVQGKPSRADLWRYQSVQRQNCQCAYC | | |
| | | GSPITFSNSEMDHIVPRAGQGSTNTRENLVAVCHRCNQSK | | |
| | | GNTPFAIWAKNTSIEGVSVKEAVERTRHWVTDTGMRSTDF | | |
| | | KKFTKAVVERFQRATMDEEIDARSMESVAWMANELRSRVA | | |
| | | QHFASHGTTVRVYRGSLTAEARRASGISGKLKFFDGVGKS | | |
| | | RLDRRHHAIDAAVIAFTSDYVAETLAVRSNLKQSQAHRQE | | |
| | | APQWREFTGKDAEHRAAWRVWCQKMEKLSALLTEDLRDDR | | |
| | | VVVMSNVRLRLGNGSAHKETIGKLSKVKLSSQLSVSDIDK | | |
| | | ASSEALWCALTREPGFDPKEGLPANPERHIRVNGTHVYAG | | |
| | | DNIGLFPVSAGSIALRGGYAELGSSFHHARVYKITSGKKP | | |
| | | AFAMLRVYTIDLLPYRNQDLFSVELKPQTMSMRQAEKKLR | | |
| | | DALATGNAEYLGWLVVDDELVVDTSKIATDQVKAVEAELG | | |
| | | TIRRWRVDGFFSPSKLRLRPLQMSKEGIKKESAPELSKII | | |
| | | DRPGWLPAVNKLFSDGNVTVVRRDSLGRVRLESTAHLPVT | | |
| | | WKVQ | | |
| CjeCas9 | Campylobacter | MARILAFDIGISSIGWAFSENDELKDCGVRIFTKVENPKT | 3279 | N582A |
| | jejuni | GESLALPRRLARSARKRLARRKARLNHLKHLIANEFKLNY | | |
| | | EDYQSFDESLAKAYKGSLISPYELRFRALNELLSKQDFAR | | |
| | | VILHIAKRRGYDDIKNSDDKEKGAILKAIKQNEEKLANYQ | | |
| | | SVGEYLYKEYFQKFKENSKEFTNVRNKKESYERCIAQSFL | | |
| | | KDELKLIFKKQREFGFSFSKKFEEEVLSVAFYKRALKDFS | | |
| | | HLVGNCSFFTDEKRAPKNSPLAFMFVALTRIINLLNNLKN | | |
| | | TEGILYTKDDLNALLNEVLKNGTLTYKQTKKLLGLSDDYE | | |
| | | FKGEKGTYFIEFKKYKEFIKALGEHNLSQDDLNEIAKDIT | | |
| | | LIKDEIKLKKALAKYDLNQNQIDSLSKLEFKDHLNISFKA | | |
| | | LKLVTPLMLEGKKYDEACNELNLKVAINEDKKDFLPAFNE | | |
| | | TYYKDEVTNPVVLRAIKEYRKVLNALLKKYGKVHKINIEL | | |
| | | AREVGKNHSQRAKIEKEQNENYKAKKDAELECEKLGLKIN | | |
| | | SKNILKLRLFKEQKEFCAYSGEKIKISDLQDEKMLEIDHI | | |
| | | YPYSRSFDDSYMNKVLVFTKQNQEKLNQTPFEAFGNDSAK | | |
| | | WQKIEVLAKNLPTKKQKRILDKNYKDKEQKNFKDRNLNDT | | |
| | | RYIARLVLNYTKDYLDFLPLSDDENTKLNDTQKGSKVHVE | | |
| | | AKSGMLTSALRHTWGFSAKDRNNHLHHAIDAVIIAYANNS | | |
| | | IVKAFSDFKKEQESNSAELYAKKISELDYKNKRKFFEPFS | | |
| | | GFRQKVLDKIDEIFVSKPERKKPSGALHEETFRKEEEFYQ | | |
| | | SYGGKEGVLKALELGKIRKVNGKIVKNGDMFRVDIFKHKK | | |
| | | TNKFYAVPIYTMDFALKVLPNKAVARSKKGEIKDWILMDE | | |
| | | NYEFCFSLYKDSLILIQTKDMQEPEFVYYNAFTSSTVSLI | | |
| | | VSKHDNKFETLSKNQKILFKNANEKEVIAKSIGIQNLKVF | | |
| | | EKYIVSALGEVTKAEFRQREDFKK | | |
| GeoCas9 | Geobacillus | MRYKIGLDIGITSVGWAVMNLDIPRIEDLGVRIFDRAENP | 3280 | N605A |
| | stearother | QTGESLALPRRLARSARRRLRRRKHRLERIRRLVIREGIL | | |
| | mophilus | TKEELDKLFEEKHEIDVWQLRVEALDRKLNNDELARVLLH | | |
| | | LAKRRGFKSNRKSERSNKENSTMLKHIEENRAILSSYRTV | | |
| | | GEMIVKDPKFALHKRNKGENYTNTIARDDLEREIRLIFSK | | |
| | | QREFGNMSCTEEFENEYITIWASQRPVASKDDIEKKVGFC | | |
| | | TFEPKEKRAPKATYTFQSFIAWEHINKLRLISPSGARGLT | | |
| | | DEERRLLYEQAFQKNKITYHDIRTLLHLPDDTYFKGIVYD | | |
| | | RGESRKQNENIRFLELDAYHQIRKAVDKVYGKGKSSSFLP | | |
| | | IDFDTFGYALTLFKDDADIHSYLRNEYEQNGKRMPNLANK | | |
| | | VYDNELIEELLNLSFTKFGHLSLKALRSILPYMEQGEVYS | | |
| | | SACERAGYTFTGPKKKQKTMLLPNIPPIANPVVMRALTQA | | |
| | | RKVVNAIIKKYGSPVSIHIELARDLSQTFDERRKTKKEQD | | |
| | | ENRKKNETAIRQLMEYGLTLNPTGHDIVKFKLWSEQNGRC | | |
| | | AYSLQPIEIERLLEPGYVEVDHVIPYSRSLDDSYTNKVLV | | |
| | | LTRENREKGNRIPAEYLGVGTERWQQFETFVLTNKQFSKK | | |
| | | KRDRLLRLHYDENEETEFKNRNLNDTRYISRFFANFIREH | | |
| | | LKFAESDDKQKVYTVNGRVTAHLRSRWEFNKNREESDLHH | | |
| | | AVDAVIVACTTPSDIAKVTAFYQRREQNKELAKKTEPHFP | | |
| | | QPWPHFADELRARLSKHPKESIKALNLGNYDDQKLESLQP | | |
| | | VFVSRMPKRSVTGAAHQETLRRYVGIDERSGKIQTVVKTK | | |
| | | LSEIKLDASGHFPMYGKESDPRTYEAIRQRLLEHNNDPKK | | |
| | | AFQEPLYKPKKNGEPGPVIRTVKIIDTKNQVIPLNDGKTV | | |
| | | AYNSNIVRVDVFEKDGKYYCVPVYTMDIMKGILPNKAIEP | | |
| | | NKPYSEWKEMTEDYTFRFSLYPNDLIRIELPREKTVKTAA | | |
| | | GEEINVKDVFVYYKTIDSANGGLELISHDHRFSLRGVGSR | | |
| | | TLKRFEKYQVDVLGNIYKVRGEKRVGLASSAHSKPGKTIR | | |
| | | PLQSTRD | | |
| iSpyMac | Streptococcus | MDKKYSIGLDIGTNSVGWAVITDEYKVPSKKFKVLGNTDR | 3281 | N863A |
| Cas9 | spp. | HSIKKNLIGALLFDSGETAEATRLKRTARRRYTRRKNRIC | | |
| | | YLQEIFSNEMAKVDDSFFHRLEESFLVEEDKKHERHPIFG | | |
| | | NIVDEVAYHEKYPTIYHLRKKLVDSTDKADLRLIYLALAH | | |
| | | MIKFRGHFLIEGDLNPDNSDVDKLFIQLVQTYNQLFEENP | | |
| | | INASGVDAKAILSARLSKSRKLENLIAQLPGEKKNGLFGN | | |
| | | LIALSLGLTPNFKSNFDLAEDAKLQLSKDTYDDDLDNLLA | | |
| | | QIGDQYADLFLAAKNLSDAILLSDILRVNTEITKAPLSAS | | |
| | | MIKRYDEHHQDLTLLKALVRQQLPEKYKEIFFDQSKNGYA | | |
| | | GYIDGGASQEEFYKFIKPILEKMDGTEELLVKLKREDLLR | | |
| | | KQRTFDNGSIPHQIHLGELHAILRRQEDFYPFLKDNREKI | | |
| | | EKILTFRIPYYVGPLARGNSRFAWMTRKSEETITPWNFEE | | |
| | | VVDKGASAQSFIERMTNFDKNLPNEKVLPKHSLLYEYFTV | | |
| | | YNELTKVKYVTEGMRKPAFLSGEQKKAIVDLLFKTNRKVT | | |
| | | VKQLKEDYFKKIECFDSVEISGVEDRFNASLGTYHDLLKI | | |
| | | IKDKDFLDNEENEDILEDIVLTLTLFEDREMIEERLKTYA | | |
| | | HLFDDKVMKQLKRRRYTGWGRLSRKLINGIRDKQSGKTIL | | |
| | | DFLKSDGFANRNFMQLIHDDSLTFKEDIQKAQVSGQGDSL | | |
| | | HEHIANLAGSPAIKKGILQTVKVVDELVKVMGRHKPENIV | | |
| | | IEMARENQTTQKGQKNSRERMKRIEEGIKELGSQILKEHP | | |
| | | VENTQLQNEKLYLYYLQNGRDMYVDQELDINRLSDYDVDH | | |
| | | IVPQSFLKDDSIDNKVLTRSDKNRGKSDNVPSEEVVKKMK | | |
| | | NYWRQLLNAKLITQRKFDNLTKAERGGLSELDKAGFIKRQ | | |
| | | LVETRQITKHVAQILDSRMNTKYDENDKLIREVKVITLKS | | |
| | | KLVSDFRKDFQFYKVREINNYHHAHDAYLNAVVGTALIKK | | |
| | | YPKLESEFVYGDYKVYDVRKMIAKSEQEIGKATAKYFFYS | | |
| | | NIMNFFKTEITLANGEIRKRPLIETNGETGEIVWDKGRDF | | |
| | | ATVRKVLSMPQVNIVKKTEIQTVGQNGGLFDDNPKSPLEV | | |
| | | TPSKLVPLKKELNPKKYGGYQKPTTAYPVLLITDTKQLIP | | |
| | | ISVMNKKQFEQNPVKFLRDRGYQQVGKNDFIKLPKYTLVD | | |
| | | IGDGIKRLWASSKEIHKGNQLVVSKKSQILLYHAHHLDSD | | |
| | | LSNDYLQNHNQQFDVLFNEIISFSKKCKLGKEHIQKIENV | | |
| | | YSNKKNSASIEELAESFIKLLGFTQLGATSPFNFLGVKLN | | |
| | | QKQYKGKKDYILPCTEGTLIRQSITGLYETRVDLSKIGED | | |
| | | SGGSGGSKRTADGSEFES | | |
| NmeCas9 | Neisseria | MAAFKPNSINYILGLDIGIASVGWAMVEIDEEENPIRLID | 3282 | N611A |
| | meningitidis | LGVRVFERAEVPKTGDSLAMARRLARSVRRLTRRRAHRLL | | |
| | | RTRRLLKREGVLQAANFDENGLIKSLPNTPWQLRAAALDR | | |
| | | KLTPLEWSAVLLHLIKHRGYLSQRKNEGETADKELGALLK | | |
| | | GVAGNAHALQTGDFRTPAELALNKFEKESGHIRNQRSDYS | | |
| | | HTFSRKDLQAELILLFEKQKEFGNPHVSGGLKEGIETLLM | | |
| | | TQRPALSGDAVQKMLGHCTFEPAEPKAAKNTYTAERFIWL | | |
| | | TKLNNLRILEQGSERPLTDTERATLMDEPYRKSKLTYAQA | | |
| | | RKLLGLEDTAFFKGLRYGKDNAEASTLMEMKAYHAISRAL | | |
| | | EKEGLKDKKSPLNLSPELQDEIGTAFSLFKTDEDITGRLK | | |
| | | DRIQPEILEALLKHISFDKFVQISLKALRRIVPLMEQGKR | | |
| | | YDEACAEIYGDHYGKKNTEEKIYLPPIPADEIRNPVVLRA | | |
| | | LSQARKVINGVVRRYGSPARIHIETAREVGKSFKDRKEIE | | |
| | | KRQEENRKDREKAAAKFREYFPNFVGEPKSKDILKLRLYE | | |
| | | QQHGKCLYSGKEINLGRLNEKGYVEIDHALPFSRTWDDSF | | |
| | | NNKVLVLGSENQNKGNQTPYEYFNGKDNSREWQEFKARVE | | |
| | | TSRFPRSKKQRILLQKFDEDGFKERNLNDTRYVNRFLCQF | | |
| | | VADRMRLTGKGKKRVFASNGQITNLLRGFWGLRKVRAEND | | |
| | | RHHALDAVVVACSTVAMQQKITRFVRYKEMNAFDGKTIDK | | |
| | | ETGEVLHQKTHFPQPWEFFAQEVMIRVFGKPDGKPEFEEA | | |
| | | DTLEKLRTLLAEKLSSRPEAVHEYVTPLFVSRAPNRKMSG | | |
| | | QGHMETVKSAKRLDEGVSVLRVPLTQLKLKDLEKMVNRER | | |
| | | EPKLYEALKARLEAHKDDPAKAFAEPFYKYDKAGNRTQQV | | |
| | | KAVRVEQVQKTGVWVRNHNGIADNATMVRVDVFEKGDKYY | | |
| | | LVPIYSWQVAKGILPDRAVVQGKDEEDWQLIDDSFNFKFS | | |
| | | LHPNDLVEVITKKARMFGYFASCHRGTGNINIRIHDLDHK | | |
| | | IGKNGILEGIGVKTALSFQKYQIDELGKEIRPCRLKKRPP | | |
| | | VR | | |
| ScaCas9 | Streptococcus | MEKKYSIGLDIGTNSVGWAVITDDYKVPSKKFKVLGNTNR | 3283 | N872A |
| | canis | KSIKKNLMGALLFDSGETAEATRLKRTARRRYTRRKNRIR | | |
| | | YLQEIFANEMAKLDDSFFQRLEESFLVEEDKKNERHPIFG | | |
| | | NLADEVAYHRNYPTIYHLRKKLADSPEKADLRLIYLALAH | | |
| | | IIKFRGHFLIEGKLNAENSDVAKLFYQLIQTYNQLFEESP | | |
| | | LDEIEVDAKGILSARLSKSKRLEKLIAVFPNEKKNGLFGN | | |
| | | IIALALGLTPNFKSNFDLTEDAKLQLSKDTYDDDLDELLG | | |
| | | QIGDQYADLFSAAKNLSDAILLSDILRSNSEVTKAPLSAS | | |
| | | MVKRYDEHHQDLALLKTLVRQQFPEKYAEIFKDDTKNGYA | | |
| | | GYVGIGIKHRKRTTKLATQEEFYKFIKPILEKMDGAEELL | | |
| | | AKLNRDDLLRKQRTFDNGSIPHQIHLKELHAILRRQEEFY | | |
| | | PFLKENREKIEKILTFRIPYYVGPLARGNSRFAWLTRKSE | | |
| | | EAITPWNFEEVVDKGASAQSFIERMTNFDEQLPNKKVLPK | | |
| | | HSLLYEYFTVYNELTKVKYVTERMRKPEFLSGEQKKAIVD | | |
| | | LLFKTNRKVTVKQLKEDYFKKIECFDSVEIIGVEDRFNAS | | |
| | | LGTYHDLLKIIKDKDFLDNEENEDILEDIVLTLTLFEDRE | | |
| | | MIEERLKTYAHLFDDKVMKQLKRRHYTGWGRLSRKMINGI | | |
| | | RDKQSGKTILDFLKSDGFSNRNFMQLIHDDSLTFKEEIEK | | |
| | | AQVSGQGDSLHEQIADLAGSPAIKKGILQTVKIVDELVKV | | |
| | | MGHKPENIVIEMARENQTTTKGLQQSRERKKRIEEGIKEL | | |
| | | ESQILKENPVENTQLQNEKLYLYYLQNGRDMYVDQELDIN | | |
| | | RLSDYDVDHIVPQSFIKDDSIDNKVLTRSVENRGKSDNVP | | |
| | | SEEVVKKMKNYWRQLLNAKLITQRKFDNLTKAERGGLSEA | | |
| | | DKAGFIKRQLVETRQITKHVARILDSRMNTKRDKNDKPIR | | |
| | | EVKVITLKSKLVSDFRKDFQLYKVRDINNYHHAHDAYLNA | | |
| | | VVGTALIKKYPKLESEFVYGDYKVYDVRKMIAKSEQEIGK | | |
| | | ATAKRFFYSNIMNFFKTEVKLANGEIRKRPLIETNGETGE | | |
| | | VVWNKEKDFATVRKVLAMPQVNIVKKTEVQTGGFSKESIL | | |
| | | SKRESAKLIPRKKGWDTRKYGGFGSPTVAYSILVVAKVEK | | |
| | | GKAKKLKSVKVLVGITIMEKGSYEKDPIGFLEAKGYKDIK | | |
| | | KELIFKLPKYSLFELENGRRRMLASATELQKANELVLPQH | | |
| | | LVRLLYYTQNISATTGSNNLGYIEQHREEFKEIFEKIIDF | | |
| | | SEKYILKNKVNSNLKSSFDEQFAVSDSILLSNSFVSLLKY | | |
| | | TSFGASGGFTFLDLDVKQGRLRYQTVTEVLDATLIYQSIT | | |
| | | GLYETRTDLSQLGGD | | |
| ScaCas9- | Streptococcus | MEKKYSIGLDIGTNSVGWAVITDDYKVPSKKFKVLGNTNR | 3284 | N872A |
| HiFi- | canis | KSIKKNLMGALLFDSGETAEATRLKRTARRRYTRRKNRIR | | |
| Sc++ | | YLQEIFANEMAKLDDSFFQRLEESFLVEEDKKNERHPIFG | | |
| | | NLADEVAYHRNYPTIYHLRKKLADSPEKADLRLIYLALAH | | |
| | | IIKFRGHFLIEGKLNAENSDVAKLFYQLIQTYNQLFEESP | | |
| | | LDEIEVDAKGILSARLSKSKRLEKLIAVFPNEKKNGLFGN | | |
| | | IIALALGLTPNFKSNFDLTEDAKLQLSKDTYDDDLDELLG | | |
| | | QIGDQYADLFSAAKNLSDAILLSDILRSNSEVTKAPLSAS | | |
| | | MVKRYDEHHQDLALLKTLVRQQFPEKYAEIFKDDTKNGYA | | |
| | | GYVGADKKLRKRSGKLATEEEFYKFIKPILEKMDGAEELL | | |
| | | AKLNRDDLLRKQRTFDNGSIPHQIHLKELHAILRRQEEFY | | |
| | | PFLKENREKIEKILTFRIPYYVGPLARGNSRFAWLTRKSE | | |
| | | EAITPWNFEEVVDKGASAQSFIERMTNFDEQLPNKKVLPK | | |
| | | HSLLYEYFTVYNELTKVKYVTERMRKPEFLSGEQKKAIVD | | |
| | | LLFKTNRKVTVKQLKEDYFKKIECFDSVEIIGVEDRFNAS | | |
| | | LGTYHDLLKIIKDKDFLDNEENEDILEDIVLTLTLFEDRE | | |
| | | MIEERLKTYAHLFDDKVMKQLKRRHYTGWGRLSRKMINGI | | |
| | | RDKQSGKTILDFLKSDGFSNANFMQLIHDDSLTFKEEIEK | | |
| | | AQVSGQGDSLHEQIADLAGSPAIKKGILQTVKIVDELVKV | | |
| | | MGHKPENIVIEMARENQTTTKGLQQSRERKKRTEEGIKEL | | |
| | | ESQILKENPVENTQLQNEKLYLYYLQNGRDMYVDQELDIN | | |
| | | RLSDYDVDHIVPQSFIKDDSIDNKVLTRSVENRGKSDNVP | | |
| | | SEEVVKKMKNYWRQLLNAKLITQRKFDNLTKAERGGLSEA | | |
| | | DKAGFIKRQLVETRQITKHVARILDSRMNTKRDKNDKPIR | | |
| | | EVKVITLKSKLVSDFRKDFQLYKVRDINNYHHAHDAYLNA | | |
| | | VVGTALIKKYPKLESEFVYGDYKVYDVRKMIAKSEQEIGK | | |
| | | ATAKRFFYSNIMNFFKTEVKLANGEIRKRPLIETNGETGE | | |
| | | VVWNKEKDFATVRKVLAMPQVNIVKKTEVQTGGFSKESIL | | |
| | | SKRESAKLIPRKKGWDTRKYGGFGSPTVAYSILVVAKVEK | | |
| | | GKAKKLKSVKVLVGITIMEKGSYEKDPIGFLEAKGYKDIK | | |
| | | KELIFKLPKYSLFELENGRRRMLASAKELQKANELVLPQH | | |
| | | LVRLLYYTQNISATTGSNNLGYIEQHREEFKEIFEKIIDF | | |
| | | SEKYILKNKVNSNLKSSFDEQFAVSDSILLSNSFVSLLKY | | |
| | | TSFGASGGFTFLDLDVKQGRLRYQTVTEVLDATLIYQSIT | | |
| | | GLYETRTDLSQLGGD | | |
| SpyCas9- | Streptococcus | MDKKYSIGLDIGTNSVGWAVITDEYKVPSKKFKVLGNTDR | 3285 | N863A |
| 3var- | pyogenes | HSIKKNLIGALLFDSGETAEATRLKRTARRRYTRRKNRIC | | |
| NRRH | | YLQEIFSNEMAKVDDSFFHRLEESFLVEEDKKHERHPIFG | | |
| | | NIVDEVAYHEKYPTIYHLRKKLVDSTDKADLRLIYLALAH | | |
| | | MIKFRGHFLIEGDLNPDNSDVDKLFIQLVQTYNQLFEENP | | |
| | | INASGVDAKAILSARLSKSRRLENLIAQLPGEKKNGLFGN | | |
| | | LIALSLGLTPNFKSNFDLAEDAKLQLSKDTYDDDLDNLLA | | |
| | | QIGDQYADLFLAAKNLSDAILLSDILRVNTEITKAPLSAS | | |
| | | MVKRYDEHHQDLTLLKALVRQQLPEKYKEIFFDQSKNGYA | | |
| | | GYIDGGASQEEFYKFIKPILEKMDGTEELLVKLNREDLLR | | |
| | | KQRTFDNGIIPHQIHLGELHAILRRQGDFYPFLKDNREKI | | |
| | | EKILTFRIPYYVGPLARGNSRFAWMTRKSEETITPWNFEE | | |
| | | VVDKGASAQSFIERMTNFDKNLPNEKVLPKHSLLYEYFTV | | |
| | | YNELTKVKYVTEGMRKPAFLSGEQKKAIVDLLFKTNRKVT | | |
| | | VKQLKEDYFKKIECFDSVEISGVEDRFNASLGTYHDLLKI | | |
| | | IKDKDFLDNEENEDILEDIVLTLTLFEDREMIEERLKTYA | | |
| | | HLFDDKVMKQLKRLRYTGWGRLSRKLINGIRDKQSGKTIL | | |
| | | DFLKSDGFANRNFMQLIHDDSLTFKEDIQKAQVSGQGDSL | | |
| | | HEHIANLAGSPAIKKGILQTVKVVDELVKVMGGHKPENIV | | |
| | | IEMARENQTTQKGQKNSRERMKRIEEGIKELGSQILKEHP | | |
| | | VENTQLQNEKLYLYYLQNGRDMYVDQELDINRLSDYDVDH | | |
| | | IVPQSFLKDDSIDNKVLTRSDKNRGKSDNVPSEEVVKKMK | | |
| | | NYWRQLLNAKLITQRKFDNLTKAERGGLSELDKAGFIKRQ | | |
| | | LVETRQITKHVAQILDSRMNTKYDENDKLIREVKVITLKS | | |
| | | KLVSDFRKDFQFYKVREINNYHHAHDAYLNAVVGTALIKK | | |
| | | YPKLESEFVYGDYKVYDVRKMIAKSEQEIGKATAKYFFYS | | |
| | | NIMNFFKTEITLANGEIRKRPLIETNGETGEIVWDKGRDF | | |
| | | ATVRKVLSMPQVNIVKKTEVQTGGFSKESILPKGNSDKLI | | |
| | | ARKKDWDPKKYGGFNSPTAAYSVLVVAKVEKGKSKKLKSV | | |
| | | KELLGITIMERSSFEKNPIGFLEAKGYKEVKKDLIIKLPK | | |
| | | YSLFELENGRKRMLASAGVLHKGNELALPSKYVNFLYLAS | | |
| | | HYEKLKGSPEDNEQKQLFVEQHKHYLDEIIEQISEFSKRV | | |
| | | ILADANLDKVLSAYNKHRDKPIREQAENIIHLFTLTNLGV | | |
| | | PAAFKYFDTTIDKKRYTSTKEVLDATLIHQSITGLYETRI | | |
| | | DLSQLGGD | | |
| SpyCas9- | Streptococcus | MDKKYSIGLDIGTNSVGWAVITDEYKVPSKKFKVLGNTDR | 3286 | N863A |
| 3var- | pyogenes | HSIKKNLIGALLFDSGETAEATRLKRTARRRYTRRKNRIC | | |
| NRTH | | YLQEIFSNEMAKVDDSFFHRLEESFLVEEDKKHERHPIFG | | |
| | | NIVDEVAYHEKYPTIYHLRKKLVDSTDKADLRLIYLALAH | | |
| | | MIKFRGHFLIEGDLNPDNSDVDKLFIQLVQTYNQLFEENP | | |
| | | INASGVDAKAILSARLSKSRRLENLIAQLPGEKKNGLFGN | | |
| | | LIALSLGLTPNFKSNFDLAEDAKLQLSKDTYDDDLDNLLA | | |
| | | QIGDQYADLFLAAKNLSDAILLSDILRVNTEITKAPLSAS | | |
| | | MVKRYDEHHQDLTLLKALVRQQLPEKYKEIFFDQSKNGYA | | |
| | | GYIDGGASQEEFYKFIKPILEKMDGTEELLVKLNREDLLR | | |
| | | KQRTFDNGIIPHQIHLGELHAILRRQGDFYPFLKDNREKI | | |
| | | EKILTFRIPYYVGPLARGNSRFAWMTRKSEETITPWNFEE | | |
| | | VVDKGASAQSFIERMTNFDKNLPNEKVLPKHSLLYEYFTV | | |
| | | YNELTKVKYVTEGMRKPAFLSGEQKKAIVDLLFKTNRKVT | | |
| | | VKQLKEDYFKKIECFDSVEISGVEDRFNASLGTYHDLLKI | | |
| | | IKDKDFLDNEENEDILEDIVLTLTLFEDREMIEERLKTYA | | |
| | | HLFDDKVMKQLKRLRYTGWGRLSRKLINGIRDKQSGKTIL | | |
| | | DFLKSDGFANRNFMQLIHDDSLTFKEDIQKAQVSGQGDSL | | |
| | | HEHIANLAGSPAIKKGILQTVKVVDELVKVMGGHKPENIV | | |
| | | IEMARENQTTQKGQKNSRERMKRIEEGIKELGSQILKEHP | | |
| | | VENTQLQNEKLYLYYLQNGRDMYVDQELDINRLSDYDVDH | | |
| | | IVPQSFLKDDSIDNKVLTRSDKNRGKSDNVPSEEVVKKMK | | |
| | | NYWRQLLNAKLITQRKFDNLTKAERGGLSELDKAGFIKRQ | | |
| | | LVETRQITKHVAQILDSRMNTKYDENDKLIREVKVITLKS | | |
| | | KLVSDFRKDFQFYKVREINNYHHAHDAYLNAVVGTALIKK | | |
| | | YPKLESEFVYGDYKVYDVRKMIAKSEQEIGKATAKYFFYS | | |
| | | NIMNFFKTEITLANGEIRKRPLIETNGETGEIVWDKGRDF | | |
| | | ATVRKVLSMPQVNIVKKTEVQTGGFSKESILPKGNSDKLI | | |
| | | ARKKDWDPKKYGGFNSPTVAYSVLVVAKVEKGKSKKLKSV | | |
| | | KELLGITIMERSSFEKNPIGFLEAKGYKEVKKDLIIKLPK | | |
| | | YSLFELENGRKRMLASASVLHKGNELALPSKYVNFLYLAS | | |
| | | HYEKLKGSSEDNKQKQLFVEQHKHYLDEIIEQISEFSKRV | | |
| | | ILADANLDKVLSAYNKHRDKPIREQAENIIHLFTLTNLGA | | |
| | | SAAFKYFDTTIGRKLYTSTKEVLDATLIHQSITGLYETRI | | |
| | | DLSQLGGD | | |
| SpyCas9- | Streptococcus | MDKKYSIGLDIGTNSVGWAVITDEYKVPSKKFKVLGNTDR | 3287 | N863A |
| 3var- | pyogenes | HSIKKNLIGALLFDSGETAEATRLKRTARRRYTRRKNRIC | | |
| NRCH | | YLQEIFSNEMAKVDDSFFHRLEESFLVEEDKKHERHPIFG | | |
| | | NIVDEVAYHEKYPTIYHLRKKLVDSTDKADLRLIYLALAH | | |
| | | MIKFRGHFLIEGDLNPDNSDVDKLFIQLVQTYNQLFEENP | | |
| | | INASGVDAKAILSARLSKSRRLENLIAQLPGEKKNGLFGN | | |
| | | LIALSLGLTPNFKSNFDLAEDAKLQLSKDTYDDDLDNLLA | | |
| | | QIGDQYADLFLAAKNLSDAILLSDILRVNTEITKAPLSAS | | |
| | | MVKRYDEHHQDLTLLKALVRQQLPEKYKEIFFDQSKNGYA | | |
| | | GYIDGGASQEEFYKFIKPILEKMDGTEELLVKLNREDLLR | | |
| | | KQRTFDNGIIPHQIHLGELHAILRRQGDFYPFLKDNREKI | | |
| | | EKILTFRIPYYVGPLARGNSRFAWMTRKSEETITPWNFEE | | |
| | | VVDKGASAQSFIERMTNFDKNLPNEKVLPKHSLLYEYFTV | | |
| | | YNELTKVKYVTEGMRKPAFLSGEQKKAIVDLLFKTNRKVT | | |
| | | VKQLKEDYFKKIECFDSVEISGVEDRFNASLGTYHDLLKI | | |
| | | IKDKDFLDNEENEDILEDIVLTLTLFEDREMIEERLKTYA | | |
| | | HLFDDKVMKQLKRLRYTGWGRLSRKLINGIRDKQSGKTIL | | |
| | | DFLKSDGFANRNFMQLIHDDSLTFKEDIQKAQVSGQGDSL | | |
| | | HEHIANLAGSPAIKKGILQTVKVVDELVKVMGGHKPENIV | | |
| | | IEMARENQTTQKGQKNSRERMKRIEEGIKELGSQILKEHP | | |
| | | VENTQLQNEKLYLYYLQNGRDMYVDQELDINRLSDYDVDH | | |
| | | IVPQSFLKDDSIDNKVLTRSDKNRGKSDNVPSEEVVKKMK | | |
| | | NYWRQLLNAKLITQRKFDNLTKAERGGLSELDKAGFIKRQ | | |
| | | LVETRQITKHVAQILDSRMNTKYDENDKLIREVKVITLKS | | |
| | | KLVSDFRKDFQFYKVREINNYHHAHDAYLNAVVGTALIKK | | |
| | | YPKLESEFVYGDYKVYDVRKMIAKSEQEIGKATAKYFFYS | | |
| | | NIMNFFKTEITLANGEIRKRPLIETNGETGEIVWDKGRDF | | |
| | | ATVRKVLSMPQVNIVKKTEVQTGGFSKESILPKGNSDKLI | | |
| | | ARKKDWDPKKYGGFNSPTVAYSVLVVAKVEKGKSKKLKSV | | |
| | | KELLGITIMERSSFEKNPIDFLEAKGYKEVKKDLIIKLPK | | |
| | | YSLFELENGRKRMLASAGVLQKGNELALPSKYVNFLYLAS | | |
| | | HYEKLKGSPEDNEQKQLFVEQHKHYLDEIIEQISEFSKRV | | |
| | | ILADANLDKVLSAYNKHRDKPIREQAENIIHLFTLTNLGA | | |
| | | PAAFKYFDTTINRKQYNTTKEVLDATLIRQSITGLYETRI | | |
| | | DLSQLGGD | | |
| SpyCas9- | Streptococcus | MDKKYSIGLDIGTNSVGWAVITDEYKVPSKKFKVLGNTDR | 3269 | N863A |
| HF1 | pyogenes | HSIKKNLIGALLFDSGETAEATRLKRTARRRYTRRKNRIC | | |
| | | YLQEIFSNEMAKVDDSFFHRLEESFLVEEDKKHERHPIFG | | |
| | | NIVDEVAYHEKYPTIYHLRKKLVDSTDKADLRLIYLALAH | | |
| | | MIKFRGHFLIEGDLNPDNSDVDKLFIQLVQTYNQLFEENP | | |
| | | INASGVDAKAILSARLSKSRRLENLIAQLPGEKKNGLFGN | | |
| | | LIALSLGLTPNFKSNFDLAEDAKLQLSKDTYDDDLDNLLA | | |
| | | QIGDQYADLFLAAKNLSDAILLSDILRVNTEITKAPLSAS | | |
| | | MIKRYDEHHQDLTLLKALVRQQLPEKYKEIFFDQSKNGYA | | |
| | | GYIDGGASQEEFYKFIKPILEKMDGTEELLVKLNREDLLR | | |
| | | KQRTFDNGSIPHQIHLGELHAILRRQEDFYPFLKDNREKI | | |
| | | EKILTFRIPYYVGPLARGNSRFAWMTRKSEETITPWNFEE | | |
| | | VVDKGASAQSFIERMTNFDKNLPNEKVLPKHSLLYEYFTV | | |
| | | YNELTKVKYVTEGMRKPAFLSGEQKKAIVDLLFKTNRKVT | | |
| | | VKQLKEDYFKKIECFDSVEISGVEDRFNASLGTYHDLLKI | | |
| | | IKDKDFLDNEENEDILEDIVLTLTLFEDREMIEERLKTYA | | |
| | | HLFDDKVMKQLKRRRYTGWGRLSRKLINGIRDKQSGKTIL | | |
| | | DFLKSDGFANRNFMQLIHDDSLTFKEDIQKAQVSGQGDSL | | |
| | | HEHIANLAGSPAIKKGILQTVKVVDELVKVMGRHKPENIV | | |
| | | IEMARENQTTQKGQKNSRERMKRIEEGIKELGSQILKEHP | | |
| | | VENTQLQNEKLYLYYLQNGRDMYVDQELDINRLSDYDVDH | | |
| | | IVPQSFLKDDSIDNKVLTRSDKNRGKSDNVPSEEVVKKMK | | |
| | | NYWRQLLNAKLITQRKFDNLTKAERGGLSELDKAGFIKRQ | | |
| | | LVETRQITKHVAQILDSRMNTKYDENDKLIREVKVITLKS | | |
| | | KLVSDFRKDFQFYKVREINNYHHAHDAYLNAVVGTALIKK | | |
| | | YPKLESEFVYGDYKVYDVRKMIAKSEQEIGKATAKYFFYS | | |
| | | NIMNFFKTEITLANGEIRKRPLIETNGETGEIVWDKGRDF | | |
| | | ATVRKVLSMPQVNIVKKTEVQTGGFSKESILPKRNSDKLI | | |
| | | ARKKDWDPKKYGGFDSPTVAYSVLVVAKVEKGKSKKLKSV | | |
| | | KELLGITIMERSSFEKNPIDFLEAKGYKEVKKDLIIKLPK | | |
| | | YSLFELENGRKRMLASAGELQKGNELALPSKYVNFLYLAS | | |
| | | HYEKLKGSPEDNEQKQLFVEQHKHYLDEIIEQISEFSKRV | | |
| | | ILADANLDKVLSAYNKHRDKPIREQAENIIHLFTLTNLGA | | |
| | | PAAFKYFDTTIDRKRYTSTKEVLDATLIHQSITGLYETRI | | |
| | | DLSQLGGD | | |
| SpyCas9- | Streptococcus | MDKKYSIGLDIGTNSVGWAVITDEYKVPSKKFKVLGNTDR | 3288 | N863A |
| QQR1 | pyogenes | HSIKKNLIGALLFDSGETAEATRLKRTARRRYTRRKNRIC | | |
| | | YLQEIFSNEMAKVDDSFFHRLEESFLVEEDKKHERHPIFG | | |
| | | NIVDEVAYHEKYPTIYHLRKKLVDSTDKADLRLIYLALAH | | |
| | | MIKFRGHFLIEGDLNPDNSDVDKLFIQLVQTYNQLFEENP | | |
| | | INASGVDAKAILSARLSKSRRLENLIAQLPGEKKNGLFGN | | |
| | | LIALSLGLTPNFKSNFDLAEDAKLQLSKDTYDDDLDNLLA | | |
| | | QIGDQYADLFLAAKNLSDAILLSDILRVNTEITKAPLSAS | | |
| | | MIKRYDEHHQDLTLLKALVRQQLPEKYKEIFFDQSKNGYA | | |
| | | GYIDGGASQEEFYKFIKPILEKMDGTEELLVKLNREDLLR | | |
| | | KQRTFDNGSIPHQIHLGELHAILRRQEDFYPFLKDNREKI | | |
| | | EKILTFRIPYYVGPLARGNSRFAWMTRKSEETITPWNFEE | | |
| | | VVDKGASAQSFIERMTNFDKNLPNEKVLPKHSLLYEYFTV | | |
| | | YNELTKVKYVTEGMRKPAFLSGEQKKAIVDLLFKTNRKVT | | |
| | | VKQLKEDYFKKIECFDSVEISGVEDRFNASLGTYHDLLKI | | |
| | | IKDKDFLDNEENEDILEDIVLTLTLFEDREMIEERLKTYA | | |
| | | HLFDDKVMKQLKRRRYTGWGRLSRKLINGIRDKQSGKTIL | | |
| | | DFLKSDGFANRNFMQLIHDDSLTFKEDIQKAQVSGQGDSL | | |
| | | HEHIANLAGSPAIKKGILQTVKVVDELVKVMGRHKPENIV | | |
| | | IEMARENQTTQKGQKNSRERMKRIEEGIKELGSQILKEHP | | |
| | | VENTQLQNEKLYLYYLQNGRDMYVDQELDINRLSDYDVDH | | |
| | | IVPQSFLKDDSIDNKVLTRSDKNRGKSDNVPSEEVVKKMK | | |
| | | NYWRQLLNAKLITQRKFDNLTKAERGGLSELDKAGFIKRQ | | |
| | | LVETRQITKHVAQILDSRMNTKYDENDKLIREVKVITLKS | | |
| | | KLVSDFRKDFQFYKVREINNYHHAHDAYLNAVVGTALIKK | | |
| | | YPKLESEFVYGDYKVYDVRKMIAKSEQEIGKATAKYFFYS | | |
| | | NIMNFFKTEITLANGEIRKRPLIETNGETGEIVWDKGRDF | | |
| | | ATVRKVLSMPQVNIVKKTEVQTGGFSKESILPKRNSDKLI | | |
| | | ARKKDWDPKKYGGFDSPTVAYSVLVVAKVEKGKSKKLKSV | | |
| | | KELLGITIMERSSFEKNPIDFLEAKGYKEVKKDLIIKLPK | | |
| | | YSLFELENGRKRMLASARELQKGNELALPSKYVNFLYLAS | | |
| | | HYEKLKGSPEDNEQKQLFVEQHKHYLDEIIEQISEFSKRV | | |
| | | ILADAQLDKVLSAYNKHRDKPIREQAENIIHLFTLTNLGA | | |
| | | PAAFKYFDTTFKQKQYRSTKEVLDATLIHQSITGLYETRI | | |
| | | DLSQLGGD | | |
| SpyCas9- | Streptococcus | MDKKYSIGLDIGTNSVGWAVITDEYKVPSKKFKVLGNTDR | 3289 | N863A |
| SpG | pyogenes | HSIKKNLIGALLFDSGETAEATRLKRTARRRYTRRKNRIC | | |
| | | YLQEIFSNEMAKVDDSFFHRLEESFLVEEDKKHERHPIFG | | |
| | | NIVDEVAYHEKYPTIYHLRKKLVDSTDKADLRLIYLALAH | | |
| | | MIKFRGHFLIEGDLNPDNSDVDKLFIQLVQTYNQLFEENP | | |
| | | INASGVDAKAILSARLSKSRRLENLIAQLPGEKKNGLFGN | | |
| | | LIALSLGLTPNFKSNFDLAEDAKLQLSKDTYDDDLDNLLA | | |
| | | QIGDQYADLFLAAKNLSDAILLSDILRVNTEITKAPLSAS | | |
| | | MIKRYDEHHQDLTLLKALVRQQLPEKYKEIFFDQSKNGYA | | |
| | | GYIDGGASQEEFYKFIKPILEKMDGTEELLVKLNREDLLR | | |
| | | KQRTFDNGSIPHQIHLGELHAILRRQEDFYPFLKDNREKI | | |
| | | EKILTFRIPYYVGPLARGNSRFAWMTRKSEETITPWNFEE | | |
| | | VVDKGASAQSFIERMTNFDKNLPNEKVLPKHSLLYEYFTV | | |
| | | YNELTKVKYVTEGMRKPAFLSGEQKKAIVDLLFKTNRKVT | | |
| | | VKQLKEDYFKKIECFDSVEISGVEDRFNASLGTYHDLLKI | | |
| | | IKDKDFLDNEENEDILEDIVLTLTLFEDREMIEERLKTYA | | |
| | | HLFDDKVMKQLKRRRYTGWGRLSRKLINGIRDKQSGKTIL | | |
| | | DFLKSDGFANRNFMQLIHDDSLTFKEDIQKAQVSGQGDSL | | |
| | | HEHIANLAGSPAIKKGILQTVKVVDELVKVMGRHKPENIV | | |
| | | IEMARENQTTQKGQKNSRERMKRIEEGIKELGSQILKEHP | | |
| | | VENTQLQNEKLYLYYLQNGRDMYVDQELDINRLSDYDVDH | | |
| | | IVPQSFLKDDSIDNKVLTRSDKNRGKSDNVPSEEVVKKMK | | |
| | | NYWRQLLNAKLITQRKFDNLTKAERGGLSELDKAGFIKRQ | | |
| | | LVETRQITKHVAQILDSRMNTKYDENDKLIREVKVITLKS | | |
| | | KLVSDFRKDFQFYKVREINNYHHAHDAYLNAVVGTALIKK | | |
| | | YPKLESEFVYGDYKVYDVRKMIAKSEQEIGKATAKYFFYS | | |
| | | NIMNFFKTEITLANGEIRKRPLIETNGETGEIVWDKGRDF | | |
| | | ATVRKVLSMPQVNIVKKTEVQTGGFSKESILPKRNSDKLI | | |
| | | ARKKDWDPKKYGGFLWPTVAYSVLVVAKVEKGKSKKLKSV | | |
| | | KELLGITIMERSSFEKNPIDFLEAKGYKEVKKDLIIKLPK | | |
| | | YSLFELENGRKRMLASAKQLQKGNELALPSKYVNFLYLAS | | |
| | | HYEKLKGSPEDNEQKQLFVEQHKHYLDEIIEQISEFSKRV | | |
| | | ILADANLDKVLSAYNKHRDKPIREQAENIIHLFTLTNLGA | | |
| | | PAAFKYFDTTIDRKQYRSTKEVLDATLIHQSITGLYETRI | | |
| | | DLSQLGGD | | |
| SpyCas9- | Streptococcus | MDKKYSIGLDIGTNSVGWAVITDEYKVPSKKFKVLGNTDR | 3290 | N863A |
| VOR | pyogenes | HSIKKNLIGALLFDSGETAEATRLKRTARRRYTRRKNRIC | | |
| | | YLQEIFSNEMAKVDDSFFHRLEESFLVEEDKKHERHPIFG | | |
| | | NIVDEVAYHEKYPTIYHLRKKLVDSTDKADLRLIYLALAH | | |
| | | MIKFRGHFLIEGDLNPDNSDVDKLFIQLVQTYNQLFEENP | | |
| | | INASGVDAKAILSARLSKSRRLENLIAQLPGEKKNGLFGN | | |
| | | LIALSLGLTPNFKSNFDLAEDAKLQLSKDTYDDDLDNLLA | | |
| | | QIGDQYADLFLAAKNLSDAILLSDILRVNTEITKAPLSAS | | |
| | | MIKRYDEHHQDLTLLKALVRQQLPEKYKEIFFDQSKNGYA | | |
| | | GYIDGGASQEEFYKFIKPILEKMDGTEELLVKLNREDLLR | | |
| | | KQRTFDNGSIPHQIHLGELHAILRRQEDFYPFLKDNREKI | | |
| | | EKILTFRIPYYVGPLARGNSRFAWMTRKSEETITPWNFEE | | |
| | | VVDKGASAQSFIERMTNFDKNLPNEKVLPKHSLLYEYFTV | | |
| | | YNELTKVKYVTEGMRKPAFLSGEQKKAIVDLLFKTNRKVT | | |
| | | VKQLKEDYFKKIECFDSVEISGVEDRFNASLGTYHDLLKI | | |
| | | IKDKDFLDNEENEDILEDIVLTLTLFEDREMIEERLKTYA | | |
| | | HLFDDKVMKQLKRRRYTGWGRLSRKLINGIRDKQSGKTIL | | |
| | | DFLKSDGFANRNFMQLIHDDSLTFKEDIQKAQVSGQGDSL | | |
| | | HEHIANLAGSPAIKKGILQTVKVVDELVKVMGRHKPENIV | | |
| | | IEMARENQTTQKGQKNSRERMKRIEEGIKELGSQILKEHP | | |
| | | VENTQLQNEKLYLYYLQNGRDMYVDQELDINRLSDYDVDH | | |
| | | IVPQSFLKDDSIDNKVLTRSDKNRGKSDNVPSEEVVKKMK | | |
| | | NYWRQLLNAKLITQRKFDNLTKAERGGLSELDKAGFIKRQ | | |
| | | LVETRQITKHVAQILDSRMNTKYDENDKLIREVKVITLKS | | |
| | | KLVSDFRKDFQFYKVREINNYHHAHDAYLNAVVGTALIKK | | |
| | | YPKLESEFVYGDYKVYDVRKMIAKSEQEIGKATAKYFFYS | | |
| | | NIMNFFKTEITLANGEIRKRPLIETNGETGEIVWDKGRDF | | |
| | | ATVRKVLSMPQVNIVKKTEVQTGGFSKESILPKRNSDKLI | | |
| | | ARKKDWDPKKYGGFVSPTVAYSVLVVAKVEKGKSKKLKSV | | |
| | | KELLGITIMERSSFEKNPIDFLEAKGYKEVKKDLIIKLPK | | |
| | | YSLFELENGRKRMLASAGELQKGNELALPSKYVNFLYLAS | | |
| | | HYEKLKGSPEDNEQKQLFVEQHKHYLDEIIEQISEFSKRV | | |
| | | ILADANLDKVLSAYNKHRDKPIREQAENIIHLFTLTNLGA | | |
| | | PAAFKYFDTTIDRKQYRSTKEVLDATLIHQSITGLYETRI | | |
| | | DLSQLGGD | | |
| SpyCas9- | Streptococcus | MDKKYSIGLDIGTNSVGWAVITDEYKVPSKKFKVLGNTDR | 3291 | N863A |
| VRER | pyogenes | HSIKKNLIGALLFDSGETAEATRLKRTARRRYTRRKNRIC | | |
| | | YLQEIFSNEMAKVDDSFFHRLEESFLVEEDKKHERHPIFG | | |
| | | NIVDEVAYHEKYPTIYHLRKKLVDSTDKADLRLIYLALAH | | |
| | | MIKFRGHFLIEGDLNPDNSDVDKLFIQLVQTYNQLFEENP | | |
| | | INASGVDAKAILSARLSKSRRLENLIAQLPGEKKNGLFGN | | |
| | | LIALSLGLTPNFKSNFDLAEDAKLQLSKDTYDDDLDNLLA | | |
| | | QIGDQYADLFLAAKNLSDAILLSDILRVNTEITKAPLSAS | | |
| | | MIKRYDEHHQDLTLLKALVRQQLPEKYKEIFFDQSKNGYA | | |
| | | GYIDGGASQEEFYKFIKPILEKMDGTEELLVKLNREDLLR | | |
| | | KQRTFDNGSIPHQIHLGELHAILRRQEDFYPFLKDNREKI | | |
| | | EKILTFRIPYYVGPLARGNSRFAWMTRKSEETITPWNFEE | | |
| | | VVDKGASAQSFIERMTNFDKNLPNEKVLPKHSLLYEYFTV | | |
| | | YNELTKVKYVTEGMRKPAFLSGEQKKAIVDLLFKTNRKVT | | |
| | | VKQLKEDYFKKIECFDSVEISGVEDRFNASLGTYHDLLKI | | |
| | | IKDKDFLDNEENEDILEDIVLTLTLFEDREMIEERLKTYA | | |
| | | HLFDDKVMKQLKRRRYTGWGRLSRKLINGIRDKQSGKTIL | | |
| | | DFLKSDGFANRNFMQLIHDDSLTFKEDIQKAQVSGQGDSL | | |
| | | HEHIANLAGSPAIKKGILQTVKVVDELVKVMGRHKPENIV | | |
| | | IEMARENQTTQKGQKNSRERMKRIEEGIKELGSQILKEHP | | |
| | | VENTQLQNEKLYLYYLQNGRDMYVDQELDINRLSDYDVDH | | |
| | | IVPQSFLKDDSIDNKVLTRSDKNRGKSDNVPSEEVVKKMK | | |
| | | NYWRQLLNAKLITQRKFDNLTKAERGGLSELDKAGFIKRQ | | |
| | | LVETRQITKHVAQILDSRMNTKYDENDKLIREVKVITLKS | | |
| | | KLVSDFRKDFQFYKVREINNYHHAHDAYLNAVVGTALIKK | | |
| | | YPKLESEFVYGDYKVYDVRKMIAKSEQEIGKATAKYFFYS | | |
| | | NIMNFFKTEITLANGEIRKRPLIETNGETGEIVWDKGRDF | | |
| | | ATVRKVLSMPQVNIVKKTEVQTGGFSKESILPKRNSDKLI | | |
| | | ARKKDWDPKKYGGFVSPTVAYSVLVVAKVEKGKSKKLKSV | | |
| | | KELLGITIMERSSFEKNPIDFLEAKGYKEVKKDLIIKLPK | | |
| | | YSLFELENGRKRMLASARELQKGNELALPSKYVNFLYLAS | | |
| | | HYEKLKGSPEDNEQKQLFVEQHKHYLDEIIEQISEFSKRV | | |
| | | ILADANLDKVLSAYNKHRDKPIREQAENIIHLFTLTNLGA | | |
| | | PAAFKYFDTTIDRKEYRSTKEVLDATLIHQSITGLYETRI | | |
| | | DLSQLGGD | | |
| SpyCas9- | Streptococcus | MDKKYSIGLDIGTNSVGWAVITDEYKVPSKKFKVLGNTDR | 3292 | N863A |
| xCas | pyogenes | HSIKKNLIGALLFDSGETAEATRLKRTARRRYTRRKNRIC | | |
| | | YLQEIFSNEMAKVDDSFFHRLEESFLVEEDKKHERHPIFG | | |
| | | NIVDEVAYHEKYPTIYHLRKKLVDSTDKADLRLIYLALAH | | |
| | | MIKFRGHFLIEGDLNPDNSDVDKLFIQLVQTYNQLFEENP | | |
| | | INASGVDAKAILSARLSKSRRLENLIAQLPGEKKNGLFGN | | |
| | | LIALSLGLTPNFKSNFDLAEDTKLQLSKDTYDDDLDNLLA | | |
| | | QIGDQYADLFLAAKNLSDAILLSDILRVNTEITKAPLSAS | | |
| | | MIKLYDEHHQDLTLLKALVRQQLPEKYKEIFFDQSKNGYA | | |
| | | GYIDGGASQEEFYKFIKPILEKMDGTEELLVKLNREDLLR | | |
| | | KQRTFDNGIIPHQIHLGELHAILRRQEDFYPFLKDNREKI | | |
| | | EKILTFRIPYYVGPLARGNSRFAWMTRKSEETITPWNFEK | | |
| | | VVDKGASAQSFIERMTNFDKNLPNEKVLPKHSLLYEYFTV | | |
| | | YNELTKVKYVTEGMRKPAFLSGDQKKAIVDLLFKTNRKVT | | |
| | | VKQLKEDYFKKIECFDSVEISGVEDRFNASLGTYHDLLKI | | |
| | | IKDKDFLDNEENEDILEDIVLTLTLFEDREMIEERLKTYA | | |
| | | HLFDDKVMKQLKRRRYTGWGRLSRKLINGIRDKQSGKTIL | | |
| | | DFLKSDGFANRNFIQLIHDDSLTFKEDIQKAQVSGQGDSL | | |
| | | HEHIANLAGSPAIKKGILQTVKVVDELVKVMGRHKPENIV | | |
| | | IEMARENQTTQKGQKNSRERMKRIEEGIKELGSQILKEHP | | |
| | | VENTQLQNEKLYLYYLQNGRDMYVDQELDINRLSDYDVDH | | |
| | | IVPQSFLKDDSIDNKVLTRSDKNRGKSDNVPSEEVVKKMK | | |
| | | NYWRQLLNAKLITQRKFDNLTKAERGGLSELDKAGFIKRQ | | |
| | | LVETRQITKHVAQILDSRMNTKYDENDKLIREVKVITLKS | | |
| | | KLVSDFRKDFQFYKVREINNYHHAHDAYLNAVVGTALIKK | | |
| | | YPKLESEFVYGDYKVYDVRKMIAKSEQEIGKATAKYFFYS | | |
| | | NIMNFFKTEITLANGEIRKRPLIETNGETGEIVWDKGRDF | | |
| | | ATVRKVLSMPQVNIVKKTEVQTGGFSKESILPKRNSDKLI | | |
| | | ARKKDWDPKKYGGFDSPTVAYSVLVVAKVEKGKSKKLKSV | | |
| | | KELLGITIMERSSFEKNPIDFLEAKGYKEVKKDLIIKLPK | | |
| | | YSLFELENGRKRMLASAGVLQKGNELALPSKYVNFLYLAS | | |
| | | HYEKLKGSPEDNEQKQLFVEQHKHYLDEIIEQISEFSKRV | | |
| | | ILADANLDKVLSAYNKHRDKPIREQAENIIHLFTLTNLGA | | |
| | | PAAFKYFDTTIDRKRYTSTKEVLDATLIHQSITGLYETRI | | |
| | | DLSQLGGD | | |
| SpyCas9- | Streptococcus | MDKKYSIGLDIGTNSVGWAVITDEYKVPSKKFKVLGNTDR | 3293 | N863A |
| xCas-NG | pyogenes | HSIKKNLIGALLFDSGETAEATRLKRTARRRYTRRKNRIC | | |
| | | YLQEIFSNEMAKVDDSFFHRLEESFLVEEDKKHERHPIFG | | |
| | | NIVDEVAYHEKYPTIYHLRKKLVDSTDKADLRLIYLALAH | | |
| | | MIKFRGHFLIEGDLNPDNSDVDKLFIQLVQTYNQLFEENP | | |
| | | INASGVDAKAILSARLSKSRRLENLIAQLPGEKKNGLFGN | | |
| | | LIALSLGLTPNFKSNFDLAEDTKLQLSKDTYDDDLDNLLA | | |
| | | QIGDQYADLFLAAKNLSDAILLSDILRVNTEITKAPLSAS | | |
| | | MIKLYDEHHQDLTLLKALVRQQLPEKYKEIFFDQSKNGYA | | |
| | | GYIDGGASQEEFYKFIKPILEKMDGTEELLVKLNREDLLR | | |
| | | KQRTFDNGIIPHQIHLGELHAILRRQEDFYPFLKDNREKI | | |
| | | EKILTFRIPYYVGPLARGNSRFAWMTRKSEETITPWNFEK | | |
| | | VVDKGASAQSFIERMTNFDKNLPNEKVLPKHSLLYEYFTV | | |
| | | YNELTKVKYVTEGMRKPAFLSGDQKKAIVDLLFKTNRKVT | | |
| | | VKQLKEDYFKKIECFDSVEISGVEDRFNASLGTYHDLLKI | | |
| | | IKDKDFLDNEENEDILEDIVLTLTLFEDREMIEERLKTYA | | |
| | | HLFDDKVMKQLKRRRYTGWGRLSRKLINGIRDKQSGKTIL | | |
| | | DFLKSDGFANRNFIQLIHDDSLTFKEDIQKAQVSGQGDSL | | |
| | | HEHIANLAGSPAIKKGILQTVKVVDELVKVMGRHKPENIV | | |
| | | IEMARENQTTQKGQKNSRERMKRIEEGIKELGSQILKEHP | | |
| | | VENTQLQNEKLYLYYLQNGRDMYVDQELDINRLSDYDVDH | | |
| | | IVPQSFLKDDSIDNKVLTRSDKNRGKSDNVPSEEVVKKMK | | |
| | | NYWRQLLNAKLITQRKFDNLTKAERGGLSELDKAGFIKRQ | | |
| | | LVETRQITKHVAQILDSRMNTKYDENDKLIREVKVITLKS | | |
| | | KLVSDFRKDFQFYKVREINNYHHAHDAYLNAVVGTALIKK | | |
| | | YPKLESEFVYGDYKVYDVRKMIAKSEQEIGKATAKYFFYS | | |
| | | NIMNFFKTEITLANGEIRKRPLIETNGETGEIVWDKGRDF | | |
| | | ATVRKVLSMPQVNIVKKTEVQTGGFSKESIRPKRNSDKLI | | |
| | | ARKKDWDPKKYGGFVSPTVAYSVLVVAKVEKGKSKKLKSV | | |
| | | KELLGITIMERSSFEKNPIDFLEAKGYKEVKKDLIIKLPK | | |
| | | YSLFELENGRKRMLASARFLQKGNELALPSKYVNFLYLAS | | |
| | | HYEKLKGSPEDNEQKQLFVEQHKHYLDEIIEQISEFSKRV | | |
| | | ILADANLDKVLSAYNKHRDKPIREQAENIIHLFTLTNLGA | | |
| | | PRAFKYFDTTIDRKVYRSTKEVLDATLIHQSITGLYETRI | | |
| | | DLSQLGGD | | |
| St1Cas9- | Streptococcus | MSDLVLGLDIGIGSVGVGILNKVTGEIIHKNSRIFPAAQA | 3294 | N622A |
| CNRZ1066 | thermophilus | ENNLVRRTNRQGRRLARRKKHRRVRLNRLFEESGLITDFT | | |
| | | KISINLNPYQLRVKGLTDELSNEELFIALKNMVKHRGISY | | |
| | | LDDASDDGNSSVGDYAQIVKENSKQLETKTPGQIQLERYQ | | |
| | | TYGQLRGDFTVEKDGKKHRLINVFPTSAYRSEALRILQTQ | | |
| | | QEFNPQITDEFINRYLEILTGKRKYYHGPGNEKSRTDYGR | | |
| | | YRTSGETLDNIFGILIGKCTFYPDEFRAAKASYTAQEFNL | | |
| | | LNDLNNLTVPTETKKLSKEQKNQIINYVKNEKAMGPAKLF | | |
| | | KYIAKLLSCDVADIKGYRIDKSGKAEIHTFEAYRKMKTLE | | |
| | | TLDIEQMDRETLDKLAYVLTLNTEREGIQEALEHEFADGS | | |
| | | FSQKQVDELVQFRKANSSIFGKGWHNFSVKLMMELIPELY | | |
| | | ETSEEQMTILTRLGKQKTTSSSNKTKYIDEKLLTEEIYNP | | |
| | | VVAKSVRQAIKIVNAAIKEYGDFDNIVIEMARETNEDDEK | | |
| | | KAIQKIQKANKDEKDAAMLKAANQYNGKAELPHSVFHGHK | | |
| | | QLATKIRLWHQQGERCLYTGKTISIHDLINNSNQFEVDHI | | |
| | | LPLSITFDDSLANKVLVYATANQEKGQRTPYQALDSMDDA | | |
| | | WSFRELKAFVRESKTLSNKKKEYLLTEEDISKFDVRKKFI | | |
| | | ERNLVDTRYASRVVLNALQEHFRAHKIDTKVSVVRGQFTS | | |
| | | QLRRHWGIEKTRDTYHHHAVDALIIAASSQLNLWKKQKNT | | |
| | | LVSYSEEQLLDIETGELISDDEYKESVFKAPYQHFVDTLK | | |
| | | SKEFEDSILFSYQVDSKFNRKISDATIYATRQAKVGKDKK | | |
| | | DETYVLGKIKDIYTQDGYDAFMKIYKKDKSKFLMYRHDPQ | | |
| | | TFEKVIEPILENYPNKQMNEKGKEVPCNPFLKYKEEHGYI | | |
| | | RKYSKKGNGPEIKSLKYYDSKLLGNPIDITPENSKNKVVL | | |
| | | QSLKPWRTDVYFNKATGKYEILGLKYADLQFEKGTGTYKI | | |
| | | SQEKYNDIKKKEGVDSDSEFKFTLYKNDLLLVKDTETKEQ | | |
| | | QLFRFLSRTLPKQKHYVELKPYDKQKFEGGEALIKVLGNV | | |
| | | ANGGQCIKGLAKSNISIYKVRTDVLGNQHIIKNEGDKPKL | | |
| | | DF | | |
| St1Cas9- | Streptococcus | MSDLVLGLDIGIGSVGVGILNKVTGEIIHKNSRIFPAAQA | 3295 | N622A |
| LMG1831 | thermophilus | ENNLVRRTNRQGRRLARRKKHRRVRLNRLFEESGLITDFT | | |
| | | KISINLNPYQLRVKGLTDELSNEELFIALKNMVKHRGISY | | |
| | | LDDASDDGNSSVGDYAQIVKENSKQLETKTPGQIQLERYQ | | |
| | | TYGQLRGDFTVEKDGKKHRLINVFPTSAYRSEALRILQTQ | | |
| | | QEFNPQITDEFINRYLEILTGKRKYYHGPGNEKSRTDYGR | | |
| | | YRTSGETLDNIFGILIGKCTFYPDEFRAAKASYTAQEFNL | | |
| | | LNDLNNLTVPTETKKLSKEQKNQIINYVKNEKAMGPAKLF | | |
| | | KYIAKLLSCDVADIKGYRIDKSGKAEIHTFEAYRKMKTLE | | |
| | | TLDIEQMDRETLDKLAYVLTLNTEREGIQEALEHEFADGS | | |
| | | FSQKQVDELVQFRKANSSIFGKGWHNFSVKLMMELIPELY | | |
| | | ETSEEQMTILTRLGKQKTTSSSNKTKYIDEKLLTEEIYNP | | |
| | | VVAKSVRQAIKIVNAAIKEYGDFDNIVIEMARETNEDDEK | | |
| | | KAIQKIQKANKDEKDAAMLKAANQYNGKAELPHSVFHGHK | | |
| | | QLATKIRLWHQQGERCLYTGKTISIHDLINNSNQFEVDHI | | |
| | | LPLSITFDDSLANKVLVYATANQEKGQRTPYQALDSMDDA | | |
| | | WSFRELKAFVRESKTLSNKKKEYLLTEEDISKFDVRKKFI | | |
| | | ERNLVDTRYASRVVLNALQEHFRAHKIDTKVSVVRGQFTS | | |
| | | QLRRHWGIEKTRDTYHHHAVDALIIAASSQLNLWKKQKNT | | |
| | | LVSYSEEQLLDIETGELISDDEYKESVFKAPYQHFVDTLK | | |
| | | SKEFEDSILFSYQVDSKFNRKISDATIYATRQAKVGKDKK | | |
| | | DETYVLGKIKDIYTQDGYDAFMKIYKKDKSKFLMYRHDPQ | | |
| | | TFEKVIEPILENYPNKQMNEKGKEVPCNPFLKYKEEHGYI | | |
| | | RKYSKKGNGPEIKSLKYYDSKLLGNPIDITPENSKNKVVL | | |
| | | QSLKPWRTDVYFNKNTGKYEILGLKYADLQFEKKTGTYKI | | |
| | | SQEKYNGIMKEEGVDSDSEFKFTLYKNDLLLVKDTETKEQ | | |
| | | QLFRFLSRTMPNVKYYVELKPYSKDKFEKNESLIEILGSA | | |
| | | DKSGRCIKGLGKSNISIYKVRTDVLGNQHIIKNEGDKPKL | | |
| | | DF | | |
| St1Cas9- | Streptococcus | MSDLVLGLDIGIGSVGVGILNKVTGEIIHKNSRIFPAAQA | 3296 | N622A |
| MTH17CL396 | thermophilus | ENNLVRRTNRQGRRLARRKKHRRVRLNRLFEESGLITDFT | | |
| | | KISINLNPYQLRVKGLTDELSNEELFIALKNMVKHRGISY | | |
| | | LDDASDDGNSSVGDYAQIVKENSKQLETKTPGQIQLERYQ | | |
| | | TYGQLRGDFTVEKDGKKHRLINVFPTSAYRSEALRILQTQ | | |
| | | QEFNPQITDEFINRYLEILTGKRKYYHGPGNEKSRTDYGR | | |
| | | YRTSGETLDNIFGILIGKCTFYPDEFRAAKASYTAQEFNL | | |
| | | LNDLNNLTVPTETKKLSKEQKNQIINYVKNEKAMGPAKLF | | |
| | | KYIAKLLSCDVADIKGYRIDKSGKAEIHTFEAYRKMKTLE | | |
| | | TLDIEQMDRETLDKLAYVLTLNTEREGIQEALEHEFADGS | | |
| | | FSQKQVDELVQFRKANSSIFGKGWHNFSVKLMMELIPELY | | |
| | | ETSEEQMTILTRLGKQKTTSSSNKTKYIDEKLLTEEIYNP | | |
| | | VVAKSVRQAIKIVNAAIKEYGDFDNIVIEMARETNEDDEK | | |
| | | KAIQKIQKANKDEKDAAMLKAANQYNGKAELPHSVFHGHK | | |
| | | QLATKIRLWHQQGERCLYTGKTISIHDLINNSNQFEVDHI | | |
| | | LPLSITFDDSLANKVLVYATANQEKGQRTPYQALDSMDDA | | |
| | | WSFRELKAFVRESKTLSNKKKEYLLTEEDISKFDVRKKFI | | |
| | | ERNLVDTRYASRVVLNALQEHFRAHKIDTKVSVVRGQFTS | | |
| | | QLRRHWGIEKTRDTYHHHAVDALIIAASSQLNLWKKQKNT | | |
| | | LVSYSEDQLLDIETGELISDDEYKESVFKAPYQHFVDTLK | | |
| | | SKEFEDSILFSYQVDSKFNRKISDATIYATRQAKVGKDKA | | |
| | | DETYVLGKIKDIYTQDGYDAFMKIYKKDKSKFLMYRHDPQ | | |
| | | TFEKVIEPILENYPNKQINEKGKEVPCNPFLKYKEEHGYI | | |
| | | RKYSKKGNGPEIKSLKYYDSKLGNHIDITPKDSNNKVVLQ | | |
| | | SLKPWRTDVYFNKNTGKYEILGLKYSDMQFEKGTGKYSIS | | |
| | | KEQYENIKVREGVDENSEFKFTLYKNDLLLLKDSENGEQI | | |
| | | LLRFTSRNDTSKHYVELKPYNRQKFEGSEYLIKSLGTVAK | | |
| | | GGQCIKGLGKSNISIYKVRTDVLGNQHIIKNEGDKPKLDF | | |
| St1Cas9- | Streptococcus | MSDLVLGLDIGIGSVGVGILNKVTGEIIHKNSRIFPAAQA | 3297 | N622A |
| TH1477 | thermophilus | ENNLVRRTNRQGRRLARRKKHRRVRLNRLFEESGLITDFT | | |
| | | KISINLNPYQLRVKGLTDELSNEELFIALKNMVKHRGISY | | |
| | | LDDASDDGNSSVGDYAQIVKENSKQLETKTPGQIQLERYQ | | |
| | | TYGQLRGDFTVEKDGKKHRLINVFPTSAYRSEALRILQTQ | | |
| | | QEFNPQITDEFINRYLEILTGKRKYYHGPGNEKSRTDYGR | | |
| | | YRTSGETLDNIFGILIGKCTFYPDEFRAAKASYTAQEFNL | | |
| | | LNDLNNLTVPTETKKLSKEQKNQIINYVKNEKAMGPAKLF | | |
| | | KYIAKLLSCDVADIKGYRIDKSGKAEIHTFEAYRKMKTLE | | |
| | | TLDIEQMDRETLDKLAYVLTLNTEREGIQEALEHEFADGS | | |
| | | FSQKQVDELVQFRKANSSIFGKGWHNFSVKLMMELIPELY | | |
| | | ETSEEQMTILTRLGKQKTTSSSNKTKYIDEKLLTEEIYNP | | |
| | | VVAKSVRQAIKIVNAAIKEYGDFDNIVIEMARETNEDDEK | | |
| | | KAIQKIQKANKDEKDAAMLKAANQYNGKAELPHSVFHGHK | | |
| | | QLATKIRLWHQQGERCLYTGKTISIHDLINNSNQFEVDHI | | |
| | | LPLSITFDDSLANKVLVYATANQEKGQRTPYQALDSMDDA | | |
| | | WSFRELKAFVRESKTLSNKKKEYLLTEEDISKFDVRKKFI | | |
| | | ERNLVDTRYASRVVLNALQEHFRAHKIDTKVSVVRGQFTS | | |
| | | QLRRHWGIEKTRDTYHHHAVDALIIAASSQLNLWKKQKNT | | |
| | | LVSYSEDQLLDIETGELISDDEYKESVFKAPYQHFVDTLK | | |
| | | SKEFEDSILFSYQVDSKFNRKISDATIYATRQAKVGKDKA | | |
| | | DETYVLGKIKDIYTQDGYDAFMKIYKKDKSKFLMYRHDPQ | | |
| | | TFEKVIEPILENYPNKQINEKGKEVPCNPFLKYKEEHGYI | | |
| | | RKYSKKGNGPEIKSLKYYDSKLGNHIDITPKDSNNKVVLQ | | |
| | | SLKPWRTDVYFNKNTGKYEILGLKYSDMQFEKGTGKYSIS | | |
| | | KEQYENIKVREGVDENSEFKFTLYKNDLLLLKDSENGEQI | | |
| | | LLRFTSRNDTSKHYVELKPYNRQKFEGSEYLIKSLGTVVK | | |
| | | GGRCIKGLGKSNISIYKVRTDVLGNQHIIKNEGDKPKLDF | | |

Table 9B provides parameters to define the necessary components for designing gRNA and/or Template RNAs to apply Cas variants listed in Table 3A for Gene Writing. Tier indicates preferred Cas variants if they are available for use at a given locus. The cut site indicates the validated or predicted protospacer adjacent motif (PAM) requirements, validated or predicted location of cut site (relative to the most upstream base of the PAM site). The gRNA for a given enzyme can be assembled by concatenating the crRNA, Tetraloop, and tracrRNA sequences, and further adding a 5′ spacer of a length within Spacer (min) and Spacer (max) that matches a protospacer at a target site. Further, the predicted location of the ssDNA nick at the target is important for designing the 3′ region of a Template RNA that needs to anneal to the sequence immediately 5′ of the nick in order to initiate target primed reverse transcription.

TABLE 9B
parameters to define the necessary components for designing gRNA and/or Template
RNAs to apply Cas variants listed in Table 9A for Gene Writing

| | | | | | | | SEQ | | | SEQ |
|---|---|---|---|---|---|---|---|---|---|---|
| | | | | Spacer | Spacer | | ID | Tetra- | | ID |
| Variant | PAM(s) | Cut | Tier | (min) | (max) | crRNA | NO: | loop | tracrRNA | NO: |
| Nme2Cas9 | NNNNC | −3 | 1 | 22 | 24 | GTTG | 3535 | GAA | CGAAATGA | 3536 |
| | C | | | | | TAGC | | A | GAACCGTT | |
| | | | | | | TCCCT | | | GCTACAAT | |
| | | | | | | TTCTC | | | AAGGCCGT | |
| | | | | | | ATTTC | | | CTGAAAAG | |
| | | | | | | G | | | ATGTGCCG | |
| | | | | | | | | | CAACGCTC | |
| | | | | | | | | | TGCCCCTT | |
| | | | | | | | | | AAAGCTTC | |
| | | | | | | | | | TGCTTTAA | |
| | | | | | | | | | GGGGCATC | |
| | | | | | | | | | GTTTA | |
| PpnCas9 | NNNNR | | 1 | 21 | 24 | GTTG | 3537 | GAA | GCGAAATG | 3538 |
| | TT | | | | | TAGC | | A | AAAAACGT | |
| | | | | | | TCCCT | | | TGTTACAA | |
| | | | | | | TTTTC | | | TAAGAGAT | |
| | | | | | | ATTTC | | | GAATTTCT | |
| | | | | | | GC | | | CGCAAAGC | |
| | | | | | | | | | TCTGCCTC | |
| | | | | | | | | | TTGAAATT | |
| | | | | | | | | | TCGGTTTC | |
| | | | | | | | | | AAGAGGCA | |
| | | | | | | | | | TCTTTTT | |
| SauCas9 | NNGRR; | −3 | 1 | 21 | 23 | GTTTT | 3539 | GAA | CAGAATCT | 3540 |
| | NNGRRT | | | | | AGTA | | A | ACTAAAAC | |
| | | | | | | CTCT | | | AAGGCAAA | |
| | | | | | | G | | | ATGCCGTG | |
| | | | | | | | | | TTTATCTC | |
| | | | | | | | | | GTCAACTT | |
| | | | | | | | | | GTTGGCGA | |
| | | | | | | | | | GA | |
| SauCas9- | NNNRR; | −3 | 1 | 21 | 21 | GTTTT | 3541 | GAA | ATTACAGA | 3542 |
| KKH | NNNRRT | | | | | AGTA | | A | ATCTACTA | |
| | | | | | | CTCT | | | AAACAAGG | |
| | | | | | | GTAA | | | CAAAATGC | |
| | | | | | | T | | | CGTGTTTA | |
| | | | | | | | | | TCTCGTCA | |
| | | | | | | | | | ACTTGTTG | |
| | | | | | | | | | GCGAGA | |
| SauriCas | NNGG | −3 | 1 | 21 | 21 | GTTTT | 3539 | GAA | CAGAATCT | 3543 |
| 9 | | | | | | AGTA | | A | ACTAAAAC | |
| | | | | | | CTCT | | | AAGGCAAA | |
| | | | | | | G | | | ATGCCGTG | |
| | | | | | | | | | TTTATCTC | |
| | | | | | | | | | GTCAACTT | |
| | | | | | | | | | GTTGGCGA | |
| | | | | | | | | | GATTTTT | |
| SauriCas | NNRG | −3 | 1 | 21 | 21 | GTTTT | 3539 | GAA | CAGAATCT | 3543 |
| 9-KKH | | | | | | AGTA | | A | ACTAAAAC | |
| | | | | | | CTCT | | | AAGGCAAA | |
| | | | | | | G | | | ATGCCGTG | |
| | | | | | | | | | TTTATCTC | |
| | | | | | | | | | GTCAACTT | |
| | | | | | | | | | GTTGGCGA | |
| | | | | | | | | | GATTTTT | |
| ScaCas9- | NNG | −3 | 1 | 20 | 20 | GTTTT | 3544 | GAA | TAGCAAGT | 3545 |
| Sc++ | | | | | | AGAG | | A | TAAAATAA | |
| | | | | | | CTA | | | GGCTAGTC | |
| | | | | | | | | | CGTTATCA | |
| | | | | | | | | | ACTTGAAA | |
| | | | | | | | | | AAGTGGCA | |
| | | | | | | | | | CCGAGTCG | |
| | | | | | | | | | GTGC | |
| SpyCas9 | NGG | −3 | 1 | 20 | 20 | GTTTT | 3544 | GAA | TAGCAAGT | 3545 |
| | | | | | | AGAG | | A | TAAAATAA | |
| | | | | | | CTA | | | GGCTAGTC | |
| | | | | | | | | | CGTTATCA | |
| | | | | | | | | | ACTTGAAA | |
| | | | | | | | | | AAGTGGCA | |
| | | | | | | | | | CCGAGTCG | |
| | | | | | | | | | GTGC | |
| SpyCas9- | NG | −3 | 1 | 20 | 20 | GTTT | 3546 | GAA | CAGCATAG | 3547 |
| NG | (NGG = N | | | | | AAGA | | A | CAAGTTTA | |
| | GA = NGT > | | | | | GCTA | | | AATAAGGC | |
| | NGC) | | | | | TGCT | | | TAGTCCGT | |
| | | | | | | G | | | TATCAACT | |
| | | | | | | | | | TGAAAAAG | |
| | | | | | | | | | TGGCACCG | |
| | | | | | | | | | AGTCGGTG | |
| | | | | | | | | | C | |
| SpyCas9- | NRN > N | −3 | 1 | 20 | 20 | GTTTT | 3544 | GAA | TAGCAAGT | 3545 |
| SpRY | YN | | | | | AGAG | | A | TAAAATAA | |
| | | | | | | CTA | | | GGCTAGTC | |
| | | | | | | | | | CGTTATCA | |
| | | | | | | | | | ACTTGAAA | |
| | | | | | | | | | AAGTGGCA | |
| | | | | | | | | | CCGAGTCG | |
| | | | | | | | | | GTGC | |
| St1Cas9 | NNAGA | −3 | 1 | 20 | 20 | GTCTT | 3548 | GTA | CAGAAGCT | 3549 |
| | AW > NN | | | | | TGTA | | C | ACAAAGAT | |
| | AGGAW = | | | | | CTCT | | | AAGGCTTC | |
| | NNGG | | | | | G | | | ATGCCGAA | |
| | AAW | | | | | | | | ATCAACAC | |
| | | | | | | | | | CCTGTCAT | |
| | | | | | | | | | TTTATGGC | |
| | | | | | | | | | AGGGTGTT | |
| | | | | | | | | | TT | |
| BlatCas | NNNNC | −3 | 1 | 19 | 23 | GCTA | 3550 | GAA | GGTAAGTT | 3551 |
| 9 | NAA > N | | | | | TAGT | | A | GCTATAGT | |
| | NNNCN | | | | | TCCTT | | | AAGGGCAA | |
| | DD > NN | | | | | ACT | | | CAGACCCG | |
| | NNC | | | | | | | | AGGCGTTG | |
| | | | | | | | | | GGGATCGC | |
| | | | | | | | | | CTAGCCCG | |
| | | | | | | | | | TGTTTACG | |
| | | | | | | | | | GGCTCTCC | |
| | | | | | | | | | CCATATTC | |
| | | | | | | | | | AAAATAAT | |
| | | | | | | | | | GACAGACG | |
| | | | | | | | | | AGCACCTT | |
| | | | | | | | | | GGAGCATT | |
| | | | | | | | | | TATCTCCG | |
| | | | | | | | | | AGGTGCT | |
| cCas9- | NNVAC | −3 | 2 | 21 | 21 | GUCU | 3552 | GAA | CAGAAUCU | 3553 |
| v16 | T; NNVA | | | | | UAGU | | A | ACUAAGAC | |
| | TGM; NN | | | | | ACUC | | | AAGGCAAA | |
| | VATT; N | | | | | UG | | | AUGCCGUG | |
| | NVGCT; | | | | | | | | UUUAUCUC | |
| | NNVGT | | | | | | | | GUCAACUU | |
| | G; NNVG | | | | | | | | GUUGGCGA | |
| | TT | | | | | | | | GAUUUUUU | |
| | | | | | | | | | U | |
| cCas9- | NNVRR | −3 | 2 | 21 | 21 | GUCU | 3552 | GAA | CAGAAUCU | 3553 |
| v17 | N | | | | | UAGU | | A | ACUAAGAC | |
| | | | | | | ACUC | | | AAGGCAAA | |
| | | | | | | UG | | | AUGCCGUG | |
| | | | | | | | | | UUUAUCUC | |
| | | | | | | | | | GUCAACUU | |
| | | | | | | | | | GUUGGCGA | |
| | | | | | | | | | GAUUUUUU | |
| | | | | | | | | | U | |
| cCas9- | NNVAC | −3 | 2 | 21 | 21 | GUCU | 3552 | GAA | CAGAAUCU | 3553 |
| v21 | T; NNVA | | | | | UAGU | | A | ACUAAGAC | |
| | TGM; NN | | | | | ACUC | | | AAGGCAAA | |
| | VATT; N | | | | | UG | | | AUGCCGUG | |
| | NVGCT; | | | | | | | | UUUAUCUC | |
| | NNVGT | | | | | | | | GUCAACUU | |
| | G; NNVG | | | | | | | | GUUGGCGA | |
| | TT | | | | | | | | GAUUUUUU | |
| | | | | | | | | | U | |
| cCas9- | NNVRR | −3 | 2 | 21 | 21 | GUCU | 3552 | GAA | CAGAAUCU | 3553 |
| v42 | N | | | | | UAGU | | A | ACUAAGAC | |
| | | | | | | ACUC | | | AAGGCAAA | |
| | | | | | | UG | | | AUGCCGUG | |
| | | | | | | | | | UUUAUCUC | |
| | | | | | | | | | GUCAACUU | |
| | | | | | | | | | GUUGGCGA | |
| | | | | | | | | | GAUUUUUU | |
| | | | | | | | | | U | |
| CdiCas9 | NNRHH | | 2 | 22 | 22 | ACUG | 3554 | GAA | CUGAACCU | 3555 |
| | HY; NNR | | | | | GGGU | | A | CAGUAAGC | |
| | AAAY | | | | | UCAG | | | AUUGGCUC | |
| | | | | | | | | | GUUUCCAA | |
| | | | | | | | | | UGUUGAUU | |
| | | | | | | | | | GCUCCGCC | |
| | | | | | | | | | GGUGCUCC | |
| | | | | | | | | | UUAUUUUU | |
| | | | | | | | | | AAGGGCGC | |
| | | | | | | | | | CGGC | |
| CjeCas9 | NNNNR | −3 | 2 | 21 | 23 | GTTTT | 3556 | GAA | AGGGACTA | 3557 |
| | YAC | | | | | AGTC | | A | AAATAAAG | |
| | | | | | | CCT | | | AGTTTGCG | |
| | | | | | | | | | GGACTCTG | |
| | | | | | | | | | CGGGGTTA | |
| | | | | | | | | | CAATCCCC | |
| | | | | | | | | | TAAAACCG | |
| | | | | | | | | | CTTTTTT | |
| GeoCas | NNNNC | | 2 | 21 | 23 | GUCA | 3558 | GAA | UCAGGGUU | 3559 |
| 9 | RAA | | | | | UAGU | | A | ACUAUGAU | |
| | | | | | | UCCC | | | AAGGGCUU | |
| | | | | | | CUGA | | | UCUGCCUA | |
| | | | | | | | | | AGGCAGAC | |
| | | | | | | | | | UGACCCGC | |
| | | | | | | | | | GGCGUUGG | |
| | | | | | | | | | GGAUCGCC | |
| | | | | | | | | | UGUCGCCC | |
| | | | | | | | | | GCUUUUGG | |
| | | | | | | | | | CGGGCAUU | |
| | | | | | | | | | CCCCAUCC | |
| | | | | | | | | | UU | |
| iSpyMac | NAAN | −3 | 2 | 19 | 21 | GTTTT | 3544 | GAA | TAGCAAGT | 3545 |
| Cas9 | | | | | | AGAG | | A | TAAAATAA | |
| | | | | | | CTA | | | GGCTAGTC | |
| | | | | | | | | | CGTTATCA | |
| | | | | | | | | | ACTTGAAA | |
| | | | | | | | | | AAGTGGCA | |
| | | | | | | | | | CCGAGTCG | |
| | | | | | | | | | GTGC | |
| NmeCas | NNNNG | −3 | 2 | 20 | 24 | GTTG | 3535 | GAA | CGAAATGA | 3536 |
| 9 | AYT; NN | | | | | TAGC | | A | GAACCGTT | |
| | NNGYTT; | | | | | TCCCT | | | GCTACAAT | |
| | NNNNG | | | | | TTCTC | | | AAGGCCGT | |
| | AYA; NN | | | | | ATTTC | | | CTGAAAAG | |
| | NNGTCT | | | | | G | | | ATGTGCCG | |
| | | | | | | | | | CAACGCTC | |
| | | | | | | | | | TGCCCCTT | |
| | | | | | | | | | AAAGCTTC | |
| | | | | | | | | | TGCTTTAA | |
| | | | | | | | | | GGGGCATC | |
| | | | | | | | | | GTTTA | |
| ScaCas9 | NNG | −3 | 2 | 20 | 20 | GTTTT | 3544 | GAA | TAGCAAGT | 3545 |
| | | | | | | AGAG | | A | TAAAATAA | |
| | | | | | | CTA | | | GGCTAGTC | |
| | | | | | | | | | CGTTATCA | |
| | | | | | | | | | ACTTGAAA | |
| | | | | | | | | | AAGTGGCA | |
| | | | | | | | | | CCGAGTCG | |
| | | | | | | | | | GTGC | |
| ScaCas9- | NNG | −3 | 2 | 20 | 20 | GTTTT | 3544 | GAA | TAGCAAGT | 3545 |
| HiFi- | | | | | | AGAG | | A | TAAAATAA | |
| Sc++ | | | | | | CTA | | | GGCTAGTC | |
| | | | | | | | | | CGTTATCA | |
| | | | | | | | | | ACTTGAAA | |
| | | | | | | | | | AAGTGGCA | |
| | | | | | | | | | CCGAGTCG | |
| | | | | | | | | | GTGC | |
| SpyCas9- | NRRH | −3 | 2 | 20 | 20 | GTTT | 3546 | GAA | CAGCATAG | 3547 |
| 3var- | | | | | | AAGA | | A | CAAGTTTA | |
| NRRH | | | | | | GCTA | | | AATAAGGC | |
| | | | | | | TGCT | | | TAGTCCGT | |
| | | | | | | G | | | TATCAACT | |
| | | | | | | | | | TGAAAAAG | |
| | | | | | | | | | TGGCACCG | |
| | | | | | | | | | AGTCGGTG | |
| | | | | | | | | | C | |
| SpyCas9- | NRTH | −3 | 2 | 20 | 20 | GTTT | 3546 | GAA | CAGCATAG | 3547 |
| 3var- | | | | | | AAGA | | A | CAAGTTTA | |
| NRTH | | | | | | GCTA | | | AATAAGGC | |
| | | | | | | TGCT | | | TAGTCCGT | |
| | | | | | | G | | | TATCAACT | |
| | | | | | | | | | TGAAAAAG | |
| | | | | | | | | | TGGCACCG | |
| | | | | | | | | | AGTCGGTG | |
| | | | | | | | | | C | |
| SpyCas9- | NRCH | −3 | 2 | 20 | 20 | GTTT | 3546 | GAA | CAGCATAG | 3547 |
| 3var- | | | | | | AAGA | | A | CAAGTTTA | |
| NRCH | | | | | | GCTA | | | AATAAGGC | |
| | | | | | | TGCT | | | TAGTCCGT | |
| | | | | | | G | | | TATCAACT | |
| | | | | | | | | | TGAAAAAG | |
| | | | | | | | | | TGGCACCG | |
| | | | | | | | | | AGTCGGTG | |
| | | | | | | | | | C | |
| SpyCas9- | NGG | −3 | 2 | 20 | 20 | GTTTT | 3544 | GAA | TAGCAAGT | 3545 |
| HF1 | | | | | | AGAG | | A | TAAAATAA | |
| | | | | | | CTA | | | GGCTAGTC | |
| | | | | | | | | | CGTTATCA | |
| | | | | | | | | | ACTTGAAA | |
| | | | | | | | | | AAGTGGCA | |
| | | | | | | | | | CCGAGTCG | |
| | | | | | | | | | GTGC | |
| SpyCas9- | NAAG | −3 | 2 | 20 | 20 | GTTTT | 3544 | GAA | TAGCAAGT | 3545 |
| QQR1 | | | | | | AGAG | | A | TAAAATAA | |
| | | | | | | CTA | | | GGCTAGTC | |
| | | | | | | | | | CGTTATCA | |
| | | | | | | | | | ACTTGAAA | |
| | | | | | | | | | AAGTGGCA | |
| | | | | | | | | | CCGAGTCG | |
| | | | | | | | | | GTGC | |
| SpyCas9- | NGN | −3 | 2 | 20 | 20 | GTTTT | 3544 | GAA | TAGCAAGT | 3545 |
| SpG | | | | | | AGAG | | A | TAAAATAA | |
| | | | | | | CTA | | | GGCTAGTC | |
| | | | | | | | | | CGTTATCA | |
| | | | | | | | | | ACTTGAAA | |
| | | | | | | | | | AAGTGGCA | |
| | | | | | | | | | CCGAGTCG | |
| | | | | | | | | | GTGC | |
| SpyCas9- | NGAN | −3 | 2 | 20 | 20 | GTTTT | 3544 | GAA | TAGCAAGT | 3545 |
| VQR | | | | | | AGAG | | A | TAAAATAA | |
| | | | | | | CTA | | | GGCTAGTC | |
| | | | | | | | | | CGTTATCA | |
| | | | | | | | | | ACTTGAAA | |
| | | | | | | | | | AAGTGGCA | |
| | | | | | | | | | CCGAGTCG | |
| | | | | | | | | | GTGC | |
| SpyCas9- | NGCG | −3 | 2 | 20 | 20 | GTTTT | 3544 | GAA | TAGCAAGT | 3545 |
| VRER | | | | | | AGAG | | A | TAAAATAA | |
| | | | | | | CTA | | | GGCTAGTC | |
| | | | | | | | | | CGTTATCA | |
| | | | | | | | | | ACTTGAAA | |
| | | | | | | | | | AAGTGGCA | |
| | | | | | | | | | CCGAGTCG | |
| | | | | | | | | | GTGC | |
| SpyCas9- | NG; GAA; | −3 | 2 | 20 | 20 | GTTT | 3546 | GAA | CAGCATAG | 3547 |
| xCas | GAT | | | | | AAGA | | A | CAAGTTTA | |
| | | | | | | GCTA | | | AATAAGGC | |
| | | | | | | TGCT | | | TAGTCCGT | |
| | | | | | | G | | | TATCAACT | |
| | | | | | | | | | TGAAAAAG | |
| | | | | | | | | | TGGCACCG | |
| | | | | | | | | | AGTCGGTG | |
| | | | | | | | | | C | |
| SpyCas9- | NG | −3 | 2 | 20 | 20 | GTTT | 3546 | GAA | CAGCATAG | 3547 |
| xCas- | | | | | | AAGA | | A | CAAGTTTA | |
| NG | | | | | | GCTA | | | AATAAGGC | |
| | | | | | | TGCT | | | TAGTCCGT | |
| | | | | | | G | | | TATCAACT | |
| | | | | | | | | | TGAAAAAG | |
| | | | | | | | | | TGGCACCG | |
| | | | | | | | | | AGTCGGTG | |
| | | | | | | | | | C | |
| St1Cas9- | NNACA | −3 | 2 | 20 | 20 | GTCTT | 3548 | GTA | CAGAAGCT | 3549 |
| CNRZ1 | A | | | | | TGTA | | C | ACAAAGAT | |
| 066 | | | | | | CTCT | | | AAGGCTTC | |
| | | | | | | G | | | ATGCCGAA | |
| | | | | | | | | | ATCAACAC | |
| | | | | | | | | | CCTGTCAT | |
| | | | | | | | | | TTTATGGC | |
| | | | | | | | | | AGGGTGTT | |
| | | | | | | | | | TT | |
| St1Cas9- | NNGCA | −3 | 2 | 20 | 20 | GTCTT | 3548 | GTA | CAGAAGCT | 3549 |
| LMG18 | A | | | | | TGTA | | C | ACAAAGAT | |
| 31 | | | | | | CTCT | | | AAGGCTTC | |
| | | | | | | G | | | ATGCCGAA | |
| | | | | | | | | | ATCAACAC | |
| | | | | | | | | | CCTGTCAT | |
| | | | | | | | | | TTTATGGC | |
| | | | | | | | | | AGGGTGTT | |
| | | | | | | | | | TT | |
| St1Cas9- | NNAAA | −3 | 2 | 20 | 20 | GTCTT | 3548 | GTA | CAGAAGCT | 3549 |
| MTH17 | A | | | | | TGTA | | C | ACAAAGAT | |
| CL396 | | | | | | CTCT | | | AAGGCTTC | |
| | | | | | | G | | | ATGCCGAA | |
| | | | | | | | | | ATCAACAC | |
| | | | | | | | | | CCTGTCAT | |
| | | | | | | | | | TTTATGGC | |
| | | | | | | | | | AGGGTGTT | |
| | | | | | | | | | TT | |
| St1Cas9- | NNGAA | −3 | 2 | 20 | 20 | GTCTT | 3548 | GTA | CAGAAGCT | 3549 |
| TH1477 | A | | | | | TGTA | | C | ACAAAGAT | |
| | | | | | | CTCT | | | AAGGCTTC | |
| | | | | | | G | | | ATGCCGAA | |
| | | | | | | | | | ATCAACAC | |
| | | | | | | | | | CCTGTCAT | |
| | | | | | | | | | TTTATGGC | |
| | | | | | | | | | AGGGTGTT | |
| | | | | | | | | | TT | |

[0699] In some embodiments, the opener molecule is exogenous to the cell comprising the Gene Writer polypeptide and or template nucleic acid. In some embodiments, the opener molecule comprises an endogenous agent (e.g., endogenous to the cell comprising the Gene Writer polypeptide and or template nucleic acid comprising the gRNA and blocking domain). For example, an inducible gRNA, blocking domain, and opener molecule may be chosen such that the opener molecule is an endogenous agent expressed in a target cell or tissue, e.g., thereby ensuring activity of a Gene Writer system in the target cell or tissue. As a further example, an inducible gRNA, blocking domain, and opener molecule may be chosen such that the opener molecule is absent or not substantially expressed in one or more non-target cells or tissues, e.g., thereby ensuring that activity of a Gene Writer system does not occur or substantially occur in the one or more non-target cells or tissues, or occurs at a reduced level compared to a target cell or tissue. Exemplary blocking domains, opener molecules, and uses thereof are described in PCT App. Publication WO2020044039A1, which is incorporated herein by reference in its entirety. In some embodiments, the template nucleic acid, e.g., template RNA, may comprise one or more UTRs (e.g. from an R2-type retrotransposon) and a gRNA. In some embodiments, the UTR facilitates interaction of the template nucleic acid (e.g., template RNA) with the writing domain, e.g., reverse transcriptase domain, of the Gene Writer polypeptide. In some embodiments, the gRNA facilitates interaction with the template nucleic acid binding domain (e.g., RNA binding domain) of the polypeptide. In some embodiments, the gRNA directs the polypeptide to the matching target sequence, e.g., in a target cell genome. In some embodiments, the template nucleic acid may contain only the reverse transcriptase binding motif (e.g. 3′ UTR from R2) and the gRNA may be provided as a second nucleic acid molecule (e.g., second RNA molecule) for target site recognition. In some embodiments, the template nucleic acid containing the RT-binding motif may exist on the same molecule as the gRNA, but be processed into two RNA molecules by cleavage activity (e.g. ribozyme).

[0700] In some embodiments, a template RNA may be customized to correct a given mutation in the genomic DNA of a target cell (e.g., ex vivo or in vivo, e.g., in a target tissue or organ, e.g., in a subject). For example, the mutation may be a disease-associated mutation relative to the wild-type sequence. Without wishing to be bound by theory, sets of empirical parameters help ensure optimal initial in silico designs of template RNAs or portions thereof. As a non-limiting illustrative example, for a selected mutation, the following design parameters may be employed. In some embodiments, design is initiated by acquiring approximately 500 bp (e.g., up to 50, 100, 150, 200, 250, 300, 350, 400, 450, 500, 550, 600, 650, or 700 bp, and optionally at least 20, 30, 40, 50, 100, 150, 200, 250, 300, 350, 400, 450, 500, 550, 600, or 650 bp) flanking sequence on either side of the mutation to serve as the target region. In some embodiments, a template nucleic acid comprises a gRNA. Methodology for designing gRNAs is known to those of skill in the art. In some embodiments, a gRNA comprises a sequence (e.g., a CRISPR spacer) that binds a target site. In some embodiments, the sequence (e.g., a CRISPR spacer) that binds a target site for use in targeting a template nucleic acid to a target region is selected by considering the particular Gene Writer polypeptide (e.g., endonuclease domain or writing domain, e.g., comprising a CRISPR/Cas domain) being used (e.g., for Cas9, a protospacer-adjacent motif (PAM) of NGG immediately 3′ of a 20 nt gRNA binding region). In some embodiments, the CRISPR spacer is selected by ranking first by whether the PAM will be disrupted by the Gene Writing induced edit. In some embodiments, disruption of the PAM may increase edit efficiency. In some embodiments, the PAM can be disrupted by also introducing (e.g., as part of or in addition to another modification to a target site in genomic DNA) a silent mutation (e.g., a mutation that does not alter an amino acid residue encoded by the target nucleic acid sequence, if any) in the target site during Gene Writing. In some embodiments, the CRISPR spacer is selected by ranking sequences by the proximity of their corresponding genomic site to the desired edit location. In some embodiments, the gRNA comprises a gRNA scaffold. In some embodiments, the gRNA scaffold used may be a standard scaffold (e.g., for Cas9, 5′-GTTTTAGAGCTAGAAATAGCAAGTTAAAATAAGGCTAGTCCGTTATCAACTTGAAAAAGTGGGACCGAGTCGGTCC-3′ (SEQ ID NO: 1591)), or may contain one or more nucleotide substitutions. In some embodiments, the heterologous object sequence has at least 90% identity, e.g., at least 90%, 95%, 98%, 99%, or 100% identity, or comprises no more than 1, 2, 3, 4, or 5 positions of non-identity to the target site 3′ of the first strand nick (e.g., immediately 3′ of the first strand nick or up to 1, 2, 3, 4, or 5 nucleotides 3′ of the first strand nick), with the exception of any insertion, substitution, or deletion that may be written into the target site by the Gene Writer. In some embodiments, the 3′ target homology domain contains at least 90% identity, e.g., at least 90%, 95%, 98%, 99%, or 100% identity, or comprises no more than 1, 2, 3, 4, or 5 positions of non-identity to the target site 5′ of the first strand nick (e.g., immediately 5′ of the first strand nick or up to 1, 2, 3, 4, or 5 nucleotides 3′ of the first strand nick).

[0701] Methods and Compositions for Modified RNA (e.g., gRNA or Template RNA)

[0702] In some embodiments, an RNA component of the system (e.g., a template RNA or a gRNA) comprises one or more nucleotide modifications. In some embodiments, the modification pattern of a gRNA can significantly affect in vivo activity compared to unmodified or end-modified guides (e.g., as shown in FIG. 1D from Finn et al. Cell Rep 22(9):2227-2235 (2018); incorporated herein by reference in its entirety). Without wishing to be bound by theory, this process may be due, at least in part, to a stabilization of the RNA conferred by the modifications. Non-limiting examples of such modifications may include 2′-O-methyl (2′-O-Me), 2′-O-(2-methoxyethyl) (2′-O-MOE), 2′-fluoro (2′-F), phosphorothioate (PS) bond between nucleotides, G-C substitutions, and inverted abasic linkages between nucleotides and equivalents thereof.

[0703] In some embodiments, the template RNA (e.g., at the portion thereof that binds a target site) or the guide RNA comprises a 5′ terminus region. In some embodiments, the template RNA or the guide RNA does not comprise a 5′ terminus region. In some embodiments, the 5′ terminus region comprises a CRISPR spacer region, e.g., as described with respect to sgRNA in Briner A E et al, Molecular Cell 56: 333-339 (2014) (incorporated herein by reference in its entirety; applicable herein, e.g., to all guide RNAs). In some embodiments, the 5′ terminus region comprises a 5′ end modification. In some embodiments, a 5′ terminus region with or without a spacer region may be associated with a crRNA, trRNA, sgRNA and/or dgRNA. The CRISPR spacer region can, in some instances, comprise a guide region, guide domain, or targeting domain. In some embodiments, a target domain or target sequence may comprise a sequence of nucleic acid to which the guide region/domain directs a nuclease for cleavage. In some embodiments, a spyCas9 protein may be directed by a guide region/domain to a target sequence of a target nucleic acid molecule by the nucleotides present in the CRISPR spacer region.

[0704] In some embodiments, the template RNAs (e.g., at the portion thereof that binds a target site) or guide RNAs described herein comprises any of the sequences shown in Table 4 of WO2018107028A1, incorporated herein by reference in its entirety. In some embodiments, where a sequence shows a guide and/or spacer region, the composition may comprise this region or not. In some embodiments, a guide RNA comprises one or more of the modifications of any of the sequences shown in Table 4 of WO2018107028A1, e.g., as identified therein by a SEQ ID NO. In embodiments, the nucleotides may be the same or different, and/or the modification pattern shown may be the same or similar to a modification pattern of a guide sequence as shown in Table 4 of WO2018107028A1. In some embodiments, a modification pattern includes the relative position and identity of modifications of the gRNA or a region of the gRNA (e.g. 5′ terminus region, lower stem region, bulge region, upper stem region, nexus region, hairpin 1 region, hairpin 2 region, 3′ terminus region). In some embodiments, the modification pattern contains at least 50%, 55%, 60%, 70%, 75%, 80%, 85%, 90%, 95%, 96%, 97%, 98%, 99%, or 100% of the modifications of any one of the sequences shown in the sequence column of Table 4 of WO2018107028A1, and/or over one or more regions of the sequence. In some embodiments, the modification pattern is at least 50%, 55%, 60%, 70%, 75%, 80%, 85%, 90%, 95%, 96%, 97%, 98%, 99%, or 100% identical to the modification pattern of any one of the sequences shown in the sequence column of Table 4 of WO2018107028A1. In some embodiments, the modification pattern is at least 50%, 55%, 60%, 70%, 75%, 80%, 85%, 90%, 95%, 96%, 97%, 98%, 99%, or 100% identical over one or more regions of the sequence shown in Table 4 of WO2018107028A1, e.g., in a 5′ terminus region, lower stem region, bulge region, upper stem region, nexus region, hairpin 1 region, hairpin 2 region, and/or 3′ terminus region. In some embodiments, the modification pattern is least 50%, 55%, 60%, 70%, 75%, 80%, 85%, 90%, 95%, 96%, 97%, 98%, 99%, or 100% identical to the modification pattern of a sequence over the 5′ terminus region. In some embodiments, the modification pattern is least 50%, 55%, 60%, 70%, 75%, 80%, 85%, 90%, 95%, 96%, 97%, 98%, 99%, or 100% identical over the lower stem. In some embodiments, the modification pattern is least 50%, 55%, 60%, 70%, 75%, 80%, 85%, 90%, 95%, 96%, 97%, 98%, 99%, or 100% identical over the bulge. In some embodiments, the modification pattern is least 50%, 55%, 60%, 70%, 75%, 80%, 85%, 90%, 95%, 96%, 97%, 98%, 99%, or 100% identical over the upper stem. In some embodiments, the modification pattern is least 50%, 55%, 60%, 70%, 75%, 80%, 85%, 90%, 95%, 96%, 97%, 98%, 99%, or 100% identical over the nexus. In some embodiments, the modification pattern is least 50%, 55%, 60%, 70%, 75%, 80%, 85%, 90%, 95%, 96%, 97%, 98%, 99%, or 100% identical over the hairpin 1. In some embodiments, the modification pattern is least 50%, 55%, 60%, 70%, 75%, 80%, 85%, 90%, 95%, 96%, 97%, 98%, 99%, or 100% identical over the hairpin 2. In some embodiments, the modification pattern is least 50%, 55%, 60%, 70%, 75%, 80%, 85%, 90%, 95%, 96%, 97%, 98%, 99%, or 100% identical over the 3′ terminus. In some embodiments, the modification pattern differs from the modification pattern of a sequence of Table 4 of WO2018107028A1, or a region (e.g. 5′ terminus, lower stem, bulge, upper stem, nexus, hairpin 1, hairpin 2, 3′ terminus) of such a sequence, e.g., at 0, 1, 2, 3, 4, 5, 6, or more nucleotides. In some embodiments, the gRNA comprises modifications that differ from the modifications of a sequence of Table 4 of WO2018107028A1, e.g., at 0, 1, 2, 3, 4, 5, 6, or more nucleotides. In some embodiments, the gRNA comprises modifications that differ from modifications of a region (e.g. 5′ terminus, lower stem, bulge, upper stem, nexus, hairpin 1, hairpin 2, 3′ terminus) of a sequence of Table 4 of WO2018107028A1, e.g., at 0, 1, 2, 3, 4, 5, 6, or more nucleotides.

[0705] In some embodiments, the template RNAs (e.g., at the portion thereof that binds a target site) or the gRNA comprises a 2′-O-methyl (2′-O-Me) modified nucleotide. In some embodiments, the gRNA comprises a 2′-O-(2-methoxy ethyl) (2′-O-moe) modified nucleotide. In some embodiments, the gRNA comprises a 2′-fluoro (2′-F) modified nucleotide. In some embodiments, the gRNA comprises a phosphorothioate (PS) bond between nucleotides. In some embodiments, the gRNA comprises a 5′ end modification, a 3′ end modification, or 5′ and 3′ end modifications. In some embodiments, the 5′ end modification comprises a phosphorothioate (PS) bond between nucleotides. In some embodiments, the 5′ end modification comprises a 2′-O-methyl (2′-O-Me), 2′-O-(2-methoxy ethyl) (2′-O-MOE), and/or 2′-fluoro (2′-F) modified nucleotide. In some embodiments, the 5′ end modification comprises at least one phosphorothioate (PS) bond and one or more of a 2′-O-methyl (2′-O-Me), 2′-O-(2-methoxyethyl) (2′-O-MOE), and/or 2′-fluoro (2′-F) modified nucleotide. The end modification may comprise a phosphorothioate (PS), 2′-O-methyl (2′-O-Me), 2′-O-(2-methoxyethyl) (2′-O-MOE), and/or 2′-fluoro (2′-F) modification. Equivalent end modifications are also encompassed by embodiments described herein. In some embodiments, the template RNA or gRNA comprises an end modification in combination with a modification of one or more regions of the template RNA or gRNA. Additional exemplary modifications and methods for protecting RNA, e.g., gRNA, and formulae thereof, are described in WO2018126176A1, which is incorporated herein by reference in its entirety.

[0706] In some embodiments, structure-guided and systematic approaches are used to introduce modifications (e.g., 2′-OMe-RNA, 2′-F-RNA, and PS modifications) to a template RNA or guide RNA, for example, as described in Mir et al. Nat Commun 9:2641 (2018) (incorporated by reference herein in its entirety). In some embodiments, the incorporation of 2′-F-RNAs increases thermal and nuclease stability of RNA:RNA or RNA:DNA duplexes, e.g., while minimally interfering with C3′-endo sugar puckering. In some embodiments, 2′-F may be better tolerated than 2′-OMe at positions where the 2′-OH is important for RNA:DNA duplex stability. In some embodiments, a crRNA comprises one or more modifications that do not reduce Cas9 activity, e.g., C10, C20, or C21 (fully modified), e.g., as described in Supplementary Table 1 of Mir et al. Nat Commun 9:2641 (2018), incorporated herein by reference in its entirety. In some embodiments, a tracrRNA comprises one or more modifications that do not reduce Cas9 activity, e.g., T2, T6, T7, or T8 (fully modified) of Supplementary Table 1 of Mir et al. Nat Commun 9:2641 (2018). In some embodiments, a crRNA comprises one or more modifications (e.g., as described herein) may be paired with a tracrRNA comprising one or more modifications, e.g., C20 and T2. In some embodiments, a gRNA comprises a chimera, e.g., of a crRNA and a tracrRNA (e.g., Jinek et al. Science 337(6096):816-821 (2012)). In embodiments, modifications from the crRNA and tracrRNA are mapped onto the single-guide chimera, e.g., to produce a modified gRNA with enhanced stability.

[0707] In some embodiments, gRNA molecules may be modified by the addition or subtraction of the naturally occurring structural components, e.g., hairpins. In some embodiments, a gRNA may comprise a gRNA with one or more 3′ hairpin elements deleted, e.g., as described in WO2018106727, incorporated herein by reference in its entirety. In some embodiments, a gRNA may contain an added hairpin structure, e.g., an added hairpin structure in the spacer region, which was shown to increase specificity of a CRISPR-Cas system in the teachings of Kocak et al. Nat Biotechnol 37(6):657-666 (2019). Additional modifications, including examples of shortened gRNA and specific modifications improving in vivo activity, can be found in US20190316121, incorporated herein by reference in its entirety.

[0708] In some embodiments, structure-guided and systematic approaches (e.g., as described in Mir et al. Nat Commun 9:2641 (2018); incorporated herein by reference in its entirety) are employed to find modifications for the template RNA. In embodiments, the modifications are identified with the inclusion or exclusion of a guide region of the template RNA. In some embodiments, a structure of polypeptide bound to template RNA is used to determine non-protein-contacted nucleotides of the RNA that may then be selected for modifications, e.g., with lower risk of disrupting the association of the RNA with the polypeptide. Secondary structures in a template RNA can also be predicted in silico by software tools, e.g., the RNAstructure tool available at rna.urmc.rochester.edu/RNAstructureWeb (Bellaousov et al. Nucleic Acids Res 41:W471-W474 (2013); incorporated by reference herein in its entirety), e.g., to determine secondary structures for selecting modifications, e.g., hairpins, stems, and/or bulges.

[0709] Further included here are compositions and methods for the assembly of full or partial template RNA molecules (e.g., Gene Writing template RNA molecules optionally comprising a gRNA, or separate gRNA molecules). In some embodiments, RNA molecules may be assembled by the connection of two or more (e.g., two, three, four, five, six, seven, eight, nine, ten, or more) RNA segments with each other. In an aspect, the disclosure provides methods for producing nucleic acid molecules, the methods comprising contacting two or more linear RNA segments with each other under conditions that allow for the 5′ terminus of a first RNA segment to be covalently linked with the 3′ terminus of a second RNA segment. In some embodiments, the joined molecule may be contacted with a third RNA segment under conditions that allow for the 5′ terminus of the joined molecule to be covalently linked with the 3′ terminus of the third RNA segment. In embodiments, the method further comprises joining a fourth, fifth, or additional RNA segments to the elongated molecule. This form of assembly may, in some instances, allow for rapid and efficient assembly of RNA molecules.

[0710] The present disclosure also provides compositions and methods for the connection (e.g., covalent connection) of crRNA molecules and tracrRNA molecules. In some embodiments, guide RNA molecules with specificity for different target sites can be generated using a single tracrRNA molecule/segment connected to a target site specific crRNA molecule/segment (e.g., as shown in FIG. 10 of US20160102322A1; incorporated herein by reference in its entirety). For example, FIG. 10 of US20160102322A1 shows four tubes with different crRNA molecules with crRNA molecule 3 being connected to a tracrRNA molecule to form a guide RNA molecule, thereby depicting an exemplary connection of two RNA segments to form a product RNA molecule.

[0711] The disclosure also provides compositions and methods for the production of template RNA molecules with specificity for a Gene Writer polypeptide and/or a genomic target site. In an aspect, the method comprises: (1) identification of the target site and desired modification thereto, (2) production of RNA segments including an upstream homology segment, a heterologous object sequence segment, a Gene Writer polypeptide binding motif, and a gRNA segment, and/or (3) connection of the four or more segments into at least one molecule, e.g., into a single RNA molecule. In some embodiments, some or all of the template RNA segments comprised in (2) are assembled into a template RNA molecule, e.g., one, two, three, or four of the listed components. In some embodiments, the segments comprised in (2) may be produced in further segmented molecules, e.g., split into at least 2, at least 3, at least 4, or at least 5 or more sub-segments, e.g., that are subsequently assembled, e.g., by one or more methods described herein.

[0712] In some embodiments, RNA segments may be produced by chemical synthesis. In some embodiments, RNA segments may be produced by in vitro transcription of a nucleic acid template, e.g., by providing an RNA polymerase to act on a cognate promoter of a DNA template to produce an RNA transcript. In some embodiments, in vitro transcription is performed using, e.g., a T7, T3, or SP6 RNA polymerase, or a derivative thereof, acting on a DNA, e.g., dsDNA, ssDNA, linear DNA, plasmid DNA, linear DNA amplicon, linearized plasmid DNA, e.g., encoding the RNA segment, e.g., under transcriptional control of a cognate promoter, e.g., a T7, T3, or SP6 promoter. In some embodiments, a combination of chemical synthesis and in vitro transcription is used to generate the RNA segments for assembly. In embodiments, the gRNA, upstream target homology, and Gene Writer polypeptide binding segments are produced by chemical synthesis and the heterologous object sequence segment is produced by in vitro transcription. Without wishing to be bound by theory, in vitro transcription may be better suited for the production of longer RNA molecules. In some embodiments, reaction temperature for in vitro transcription may be lowered, e.g., be less than 37° C. (e.g., between 0-10 C, 10-20 C, or 20-30 C), to result in a higher proportion of full-length transcripts (Krieg Nucleic Acids Res 18:6463 (1990)). In some embodiments, a protocol for improved synthesis of long transcripts is employed to synthesize a long template RNA, e.g., a template RNA greater than 5 kb, such as the use of e.g., T7 RiboMAX Express, which can generate 27 kb transcripts in vitro (Thiel et al. J Gen Virol 82(6):1273-1281 (2001)). In some embodiments, modifications to RNA molecules as described herein may be incorporated during synthesis of RNA segments (e.g., through the inclusion of modified nucleotides or alternative binding chemistries), following synthesis of RNA segments through chemical or enzymatic processes, following assembly of one or more RNA segments, or a combination thereof.

[0713] In some embodiments, an mRNA of the system (e.g., an mRNA encoding a Gene Writer polypeptide) is synthesized in vitro using T7 polymerase-mediated DNA-dependent RNA transcription from a linearized DNA template, where UTP is optionally substituted with 1-methylpseudoUTP. In some embodiments, the transcript incorporates 5′ and 3′ UTRs, e.g., GGGAAAUAAGAGAGAAAAGAAGAGUAAGAAGAAAUAUAAGAGCCACC (SEQ ID NO: 1603) and UGAUAAUAGGCUGGAGCCUCGGUGGCCAUGCUUCUUGCCCCUUGGGCCUCCCCCCAGCCCCUCCUCCCCUUCCUGCACCCGUACCCCCGUGGUCUUUGAAUAAAGUCUGA (SEQ ID NO: 1604), or functional fragments or variants thereof, and optionally includes a poly-A tail, which can be encoded in the DNA template or added enzymatically following transcription. In some embodiments, a donor methyl group, e.g., S-adenosylmethionine, is added to a methylated capped RNA with cap 0 structure to yield a cap 1 structure that increases mRNA translation efficiency (Richner et al. Cell 168(6): P 1114-1125 (2017)).

[0714] In some embodiments, the transcript from a T7 promoter starts with a GGG motif. In some embodiments, a transcript from a T7 promoter does not start with a GGG motif. It has been shown that a GGG motif at the transcriptional start, despite providing superior yield, may lead to T7 RNAP synthesizing a ladder of poly(G) products as a result of slippage of the transcript on the three C residues in the template strand from +1 to +3 (Imburgio et al. Biochemistry 39(34):10419-10430 (2000). For tuning transcription levels and altering the transcription start site nucleotides to fit alternative 5′ UTRs, the teachings of Davidson et al. Pac Symp Biocomput 433-443 (2010) describe T7 promoter variants, and the methods of discovery thereof, that fulfill both of these traits.

[0715] In some embodiments, RNA segments may be connected to each other by covalent coupling. In some embodiments, an RNA ligase, e.g., T4 RNA ligase, may be used to connect two or more RNA segments to each other. When a reagent such as an RNA ligase is used, a 5′ terminus is typically linked to a 3′ terminus. In some embodiments, if two segments are connected, then there are two possible linear constructs that can be formed (i.e., (1) 5′-Segment 1-Segment 2-3′ and (2) 5′-Segment 2-Segment 1-3′). In some embodiments, intramolecular circularization can also occur. Both of these issues can be addressed, for example, by blocking one 5′ terminus or one 3′ terminus so that RNA ligase cannot ligate the terminus to another terminus. In embodiments, if a construct of 5′-Segment 1-Segment 2-3′ is desired, then placing a blocking group on either the 5′ end of Segment 1 or the 3′ end of Segment 2 may result in the formation of only the correct linear ligation product and/or prevent intramolecular circularization. Compositions and methods for the covalent connection of two nucleic acid (e.g., RNA) segments are disclosed, for example, in US20160102322A1 (incorporated herein by reference in its entirety), along with methods including the use of an RNA ligase to directionally ligate two single-stranded RNA segments to each other.

[0716] One example of an end blocker that may be used in conjunction with, for example, T4 RNA ligase, is a dideoxy terminator. T4 RNA ligase typically catalyzes the ATP-dependent ligation of phosphodiester bonds between 5′-phosphate and 3′-hydroxyl termini. In some embodiments, when T4 RNA ligase is used, suitable termini must be present on the termini being ligated. One means for blocking T4 RNA ligase on a terminus comprises failing to have the correct terminus format. Generally, termini of RNA segments with a 5-hydroxyl or a 3′-phosphate will not act as substrates for T4 RNA ligase.

[0717] Additional exemplary methods that may be used to connect RNA segments is by click chemistry (e.g., as described in U.S. Pat. Nos. 7,375,234 and 7,070,941, and US Patent Publication No. 2013/0046084, the entire disclosures of which are incorporated herein by reference). For example, one exemplary click chemistry reaction is between an alkyne group and an azide group (see FIG. 11 of US20160102322A1, which is incorporated herein by reference in its entirety). Any click reaction may potentially be used to link RNA segments (e.g., Cu-azide-alkyne, strain-promoted-azide-alkyne, staudinger ligation, tetrazine ligation, photo-induced tetrazole-alkene, thiol-ene, NHS esters, epoxides, isocyanates, and aldehyde-aminooxy). In some embodiments, ligation of RNA molecules using a click chemistry reaction is advantageous because click chemistry reactions are fast, modular, efficient, often do not produce toxic waste products, can be done with water as a solvent, and/or can be set up to be stereospecific.

[0718] In some embodiments, RNA segments may be connected using an Azide-Alkyne Huisgen Cycloaddition. reaction, which is typically a 1,3-dipolar cycloaddition between an azide and a terminal or internal alkyne to give a 1,2,3-triazole for the ligation of RNA segments. Without wishing to be bound by theory, one advantage of this ligation method may be that this reaction can initiated by the addition of required Cu(I) ions. Other exemplary mechanisms by which RNA segments may be connected include, without limitation, the use of halogens (F—, Br—, I—)/alkynes addition reactions, carbonyls/sulfhydryls/maleimide, and carboxyl/amine linkages. For example, one RNA molecule may be modified with thiol at 3′ (using disulfide amidite and universal support or disulfide modified support), and the other RNA molecule may be modified with acrydite at 5′ (using acrylic phosphoramidite), then the two RNA molecules can be connected by a Michael addition reaction. This strategy can also be applied to connecting multiple RNA molecules stepwise. Also provided are methods for linking more than two (e.g., three, four, five, six, etc.) RNA molecules to each other. Without wishing to be bound by theory, this may be useful when a desired RNA molecule is longer than about 40 nucleotides, e.g., such that chemical synthesis efficiency degrades, e.g., as noted in US20160102322A1 (incorporated herein by reference in its entirety).

[0719] By way of illustration, a tracrRNA is typically around 80 nucleotides in length. Such RNA molecules may be produced, for example, by processes such as in vitro transcription or chemical synthesis. In some embodiments, when chemical synthesis is used to produce such RNA molecules, they may be produced as a single synthesis product or by linking two or more synthesized RNA segments to each other. In embodiments, when three or more RNA segments are connected to each other, different methods may be used to link the individual segments together. Also, the RNA segments may be connected to each other in one pot (e.g., a container, vessel, well, tube, plate, or other receptacle), all at the same time, or in one pot at different times or in different pots at different times. In a non-limiting example, to assemble RNA Segments 1, 2 and 3 in numerical order, RNA Segments 1 and 2 may first be connected, 5′ to 3′, to each other. The reaction product may then be purified for reaction mixture components (e.g., by chromatography), then placed in a second pot, for connection of the 3′ terminus with the 5′ terminus of RNA Segment 3. The final reaction product may then be connected to the 5′ terminus of RNA Segment 3.

[0720] In another non-limiting example, RNA Segment 1 (about 30 nucleotides) is the target locus recognition sequence of a crRNA and a portion of Hairpin Region 1. RNA Segment 2 (about 35 nucleotides) contains the remainder of Hairpin Region 1 and some of the linear tracrRNA between Hairpin Region 1 and Hairpin Region 2. RNA Segment 3 (about 35 nucleotides) contains the remainder of the linear tracrRNA between Hairpin Region 1 and Hairpin Region 2 and all of Hairpin Region 2. In this example, RNA Segments 2 and 3 are linked, 5′ to 3′, using click chemistry. Further, the 5′ and 3′ end termini of the reaction product are both phosphorylated. The reaction product is then contacted with RNA Segment 1, having a 3′ terminal hydroxyl group, and T4 RNA ligase to produce a guide RNA molecule.

[0721] A number of additional linking chemistries may be used to connect RNA segments according to method of the invention. Some of these chemistries are set out in Table 6 of US20160102322A1, which is incorporated herein by reference in its entirety.

[0722] Template Nucleic Acid Composition

[0723] In some embodiments, the template nucleic acid is a template RNA. In some embodiments, the template RNA comprises one or more modified nucleotides. For example, in some embodiments, the template RNA comprises one or more deoxyribonucleotides. In some embodiments, regions of the template RNA are replaced by DNA nucleotides, e.g., to enhance stability of the molecule. For example, the 3′ end of the template may comprise DNA nucleotides, while the rest of the template comprises RNA nucleotides that can be reverse transcribed. For instance, in some embodiments, the heterologous object sequence is primarily or wholly made up of RNA nucleotides (e.g., at least 90%, 95%, 98%, or 99% RNA nucleotides). In some embodiments, one or both of the 3′ UTR and the 3′ target homology domain are primarily or wholly made up of DNA nucleotides (e.g., at least 90%, 95%, 98%, or 99% DNA nucleotides). In other embodiments, the template region for writing into the genome may comprise DNA nucleotides. In some embodiments, the DNA nucleotides in the template are copied into the genome by a domain capable of DNA-dependent DNA polymerase activity. In some embodiments, the DNA-dependent DNA polymerase activity is provided by a DNA polymerase domain in the polypeptide. In some embodiments, the DNA-dependent DNA polymerase activity is provided by a reverse transcriptase domain that is also capable of DNA-dependent DNA polymerization, e.g., second strand synthesis. In some embodiments, the DNA-dependent DNA polymerase activity is provided by a DNA polymerase. In some embodiments, the DNA-dependent DNA polymerase activity provided by a DNA polymerase domain in the polypeptide is not capable of reverse transcription activity. In some embodiments, the template molecule is composed of only DNA nucleotides. In some embodiments, the DNA template is polymerized into the genome by a DNA polymerase. In some embodiments, the template composed of DNA nucleotides comprises modified DNA nucleotides. In some embodiments, the template composed of DNA nucleotides comprises a modified backbone.

[0724] The nucleotides comprising the template of the Gene Writer™ system can be natural or modified bases, or a combination thereof. For example, the template may contain pseudouridine, dihydrouridine, inosine, 7-methylguanosine, or other modified bases. In some embodiments, the template may contain locked nucleic acid nucleotides. In some embodiments, the modified bases used in the template do not inhibit the reverse transcription of the template. In some embodiments, the modified bases used in the template may improve reverse transcription, e.g., specificity or fidelity.

### Additional Functional Characteristics for Gene Writers™

[0725] A Gene Writer as described herein may, in some instances, be characterized by one or more functional measurements or characteristics. In some embodiments, the DNA binding domain has one or more of the functional characteristics described below. In some embodiments, the RNA binding domain has one or more of the functional characteristics described below. In some embodiments, the endonuclease domain has one or more of the functional characteristics described below. In some embodiments, the reverse transcriptase domain has one or more of the functional characteristics described below. In some embodiments, the template (e.g., template RNA) has one or more of the functional characteristics described below. In some embodiments, the target site bound by the Gene Writer has one or more of the functional characteristics described below.

[0726] Gene Writer Polypeptide

[0727] DNA Binding Domain

[0728] In some embodiments, the DNA binding domain is capable of binding to a target sequence (e.g., a dsDNA target sequence) with greater affinity than a reference DNA binding domain. In some embodiments, the reference DNA binding domain is a DNA binding domain from R2_BM of B. mori. In some embodiments, the DNA binding domain is capable of binding to a target sequence (e.g., a dsDNA target sequence) with an affinity between 100 pM-10 nM (e.g., between 100 pM-1 nM or 1 nM-10 nM).

[0729] In some embodiments, the affinity of a DNA binding domain for its target sequence (e.g., dsDNA target sequence) is measured in vitro, e.g., by thermophoresis, e.g., as described in Asmari et al. Methods 146:107-119 (2018) (incorporated by reference herein in its entirety).

[0730] In embodiments, the DNA binding domain is capable of binding to its target sequence (e.g., dsDNA target sequence), e.g, with an affinity between 100 pM-10 nM (e.g., between 100 pM-1 nM or 1 nM-10 nM) in the presence of a molar excess of scrambled sequence competitor dsDNA, e.g., of about 100-fold molar excess.

[0731] In some embodiments, the DNA binding domain is found associated with its target sequence (e.g., dsDNA target sequence) more frequently than any other sequence in the genome of a target cell, e.g., human target cell, e.g., as measured by ChIP-seq (e.g., in HEK293T cells), e.g., as described in He and Pu (2010) Curr. Protoc Mol Biol Chapter 21 (incorporated herein by reference in its entirety). In some embodiments, the DNA binding domain is found associated with its target sequence (e.g., dsDNA target sequence) at least about 5-fold or 10-fold, more frequently than any other sequence in the genome of a target cell, e.g., as measured by ChIP-seq (e.g., in HEK293T cells), e.g., as described in He and Pu (2010), supra.

[0732] RNA Binding Domain

[0733] In some embodiments, the RNA binding domain is capable of binding to a template RNA with greater affinity than a reference RNA binding domain. In some embodiments, the reference RNA binding domain is an RNA binding domain from R2_BM of B. mori. In some embodiments, the RNA binding domain is capable of binding to a template RNA with an affinity between 100 pM-10 nM (e.g., between 100 pM-1 nM or 1 nM-10 nM). In some embodiments, the affinity of a RNA binding domain for its template RNA is measured in vitro, e.g., by thermophoresis, e.g., as described in Asmari et al. Methods 146:107-119 (2018) (incorporated by reference herein in its entirety). In some embodiments, the affinity of a RNA binding domain for its template RNA is measured in cells (e.g., by FRET or CLIP-Seq).

[0734] In some embodiments, the RNA binding domain is associated with the template RNA in vitro at a frequency at least about 5-fold or 10-fold higher than with a scrambled RNA. In some embodiments, the frequency of association between the RNA binding domain and the template RNA or scrambled RNA is measured by CLIP-seq, e.g., as described in Lin and Miles (2019) Nucleic Acids Res 47(11):5490-5501 (incorporated by reference herein in its entirety). In some embodiments, the RNA binding domain is associated with the template RNA in cells (e.g., in HEK293T cells) at a frequency at least about 5-fold or 10-fold higher than with a scrambled RNA. In some embodiments, the frequency of association between the RNA binding domain and the template RNA or scrambled RNA is measured by CLIP-seq, e.g., as described in Lin and Miles (2019), supra.

[0735] Endonuclease Domain

[0736] In some embodiments, the endonuclease domain is associated with the target dsDNA in vitro at a frequency at least about 5-fold or 10-fold higher than with a scrambled dsDNA. In some embodiments, the endonuclease domain is associated with the target dsDNA in vitro at a frequency at least about 5-fold or 10-fold higher than with a scrambled dsDNA, e.g., in a cell (e.g., a HEK293T cell). In some embodiments, the frequency of association between the endonuclease domain and the target DNA or scrambled DNA is measured by ChIP-seq, e.g., as described in He and Pu (2010) Curr. Protoc Mol Biol Chapter 21 (incorporated by reference herein in its entirety).

[0737] In some embodiments, the endonuclease domain can catalyze the formation of a nick at a target sequence, e.g., to an increase of at least about 5-fold or 10-fold relative to a non-target sequence (e.g., relative to any other genomic sequence in the genome of the target cell). In some embodiments, the level of nick formation is determined using NickSeq, e.g., as described in Elacqua et al. (2019) bioRxiv doi.org/10.1101/867937 (incorporated herein by reference in its entirety).

[0738] In some embodiments, the endonuclease domain is capable of nicking DNA in vitro. In embodiments, the nick results in an exposed base. In embodiments, the exposed base can be detected using a nuclease sensitivity assay, e.g., as described in Chaudhry and Weinfeld (1995) Nucleic Acids Res 23(19):3805-3809 (incorporated by reference herein in its entirety). In embodiments, the level of exposed bases (e.g., detected by the nuclease sensitivity assay) is increased by at least 10%, 50%, or more relative to a reference endonuclease domain. In some embodiments, the reference endonuclease domain is an endonuclease domain from R2_BM of B. mori.

[0739] In some embodiments, the endonuclease domain is capable of nicking DNA in a cell. In embodiments, the endonuclease domain is capable of nicking DNA in a HEK293T cell. In embodiments, an unrepaired nick that undergoes replication in the absence of Rad51 results in increased NHEJ rates at the site of the nick, which can be detected, e.g., by using a Rad51 inhibition assay, e.g., as described in Bothmer et al. (2017) Nat Commun 8:13905 (incorporated by reference herein in its entirety). In embodiments, NHEJ rates are increased above 0-5%. In embodiments, NHEJ rates are increased to 20-70% (e.g., between 30%-60% or 40-50%), e.g., upon Rad51 inhibition.

[0740] In some embodiments, the endonuclease domain releases the target after cleavage. In some embodiments, release of the target is indicated indirectly by assessing for multiple turnovers by the enzyme, e.g., as described in Yourik at al. RNA 25(1):35-44 (2019) (incorporated herein by reference in its entirety) and shown in FIG. 2. In some embodiments, the kₑₓₚ of an endonuclease domain is 1×10⁻³-1×10⁻5 min-1 as measured by such methods.

[0741] In some embodiments, the endonuclease domain has a catalytic efficiency (k_{cat}/Kₘ) greater than about 1×10⁸ s⁻¹ M⁻¹ in vitro. In embodiments, the endonuclease domain has a catalytic efficiency greater than about 1×10⁵, 1×10⁶, 1×10⁷, or 1×10⁸, s⁻¹ M⁻¹ in vitro. In embodiments, catalytic efficiency is determined as described in Chen et al. (2018) Science 360(6387):436-439 (incorporated herein by reference in its entirety). In some embodiments, the endonuclease domain has a catalytic efficiency (k_{cat}/Kₘ) greater than about 1×10⁸ s⁻¹ M⁻¹ in cells. In embodiments, the endonuclease domain has a catalytic efficiency greater than about 1×10⁵, 1×10⁶, 1×10⁷, or 1×10⁸ s⁻¹ M⁻¹ in cells.

[0742] Reverse Transcriptase Domain

[0743] In some embodiments, the reverse transcriptase domain has a lower probability of premature termination rate (P_{off}) in vitro relative to a reference reverse transcriptase domain. In some embodiments, the reference reverse transcriptase domain is a reverse transcriptase domain from R2_BM of B. mori or a viral reverse transcriptase domain, e.g., the RT domain from M-MLV.

[0744] In some embodiments, the reverse transcriptase domain has a lower probability of premature termination rate (P_{off}) in vitro of less than about 5×10⁻³/nt, 5×10⁻⁴/nt, or 5×10⁻⁶/nt, e.g., as measured on a 1094 nt RNA. In embodiments, the in vitro premature termination rate is determined as described in Bibillo and Eickbush (2002) J Biol Chem 277(38):34836-34845 (incorporated by reference herein its entirety).

[0745] In some embodiments, the reverse transcriptase domain is able to complete at least about 30% or 50% of integrations in cells. The percent of complete integrations can be measured by dividing the number of substantially full-length integration events (e.g., genomic sites that comprise at least 98% of the expected integrated sequence) by the number of total (including substantially full-length and partial) integration events in a population of cells. In embodiments, the integrations in cells is determined (e.g., across the integration site) using long-read amplicon sequencing, e.g., as described in Karst et al. (2020) bioRxiv doi.org/10.1101/645903 (incorporated by reference herein its in entirety).

[0746] In embodiments, quantifying integrations in cells comprises counting the fraction of integrations that contain at least about 75%, 80%, 85%, 90%, 95%, 96%, 97%, 98%, 99%, or 100% of the DNA sequence corresponding to the template RNA (e.g., a template RNA having a length of at least 0.05, 0.1, 0.5, 0.6, 0.7, 0.8, 0.9, 1, 1.5, 2, 3, 4, or 5 kb, e.g., a length between 0.5-0.6, 0.6-0.7, 0.7-0.8, 0.8-0.9, 1.0-1.2, 1.2-1.4, 1.4-1.6, 1.6-1.8, 1.8-2.0, 2-3, 3-4, or 4-5 kb).

[0747] In some embodiments, the reverse transcriptase domain is capable of polymerizing dNTPs in vitro. In embodiments, the reverse transciptase domain is capable of polymerizing dNTPs in vitro at a rate between 0.1-50 nt/sec (e.g., between 0.1-1, 1-10, or 10-50 nt/sec). In embodiments, polymerization of dNTPs by the reverse transcriptase domain is measured by a single-molecule assay, e.g., as described in Schwartz and Quake (2009) PNAS 106(48):20294-20299 (incorporated by reference in its entirety).

[0748] In some embodiments, the reverse transcriptase domain has an in vitro error rate (e.g., misincorporation of nucleotides) of between 1×10⁻³-1×10⁻⁴ or 1×10⁻⁴-1×10⁻⁵ substitutions/nt, e.g., as described in Yasukawa et al. (2017) Biochem Biophys Res Commun 492(2):147-153 (incorporated herein by reference in its entirety). In some embodiments, the reverse transcriptase domain has an error rate (e.g., misincorporation of nucleotides) in cells (e.g., HEK293T cells) of between 1×10⁻³-1×10⁻⁴ or 1×10⁻⁴-1×10⁻⁵ substitutions/nt, e.g., by long-read amplicon sequencing, e.g., as described in Karst et al. (2020) bioRxiv doi.org/10.1101/645903 (incorporated by reference herein in its entirety).

[0749] In some embodiments, the reverse transcriptase domain is capable of performing reverse transcription of a target RNA in vitro. In some embodiments, the reverse transcriptase requires a primer of at least 3 nt to initiate reverse transcription of a template. In some embodiments, reverse transcription of the target RNA is determined by detection of cDNA from the target RNA (e.g., when provided with a ssDNA primer, e.g., which anneals to the target with at least 3, 4, 5, 6, 7, 8, 9, or 10 nt at the 3′ end), e.g., as described in Bibillo and Eickbush (2002) J Biol Chem 277(38):34836-34845 (incorporated herein by reference in its entirety).

[0750] In some embodiments, the reverse transcriptase domain performs reverse transcription at least 5 or 10 times more efficiently (e.g., by cDNA production), e.g., when converting its RNA template to cDNA, for example, as compared to an RNA template lacking the protein binding motif (e.g., a 3′ UTR). In embodiments, efficiency of reverse transcription is measured as described in Yasukawa et al. (2017) Biochem Biophys Res Commun 492(2):147-153 (incorporated by reference herein in its entirety).

[0751] In some embodiments, the reverse transcriptase domain specifically binds a specific RNA template with higher frequency (e.g., about 5 or 10-fold higher frequency) than any endogenous cellular RNA, e.g., when expressed in cells (e.g., HEK293T cells). In embodiments, frequency of specific binding between the reverse transcriptase domain and the template RNA are measured by CLIP-seq, e.g., as described in Lin and Miles (2019) Nucleic Acids Res 47(11):5490-5501 (incorporated herein by reference in its entirety).

[0752] In some embodiments, a reverse transcriptase domain may comprise a mutation, e.g., as listed in Table 45. In embodiments, the mutation modifies, e.g., increases the stability and functionality of the RT domain. In some embodiments, the mutation modifies, e.g., increases processivity and template affinity of the RT domain. In some embodiments, the mutated RT domain may show at least 5 fold, at least 10 fold, at least 15 fold, at least 20 fold, at least 25 fold, at least 30 fold, at least 40 fold, at least 45 fold, at least 50 fold, at least 55 fold, at least 60 fold, at least 65 fold, at least 70 fold, at least 80 fold, at least 100 fold increase to processivity compared to an unmutated RT domain. In embodiments, a mutated RT domain may show at least at least 5 fold, at least 10 fold, at least 15 fold, at least 20 fold, at least 25 fold, at least 30 fold, at least 40 fold, at least 45 fold, at least 50 fold, at least 55 fold, at least 60 fold, at least 65 fold, at least 70 fold, at least 80 fold, at least 100 fold increase in template affinity compared to an unmutated RT domain. In some embodiments, a mutant RT domain may comprise one or more mutations selected from D200N/T330P/L603W, T306K, W313F, L139P, E607K.

Table 45 discloses mutations improve the properties of various reverse transcriptases. Core mutations expected to be the most impactful were applied across groups of retroviruses. Conservation of sequence across a group of viruses at one of these core mutations led to the installation of the mutation across that group (see Example 33, FIGS. 36 A and B). Sequence positions refer to the positions in MMLV RT. In some embodiments, a RT domain described herein comprises a mutation as described in Table 45.

TABLE 45
List of exemplary RT domain mutations

| Group | L139 | D200 | T306 | W313 | T330 | L603 | E607 |
|---|---|---|---|---|---|---|---|
| Gamma | | D200N | T306K | W313F | T330P | L603W | |
| Epsilon | | D200N | T306K | W313F | T330P | L603W | |
| Delta | L139P | D200N | X | X | T330P | L603W* | X |
| Beta | L139P | X | X | X | T330P | X | X |
| Spuma | | D200N | T306K | X | T330P | L603W | |

[0753] Cas-RT Fusions

[0754] In some embodiments, a GeneWriter polypeptide comprises a RT domain fused to a Cas molecule. In some embodiments, the Cas molecule is the DBD and/or the endonuclease domain of the GeneWriter polypeptide. In some embodiments, the an RT domain comprises Cas9. In some embodiments, the Cas9 may comprise a mutation, e.g., a disclosed in Table 40A. Table 46 discloses a list of exemplary Cas-RT fusion proteins.

[0755] In some embodiments, a Cas molecule in a GeneWriter polypeptide has a similar activity to an otherwise similar Cas molecule that is not fused to a RT domain. In some embodiments, the activity is at least 40%, 50%, 60%, 70%, 80%, or 90% of that of the otherwise similar Cas molecule. In some embodiments, the Cas molecule in the GeneWriter polypeptide may have an indel formation activity at least 40%, 50%, 60%, 70%, 80%, or 90% of that of an otherwise similar Cas molecule that is not fused to a RT domain, e.g., in an assay according to Example 32.

[0756] In some embodiments, a GeneWriter polypeptide comprises an amino acid sequence according to Table 46 below, or a sequence having at least 70%, 75%, 80%, 85%, 90%, 95%, 96%, 97%, 98%, or 99% identity thereto. In some embodiments, a nucleic acid encoding a GeneWriter polypeptide comprises a nucleic acid sequence according to Table 47, or a sequence having at least 70%, 75%, 80%, 85%, 90%, 95%, 96%, 97%, 98%, or 99% identity thereto.

TABLE 46
List of exemplary Gene Writer polypeptides comprising Cas-RT fusions

| | | | SEQ | RT | RT source | | SEQ |
|---|---|---|---|---|---|---|---|
| | Cas | | ID | retroviral | poly- | | ID |
| Name | domain | Linker | NO: | source | peptide | Gene Writer polypeptide sequence | NO: |
| Cas- | Cas9 | SGGSS | 1589 | Moloney | P03355 | MKRTADGSEFESPKKKRKVDKKYSIGLDIGTNSVG | 3560 |
| RT(MMLV) | (N863A) | GGSSG | | murine | | WAVITDEYKVPSKKFKVLGNTDRHSIKKNLIGALL | |
| | | SETPG | | leukemia | | FDSGETAEATRLKRTARRRYTRRKNRICYLQEIFS | |
| | | TSESA | | virus | | NEMAKVDDSFFHRLEESFLVEEDKKHERHPIFGNI | |
| | | TPESS | | (MMLV | | VDEVAYHEKYPTIYHLRKKLVDSTDKADLRLIYLA | |
| | | GGSSG | | or | | LAHMIKFRGHFLIEGDLNPDNSDVDKLFIQLVQTY | |
| | | GSS | | MLVMS) | | NQLFEENPINASGVDAKAILSARLSKSRRLENLIA | |
| | | | | | | QLPGEKKNGLFGNLIALSLGLTPNFKSNFDLAEDA | |
| | | | | | | KLQLSKDTYDDDLDNLLAQIGDQYADLFLAAKNLS | |
| | | | | | | DAILLSDILRVNTEITKAPLSASMIKRYDEHHQDL | |
| | | | | | | TLLKALVRQQLPEKYKEIFFDQSKNGYAGYIDGGA | |
| | | | | | | SQEEFYKFIKPILEKMDGTEELLVKLNREDLLRKQ | |
| | | | | | | RTFDNGSIPHQIHLGELHAILRRQEDFYPFLKDNR | |
| | | | | | | EKIEKILTFRIPYYVGPLARGNSRFAWMTRKSEET | |
| | | | | | | ITPWNFEEVVDKGASAQSFIERMTNFDKNLPNEKV | |
| | | | | | | LPKHSLLYEYFTVYNELTKVKYVTEGMRKPAFLSG | |
| | | | | | | EQKKAIVDLLFKTNRKVTVKQLKEDYFKKIECFDS | |
| | | | | | | VEISGVEDRFNASLGTYHDLLKIIKDKDFLDNEEN | |
| | | | | | | EDILEDIVLTLTLFEDREMIEERLKTYAHLFDDKV | |
| | | | | | | MKQLKRRRYTGWGRLSRKLINGIRDKQSGKTILDF | |
| | | | | | | LKSDGFANRNFMQLIHDDSLTFKEDIQKAQVSGQG | |
| | | | | | | DSLHEHIANLAGSPAIKKGILQTVKVVDELVKVMG | |
| | | | | | | RHKPENIVIEMARENQTTQKGQKNSRERMKRIEEG | |
| | | | | | | IKELGSQILKEHPVENTQLQNEKLYLYYLQNGRDM | |
| | | | | | | YVDQELDINRLSDYDVDHIVPQSFLKDDSIDNKVL | |
| | | | | | | TRSDKARGKSDNVPSEEVVKKMKNYWRQLLNAKLI | |
| | | | | | | TQRKFDNLTKAERGGLSELDKAGFIKRQLVETRQI | |
| | | | | | | TKHVAQILDSRMNTKYDENDKLIREVKVITLKSKL | |
| | | | | | | VSDFRKDFQFYKVREINNYHHAHDAYLNAVVGTAL | |
| | | | | | | IKKYPKLESEFVYGDYKVYDVRKMIAKSEQEIGKA | |
| | | | | | | TAKYFFYSNIMNFFKTEITLANGEIRKRPLIETNG | |
| | | | | | | ETGEIVWDKGRDFATVRKVLSMPQVNIVKKTEVQT | |
| | | | | | | GGFSKESILPKRNSDKLIARKKDWDPKKYGGFDSP | |
| | | | | | | TVAYSVLVVAKVEKGKSKKLKSVKELLGITIMERS | |
| | | | | | | SFEKNPIDFLEAKGYKEVKKDLIIKLPKYSLFELE | |
| | | | | | | NGRKRMLASAGELQKGNELALPSKYVNFLYLASHY | |
| | | | | | | EKLKGSPEDNEQKQLFVEQHKHYLDEIIEQISEFS | |
| | | | | | | KRVILADANLDKVLSAYNKHRDKPIREQAENIIHL | |
| | | | | | | FTLTNLGAPAAFKYFDTTIDRKRYTSTKEVLDATL | |
| | | | | | | IHQSITGLYETRIDLSQLGGDSGGSSGGSSGSETP | |
| | | | | | | GTSESATPESSGGSSGGSSTLNIEDEYRLHETSKE | |
| | | | | | | PDVSLGSTWLSDFPQAWAETGGMGLAVRQAPLIIP | |
| | | | | | | LKATSTPVSIKQYPMSQEARLGIKPHIQRLLDQGI | |
| | | | | | | LVPCQSPWNTPLLPVKKPGTNDYRPVQDLREVNKR | |
| | | | | | | VEDIHPTVPNPYNLLSGLPPSHQWYTVLDLKDAFF | |
| | | | | | | CLRLHPTSQPLFAFEWRDPEMGISGQLTWTRLPQG | |
| | | | | | | FKNSPTLFNEALHRDLADFRIQHPDLILLQYVDDL | |
| | | | | | | LLAATSELDCQQGTRALLQTLGNLGYRASAKKAQI | |
| | | | | | | CQKQVKYLGYLLKEGQRWLTEARKETVMGQPTPKT | |
| | | | | | | PRQLREFLGKAGFCRLFIPGFAEMAAPLYPLTKPG | |
| | | | | | | TLFNWGPDQQKAYQEIKQALLTAPALGLPDLTKPF | |
| | | | | | | ELFVDEKQGYAKGVLTQKLGPWRRPVAYLSKKLDP | |
| | | | | | | VAAGWPPCLRMVAAIAVLTKDAGKLTMGQPLVILA | |
| | | | | | | PHAVEALVKQPPDRWLSNARMTHYQALLLDTDRVQ | |
| | | | | | | FGPVVALNPATLLPLPEEGLQHNCLDILAEAHGTR | |
| | | | | | | PDLTDQPLPDADHTWYTDGSSLLQEGQRKAGAAVT | |
| | | | | | | TETEVIWAKALPAGTSAQRAELIALTQALKMAEGK | |
| | | | | | | KLNVYTDSRYAFATAHIHGEIYRRRGWLTSEGKEI | |
| | | | | | | KNKDEILALLKALFLPKRLSIIHCPGHQKGHSAEA | |
| | | | | | | RGNRMADQAARKAAITETPDTSTLLIENSSPSGGS | |
| | | | | | | KRTADGSEFEPKKKRKV | |
| Cas- | Cas9 | SGGSS | 1589 | Porcine | Q4VFZ2 | MAPKKKRKVGIHGVPAADKKYSIGLDIGTNSVGWA | 3561 |
| RT(PERV) | (N863A) | GGSSG | | endogenous | | VITDEYKVPSKKFKVLGNTDRHSIKKNLIGALLFD | |
| | | SETPG | | retrovirus | | SGETAEATRLKRTARRRYTRRKNRICYLQEIFSNE | |
| | | TSESA | | (PERV) | | MAKVDDSFFHRLEESFLVEEDKKHERHPIFGNIVD | |
| | | TPESS | | | | EVAYHEKYPTIYHLRKKLVDSTDKADLRLIYLALA | |
| | | GGSSG | | | | HMIKFRGHFLIEGDLNPDNSDVDKLFIQLVQTYNQ | |
| | | GSS | | | | LFEENPINASGVDAKAILSARLSKSRRLENLIAQL | |
| | | | | | | PGEKKNGLFGNLIALSLGLTPNFKSNFDLAEDAKL | |
| | | | | | | QLSKDTYDDDLDNLLAQIGDQYADLFLAAKNLSDA | |
| | | | | | | ILLSDILRVNTEITKAPLSASMIKRYDEHHQDLTL | |
| | | | | | | LKALVRQQLPEKYKEIFFDQSKNGYAGYIDGGASQ | |
| | | | | | | EEFYKFIKPILEKMDGTEELLVKLNREDLLRKQRT | |
| | | | | | | FDNGSIPHQIHLGELHAILRRQEDFYPFLKDNREK | |
| | | | | | | IEKILTFRIPYYVGPLARGNSRFAWMTRKSEETIT | |
| | | | | | | PWNFEEVVDKGASAQSFIERMTNFDKNLPNEKVLP | |
| | | | | | | KHSLLYEYFTVYNELTKVKYVTEGMRKPAFLSGEQ | |
| | | | | | | KKAIVDLLFKTNRKVTVKQLKEDYFKKIECFDSVE | |
| | | | | | | ISGVEDRFNASLGTYHDLLKIIKDKDFLDNEENED | |
| | | | | | | ILEDIVLTLTLFEDREMIEERLKTYAHLFDDKVMK | |
| | | | | | | QLKRRRYTGWGRLSRKLINGIRDKQSGKTILDFLK | |
| | | | | | | SDGFANRNFMQLIHDDSLTFKEDIQKAQVSGQGDS | |
| | | | | | | LHEHIANLAGSPAIKKGILQTVKVVDELVKVMGRH | |
| | | | | | | KPENIVIEMARENQTTQKGQKNSRERMKRIEEGIK | |
| | | | | | | ELGSQILKEHPVENTQLQNEKLYLYYLQNGRDMYV | |
| | | | | | | DQELDINRLSDYDVDHIVPQSFLKDDSIDNKVLTR | |
| | | | | | | SDKARGKSDNVPSEEVVKKMKNYWRQLLNAKLITQ | |
| | | | | | | RKFDNLTKAERGGLSELDKAGFIKRQLVETRQITK | |
| | | | | | | HVAQILDSRMNTKYDENDKLIREVKVITLKSKLVS | |
| | | | | | | DFRKDFQFYKVREINNYHHAHDAYLNAVVGTALIK | |
| | | | | | | KYPKLESEFVYGDYKVYDVRKMIAKSEQEIGKATA | |
| | | | | | | KYFFYSNIMNFFKTEITLANGEIRKRPLIETNGET | |
| | | | | | | GEIVWDKGRDFATVRKVLSMPQVNIVKKTEVQTGG | |
| | | | | | | FSKESILPKRNSDKLIARKKDWDPKKYGGFDSPTV | |
| | | | | | | AYSVLVVAKVEKGKSKKLKSVKELLGITIMERSSF | |
| | | | | | | EKNPIDFLEAKGYKEVKKDLIIKLPKYSLFELENG | |
| | | | | | | RKRMLASAGELQKGNELALPSKYVNFLYLASHYEK | |
| | | | | | | LKGSPEDNEQKQLFVEQHKHYLDEIIEQISEFSKR | |
| | | | | | | VILADANLDKVLSAYNKHRDKPIREQAENIIHLFT | |
| | | | | | | LTNLGAPAAFKYFDTTIDRKRYTSTKEVLDATLIH | |
| | | | | | | QSITGLYETRIDLSQLGGDSGGSSGGSSGSETPGT | |
| | | | | | | SESATPESSGGSSGGSSLDDEYRLYSPLVKPDQNI | |
| | | | | | | QFWLEQFPQAWAETAGMGLAKQVPPQVIQLKASAT | |
| | | | | | | PVSVRQYPLSKEAQEGIRPHVQRLIQQGILVPVQS | |
| | | | | | | PWNTPLLPVRKPGTNDYRPVQDLREVNKRVQDIHP | |
| | | | | | | TVPNPYNLLCALPPQRSWYTVLDLKDAFFCLRLHP | |
| | | | | | | TSQPLFAFEWRDPGTGRTGQLTWTRLPQGFKNSPT | |
| | | | | | | IFNEALHRDLANFRIQHPQVTLLQYVDDLLLAGAT | |
| | | | | | | KQDCLEGTKALLLELSDLGYRASAKKAQICRREVT | |
| | | | | | | YLGYSLRDGQRWLTEARKKTVVQIPAPTTAKQVRE | |
| | | | | | | FLGKAGFCRLFIPGFATLAAPLYPLTKPKGEFSWA | |
| | | | | | | PEHQKAFDAIKKALLSAPALALPDVTKPFTLYVDE | |
| | | | | | | RKGVARGVLTQTLGPWRRPVAYLSKKLDPVASGWP | |
| | | | | | | VCLKAIAAVAILVKDADKLTLGQNITVIAPHALEN | |
| | | | | | | IVRQPPDRWMTNARMTHYQSLLLTERVTFAPPAAL | |
| | | | | | | NPATLLPEETDEPVTHDCHQLLIEETGVRKDLTDI | |
| | | | | | | PLTGEVLTWFTDGSSYVVEGKRMAGAAVVDGTRTI | |
| | | | | | | WASSLPEGTSAQKAELMALTQALRLAEGKSINIYT | |
| | | | | | | DSRYAFATAHVHGAIYKQRGWLTSAGREIKNKEEI | |
| | | | | | | LSLLEALHLPKRLAIIHCPGHQKAKDPISRGNQMA | |
| | | | | | | DRVAKQAAQGVNLLP | |
| Cas- | Cas9 | SGGSS | 1589 | Murine | Q7SVK7 | MAPKKKRKVGIHGVPAADKKYSIGLDIGTNSVGWA | 3562 |
| RT(MLVB | (N863A) | GGSSG | | leukemia | | VITDEYKVPSKKFKVLGNTDRHSIKKNLIGALLFD | |
| M) | | SETPG | | virus | | SGETAEATRLKRTARRRYTRRKNRICYLQEIFSNE | |
| | | TSESA | | (MLVBM) | | MAKVDDSFFHRLEESFLVEEDKKHERHPIFGNIVD | |
| | | TPESS | | | | EVAYHEKYPTIYHLRKKLVDSTDKADLRLIYLALA | |
| | | GGSSG | | | | HMIKFRGHFLIEGDLNPDNSDVDKLFIQLVQTYNQ | |
| | | GSS | | | | LFEENPINASGVDAKAILSARLSKSRRLENLIAQL | |
| | | | | | | PGEKKNGLFGNLIALSLGLTPNFKSNFDLAEDAKL | |
| | | | | | | QLSKDTYDDDLDNLLAQIGDQYADLFLAAKNLSDA | |
| | | | | | | ILLSDILRVNTEITKAPLSASMIKRYDEHHQDLTL | |
| | | | | | | LKALVRQQLPEKYKEIFFDQSKNGYAGYIDGGASQ | |
| | | | | | | EEFYKFIKPILEKMDGTEELLVKLNREDLLRKQRT | |
| | | | | | | FDNGSIPHQIHLGELHAILRRQEDFYPFLKDNREK | |
| | | | | | | IEKILTFRIPYYVGPLARGNSRFAWMTRKSEETIT | |
| | | | | | | PWNFEEVVDKGASAQSFIERMTNFDKNLPNEKVLP | |
| | | | | | | KHSLLYEYFTVYNELTKVKYVTEGMRKPAFLSGEQ | |
| | | | | | | KKAIVDLLFKTNRKVTVKQLKEDYFKKIECFDSVE | |
| | | | | | | ISGVEDRFNASLGTYHDLLKIIKDKDFLDNEENED | |
| | | | | | | ILEDIVLTLTLFEDREMIEERLKTYAHLFDDKVMK | |
| | | | | | | QLKRRRYTGWGRLSRKLINGIRDKQSGKTILDFLK | |
| | | | | | | SDGFANRNFMQLIHDDSLTFKEDIQKAQVSGQGDS | |
| | | | | | | LHEHIANLAGSPAIKKGILQTVKVVDELVKVMGRH | |
| | | | | | | KPENIVIEMGRDMYVDQELDINRLSDYDVDHIVPQ | |
| | | | | | | SFLKDDSIDNKVLTRSDKARGKSDNVPSEEVVKKM | |
| | | | | | | KNYWRQLLNAKLITQRKFDNLTKAERGGLSELDKA | |
| | | | | | | GFIKRQLVETRQITKHVAQILDSRMNTKYDENDKL | |
| | | | | | | IREVKVITLKSKLVSDFRKDFQFYKVREINNYHHA | |
| | | | | | | HDAYLNAVVGTALIKKYPKLESEFVYGDYKVYDVR | |
| | | | | | | KMIAKSEQEIGKATAKYFFYSNIMNFFKTEITLAN | |
| | | | | | | GEIRKRPLIETNGETGEIVWDKGRDFATVRKVLSM | |
| | | | | | | PQVNIVKKTEVQTGGFSKESILPKRNSDKLIARKK | |
| | | | | | | DWDPKKYGGFDSPTVAYSVLVVAKVEKGKSKKLKS | |
| | | | | | | VKELLGITIMERSSFEKNPIDFLEAKGYKEVKKDL | |
| | | | | | | IIKLPKYSLFELENGRKRMLASAGELQKGNELALP | |
| | | | | | | SKYVNFLYLASHYEKLKGSPEDNEQKQLFVEQHKH | |
| | | | | | | YLDEIIEQISEFSKRVILADANLDKVLSAYNKHRD | |
| | | | | | | KPIREQAENIIHLFTLTNLGAPAAFKYFDTTIDRK | |
| | | | | | | RYTSTKEVLDATLIHQSITGLYETRIDLSQLGGDS | |
| | | | | | | GGSSGGSSGSETPGTSESATPESSGGSSGGSSLGI | |
| | | | | | | EDEYRLHETSTEPDVSLGSTWLSDFPQAWAETGGM | |
| | | | | | | GLAVRQAPLIIPLKATSTPVSIQQYPMSHEARLGI | |
| | | | | | | KPHIQRLLDQGILVPCQSPWNTPLLPVKKPGTNDY | |
| | | | | | | RPVQDLREVNKRVEDIHPTVPNPYNLLSGLPPSHQ | |
| | | | | | | WYTVLDLKDAFFCLRLHPTSQPLFAFEWRDPGMGI | |
| | | | | | | SGQLTWTRLPQGFKNSPTLFNEALHRDLADFRIQH | |
| | | | | | | PDLILLQYVDDILLAATSELDCQQGTRALLQTLGD | |
| | | | | | | LGYRASAKKAQICQKQVKYLGYLLREGQRWLTEAR | |
| | | | | | | KETVMGQPVPKTPRQLREFLGKAGFCRLFIPGFAE | |
| | | | | | | MAAPLYPLTKPGTLFSWGPDQQKAYQEIKQALLTA | |
| | | | | | | PALGLPDLTKPFELFVDEKQGYAKGVLTQKLGPWR | |
| | | | | | | RPVAYLSKKLDPVAAGWPPCLRMVAAIAVLTKDAG | |
| | | | | | | KLTMGQPLVILAPHAVEALVKQPPDRWLSNARMTH | |
| | | | | | | YQAMLLDTDRVQFGPVVALNPATLLPLPEEGAPHD | |
| | | | | | | CLEILAETHGTRPDLTDQPIPDADHTWYTDGSSFL | |
| | | | | | | QEGQRKAGAAVTTETEVIWAGALPAGTSAQRAELI | |
| | | | | | | ALTQALKMAEGKRLNVYTDSRYAFATAHIHGEIYR | |
| | | | | | | RRGWLTSEGREIKNKSEILALLKALFLPKRLSIIH | |
| | | | | | | CLGHQKGDSAEARGNRLADQAAREAAIKTPPDTST | |
| | | | | | | LLI | |
| Cas- | Cas9 | SGGSS | 1589 | Mouse | P03365 | MAPKKKRKVGIHGVPAADKKYSIGLDIGTNSVGWA | 3563 |
| RT | (N863A) | GGSSG | | mammary | | VITDEYKVPSKKFKVLGNTDRHSIKKNLIGALLFD | |
| (MMTVB) | | SETPG | | tumor | | SGETAEATRLKRTARRRYTRRKNRICYLQEIFSNE | |
| | | TSESA | | virus | | MAKVDDSFFHRLEESFLVEEDKKHERHPIFGNIVD | |
| | | TPESS | | (MMTVB) | | EVAYHEKYPTIYHLRKKLVDSTDKADLRLIYLALA | |
| | | GGSSG | | | | HMIKFRGHFLIEGDLNPDNSDVDKLFIQLVQTYNQ | |
| | | GSS | | | | LFEENPINASGVDAKAILSARLSKSRRLENLIAQL | |
| | | | | | | PGEKKNGLFGNLIALSLGLTPNFKSNFDLAEDAKL | |
| | | | | | | QLSKDTYDDDLDNLLAQIGDQYADLFLAAKNLSDA | |
| | | | | | | ILLSDILRVNTEITKAPLSASMIKRYDEHHQDLTL | |
| | | | | | | LKALVRQQLPEKYKEIFFDQSKNGYAGYIDGGASQ | |
| | | | | | | EEFYKFIKPILEKMDGTEELLVKLNREDLLRKQRT | |
| | | | | | | FDNGSIPHQIHLGELHAILRRQEDFYPFLKDNREK | |
| | | | | | | IEKILTFRIPYYVGPLARGNSRFAWMTRKSEETIT | |
| | | | | | | PWNFEEVVDKGASAQSFIERMTNFDKNLPNEKVLP | |
| | | | | | | KHSLLYEYFTVYNELTKVKYVTEGMRKPAFLSGEQ | |
| | | | | | | KKAIVDLLFKTNRKVTVKQLKEDYFKKIECFDSVE | |
| | | | | | | ISGVEDRFNASLGTYHDLLKIIKDKDFLDNEENED | |
| | | | | | | ILEDIVLTLTLFEDREMIEERLKTYAHLFDDKVMK | |
| | | | | | | QLKRRRYTGWGRLSRKLINGIRDKQSGKTILDFLK | |
| | | | | | | SDGFANRNFMQLIHDDSLTFKEDIQKAQVSGQGDS | |
| | | | | | | LHEHIANLAGSPAIKKGILQTVKVVDELVKVMGRH | |
| | | | | | | KPENIVIEMARENQTTQKGQKNSRERMKRIEEGIK | |
| | | | | | | ELGSQILKEHPVENTQLQNEKLYLYYLQNGRDMYV | |
| | | | | | | DQELDINRLSDYDVDHIVPQSFLKDDSIDNKVLTR | |
| | | | | | | SDKARGKSDNVPSEEVVKKMKNYWRQLLNAKLITQ | |
| | | | | | | RKFDNLTKAERGGLSELDKAGFIKRQLVETRQITK | |
| | | | | | | HVAQILDSRMNTKYDENDKLIREVKVITLKSKLVS | |
| | | | | | | DFRKDFQFYKVREINNYHHAHDAYLNAVVGTALIK | |
| | | | | | | KYPKLESEFVYGDYKVYDVRKMIAKSEQEIGKATA | |
| | | | | | | KYFFYSNIMNFFKTEITLANGEIRKRPLIETNGET | |
| | | | | | | GEIVWDKGRDFATVRKVLSMPQVNIVKKTEVQTGG | |
| | | | | | | FSKESILPKRNSDKLIARKKDWDPKKYGGFDSPTV | |
| | | | | | | AYSVLVVAKVEKGKSKKLKSVKELLGITIMERSSF | |
| | | | | | | EKNPIDFLEAKGYKEVKKDLIIKLPKYSLFELENG | |
| | | | | | | RKRMLASAGELQKGNELALPSKYVNFLYLASHYEK | |
| | | | | | | LKGSPEDNEQKQLFVEQHKHYLDEIIEQISEFSKR | |
| | | | | | | VILADANLDKVLSAYNKHRDKPIREQAENIIHLFT | |
| | | | | | | LTNLGAPAAFKYFDTTIDRKRYTSTKEVLDATLIH | |
| | | | | | | QSITGLYETRIDLSQLGGDSGGSSGGSSGSETPGT | |
| | | | | | | SESATPESSGGSSGGSSVQEISDSRPMLHIYLNGR | |
| | | | | | | RFLGLLDTGADKTCIAGRDWPANWPIHQTESSLQG | |
| | | | | | | LGMACGVARSSQPLRWQHEDKSGIIHPFVIPTLPF | |
| | | | | | | TLWGRDIMKDIKVRLMTDSPDDSQDLMIGAIESNL | |
| | | | | | | FADQISWKSDQPVWLNQWPLKQEKLQALQQLVTEQ | |
| | | | | | | LQLGHLEESNSPWNTPVFVIKKKSGKWRLLQDLRA | |
| | | | | | | VNATMHDMGALQPGLPSPVAVPKGWEIIIIDLQDC | |
| | | | | | | FFNIKLHPEDCKRFAFSVPSPNFKRPYQRFQWKVL | |
| | | | | | | PQGMKNSPTLCQKFVDKAILTVRDKYQDSYIVHYM | |
| | | | | | | DDILLAHPSRSIVDEILTSMIQALNKHGLVVSTEK | |
| | | | | | | IQKYDNLKYLGTHIQGDSVSYQKLQIRTDKLRTLN | |
| | | | | | | DFQKLLGNINWIRPFLKLTTGELKPLFEILNGDSN | |
| | | | | | | PISTRKLTPEACKALQLMNERLSTARVKRLDLSQP | |
| | | | | | | WSLCILKTEYTPTACLWQDGVVEWIHLPHISPKVI | |
| | | | | | | TPYDIFCTQLIIKGRHRSKELFSKDPDYIVVPYTK | |
| | | | | | | VQFDLLLQEKEDWPISLLGFLGEVHFHLPKDPLLT | |
| | | | | | | FTLQTAIIFPHMTSTTPLEKGIVIFTDGSANGRSV | |
| | | | | | | TYIQGREPIIKENTQNTAQQAEIVAVITAFEEVSQ | |
| | | | | | | PFNLYTDSKYVTGLFPEIETATLSPRTKIYTELKH | |
| | | | | | | LQRLIHKRQEKFYIGHIRGHTGLPGPLAQGNAYAD | |
| | | | | | | SLTRILTA(SEQ ID NO: 3563) | |
| Cas- | Cas9 | SGGSS | 1589 | Mason- | P07572 | MAPKKKRKVGIHGVPAADKKYSIGLDIGTNSVGWA | 3564 |
| RT | (N863A) | GGSSG | | Pfizer | | VITDEYKVPSKKFKVLGNTDRHSIKKNLIGALLFD | |
| (MPMV) | | SETPG | | monkey | | SGETAEATRLKRTARRRYTRRKNRICYLQEIFSNE | |
| | | TSESA | | virus | | MAKVDDSFFHRLEESFLVEEDKKHERHPIFGNIVD | |
| | | TPESS | | (MPMV) | | EVAYHEKYPTIYHLRKKLVDSTDKADLRLIYLALA | |
| | | GGSSG | | | | HMIKFRGHFLIEGDLNPDNSDVDKLFIQLVQTYNQ | |
| | | GSS | | | | LFEENPINASGVDAKAILSARLSKSRRLENLIAQL | |
| | | | | | | PGEKKNGLFGNLIALSLGLTPNFKSNFDLAEDAKL | |
| | | | | | | QLSKDTYDDDLDNLLAQIGDQYADLFLAAKNLSDA | |
| | | | | | | ILLSDILRVNTEITKAPLSASMIKRYDEHHQDLTL | |
| | | | | | | LKALVRQQLPEKYKEIFFDQSKNGYAGYIDGGASQ | |
| | | | | | | EEFYKFIKPILEKMDGTEELLVKLNREDLLRKQRT | |
| | | | | | | FDNGSIPHQIHLGELHAILRRQEDFYPFLKDNREK | |
| | | | | | | IEKILTFRIPYYVGPLARGNSRFAWMTRKSEETIT | |
| | | | | | | PWNFEEVVDKGASAQSFIERMTNFDKNLPNEKVLP | |
| | | | | | | KHSLLYEYFTVYNELTKVKYVTEGMRKPAFLSGEQ | |
| | | | | | | KKAIVDLLFKTNRKVTVKQLKEDYFKKIECFDSVE | |
| | | | | | | ISGVEDRFNASLGTYHDLLKIIKDKDFLDNEENED | |
| | | | | | | ILEDIVLTLTLFEDREMIEERLKTYAHLFDDKVMK | |
| | | | | | | QLKRRRYTGWGRLSRKLINGIRDKQSGKTILDFLK | |
| | | | | | | SDGFANRNFMQLIHDDSLTFKEDIQKAQVSGQGDS | |
| | | | | | | LHEHIANLAGSPAIKKGILQTVKVVDELVKVMGRH | |
| | | | | | | KPENIVIEMARENQTTQKGQKNSRERMKRIEEGIK | |
| | | | | | | ELGSQILKEHPVENTQLQNEKLYLYYLQNGRDMYV | |
| | | | | | | DQELDINRLSDYDVDHIVPQSFLKDDSIDNKVLTR | |
| | | | | | | SDKARGKSDNVPSEEVVKKMKNYWRQLLNAKLITQ | |
| | | | | | | RKFDNLTKAERGGLSELDKAGFIKRQLVETRQITK | |
| | | | | | | HVAQILDSRMNTKYDENDKLIREVKVITLKSKLVS | |
| | | | | | | DFRKDFQFYKVREINNYHHAHDAYLNAVVGTALIK | |
| | | | | | | KYPKLESEFVYGDYKVYDVRKMIAKSEQEIGKATA | |
| | | | | | | KYFFYSNIMNFFKTEITLANGEIRKRPLIETNGET | |
| | | | | | | GEIVWDKGRDFATVRKVLSMPQVNIVKKTEVQTGG | |
| | | | | | | FSKESILPKRNSDKLIARKKDWDPKKYGGFDSPTV | |
| | | | | | | AYSVLVVAKVEKGKSKKLKSVKELLGITIMERSSF | |
| | | | | | | EKNPIDFLEAKGYKEVKKDLIIKLPKYSLFELENG | |
| | | | | | | RKRMLASAGELQKGNELALPSKYVNFLYLASHYEK | |
| | | | | | | LKGSPEDNEQKQLFVEQHKHYLDEIIEQISEFSKR | |
| | | | | | | VILADANLDKVLSAYNKHRDKPIREQAENIIHLFT | |
| | | | | | | LTNLGAPAAFKYFDTTIDRKRYTSTKEVLDATLIH | |
| | | | | | | QSITGLYETRIDLSQLGGDSGGSSGGSSGSETPGT | |
| | | | | | | SESATPESSGGSSGGSSTAAIDILAPQQCAEPITW | |
| | | | | | | KSDEPVWVDQWPLTNDKLAAAQQLVQEQLEAGHIT | |
| | | | | | | ESSSPWNTPIFVIKKKSGKWRLLQDLRAVNATMVL | |
| | | | | | | MGALQPGLPSPVAIPQGYLKIIIDLKDCFFSIPLH | |
| | | | | | | PSDQKRFAFSLPSTNFKEPMQRFQWKVLPQGMANS | |
| | | | | | | PTLCQKYVATAIHKVRHAWKQMYIIHYMDDILIAG | |
| | | | | | | KDGQQVLQCFDQLKQELTAAGLHIAPEKVQLQDPY | |
| | | | | | | TYLGFELNGPKITNQKAVIRKDKLQTLNDFQKLLG | |
| | | | | | | DINWLRPYLKLTTGDLKPLFDTLKGDSDPNSHRSL | |
| | | | | | | SKEALASLEKVETAIAEQFVTHINYSLPLIFLIFN | |
| | | | | | | TALTPTGLFWQDNPIMWIHLPASPKKVLLPYYDAI | |
| | | | | | | ADLIILGRDHSKKYFGIEPSTIIQPYSKSQIDWLM | |
| | | | | | | QNTEMWPIACASFVGILDNHYPPNKLIQFCKLHTF | |
| | | | | | | VFPQIISKTPLNNALLVFTDGSSTGMAAYTLTDTT | |
| | | | | | | IKFQTNLNSAQLVELQALIAVLSAFPNQPLNIYTD | |
| | | | | | | SAYLAHSIPLLETVAQIKHISETAKLFLQCQQLIY | |
| | | | | | | NRSIPFYIGHVRAHSGLPGPIAQGNQRADLATKIV | |
| | | | | | | ASNINTN | |

TABLE 47
Exemplary Gene Writer polypeptide
coding mRNAs sequences

| Name | mRNA (5′ to 3′) | Tail |
|---|---|---|
| Cas9- | AGGAAAUAAGAGAGAAAAGAAGAGU | (A)80 |
| RT(MMLV) | AAGAAGAAAUAUAAGAGCCACCAUG | (SEQ |
| | AAACGGACAGCCGACGGAAGCGAGU | ID |
| | UCGAGUCACCAAAGAAGAAGCGGAA | NO: |
| | AGUCGACAAGAAGUACAGCAUCGGC | 3782) |
| | CUGGACAUCGGCACCAACUCUGUGG | |
| | GCUGGGCCGUGAUCACCGACGAGUA | |
| | CAAGGUGCCCAGCAAGAAAUUCAAG | |
| | GUGCUGGGCAACACCGACCGGCACA | |
| | GCAUCAAGAAGAACCUGAUCGGAGC | |
| | CCUGCUGUUCGACAGCGGCGAAACA | |
| | GCCGAGGCCACCCGGCUGAAGAGAA | |
| | CCGCCAGAAGAAGAUACACCAGACG | |
| | GAAGAACCGGAUCUGCUAUCUGCAA | |
| | GAGAUCUUCAGCAACGAGAUGGCCA | |
| | AGGUGGACGACAGCUUCUUCCACAG | |
| | ACUGGAAGAGUCCUUCCUGGUGGAA | |
| | GAGGAUAAGAAGCACGAGCGGCACC | |
| | CCAUCUUCGGCAACAUCGUGGACGA | |
| | GGUGGCCUACCACGAGAAGUACCCC | |
| | ACCAUCUACCACCUGAGAAAGAAAC | |
| | UGGUGGACAGCACCGACAAGGCCGA | |
| | CCUGCGGCUGAUCUAUCUGGCCCUG | |
| | GCCCACAUGAUCAAGUUCCGGGGCC | |
| | ACUUCCUGAUCGAGGGCGACCUGAA | |
| | CCCCGACAACAGCGACGUGGACAAG | |
| | CUGUUCAUCCAGCUGGUGCAGACCU | |
| | ACAACCAGCUGUUCGAGGAAAACCC | |
| | CAUCAACGCCAGCGGCGUGGACGCC | |
| | AAGGCCAUCCUGUCUGCCAGACUGA | |
| | GCAAGAGCAGACGGCUGGAAAAUCU | |
| | GAUCGCCCAGCUGCCCGGCGAGAAG | |
| | AAGAAUGGCCUGUUCGGAAACCUGA | |
| | UUGCCCUGAGCCUGGGCCUGACCCC | |
| | CAACUUCAAGAGCAACUUCGACCUG | |
| | GCCGAGGAUGCCAAACUGCAGCUGA | |
| | GCAAGGACACCUACGACGACGACCU | |
| | GGACAACCUGCUGGCCCAGAUCGGC | |
| | GACCAGUACGCCGACCUGUUUCUGG | |
| | CCGCCAAGAACCUGUCCGACGCCAU | |
| | CCUGCUGAGCGACAUCCUGAGAGUG | |
| | AACACCGAGAUCACCAAGGCCCCCC | |
| | UGAGCGCCUCUAUGAUCAAGAGAUA | |
| | CGACGAGCACCACCAGGACCUGACC | |
| | CUGCUGAAAGCUCUCGUGCGGCAGC | |
| | AGCUGCCUGAGAAGUACAAAGAGAU | |
| | UUUCUUCGACCAGAGCAAGAACGGC | |
| | UACGCCGGCUACAUUGACGGCGGAG | |
| | CCAGCCAGGAAGAGUUCUACAAGUU | |
| | CAUCAAGCCCAUCCUGGAAAAGAUG | |
| | GACGGCACCGAGGAACUGCUCGUGA | |
| | AGCUGAACAGAGAGGACCUGCUGCG | |
| | GAAGCAGCGGACCUUCGACAACGGC | |
| | AGCAUCCCCCACCAGAUCCACCUGG | |
| | GAGAGCUGCACGCCAUUCUGCGGCG | |
| | GCAGGAAGAUUUUUACCCAUUCCUG | |
| | AAGGACAACCGGGAAAAGAUCGAGA | |
| | AGAUCCUGACCUUCCGCAUCCCCUA | |
| | CUACGUGGGCCCUCUGGCCAGGGGA | |
| | AACAGCAGAUUCGCCUGGAUGACCA | |
| | GAAAGAGCGAGGAAACCAUCACCCC | |
| | CUGGAACUUCGAGGAAGUGGUGGAC | |
| | AAGGGCGCUUCCGCCCAGAGCUUCA | |
| | UCGAGCGGAUGACCAACUUCGAUAA | |
| | GAACCUGCCCAACGAGAAGGUGCUG | |
| | CCCAAGCACAGCCUGCUGUACGAGU | |
| | ACUUCACCGUGUAUAACGAGCUGAC | |
| | CAAAGUGAAAUACGUGACCGAGGGA | |
| | AUGAGAAAGCCCGCCUUCCUGAGCG | |
| | GCGAGCAGAAAAAGGCCAUCGUGGA | |
| | CCUGCUGUUCAAGACCAACCGGAAA | |
| | GUGACCGUGAAGCAGCUGAAAGAGG | |
| | ACUACUUCAAGAAAAUCGAGUGCUU | |
| | CGACUCCGUGGAAAUCUCCGGCGUG | |
| | GAAGAUCGGUUCAACGCCUCCCUGG | |
| | GCACAUACCACGAUCUGCUGAAAAU | |
| | UAUCAAGGACAAGGACUUCCUGGAC | |
| | AAUGAGGAAAACGAGGACAUUCUGG | |
| | AAGAUAUCGUGCUGACCCUGACACU | |
| | GUUUGAGGACAGAGAGAUGAUCGAG | |
| | GAACGGCUGAAAACCUAUGCCCACC | |
| | UGUUCGACGACAAAGUGAUGAAGCA | |
| | GCUGAAGCGGCGGAGAUACACCGGC | |
| | UGGGGCAGGCUGAGCCGGAAGCUGA | |
| | UCAACGGCAUCCGGGACAAGCAGUC | |
| | CGGCAAGACAAUCCUGGAUUUCCUG | |
| | AAGUCCGACGGCUUCGCCAACAGAA | |
| | ACUUCAUGCAGCUGAUCCACGACGA | |
| | CAGCCUGACCUUUAAAGAGGACAUC | |
| | CAGAAAGCCCAGGUGUCCGGCCAGG | |
| | GCGAUAGCCUGCACGAGCACAUUGC | |
| | CAAUCUGGCCGGCAGCCCCGCCAUU | |
| | AAGAAGGGCAUCCUGCAGACAGUGA | |
| | AGGUGGUGGACGAGCUCGUGAAAGU | |
| | GAUGGGCCGGCACAAGCCCGAGAAC | |
| | AUCGUGAUCGAAAUGGCCAGAGAGA | |
| | ACCAGACCACCCAGAAGGGACAGAA | |
| | GAACAGCCGCGAGAGAAUGAAGCGG | |
| | AUCGAAGAGGGCAUCAAAGAGCUGG | |
| | GCAGCCAGAUCCUGAAAGAACACCC | |
| | CGUGGAAAACACCCAGCUGCAGAAC | |
| | GAGAAGCUGUACCUGUACUACCUGC | |
| | AGAAUGGGCGGGAUAUGUACGUGGA | |
| | CCAGGAACUGGACAUCAACCGGCUG | |
| | UCCGACUACGAUGUGGACCAUAUCG | |
| | UGCCUCAGAGCUUUCUGAAGGACGA | |
| | CUCCAUCGACAACAAGGUGCUGACC | |
| | AGAAGCGACAAGGCCCGGGGCAAGA | |
| | GCGACAACGUGCCCUCCGAAGAGGU | |
| | CGUGAAGAAGAUGAAGAACUACUGG | |
| | CGGCAGCUGCUGAACGCCAAGCUGA | |
| | UUACCCAGAGAAAGUUCGACAAUCU | |
| | GACCAAGGCCGAGAGAGGCGGCCUG | |
| | AGCGAACUGGAUAAGGCCGGCUUCA | |
| | UCAAGAGACAGCUGGUGGAAACCCG | |
| | GCAGAUCACAAAGCACGUGGCACAG | |
| | AUCCUGGACUCCCGGAUGAACACUA | |
| | AGUACGACGAGAAUGACAAGCUGAU | |
| | CCGGGAAGUGAAAGUGAUCACCCUG | |
| | AAGUCCAAGCUGGUGUCCGAUUUCC | |
| | GGAAGGAUUUCCAGUUUUACAAAGU | |
| | GCGCGAGAUCAACAACUACCACCAC | |
| | GCCCACGACGCCUACCUGAACGCCG | |
| | UCGUGGGAACCGCCCUGAUCAAAAA | |
| | GUACCCUAAGCUGGAAAGCGAGUUC | |
| | GUGUACGGCGACUACAAGGUGUACG | |
| | ACGUGCGGAAGAUGAUCGCCAAGAG | |
| | CGAGCAGGAAAUCGGCAAGGCUACC | |
| | GCCAAGUACUUCUUCUACAGCAACA | |
| | UCAUGAACUUUUUCAAGACCGAGAU | |
| | UACCCUGGCCAACGGCGAGAUCCGG | |
| | AAGCGGCCUCUGAUCGAGACAAACG | |
| | GCGAAACCGGGGAGAUCGUGUGGGA | |
| | UAAGGGCCGGGAUUUUGCCACCGUG | |
| | CGGAAAGUGCUGAGCAUGCCCCAAG | |
| | UGAAUAUCGUGAAAAAGACCGAGGU | |
| | GCAGACAGGCGGCUUCAGCAAAGAG | |
| | UCUAUCCUGCCCAAGAGGAACAGCG | |
| | AUAAGCUGAUCGCCAGAAAGAAGGA | |
| | CUGGGACCCUAAGAAGUACGGCGGC | |
| | UUCGACAGCCCCACCGUGGCCUAUU | |
| | CUGUGCUGGUGGUGGCCAAAGUGGA | |
| | AAAGGGCAAGUCCAAGAAACUGAAG | |
| | AGUGUGAAAGAGCUGCUGGGGAUCA | |
| | CCAUCAUGGAAAGAAGCAGCUUCGA | |
| | GAAGAAUCCCAUCGACUUUCUGGAA | |
| | GCCAAGGGCUACAAAGAAGUGAAAA | |
| | AGGACCUGAUCAUCAAGCUGCCUAA | |
| | GUACUCCCUGUUCGAGCUGGAAAAC | |
| | GGCCGGAAGAGAAUGCUGGCCUCUG | |
| | CCGGCGAACUGCAGAAGGGAAACGA | |
| | ACUGGCCCUGCCCUCCAAAUAUGUG | |
| | AACUUCCUGUACCUGGCCAGCCACU | |
| | AUGAGAAGCUGAAGGGCUCCCCCGA | |
| | GGAUAAUGAGCAGAAACAGCUGUUU | |
| | GUGGAACAGCACAAGCACUACCUGG | |
| | ACGAGAUCAUCGAGCAGAUCAGCGA | |
| | GUUCUCCAAGAGAGUGAUCCUGGCC | |
| | GACGCUAAUCUGGACAAAGUGCUGU | |
| | CCGCCUACAACAAGCACCGGGAUAA | |
| | GCCCAUCAGAGAGCAGGCCGAGAAU | |
| | AUCAUCCACCUGUUUACCCUGACCA | |
| | AUCUGGGAGCCCCUGCCGCCUUCAA | |
| | GUACUUUGACACCACCAUCGACCGG | |
| | AAGAGGUACACCAGCACCAAAGAGG | |
| | UGCUGGACGCCACCCUGAUCCACCA | |
| | GAGCAUCACCGGCCUGUACGAGACA | |
| | CGGAUCGACCUGUCUCAGCUGGGAG | |
| | GUGACUCUGGAGGAUCUAGCGGAGG | |
| | AUCCUCUGGCAGCGAGACACCAGGA | |
| | ACAAGCGAGUCAGCAACACCAGAGA | |
| | GCAGUGGCGGCAGCAGCGGCGGCAG | |
| | CAGCACCCUAAAUAUAGAAGAUGAG | |
| | UAUCGGCUACAUGAGACCUCAAAAG | |
| | AGCCAGAUGUUUCUCUAGGGUCCAC | |
| | AUGGCUGUCUGAUUUUCCUCAGGCC | |
| | UGGGCGGAAACCGGGGGCAUGGGAC | |
| | UGGCAGUUCGCCAAGCUCCUCUGAU | |
| | CAUACCUCUGAAAGCAACCUCUACC | |
| | CCCGUGUCCAUAAAACAAUACCCCA | |
| | UGUCACAAGAAGCCAGACUGGGGAU | |
| | CAAGCCCCACAUACAGAGACUGUUG | |
| | GACCAGGGAAUACUGGUACCCUGCC | |
| | AGUCCCCCUGGAACACGCCCCUGCU | |
| | ACCCGUUAAGAAACCAGGGACUAAU | |
| | GAUUAUAGGCCUGUCCAGGAUCUGA | |
| | GAGAAGUCAACAAGCGGGUGGAAGA | |
| | CAUCCACCCCACCGUGCCCAACCCU | |
| | UACAACCUCUUGAGCGGGCUCCCAC | |
| | CGUCCCACCAGUGGUACACUGUGCU | |
| | UGAUUUAAAGGAUGCCUUUUUCUGC | |
| | CUGAGACUCCACCCCACCAGUCAGC | |
| | CUCUCUUCGCCUUUGAGUGGAGAGA | |
| | UCCAGAGAUGGGAAUCUCAGGACAA | |
| | UUGACCUGGACCAGACUCCCACAGG | |
| | GUUUCAAAAACAGUCCCACCCUGUU | |
| | UAAUGAGGCACUGCACAGAGACCUA | |
| | GCAGACUUCCGGAUCCAGCACCCAG | |
| | ACUUGAUCCUGCUACAGUACGUGGA | |
| | UGACUUACUGCUGGCCGCCACUUCU | |
| | GAGCUAGACUGCCAACAAGGUACUC | |
| | GGGCCCUGUUACAAACCCUAGGGAA | |
| | CCUCGGGUAUCGGGCCUCGGCCAAG | |
| | AAAGCCCAAAUUUGCCAGAAACAGG | |
| | UCAAGUAUCUGGGGUAUCUUCUAAA | |
| | AGAGGGUCAGAGAUGGCUGACUGAG | |
| | GCCAGAAAAGAGACUGUGAUGGGGC | |
| | AGCCUACUCCGAAGACCCCUCGACA | |
| | ACUAAGGGAGUUCCUAGGGAAGGCA | |
| | GGCUUCUGUCGCCUCUUCAUCCCUG | |
| | GGUUUGCAGAAAUGGCAGCCCCCCU | |
| | GUACCCUCUCACCAAACCGGGGACU | |
| | CUGUUUAAUUGGGGCCCAGACCAAC | |
| | AAAAGGCCUAUCAAGAAAUCAAGCA | |
| | AGCUCUUCUAACUGCCCCAGCCCUG | |
| | GGGUUGCCAGAUUUGACUAAGCCCU | |
| | UUGAACUCUUUGUCGACGAGAAGCA | |
| | GGGCUACGCCAAAGGUGUCCUAACG | |
| | CAAAAACUGGGACCUUGGCGUCGGC | |
| | CGGUGGCCUACCUGUCCAAAAAGCU | |
| | AGACCCAGUAGCAGCUGGGUGGCCC | |
| | CCUUGCCUACGGAUGGUAGCAGCCA | |
| | UUGCCGUACUGACAAAGGAUGCAGG | |
| | CAAGCUAACCAUGGGACAGCCACUA | |
| | GUCAUUCUGGCCCCCCAUGCAGUAG | |
| | AGGCACUAGUCAAACAACCCCCCGA | |
| | CCGCUGGCUUUCCAACGCCCGGAUG | |
| | ACUCACUAUCAGGCCUUGCUUUUGG | |
| | ACACGGACCGGGUCCAGUUCGGACC | |
| | GGUGGUAGCCCUGAACCCGGCUACG | |
| | CUGCUCCCACUGCCUGAGGAAGGGC | |
| | UGCAACACAACUGCCUUGAUAUCCU | |
| | GGCCGAAGCCCACGGAACCCGACCC | |
| | GACCUAACGGACCAGCCGCUCCCAG | |
| | ACGCCGACCACACCUGGUACACGGA | |
| | UGGAAGCAGUCUCUUACAAGAGGGA | |
| | CAGCGUAAGGCGGGAGCUGCGGUGA | |
| | CCACCGAGACCGAGGUAAUCUGGGC | |
| | UAAAGCCCUGCCAGCCGGGACAUCC | |
| | GCUCAGCGGGCUGAACUGAUAGCAC | |
| | UCACCCAGGCCCUAAAGAUGGCAGA | |
| | AGGUAAGAAGCUAAAUGUUUAUACU | |
| | GAUAGCCGUUAUGCUUUUGCUACUG | |
| | CCCAUAUCCAUGGAGAAAUAUACAG | |
| | AAGGCGUGGGUGGCUCACAUCAGAA | |
| | GGCAAAGAGAUCAAAAAUAAAGACG | |
| | AGAUCUUGGCCCUACUAAAAGCCCU | |
| | CUUUCUGCCCAAAAGACUUAGCAUA | |
| | AUCCAUUGUCCAGGACAUCAAAAGG | |
| | GACACAGCGCCGAGGCUAGAGGCAA | |
| | CCGGAUGGCUGACCAAGCGGCCCGA | |
| | AAGGCAGCCAUCACAGAGACUCCAG | |
| | ACACCUCUACCCUCCUCAUAGAAAA | |
| | UUCAUCACCCUCUGGCGGCUCAAAA | |
| | AGAACCGCCGACGGCAGCGAAUUCG | |
| | AGCCCAAGAAGAAGAGGAAAGUCUG | |
| | AUUAAUUAAGCUGCCUUCUGCGGGG | |
| | CUUGCCUUCUGGCCAUGCCCUUCUU | |
| | CUCUCCCUUGCACCUGUACCUCUUG | |
| | GUCUUUGAAUAAAGCCUGAGUAGGA | |
| | AGUCUAG | |
| | (SEQ ID NO: 3565) | |
| Cas9- | AGGAAAUAAGAGAGAAAAGAAGAGU | (A)80 |
| RT(PERV) | AAGAAGAAAUAUAAGAGCCACCAUG | (SEQ |
| | GCUCCCAAAAAGAAAAGGAAGGUGG | ID |
| | GCAUUCACGGCGUGCCUGCGGCCGA | NO: |
| | CAAAAAGUACAGCAUCGGCCUUGAU | 3782) |
| | AUCGGCACCAAUAGCGUGGGCUGGG | |
| | CCGUUAUCACAGACGAAUACAAGGU | |
| | ACCCAGCAAGAAGUUCAAGGUGCUG | |
| | GGGAAUACAGACAGGCACUCUAUCA | |
| | AGAAAAACCUUAUCGGGGCUCUGCU | |
| | GUUUGACUCAGGCGAGACCGCCGAG | |
| | GCCACCAGGUUGAAGAGGACCGCAA | |
| | GGCGAAGGUACACCCGGAGGAAGAA | |
| | CAGGAUCUGCUAUCUGCAGGAGAUC | |
| | UUCAGCAACGAGAUGGCCAAGGUGG | |
| | ACGACAGCUUCUUCCACAGGCUGGA | |
| | GGAGAGCUUCCUUGUCGAGGAGGAU | |
| | AAGAAGCACGAACGACACCCCAUCU | |
| | UCGGCAACAUAGUCGACGAGGUCGC | |
| | UUAUCACGAGAAGUACCCCACCAUC | |
| | UACCACCUGCGAAAGAAAUUGGUGG | |
| | AUAGCACCGAUAAAGCCGACUUGCG | |
| | ACUUAUCUACUUGGCUCUGGCGCAC | |
| | AUGAUUAAGUUCAGGGGCCACUUCC | |
| | UGAUCGAGGGCGACCUUAACCCCGA | |
| | CAACAGUGACGUAGACAAAUUGUUC | |
| | AUCCAGCUUGUACAGACCUAUAACC | |
| | AGCUGUUCGAGGAAAACCCUAUUAA | |
| | CGCCAGCGGGGUGGAUGCGAAGGCC | |
| | AUACUUAGCGCCAGGCUGAGCAAAA | |
| | GCAGGCGCUUGGAGAACCUGAUAGC | |
| | CCAGCUGCCCGGUGAAAAGAAGAAC | |
| | GGCCUCUUCGGUAAUCUGAUUGCCC | |
| | UGAGCCUGGGCCUGACCCCCAACUU | |
| | CAAGAGCAACUUCGACCUGGCAGAA | |
| | GAUGCCAAGCUGCAGUUGAGUAAGG | |
| | ACACCUAUGACGACGACUUGGACAA | |
| | UCUGCUCGCCCAAAUCGGCGACCAG | |
| | UACGCUGACCUGUUCCUCGCCGCCA | |
| | AGAACCUUUCUGACGCAAUCCUGCU | |
| | UAGCGAUAUCCUUAGGGUGAACACA | |
| | GAGAUCACCAAGGCCCCCCUGAGCG | |
| | CCAGCAUGAUCAAGAGGUACGACGA | |
| | GCACCAUCAGGACCUGACCCUUCUG | |
| | AAGGCCCUGGUGAGGCAGCAACUGC | |
| | CCGAGAAGUACAAGGAGAUCUUUUU | |
| | CGACCAGAGCAAGAACGGCUACGCC | |
| | GGCUACAUCGACGGCGGAGCCAGCC | |
| | AAGAGGAGUUCUACAAGUUCAUCAA | |
| | GCCCAUCCUGGAGAAGAUGGAUGGC | |
| | ACCGAGGAGCUGCUGGUGAAGCUGA | |
| | ACAGGGAAGAUUUGCUCCGGAAGCA | |
| | GAGGACCUUUGACAACGGUAGCAUC | |
| | CCCCACCAGAUCCACCUGGGCGAGC | |
| | UGCACGCAAUACUGAGGCGACAGGA | |
| | GGAUUUCUACCCCUUCCUCAAGGAC | |
| | AAUAGGGAGAAAAUCGAAAAGAUUC | |
| | UGACCUUCAGGAUCCCCUACUACGU | |
| | GGGCCCUCUUGCCAGGGGCAACAGC | |
| | CGAUUCGCUUGGAUGACAAGAAAGA | |
| | GCGAGGAGACCAUCACCCCCUGGAA | |
| | CUUCGAGGAAGUGGUGGACAAAGGA | |
| | GCAAGCGCGCAGUCUUUCAUCGAAC | |
| | GGAUGACCAAUUUCGACAAAAACCU | |
| | GCCUAACGAGAAGGUGCUGCCCAAG | |
| | CACAGCCUGCUUUACGAGUACUUCA | |
| | CCGUGUACAACGAGCUCACCAAGGU | |
| | GAAAUAUGUGACCGAGGGCAUGCGA | |
| | AAACCCGCUUUCCUGAGCGGCGAGC | |
| | AGAAGAAGGCCAUCGUGGACCUGCU | |
| | GUUCAAGACCAACAGGAAGGUGACC | |
| | GUGAAGCAGCUGAAGGAGGACUACU | |
| | UCAAGAAGAUCGAGUGCUUUGAUAG | |
| | CGUGGAAAUAAGCGGCGUGGAGGAC | |
| | AGGUUCAACGCCAGCCUGGGCACCU | |
| | ACCACGACUUGUUGAAGAUAAUCAA | |
| | AGACAAGGAUUUCCUGGAUAAUGAG | |
| | GAGAACGAGGAUAUACUCGAGGACA | |
| | UCGUGCUGACUUUGACCCUGUUUGA | |
| | GGACCGAGAGAUGAUUGAAGAAAGG | |
| | CUCAAAACCUACGCCCACCUGUUCG | |
| | ACGACAAAGUGAUGAAACAACUGAA | |
| | GAGACGAAGAUACACCGGCUGGGGC | |
| | AGACUGUCCAGGAAGCUCAUCAACG | |
| | GCAUUAGGGACAAGCAGAGCGGCAA | |
| | GACCAUCCUGGAUUUCCUGAAGUCC | |
| | GACGGCUUCGCCAACCGAAACUUCA | |
| | UGCAGCUGAUUCACGAUGACAGCUU | |
| | GACCUUCAAGGAGGACAUCCAGAAG | |
| | GCCCAGGUUAGCGGCCAGGGCGACU | |
| | CCCUGCACGAACAUAUUGCAAACCU | |
| | GGCAGGCUCCCCUGCGAUCAAGAAG | |
| | GGCAUACUGCAGACCGUUAAGGUUG | |
| | UGGACGAAUUGGUCAAGGUCAUGGG | |
| | CAGGCACAAGCCCGAAAACAUAGUU | |
| | AUAGAGAUGGCCAGAGAGAACCAGA | |
| | CCACCCAAAAGGGCCAGAAGAACAG | |
| | CCGGGAGCGCAUGAAAAGGAUCGAG | |
| | GAGGGUAUCAAGGAACUCGGAAGCC | |
| | AGAUCCUCAAAGAGCACCCCGUGGA | |
| | GAAUACCCAGCUCCAGAACGAGAAG | |
| | CUGUACCUGUACUACCUGCAGAACG | |
| | GCAGGGACAUGUACGUUGACCAGGA | |
| | GUUGGACAUCAACAGGCUUUCAGAC | |
| | UAUGACGUGGAUCACAUAGUGCCCC | |
| | AGAGCUUUCUUAAAGACGAUAGCAU | |
| | CGACAACAAGGUCCUGACCCGCUCC | |
| | GACAAAGCCAGGGGCAAAAGCGACA | |
| | ACGUGCCAAGCGAAGAGGUGGUUAA | |
| | AAAGAUGAAGAACUACUGGAGGCAA | |
| | CUGCUCAACGCGAAAUUGAUCACCC | |
| | AGAGAAAGUUCGAUAACCUGACCAA | |
| | GGCCGAGAGGGGCGGACUCUCCGAA | |
| | CUUGACAAAGCGGGCUUCAUAAAGA | |
| | GGCAGCUGGUCGAGACCCGACAGAU | |
| | CACGAAGCACGUGGCCCAAAUCCUC | |
| | GACAGCAGAAUGAAUACCAAGUACG | |
| | AUGAGAAUGACAAACUCAUCAGGGA | |
| | AGUGAAAGUGAUUACCCUGAAGAGC | |
| | AAGUUGGUGUCCGACUUUCGCAAAG | |
| | AUUUCCAGUUCUACAAGGUGAGGGA | |
| | GAUCAACAACUACCACCAUGCCCAC | |
| | GACGCAUACCUGAACGCCGUGGUCG | |
| | GCACCGCCCUGAUUAAGAAGUAUCC | |
| | AAAGCUGGAGUCCGAAUUUGUCUAC | |
| | GGCGACUACAAAGUUUACGAUGUGA | |
| | GGAAGAUGAUCGCUAAGAGCGAACA | |
| | GGAGAUCGGCAAGGCCACCGCUAAG | |
| | UAUUUCUUCUACAGCAACAUCAUGA | |
| | ACUUUUUCAAGACCGAGAUCACACU | |
| | UGCCAACGGCGAAAUCAGGAAGAGG | |
| | CCGCUUAUCGAGACCAACGGUGAGA | |
| | CCGGCGAGAUCGUGUGGGACAAGGG | |
| | CAGGGACUUCGCCACCGUGAGGAAA | |
| | GUCCUGAGCAUGCCCCAGGUGAAUA | |
| | UUGUGAAAAAAACUGAGGUGCAGAC | |
| | AGGCGGCUUUAGCAAGGAAUCCAUC | |
| | CUGCCCAAGAGGAACAGCGACAAGC | |
| | UGAUCGCCCGGAAGAAGGACUGGGA | |
| | CCCUAAGAAGUAUGGAGGCUUCGAC | |
| | AGCCCCACCGUAGCCUACAGCGUGC | |
| | UGGUGGUCGCGAAGGUAGAGAAGGG | |
| | GAAGAGCAAGAAACUGAAGAGCGUG | |
| | AAGGAGCUGCUCGGCAUAACCAUCA | |
| | UGGAGAGGUCCAGCUUUGAGAAGAA | |
| | CCCCAUUGACUUUUUGGAAGCCAAG | |
| | GGCUACAAAGAGGUCAAAAAGGACC | |
| | UGAUCAUCAAACUCCCCAAGUACUC | |
| | CCUGUUUGAAUUGGAGAACGGCAGA | |
| | AAGAGGAUGCUGGCGAGCGCUGGGG | |
| | AACUGCAAAAGGGCAACGAACUGGC | |
| | GCUGCCCAGCAAGUACGUGAAUUUU | |
| | CUGUACCUGGCGUCCCACUACGAAA | |
| | AGCUGAAAGGCAGCCCCGAGGACAA | |
| | CGAGCAGAAGCAGCUGUUCGUGGAG | |
| | CAGCACAAGCAUUACCUGGACGAGA | |
| | UAAUCGAGCAAAUCAGCGAGUUCAG | |
| | CAAGAGGGUGAUUCUGGCCGACGCG | |
| | AACCUGGAUAAGGUCCUCAGCGCCU | |
| | ACAACAAGCACCGAGACAAACCCAU | |
| | CAGGGAGCAGGCCGAGAAUAUCAUA | |
| | CACCUGUUCACCCUGACAAAUCUGG | |
| | GCGCACCUGCGGCAUUCAAAUACUU | |
| | CGAUACCACCAUCGACAGGAAAAGG | |
| | UACACUAGCACUAAGGAGGUGCUGG | |
| | AUGCCACCUUGAUCCACCAGUCCAU | |
| | UACCGGCCUGUAUGAGACCAGGAUC | |
| | GACCUGAGCCAGCUUGGAGGCGACU | |
| | CUGGAGGAUCUAGCGGAGGAUCCUC | |
| | UGGCAGCGAGACACCAGGAACAAGC | |
| | GAGUCAGCAACACCAGAGAGCAGUG | |
| | GCGGCAGCAGCGGCGGCAGCAGCCU | |
| | GGACGACGAGUACAGACUGUAUAGC | |
| | CCUCUGGUGAAGCCAGAUCAGAACA | |
| | UUCAGUUCUGGCUGGAACAGUUUCC | |
| | ACAGGCCUGGGCCGAAACAGCCGGA | |
| | AUGGGCCUGGCCAAGCAGGUGCCUC | |
| | CUCAGGUGAUCCAGCUGAAGGCCAG | |
| | CGCCACACCUGUGUCCGUGCGGCAG | |
| | UACCCUCUGUCCAAGGAGGCUCAGG | |
| | AGGGCAUCAGACCUCACGUCCAGCG | |
| | GCUGAUCCAGCAGGGGAUCCUGGUG | |
| | CCCGUGCAAAGCCCUUGGAACACCC | |
| | CUCUUCUGCCCGUGAGAAAACCCGG | |
| | CACAAACGACUACCGGCCUGUGCAG | |
| | GACCUGAGAGAAGUGAACAAGCGGG | |
| | UGCAGGACAUCCACCCCACAGUGCC | |
| | AAAUCCUUACAACCUGCUUUGUGCC | |
| | CUGCCCCCCCAGCGCAGCUGGUACA | |
| | CCGUUCUGGACCUGAAAGAUGCCUU | |
| | UUUCUGUCUGAGACUUCAUCCUACA | |
| | AGCCAGCCCCUGUUCGCCUUCGAGU | |
| | GGCGGGAUCCUGGCACCGGCCGGAC | |
| | AGGCCAGCUGACAUGGACCAGACUG | |
| | CCUCAGGGCUUCAAGAACAGCCCUA | |
| | CCAUCUUCAACGAGGCCCUGCACAG | |
| | AGACCUUGCCAACUUCAGAAUCCAA | |
| | CACCCACAGGUGACCCUGCUCCAGU | |
| | ACGUGGAUGACCUGCUGCUGGCCGG | |
| | CGCCACAAAACAAGAUUGCCUGGAA | |
| | GGCACCAAGGCCCUUCUGCUGGAGC | |
| | UGAGCGACCUGGGAUAUCGGGCCUC | |
| | UGCUAAGAAAGCUCAGAUCUGCAGG | |
| | AGAGAGGUGACCUACCUGGGCUACU | |
| | CUCUGAGAGAUGGCCAAAGAUGGCU | |
| | GACCGAGGCCAGAAAGAAAACCGUG | |
| | GUGCAAAUCCCCGCUCCUACAACAG | |
| | CCAAGCAGGUUAGAGAGUUCCUGGG | |
| | AAAGGCUGGAUUUUGCAGACUGUUC | |
| | AUCCCAGGCUUUGCCACCCUGGCCG | |
| | CCCCUCUGUACCCCCUGACCAAACC | |
| | UAAGGGCGAGUUCAGCUGGGCCCCA | |
| | GAGCACCAGAAGGCAUUCGACGCGA | |
| | UCAAGAAGGCUCUGCUGUCUGCCCC | |
| | UGCCCUGGCUCUGCCCGACGUGACA | |
| | AAGCCCUUCACCCUGUACGUGGACG | |
| | AACGGAAGGGCGUGGCUAGAGGCGU | |
| | UCUGACCCAGACCCUGGGUCCUUGG | |
| | AGAAGGCCUGUGGCCUACCUCAGUA | |
| | AGAAGCUGGAUCCUGUGGCCUCUGG | |
| | CUGGCCUGUGUGCCUGAAGGCCAUC | |
| | GCCGCCGUGGCCAUUCUGGUCAAGG | |
| | AUGCCGAUAAGCUGACCCUAGGCCA | |
| | GAAUAUCACCGUGAUCGCCCCUCAC | |
| | GCCCUCGAGAACAUCGUGCGGCAGC | |
| | CUCCCGACAGAUGGAUGACCAACGC | |
| | CAGAAUGACCCACUACCAGAGCCUG | |
| | UUGCUGACCGAGAGAGUGACCUUCG | |
| | CCCCUCCAGCUGCCCUGAAUCCCGC | |
| | CACUCUGCUGCCCGAGGAAACCGAC | |
| | GAGCCUGUGACCCACGACUGCCACC | |
| | AGCUGCUGAUCGAGGAAACCGGCGU | |
| | CAGAAAGGACCUGACAGAUAUCCCU | |
| | CUGACCGGAGAGGUGCUGACAUGGU | |
| | UCACCGACGGCAGCAGCUACGUCGU | |
| | GGAAGGCAAGCGGAUGGCCGGCGCC | |
| | GCUGUGGUCGACGGCACAAGAACCA | |
| | UCUGGGCUUCCAGCCUGCCUGAGGG | |
| | CACCAGCGCCCAGAAGGCCGAGCUG | |
| | AUGGCCCUCACACAGGCCCUGCGGC | |
| | UGGCUGAGGGCAAAAGCAUCAACAU | |
| | CUAUACAGACAGCCGUUACGCCUUC | |
| | GCCACAGCGCACGUGCACGGCGCCA | |
| | UCUACAAGCAGAGAGGAUGGCUGAC | |
| | CUCUGCCGGAAGAGAAAUCAAGAAC | |
| | AAGGAAGAAAUCCUGAGCCUGCUGG | |
| | AAGCCCUGCAUCUCCCAAAGAGACU | |
| | GGCCAUCAUCCACUGCCCCGGCCAC | |
| | CAGAAGGCCAAAGACCCUAUCAGCA | |
| | GAGGCAACCAGAUGGCCGACCGGGU | |
| | GGCCAAGCAAGCCGCCCAAGGCGUG | |
| | AAUCUGCUGCCUUAGUUAAUUAAGC | |
| | UGCCUUCUGCGGGGCUUGCCUUCUG | |
| | GCCAUGCCCUUCUUCUCUCCCUUGC | |
| | ACCUGUACCUCUUGGUCUUUGAAUA | |
| | AAGCCUGAGUAGGAAGUCUAG | |
| | (SEQ ID NO: 3566) | |

[0757] In some embodiments, a fusion protein may comprise a Cas molecule, e.g., a mutated Cas9, e.g., a Cas-nuclease containing a mutation inhibiting (e.g., inactivating) one endonuclease active site, e.g., the Cas9 nickase Cas9(N863A). In some embodiments, the fusion protein comprises a peptide linker, e.g., a glycine serine rich flexible peptide linker, e.g., a linker as disclosed in Tables 38 and/or 42, e.g., linker 10, in Table 42. In some embodiments, the fusion protein comprises a RT domain, e.g., a RT domain comprising a sequence from Table 1, Table 3, Table 30, Table 31, Table 41, Table 44, Table 50, or a fragment or variant thereof. In some embodiments, the Cas-RT fusion protein (or nucleic acid encoding the same) is formulated with a gRNA. In some embodiments, the linker length is between 2-40 amino acids, between 5-30 amino acids, between 5-20 amino acids, between 10-20 amino acids, or between 10-15 amino acids. In some embodiments, the Cas-RT fusion proteins has similar DNA binding activity to a Cas molecule that is not fused with a RT domain. In some embodiments, a Cas-RT may comprise a RT domain comprising a mutation. In embodiments, the mutant RT domain shows increased processivity and template affinity compared to an unmutated RT domain.

### Target Site

[0758] In some embodiments, after Gene Writing, the target site surrounding the integrated sequence contains a limited number of insertions or deletions, for example, in less than about 50% or 10% of integration events, e.g., as determined by long-read amplicon sequencing of the target site, e.g., as described in Karst et al. (2020) bioRxiv doi.org/10.1101/645903 (incorporated by reference herein in its entirety). In some embodiments, the target site does not show multiple insertion events, e.g., head-to-tail or head-to-head duplications, e.g., as determined by long-read amplicon sequencing of the target site, e.g., as described in Karst et al. bioRxiv doi.org/10.1101/645903 (2020) (incorporated herein by reference in its entirety). In some embodiments, the target site contains an integrated sequence corresponding to the template RNA. In some embodiments, the target site does not contain insertions resulting from endogenous RNA in more than about 1% or 10% of events, e.g., as determined by long-read amplicon sequencing of the target site, e.g., as described in Karst et al. bioRxiv doi.org/10.1101/645903 (2020) (incorporated herein by reference in its entirety). In some embodiments, the target site contains the integrated sequence corresponding to the template RNA.

### Second Strand Nicking

[0759] In some embodiments, a Gene Writer system described herein comprises nickase activity that nicks the first strand and the second strand of target DNA. As discussed herein, without wishing to be bound by theory, nicking of the first strand of the target site DNA is thought to provide a 3′ OH that can be used by an RT domain to reverse transcribe a sequence of a template RNA, e.g., a heterologous object sequence. Without wishing to be bound by theory, it is thought that introducing an additional nick to the second strand may bias the cellular DNA repair machinery to adopt the heterologous object sequence-based sequence more frequently than the original genomic sequence. In some embodiments, the additional nick to the second strand is made by the same endonuclease domain (e.g., nickase domain) as the nick to the first strand. In some embodiments, the same Gene Writer polypeptide performs both the nick to the first strand and the nick to the second strand. In some embodiments, the Gene Writer polypeptide comprises a CRISPR/Cas domain and the additional nick to the second strand is directed by an additional nucleic acid, e.g., comprising a second gRNA directing the CRISPR/Cas domain to nick the second strand. In other embodiments, the additional second strand nick is made by a different endonuclease domain (e.g., nickase domain) than the nick to the first strand. In some embodiments, that different endonuclease domain is situated in an additional polypeptide (e.g., a system of the invention further comprises the additional polypeptide), separate from the Gene Writer polypeptide. In some embodiments, the additional polypeptide comprises an endonuclease domain (e.g., nickase domain) described herein. In some embodiments, the additional polypeptide comprises a DNA binding domain, e.g., described herein.

[0760] It is contemplated herein that the position at which the second strand nick occurs relative to the first strand nick may influence the extent to which one or more of: desired Gene Writing DNA modifications are obtained, undesired double-strand breaks (DSBs) occur, undesired insertions occur, or undesired deletions occur. Without wishing to be bound by theory, second strand nicking may occur in two general orientations: inward nicks and outward nicks.

[0761] In some embodiments, in the inward nick orientation, the RT domain polymerizes (e.g., using the template RNA (e.g., the heterologous object sequence)) away the second strand nick. In some embodiments, in the inward nick orientation, the location of the nick to the first strand and the location of the nick to the second strand are positioned between the first PAM site and second PAM site (e.g., in a scenario wherein both nicks are made by a polypeptide (e.g., a Gene Writer polypeptide) comprising a CRISPR/Cas domain). In some embodiments, in the inward nick orientation, the location of the nick to the first strand and the location of the nick to the second strand are between the sites where the polypeptide and the additional polypeptide bind to the target DNA. In some embodiments, in the inward nick orientation, the location of the nick to the second strand is positioned on the same side of the binding sites of the polypeptide and additional polypeptide relative to the location of the nick to the first strand. In some embodiments, in the inward nick orientation, the location of the nick to the first strand and the location of the nick to the second strand are positioned between the PAM site and the site at a distance from the target site.

[0762] An example of a Gene Writer system that provides an inward nick orientation comprises a Gene Writer polypeptide comprising a CRISPR/Cas domain, a template RNA comprising a gRNA that directs nicking of the target site DNA on the first strand, and an additional nucleic acid comprising an additional gRNA that directs nicking at a site a distance from the location of the first nick, wherein the location of the first nick and the location of the second nick are between the PAM sites of the sites to which the two gRNAs direct the Gene Writer polypeptide. As a further example, another Gene Writer system that provides an inward nick orientation comprises a Gene Writer polypeptide comprising a zinc finger molecule and a first nickase domain wherein the zinc finger molecule binds to the target DNA in a manner that directs the first nickase domain to nick the first strand of the target site; an additional polypeptide comprising a CRISPR/Cas domain, and an additional nucleic acid comprising a gRNA that directs the additional polypeptide to nick a site a distance from the target site DNA on the second strand, wherein the location of the first nick and the location of the second nick are between the PAM site and the site to which the zinc finger molecule binds. As a further example, another Gene Writer system that provides an inward nick orientation comprises a Gene Writer polypeptide comprising a zinc finger molecule and a first nickase domain wherein the zinc finger molecule binds to the target DNA in a manner that directs the first nickase domain to nick the first strand of the target site; an additional polypeptide comprising a TAL effector molecule and a second nickase domain wherein the TAL effector molecule binds to a site a distance from the target site in a manner that directs the additional polypeptide to nick the second strand, wherein the location of the first nick and the location of the second nick are between the site to which the TAL effector molecule binds and the site to which the zinc finger molecule binds.

[0763] In some embodiments, in the outward nick orientation, the RT domain polymerizes (e.g., using the template RNA (e.g., the heterologous object sequence)) toward the second strand nick. In some embodiments, in the inward nick orientation when both the first and second nicks are made by a polypeptide comprising a CRISPR/Cas domain (e.g., a Gene Writer polypeptide), the first PAM site and second PAM site are positioned between the location of the nick to the first strand and the location of the nick to the second strand. In some embodiments, in the inward nick orientation, the polypeptide (e.g., the Gene Writer polypeptide) and the additional polypeptide bind to sites on the target DNA between the location of the nick to the first strand and the location of the nick to the second. In some embodiments, in the inward nick orientation, the location of the nick to the second strand is positioned on the opposite side of the binding sites of the polypeptide and additional polypeptide relative to the location of the nick to the first strand. In some embodiments, in the inward orientation, the PAM site and the site at a distance from the target site are positioned between the location of the nick to the first strand and the location of the nick to the second strand.

[0764] An example of a Gene Writer system that provides an outward nick orientation comprises a Gene Writer polypeptide comprising a CRISPR/Cas domain, a template RNA comprising a gRNA that directs nicking of the target site DNA on the first strand, and an additional nucleic acid comprising an additional gRNA that directs nicking at a site a distance from the location of the first nick, wherein the location of the first nick and the location of the second nick are outside of the PAM sites of the sites to which the two gRNAs direct the Gene Writer polypeptide (i.e., the PAM sites are between the the location of the first nick and the location of the second nick). As a further example, another Gene Writer system that provides an outward nick orientation comprises a Gene Writer polypeptide comprising a zinc finger molecule and a first nickase domain wherein the zinc finger molecule binds to the target DNA in a manner that directs the first nickase domain to nick the first strand of the target site; an additional polypeptide comprising a CRISPR/Cas domain, and an additional nucleic acid comprising a gRNA that directs the additional polypeptide to nick a site a distance from the target site DNA on the second strand, wherein the location of the first nick and the location of the second nick are outside the PAM site and the site to which the zinc finger molecule binds (i.e., the PAM site and the site to which the zinc finger molecule binds are between the the location of the first nick and the location of the second nick). As a further example, another Gene Writer system that provides an outward nick orientation comprises a Gene Writer polypeptide comprising a zinc finger molecule and a first nickase domain wherein the zinc finger molecule binds to the target DNA in a manner that directs the first nickase domain to nick the first strand of the target site; an additional polypeptide comprising a TAL effector molecule and a second nickase domain wherein the TAL effector molecule binds to a site a distance from the target site in a manner that directs the additional polypeptide to nick the second strand, wherein the location of the first nick and the location of the second nick are outside the site to which the TAL effector molecule binds and the site to which the zinc finger molecule binds (i.e., the site to which the TAL effector molecule binds and the site to which the zinc finger molecule binds are between the location of the first nick and the location of the second nick).

[0765] Without wishing to be bound by theory, it is thought that, for Gene Writer systems where a second strand nick is provided, an outward nick orientation is preferred in some embodiments. As is described herein, an inward nick may produce a higher number of double-strand breaks (DSBs) than an outward nick orientation. DSBs may be recognized by the DSB repair pathways in the nucleus of a cell, which can result in undesired insertions and deletions. An outward nick orientation may provide a decreased risk of DSB formation, and a corresponding lower amount of undesired insertions and deletions. In some embodiments, undesired insertions and deletions are insertions and deletions not encoded by the heterologous object sequence, e.g., an insertion or deletion produced by the double-strand break repair pathway unrelated to the modification encoded by the heterologous object sequence. In some embodiments, a desired Gene Writing modification comprises a change to the target DNA (e.g., a substitution, insertion, or deletion) encoded by the heterologous object sequence (e.g., and achieved by the Gene Writer writing the heterologous object sequence into the target site). In some embodiments, the first strand nick and the second strand nick are in an outward orientation.

[0766] In addition, the distance between the first strand nick and second strand nick may influence the extent to which one or more of: desired Gene Writing DNA modifications are obtained, undesired double-strand breaks (DSBs) occur, undesired insertions occur, or undesired deletions occur. Without wishing to be bound by theory, it is thought the second strand nick benefit, the biasing of DNA repair toward incorporation of the heterologous object sequence into the target DNA, increases as the distance between the first strand nick and second strand nick decreases. However, it is thought that the risk of DSB formation also increases as the distance between the first strand nick and second strand nick decreases. Correspondingly, it is thought that the number of undesired insertions and/or deletions may increase as the distance between the first strand nick and second strand nick decreases. In some embodiments, the distance between the first strand nick and second strand nick is chosen to balance the benefit of biasing DNA repair toward incorporation of the heterologous object sequence into the target DNA and the risk of DSB formation and of undesired deletions and/or insertions. In some embodiments, a system where the first strand nick and the second strand nick are at least a threshold distance apart has an increased level of desired Gene Writing modification outcomes, a decreased level of undesired deletions, and/or a decreased level of undesired insertions relative to an otherwise similar inward nick orientation system where the first nick and the second nick are less than the a threshold distance apart. In some embodiments the threshold distance(s) is given below.

[0767] In some embodiments, the first nick and the second nick are at least 20, 25, 30, 35, 40, 45, 50, 55, 60, 65, 70, 75, 80, 85, 90, 95, 100, 110, 120, 130, 140, 150, 160, 170, 180, 190, or 200 nucleotides apart. In some embodiments, the first nick and the second nick are no more than 25, 30, 35, 40, 45, 50, 55, 60, 65, 70, 75, 80, 85, 90, 95, 100, 110, 120, 130, 140, 150, 160, 170, 180, 190, 200, or 250 nucleotides apart. In some embodiments, the first nick and the second nick are 20-200, 30-200, 40-200, 50-200, 60-200, 70-200, 80-200, 90-200, 100-200, 110-200, 120-200, 130-200, 140-200, 150-200, 160-200, 170-200, 180-200, 190-200, 20-190, 30-190, 40-190, 50-190, 60-190, 70-190, 80-190, 90-190, 100-190, 110-190, 120-190, 130-190, 140-190, 150-190, 160-190, 170-190, 180-190, 20-180, 30-180, 40-180, 50-180, 60-180, 70-180, 80-180, 90-180, 100-180, 110-180, 120-180, 130-180, 140-180, 150-180, 160-180, 170-180, 20-170, 30-170, 40-170, 50-170, 60-170, 70-170, 80-170, 90-170, 100-170, 110-170, 120-170, 130-170, 140-170, 150-170, 160-170, 20-160, 30-160, 40-160, 50-160, 60-160, 70-160, 80-160, 90-160, 100-160, 110-160, 120-160, 130-160, 140-160, 150-160, 20-150, 30-150, 40-150, 50-150, 60-150, 70-150, 80-150, 90-150, 100-150, 110-150, 120-150, 130-150, 140-150, 20-140, 30-140, 40-140, 50-140, 60-140, 70-140, 80-140, 90-140, 100-140, 110-140, 120-140, 130-140, 20-130, 30-130, 40-130, 50-130, 60-130, 70-130, 80-130, 90-130, 100-130, 110-130, 120-130, 20-120, 30-120, 40-120, 50-120, 60-120, 70-120, 80-120, 90-120, 100-120, 110-120, 20-110, 30-110, 40-110, 50-110, 60-110, 70-110, 80-110, 90-110, 100-110, 20-100, 30-100, 40-100, 50-100, 60-100, 70-100, 80-100, 90-100, 20-90, 30-90, 40-90, 50-90, 60-90, 70-90, 80-90, 20-80, 30-80, 40-80, 50-80, 60-80, 70-80, 20-70, 30-70, 40-70, 50-70, 60-70, 20-60, 30-60, 40-60, 50-60, 20-50, 30-50, 40-50, 20-40, 30-40, or 20-30 nucleotides apart. In some embodiments, the first nick and the second nick are 40-100 nucleotides apart.

[0768] Without wishing to be bound by theory, it is thought that, for Gene Writer systems where a second strand nick is provided and an inward nick orientation is selected, increasing the distance between the first strand nick and second strand nick may be preferred. As is described herein, an inward nick orientation may produce a higher number of DSBs than an outward nick orientation, and may result in a higher amount of undesired insertions and deletions than an outward nick orientation, but increasing the distance between the nicks may mitigate that increase in DSBs, undesired deletions, and/or undesired insertions. In some embodiments, an inward nick orientation wherein the first nick and the second nick are at least a threshold distance apart has an increased level of desired Gene Writing modification outcomes, a decreased level of undesired deletions, and/or a decreased level of undesired insertions relative to an otherwise similar inward nick orientation system where the first nick and the second nick are less than the a threshold distance apart. In some embodiments the threshold distance is given below.

[0769] In some embodiments, the first strand nick and the second strand nick are in an inward orientation. In some embodiments, the first strand nick and the second strand nick are in an inward orientation and the first strand nick and second strand nick are at least 100, 110, 120, 130, 140, 150, 160, 170, 180, 190, 200, 220, 240, 260, 280, 300, 350, 400, 450, or 500 nucleotides apart, e.g., at least 100 nucleotides apart, (and optionally no more than 500, 400, 300, 200, 190, 180, 170, 160, 150, 140, 130, or 120 nucleotides apart). In some embodiments, the first strand nick and the second strand nick are in an inward orientation and the first strand nick and second strand nick are 100-200, 110-200, 120-200, 130-200, 140-200, 150-200, 160-200, 170-200, 180-200, 190-200, 100-190, 110-190, 120-190, 130-190, 140-190, 150-190, 160-190, 170-190, 180-190, 100-180, 110-180, 120-180, 130-180, 140-180, 150-180, 160-180, 170-180, 100-170, 110-170, 120-170, 130-170, 140-170, 150-170, 160-170, 100-160, 110-160, 120-160, 130-160, 140-160, 150-160, 100-150, 110-150, 120-150, 130-150, 140-150, 100-140, 110-140, 120-140, 130-140, 100-130, 110-130, 120-130, 100-120, 110-120, or 100-110 nucleotides apart.

### Evolved Variants of Gene Writers

[0770] In some embodiments, the invention provides evolved variants of Gene Writers. Evolved variants can, in some embodiments, be produced by mutagenizing a reference Gene Writer, or one of the fragments or domains comprised therein. In some embodiments, one or more of the domains (e.g., the reverse transcriptase, DNA binding (including, for example, sequence-guided DNA binding elements), RNA-binding, or endonuclease domain) is evolved. One or more of such evolved variant domains can, in some embodiments, be evolved alone or together with other domains. An evolved variant domain or domains may, in some embodiments, be combined with unevolved cognate component(s) or evolved variants of the cognate component(s), e.g., which may have been evolved in either a parallel or serial manner.

[0771] In some embodiments, the process of mutagenizing a reference Gene Writer, or fragment or domain thereof, comprises mutagenizing the reference Gene Writer or fragment or domain thereof. In embodiments, the mutagenesis comprises a continuous evolution method (e.g., PACE) or non-continus evolution method (e.g., PANCE), e.g., as described herein. In some embodiments, the evolved Gene Writer, or a fragment or domain thereof, comprises one or more amino acid variations introduced into its amino acid sequence relative to the amino acid sequence of the reference Gene Writer, or fragment or domain thereof. In embodiments, amino acid sequence variations may include one or more mutated residues (e.g. conservative substitutions, non-conservative substitutions, or a combination thereof) within the amino acid sequence of a reference Gene Writer, e.g., as a result of a change in the nucleotide sequence encoding the gene writer that results in, e.g., a chance in the codon at any particular position in the coding sequence, the deletion of one or more amino acids (e.g., a truncated protein), the insertion of one or more amino acids, or any combination of the foregoing. The evolved variant Gene Writer may include variants in one or more components or domains of the Gene Writer (e.g., variants introduced into a reverse transcriptase domain, endonuclease domain, DNA binding domain, RNA binding domain, or combinations thereof).

[0772] In some aspects, the invention provides Gene Writers, systems, kits, and methods using or comprising an evolved variant of a Gene Writer, e.g., employs an evolved variant of a Gene Writer or a Gene Writer produced or produceable by PACE or PANCE. In embodiments, the unevolved reference Gene Writer is a Gene Writer as disclosed herein.

[0773] The term “phage-assisted continuous evolution (PACE),” as used herein, generally refers to continuous evolution that employs phage as viral vectors. Examples of PACE technology have been described, for example, in International PCT Application No. PCT/US 2009/056194, filed Sep. 8, 2009, published as WO 2010/028347 on Mar. 11, 2010; International PCT Application, PCT/US2011/066747, filed Dec. 22, 2011, published as WO 2012/088381 on Jun. 28, 2012; U.S. Pat. No. 9,023,594, issued May 5, 2015; U.S. Pat. No. 9,771,574, issued Sep. 26, 2017; U.S. Pat. No. 9,394,537, issued Jul. 19, 2016; International PCT Application, PCT/US2015/012022, filed Jan. 20, 2015, published as WO 2015/134121 on Sep. 11, 2015; U.S. Pat. No. 10,179,911, issued Jan. 15, 2019; and International PCT Application, PCT/US2016/027795, filed Apr. 15, 2016, published as WO 2016/168631 on Oct. 20, 2016, the entire contents of each of which are incorporated herein by reference.

[0774] The term “phage-assisted non-continuous evolution (PANCE),” as used herein, generally refers to non-continuous evolution that employs phage as viral vectors. Examples of PANCE technology have been described, for example, in Suzuki T. et al, Crystal structures reveal an elusive functional domain of pyrrolysyl-tRNA synthetase, Nat Chem Biol. 13(12): 1261-1266 (2017), incorporated herein by reference in its entirety. Briefly, PANCE is a technique for rapid in vivo directed evolution using serial flask transfers of evolving selection phage (SP), which contain a gene of interest to be evolved, across fresh host cells (e.g., E. coli cells). Genes inside the host cell may be held constant while genes contained in the SP continuously evolve. Following phage growth, an aliquot of infected cells may be used to transfect a subsequent flask containing host E. coli. This process can be repeated and/or continued until the desired phenotype is evolved, e.g., for as many transfers as desired.

[0775] Methods of applying PACE and PANCE to Gene Writers may be readily appreciated by the skilled artisan by reference to, inter alia, the foregoing references. Additional exemplary methods for directing continuous evolution of genome-modifying proteins or systems, e.g., in a population of host cells, e.g., using phage particles, can be applied to generate evolved variants of Gene Writers, or fragments or subdomains thereof. Non-limiting examples of such methods are described in International PCT Application, PCT/US2009/056194, filed Sep. 8, 2009, published as WO 2010/028347 on Mar. 11, 2010; International PCT Application, PCT/US2011/066747, filed Dec. 22, 2011, published as WO 2012/088381 on Jun. 28, 2012; U.S. Pat. No. 9,023,594, issued May 5, 2015; U.S. Pat. No. 9,771,574, issued Sep. 26, 2017; U.S. Pat. No. 9,394,537, issued Jul. 19, 2016; International PCT Application, PCT/US2015/012022, filed Jan. 20, 2015, published as WO 2015/134121 on Sep. 11, 2015; U.S. Pat. No. 10,179,911, issued Jan. 15, 2019; International Application No. PCT/US2019/37216, filed Jun. 14, 2019, International Patent Publication WO 2019/023680 published Jan. 31, 2019, International PCT Application, PCT/US2016/027795, filed Apr. 15, 2016, published as WO 2016/168631 on Oct. 20, 2016, and International Patent Publication No. PCT/US2019/47996, filed Aug. 23, 2019, each of which is incorporated herein by reference in its entirety.

[0776] In some non-limiting illustrative embodiments, a method of evolution of a evolved variant Gene Writer, of a fragment or domain thereof, comprises: (a) contacting a population of host cells with a population of viral vectors comprising the gene of interest (the starting Gene Writer or fragment or domain thereof), wherein: (1) the host cell is amenable to infection by the viral vector; (2) the host cell expresses viral genes required for the generation of viral particles; (3) the expression of at least one viral gene required for the production of an infectious viral particle is dependent on a function of the gene of interest; and/or (4) the viral vector allows for expression of the protein in the host cell, and can be replicated and packaged into a viral particle by the host cell. In some embodiments, the method comprises (b) contacting the host cells with a mutagen, using host cells with mutations that elevate mutation rate (e.g., either by carrying a mutation plasmid or some genome modification—e.g., proofing-impaired DNA polymerase, SOS genes, such as UmuC, UmuD′, and/or RecA, which mutations, if plasmid-bound, may be under control of an inducible promoter), or a combination thereof. In some embodiments, the method comprises (c) incubating the population of host cells under conditions allowing for viral replication and the production of viral particles, wherein host cells are removed from the host cell population, and fresh, uninfected host cells are introduced into the population of host cells, thus replenishing the population of host cells and creating a flow of host cells. In some embodiments, the cells are incubated under conditions allowing for the gene of interest to acquire a mutation. In some embodiments, the method further comprises (d) isolating a mutated version of the viral vector, encoding an evolved gene product (e.g., an evolved variant Gene Writer, or fragment or domain thereof), from the population of host cells.

[0777] The skilled artisan will appreciate a variety of features employable within the above-described framework. For example, in some embodiments, the viral vector or the phage is a filamentous phage, for example, an M13 phage, e.g., an M13 selection phage. In certain embodiments, the gene required for the production of infectious viral particles is the M13 gene III (gIII). In embodiments, the phage may lack a functional gIII, but otherwise comprise gI, gII, gIV, gV, gVI, gVII, gVIII, gIX and a gX. In some embodiments, the generation of infectious VSV particles involves the envelope protein VSV-G. Various embodiments can use different retroviral vectors, for example, Murine Leukemia Virus vectors, or Lentiviral vectors. In embodiments, the retroviral vectors can efficiently be packaged with VSV-G envelope protein, e.g., as a substitute for the native envelope protein of the virus.

[0778] In some embodiments, host cells are incubated according to a suitable number of viral life cycles, e.g., at least 10, at least 20, at least 30, at least 40, at least 50, at least 100, at least 200, at least 300, at least 400, at least, 500, at least 600, at least 700, at least 800, at least 900, at least 1000, at least 1250, at least 1500, at least 1750, at least 2000, at least 2500, at least 3000, at least 4000, at least 5000, at least 7500, at least 10000, or more consecutive viral life cycles, which in on illustrative and non-limiting examples of M13 phage is 10-20 minutes per virus life, cycle. Similarly, conditions can be modulated to adjust the time a host cell remains in a population of host cells, e.g., about 10, about 11, about 12, about 13, about 14, about 15, about 16, about 17, about 18, about 19, about 20, about 21, about 22, about 23, about 24, about 25 about 30, about 35, about 40, about 45, about 50, about 55, about 60, about 70, about 80, about 90, about 100, about 120, about 50, or about 180 minutes. Host cell populations can be controlled in part by density of the host cells, or, in some embodiments, the host cell density in an inflow, e.g., 10³ cells/ml, about 10⁴ cells/ml, about 10⁵ cells/ml, about 5-10⁵ cell/ml, about 10⁶ cells/ml, about 5-10⁶ cells/ml, about 10⁷ cells/ml about 5-10⁷ cells/ml, about 10⁸ cells/ml, about 5-10⁸ cells/ml, about 10⁹ cells/ml, about 5·10⁹ cells/ml, about 10¹⁰ cells/ml, or about 5·10¹⁰ cells/ml.

### Promoters

[0779] In some embodiments, one or more promoter or enhancer elements are operably linked to a nucleic acid encoding a Gene Writer protein or a template nucleic acid, e.g., that controls expression of the heterologous object sequence. In certain embodiments, the one or more promoter or enhancer elements comprise cell-type or tissue specific elements. In some embodiments, the promoter or enhancer is the same or derived from the promoter or enhancer that naturally controls expression of the heterologous object sequence. For example, the ornithine transcarbamylase promoter and enhancer may be used to control expression of the ornithine transcarbamylase gene in a system or method provided by the invention for correcting ornithine transcarbamylase deficiencies. In some embodiments, a promoter for use in the invention is for a gene described in any one of Tables 9-22, e.g., which may be used with an allele of the reference gene, or, in other embodiments, with a heterologous gene. In some embodiments, the promoter is a promoter of Table 33 or a functional fragment or variant thereof.

[0780] Exemplary tissue specific promoters that are commercially available can be found, for example, at a uniform resource locator (e.g., invivogen.com/tissue-specific-promoters). In some embodiments, a promoter is a native promoter or a minimal promoter, e.g., which consists of a single fragment from the 5′ region of a given gene. In some embodiments, a native promoter comprises a core promoter and its natural 5′ UTR. In some embodiments, the 5′ UTR comprises an intron. In other embodiments, these include composite promoters, which combine promoter elements of different origins or were generated by assembling a distal enhancer with a minimal promoter of the same origin.

[0781] Exemplary cell or tissue specific promoters are provided in the tables, below, and exemplary nucleic acid sequences encoding them are known in the art and can be readily accessed using a variety of resources, such as the NCBI database, including RefSeq, as well as the Eukaryotic Promoter Database (//epd.epfl.ch//index.php).

TABLE 33
Exemplary cell or tissue-specific promoters

| Promoter | Target cells |
|---|---|
| B29 Promoter | B cells |
| CD14 Promoter | Monocytic Cells |
| CD43 Promoter | Leukocytes and platelets |
| CD45 Promoter | Hematopoeitic cells |
| CD68 promoter | macrophages |
| Desmin promoter | muscle cells |
| Elastase-1 promoter | pancreatic acinar cells |
| Endoglin promoter | endothelial cells |
| fibronectin promoter | differentiating cells, healing tissue |
| Flt-1 promoter | endothelial cells |
| GFAP promoter | Astrocytes |
| GPIIB promoter | megakaryocytes |
| ICAM-2 Promoter | Endothelial cells |
| INF-Beta promoter | Hematopoeitic cells |
| Mb promoter | muscle cells |
| Nphs1 promoter | podocytes |
| OG-2 promoter | Osteoblasts, Odonblasts |
| SP-B promoter | Lung |
| Syn1 promoter | Neurons |
| WASP promoter | Hematopoeitic cells |
| SV40/bAlb promoter | Liver |
| SV40/bAlb promoter | Liver |
| SV40/Cd3 promoter | Leukocytes and platelets |
| SV40/CD45 promoter | hematopoeitic cells |
| NSE/RU5′ promoter | Mature Neurons |

TABLE 34
Additional exemplary cell or tissue-specific promoters

| Promoter | Gene Description | Gene Specificity |
|---|---|---|
| APOA2 | Apolipoprotein A-II | Hepatocytes (from hepatocyte |
| | | progenitors) |
| SERPINA1 | Serpin peptidase inhibitor, clade A | Hepatocytes |
| (hAAT) | (alpha-1 antiproteinase, antitrypsin), | (from definitive endoderm |
| | member 1 (also named alpha 1 anti-tryps in) | stage) |
| CYP3A | Cytochrome P450, family 3, | Mature Hepatocytes |
| | subfamily A, polypeptide | |
| MIR122 | MicroRNA 122 | Hepatocytes |
| | | (from early stage embryonic |
| | | liver cells) |
| | | and endoderm |

Pancreatic specific promoters

| | | |
|---|---|---|
| INS | Insulin | Pancreatic beta cells |
| | | (from definitive endoderm stage) |
| IRS2 | Insulin receptor substrate 2 | Pancreatic beta cells |
| Pdx1 | Pancreatic and duodenal | Pancreas |
| | homeobox 1 | (from definitive endoderm stage) |
| Alx3 | Aristaless-like homeobox 3 | Pancreatic beta cells |
| | | (from definitive endoderm stage) |
| Ppy | Pancreatic polypeptide | PP pancreatic cells |
| | | (gamma cells) |

Cardiac specific promoters

| | | |
|---|---|---|
| Myh6 | Myosin, heavy chain 6, cardiac | Late differentiation marker of cardiac |
| (aMHC) | muscle, alpha | muscle cells (atrial specificity) |
| MYL2 | Myosin, light chain 2, regulatory, | Late differentiation marker of cardiac |
| (MLC-2v) | cardiac, slow | muscle cells (ventricular specificity) |
| ITNN13 | Troponin I type 3 (cardiac) | Cardiomyocytes |
| (cTnl) | | (from immature state) |
| ITNN13 | Troponin I type 3 (cardiac) | Cardiomyocytes |
| (cTnl) | | (from immature state) |
| NPPA | Natriuretic peptide precursor A (also | Atrial specificity in adult cells |
| (ANF) | named Atrial Natriuretic Factor) | |
| Slc8a1 | Solute carrier family 8 | Cardiomyocytes from early |
| (Ncx1) | (sodium/calcium exchanger), member | developmental stages |
| | 1 | |

CNS specific promoters

| | | |
|---|---|---|
| SYN1 | Synapsin I | Neurons |
| (hSyn) | | |
| GFAP | Glial fibrillary acidic protein | Astrocytes |
| INA | lntemexin neuronal intermediate | Neuroprogenitors |
| | filament protein, alpha (a-internexin) | |
| NES | Nestin | Neuroprogenitors and ectoderm |
| MOBP | Myelin-associated oligodendrocyte | Oligodendrocytes |
| | basic protein | |
| MBP | Myelin basic protein | Oligodendrocytes |
| TH | Tyrosine hydroxylase | Dopaminergic neurons |
| FOXA2 | Forkhead box A2 | Dopaminergic neurons (also used as a |
| (HNF3 | | marker of endoderm) |
| beta) | | |

Skin specific promoters

| | | |
|---|---|---|
| FLG | Filaggrin | Keratinocytes from granular layer |
| K14 | Keratin 14 | Keratinocytes from granular |
| | | and basal layers |
| TGM3 | Transglutaminase 3 | Keratinocytes from granular layer |

Immune cell specific promoters

| | | |
|---|---|---|
| ITGAM | lntegrin, alpha M (complement | Monocytes, macrophages, granulocytes, |
| (CD11B) | component 3 receptor 3 subunit) | natural killer cells |

Urogential cell specific promoters

| | | |
|---|---|---|
| Pbsn | Probasin | Prostatic epithelium |
| Upk2 | Uroplakin 2 | Bladder |
| Sbp | Spermine binding protein | Prostate |
| Ferl14 | Fer-1-like 4 | Bladder |

Endothelial cell specific promoters

| | | |
|---|---|---|
| ENG | Endoglin | Endothelial cells |

Pluripotent and embryonic cell specific promoters

| | | |
|---|---|---|
| Oct4 | POU class 5 homeobox 1 | Pluripotent cells |
| (POU5F1) | | (germ cells, ES cells, iPS cells) |
| NANOG | Nanog homeobox | Pluripotent cells |
| | | (ES cells, iPS cells) |
| Synthetic | Synthetic promoter based on a Oct-4 | Pluripotent cells (ES cells, iPS cells) |
| Oct4 | core enhancer element | |
| T | Brachyury | Mesoderm |
| brachyury | | |
| NES | Nestin | Neuroprogenitors and Ectoderm |
| SOX17 | SRY (sex determining region Y)-box | Endoderm |
| | 17 | |
| FOXA2 | Forkhead box A2 | Endoderm (also used as a marker of |
| (HNFJ | | dopaminergic neurons) |
| beta) | | |
| MIR122 | MicroRNA 122 | Endoderm and hepatocytes |
| | | (from early stage embryonic liver cells~ |

[0782] Depending on the host/vector system utilized, any of a number of suitable transcription and translation control elements, including constitutive and inducible promoters, transcription enhancer elements, transcription terminators, etc. may be used in the expression vector (see e.g, Bitter et al. (1987) Method in Enzymology, 153:516-544; incorporated herein by reference in its entirety).

[0783] In some embodiments, a nucleic acid encoding a Gene Writer or template nucleic acid is operably linked to a control element, e.g. a transcriptional control element, such as a promoter. The transcriptional control element may, in some embodiment, be functional in either a eukaryotic cell, e.g., a mammalian cell; or a prokaryotic cell (e.g., bacterial or archaeal cell). In some embodiments, a nucleotide sequence encoding a polypeptide is operably linked to multiple control elements, e.g., that allow expression of the nucleotide sequence encoding the polypeptide in both prokaryotic and eukaryotic cells.

[0784] For illustration purposes, examples of spatially restricted promoters include, but are not limited to, neuron-specific promoters, adipocyte-specific promoters, cardiomyocyte-specific promoters, smooth muscle-specific promoters, photoreceptor-specific promoters, etc. Neuron-specific spatially restricted promoters include, but are not limited to, a neuron-specific enolase (NSF) promoter (see, e.g., EMBL HSENO2, X51956); an aromatic amino acid decarboxylase (AADC) promoter, a neurofilament promoter (see, e.g., GenBank HUMNFL, L04147); a synapsin promoter (see. e.g., GenBank HUMSYNIB, M55301); a thy-1 promoter (see, e.g., Chen et al. (1987) Cell 51:7-19: and Llewellyn, et al. (2010) Nat. Med. 16(10):1161-0.66); a serotonin receptor promoter (see, e.g., GenBank S62283); a tyrosine hydroxylase promoter (TH) (see, e.g., Oh et al. (2009) Gene Ther 16:437; Sasaok et al. (1992) Mol. Brain Res. 16:274; Boundy et al. (1998) J. Neurosci. 18:9989; and Kaneda et al. (1991) Neuron 6:583-594); a GnRH promoter (see, e.g., Radovick et al. (1991) Proc. Natl. Acad. Sci. USA 88:3402-3406); an L7 promoter (see, e.g., Oberdick et al. (1990) Science 248:223-226); a DNMT promoter (see, e.g., Bartge et al. (1988) Proc. Natl. Acad. Sci. USA 85:3648-3652); an enkephalin promoter (see, e.g., Comb et al. (1988) EMBO J. 17:3793-3805); a myelin basic protein (MBP) promoter; a Ca2+-calmodulin-dependent protein kinase II-alpha (CanKIIα) promoter (see, e.g., Mayford et al. (1996) Proc. Natl. Acad. Sci. USA 93:13250; and Casanova et al (2001) Genesis 31:37); a CMV enhancer/platelet-derived growth factor-β promoter (see, e.g., Liu et al. (2004) Gene Therapy 11:52-60); and the like.

[0785] Adipocyte-specific spatially restricted promoters include, but are not limited to, the aP2 gene promoter/enhancer, e.g., a region from −5.4 kb to +21 bp of a human aP2 gene (see, e.g., Tozzo et al. (1997) Endocrinol. 138:1604; Ross et al. (1990) Proc. Natl. Acad. Sci. USA 87:9590; and Pavjani et al. (2005) Nat. Med. 11:797); a glucose transporter-4 (GLUT4) promoter (see, e.g., Knight et al (2003) Proc. Natl. Acad. Sci. USA 100:14725); a fatty acid translocase (FAT/CD336) promoter (see, e.g., Kuriki et al. (2002) Biol. Pharm. Bull. 25:1476; and Sato et al. (2002) J. Biol. Chem. 277:15703); a stearoyl-CoA desaturase-1 (SCD1) promoter (Tabor et al. (1999) J. Biol. Chem. 274:20603); a leptin promoter (see, e.g., Mason et al. (1998) Endocrinol. 139:1013; and Chen et al. (1999) Biochem. Biophys. Res. Comm. 262:187); an adiponectin promoter (see, e.g., Kita et al. (2005) Biochem. Biophys. Res. Comm. 331:484; and (Chakrabarti (2010) Endocrinol. 151:2408); an adipsin promoter (see, e.g., Platt et al. (1989) Proc. Nat. Acad. Sci. USA 86:7490); a resistin promoter (see, e.g., Seo et al. (2003) Molec. Endocrinol. 17:1522); and the like.

[0786] Cardiomyocyte-specific spatially restricted promoters include, but are not limited to, control sequences derived from the following genes: myosin light chain-2, α-myosin heavy chain, AE3, cardiac troponin C, cardiac actin, and the like. Franz et al. (1997) Cardiovasc. Res. 35:560-566; Robbins et al. (1995) Ann N.Y. Acad. Sci. 752:492-505; Linn et al (1995) Circ. Res. 76:584-591; Parmacek et al. (1994) Mol. Cell. Biol. 14:1870-1885; Hunter et al. (1993) Hypertension 22:608-617; and Sartorelli et al. (1992) Proc. Natl. Acad. Sci. USA 89:4047-4051.

[0787] Smooth muscle-specific spatially restricted promoters include, but are not limited to, an SM22α promoter (see, e.g., Akyürek et al. (2000) Mol. Med. 6:983; and U.S. Pat. No. 7,169,874); a smoothelin promoter (see, e g., WO 2001/018048); an α-smooth muscle actin promoter; and the like. For example, a 0.4 kb region of the SM22α promoter, within which lie two CArG elements, has been shown to mediate vascular smooth muscle cell-specific expression (see, e.g., Kim, et al. (1997) Mol. Cell. Biol. 17, 2266-2278; Li, et al., (1996) J. Cell Biol. 132, 849-859; and Moessler, et al. (1996) Development 122, 2415-2425).

[0788] Photoreceptor-specific spatially restricted promoters include, but are not limited to, a rhodopsin promoter; a rhodopsin kinase promoter (Young et al. (2003) Ophthalmol. Vis. Sci. 44:4076); a beta phosphodiesterase gene promoter (Nicoud et al. (2007) J. Gene Med. 9:1015); a retinitis pigmentosa gene promoter (Nicoud et al. (2007) supra); an interphotoreceptor retinoid-binding protein (IRBP) gene enhancer (Nicoud et al. (2007) supra); an IRBP gene promoter (Yokoyama et al. (1992) Exp Eye Res. 55:225); and the like.

[0789] Nonlimiting Exemplary Cells—Specific Promoters

[0790] Cell-specific promoters known in the art may be used to direct expression of a Gene Writer protein, e.g., as described herein. Nonlimiting exemplary mammalian cell-specific promoters have been characterized and used in mice expressing Cre recombinase in a cell-specific manner. Certain nonlimiting exemplary mammalian cell-specific promoters are listed in Table 1 of U.S. Pat. No. 9,845,481, incorporated herein by reference.

[0791] In some embodiments, a cell-specific promoters is a promoter that is active in plants. Many exemplary cell-specific plant promoters are known in the art. See, e.g., U.S. Pat. Nos. 5,097,025; 5,783,393; 5,880,330; 5,981,727; 7,557,264; 6,291,666; 7,132,526; and 7,323,622; and U.S. Publication Nos. 2010/0269226; 2007/0180580; 2005/0034192; and 2005/0086712, which are incorporated by reference herein in their entireties for any purpose.

[0792] In some embodiments, a vector as described herein comprises an expression cassette. The term “expression cassette”, as used herein, refers to a nucleic acid construct comprising nucleic acid elements sufficient for the expression of the nucleic acid molecule of the instant invention. Typically, an expression cassette comprises the nucleic acid molecule of the instant invention operatively linked to a promoter sequence. The term“operatively linked” refers to the association of two or more nucleic acid fragments on a single nucleic acid fragment so that the function of one is affected by the other. For example, a promoter is operatively linked with a coding sequence when it is capable of affecting the expression of that coding sequence (e.g. the coding sequence is under the transcriptional control of the promoter). Encoding sequences can be operatively linked to regulatory sequences in sense or antisense orientation. In certain embodiments, the promoter is a heterologous promoter. The term “heterologous promoter”, as used herein, refers to a promoter that is not found to be operatively linked to a given encoding sequence in nature. In certain embodiments, an expression cassette may comprise additional elements, for example, an intron, an enhancer, a polyadenylation site, a woodchuck response element (WRE) and/or other elements known to affect expression levels of the encoding sequence A “promoter” typically controls the expression of a coding sequence or functional RNA. In certain embodiments, a promoter sequence comprises proximal and more distal upstream elements and can further comprise an enhancer element. An “enhancer” can typically stimulate promoter activity and may be an innate element of the promoter or a heterologous element inserted to enhance the level or tissue-specificity of a promoter, in certain embodiments, the promoter is derived in its entirety from a native gene. In certain embodiments, the promoter is composed of different elements derived from different naturally occurring promoters. In certain embodiments, the promoter comprises a synthetic nucleotide sequence. It will be understood by those skilled in the art that different promoters will direct the expression of a gene in different tissues or cell types, or at different stages of development, or in response to different environmental conditions or to the presence or the absence of a drug or transcriptional co-factor. Ubiquitous, cell-type-specific, tissue-specific, developmental stage-specific, and conditional promoters, for example, drug-responsive promoters (e.g., tetracycline-responsive promoters) are well known to those of skill in the art. Examples of promoter include, but are not limited to, the phosphoglycerate kinase (PKG) promoter, CAG (composite of the CMV enhancer the chicken beta actin promoter (CBA) and the rabbit beta globin intron), NSE (neuronal specific enolase), synlapsin or NeuN promoters, the SV40 early promoter, mouse mammary tumor virus LTR promoter; adenovirus major late promoter (Ad MLP); a herpes simplex virus (HSV) promoter, a cytomegalovirus (CMV) promoter such as the CMV immediate early promoter region (CMVIE), SFFV promoter, rous sarcoma virus (RSV) promoter, synthetic promoters, hybrid promoters, and the like. Other promoters can be of human origin or from other species, including from mice. Common promoters include, e.g., the human cytomegalovirus (CMV) immediate early gene promoter, the SV40 early promoter, the Rous sarcoma virus long terminal repeat, [beta]-actin, rat insulin promoter, the phosphoglycerate kinase promoter, the human alpha-1 antitrypsin (hAAT) promoter, the transthyretin promoter, the TBG promoter and other liver-specific promoters, the desmin promoter and similar muscle-specific promoters, the EF1-alpha promoter, the CAG promoter and other constitutive promoters, hybrid promoters with multi-tissue specificity, promoters specific for neurons like synapsin and glyceraldehyde-3-phosphate dehydrogenase promoter, all of which are promoters well known and readily available to those of skill in the art, can be used to obtain high-level expression of the coding sequence of interest. In addition, sequences derived from non-viral genes, such as the murine metallothionein gene, will also find use herein. Such promoter sequences are commercially available from, e.g., Stratagene (San Diego, CA). Additional exemplary promoter sequences are described, for example, in WO2018213786A1 (incorporated by reference herein in its entirety).

[0793] In some embodiments, the apolipoprotein E enhancer (ApoE) or a functional fragment thereof is used, e.g., to drive expression in the liver. In some embodiments, two copies of the ApoE enhancer or a functional fragment thereof is used. In some embodiments, the ApoE enhancer or functional fragment thereof is used in combination with a promoter, e.g., the human alpha-1 antitrypsin (hAAT) promoter.

[0794] In some embodiments, the regulatory sequences impart tissue-specific gene expression capabilities. In some cases, the tissue-specific regulatory sequences bind tissue-specific transcription factors that induce transcription in a tissue specific manner. Various tissue-specific regulatory sequences (e.g., promoters, enhancers, etc.) are known in the art. Exemplary tissue-specific regulatory sequences include, but are not limited to, the following tissue-specific promoters; a liver-specific thyroxin binding globulin (TBG) promoter, a insulin promoter, a glucagon promoter, a somatostatin promoter, a pancreatic polypeptide (PPY) promoter, a synapsin-1 (Syn) promoter, a creatine kinase (MCK) promoter, a mammalian desmin (DES) promoter, α-myosin heavy chain (a-MHC) promoter, or a cardiac Troponin T (cTnT) promoter. Other exemplary promoters include Beta-actin promoter, hepatitis B virus core promoter, Sandig et al., Gene Ther., 3:1002-9 (1996); alpha-fetoprotein (AFP) promoter, Arbuthnot et al., Hum. Gene. Ther., 7:1503-14 (1996)) bone osteocalcin promoter (Stein et al., Mol. Biol. Rep., 24:185-96 (1997)); bone sialoprotein promoter (Chen et al., J. Bone Miner. Res., 11:654-64 (1996)), CD2 promoter (Hansal et al., J. Immunol., 161:1063-8 (1998); immunoglobulin heavy chain promoter; T cell receptor α-chain promoter, neuronal such as neuron-specific enolase (NSE) promoter (Andersen et al., Cell. Mol. Neurobiol., 13:503-15 (1993)), neurofilament light-chain gene promoter (Piccioli et al., Proc. Natl. Acad. Sci. USA, 88:5611-5 (1991)), and the neuron-specific vgf gene promoter (Piccioli et al., Neuron, 15:373-84 (1995)), and others. Additional exemplary promoter sequences are described, for example, in U.S. Pat. No. 10,300,146 (incorporated herein by reference in its entirety). In some embodiments, a tissue specific regulatory element, e.g., a tissue-specific promoter, is selected from one known to be operably linked to a gene that is highly expressed in a given tissue, e.g., as measured by RNA-seq or protein expression data, or a combination thereof. Methods for analyzing tissue specificity by expression are taught in Fagerberg et al. Mol Cell Proteomics 13(2):397-406 (2014), which is incorporated herein by reference in its entirety.

[0795] In some embodiments, a vector described herein is a multicistronic expression construct. Multicistronic expression constructs include, for example, constructs harboring a first expression cassette, e.g. comprising a first promoter and a first encoding nucleic acid sequence, and a second expression cassette, e.g. comprising a second promoter and a second encoding nucleic acid sequence. Such multicistronic expression constructs may, in some instances, be particularly useful in the delivery of non-translated gene products, such as hairpin RNAs, together with a polypeptide, for example, a gene writer and gene writer template. In some embodiments, multicistronic expression constructs may exhibit reduced expression levels of one or more of the included transgenes, for example, because of promoter interference or the presence of incompatible nucleic acid elements in close proximity. If a multicistronic expression construct is part of a viral vector, the presence of a self-complementary nucleic acid sequence may, in some instances, interfere with the formation of structures necessary for viral reproduction or packaging.

[0796] In some embodiments, the sequence encodes an RNA with a hairpin. In some embodiments, the hairpin RNA is an a guide RNA, a template RNA, sh-RNA, or a microRNA, in some embodiments, the first promoter is an RNA polymerase I promoter. In some embodiments, the first promoter is an RNA polymerase II promoter. In some embodiments, the second promoter is an RNA polymerase III promoter. In some embodiments, the second promoter is a U6 or H1 promoter. In some embodiments, the nucleic acid construct comprises the structure of AAV construct B1 or B2.

[0797] Without wishing to be bound by theory, multicistronic expression constructs may not achieve optimal expression levels as compared to expression systems containing only one cistron. One of the suggested causes of lower expression levels achieved with multicistronic expression constructs comprising two ore more promoter elements is the phenomenon of promoter interference (see, e.g., Curtin J A, Dane A P, Swanson A, Alexander I E, Ginn S L. Bidirectional promoter interference between two widely used internal heterologous promoters in a late-generation lentiviral construct. Gene Ther. 2008 March; 15(5):384-90; and Martin-Duque P, Jezzard S, Kaftansis L, Vassaux G. Direct comparison of the insulating properties of two genetic elements in an adenoviral vector containing two different expression cassettes. Hum Gene Ther. 2004 October; 15(10):995-1002; both references incorporated herein by reference for disclosure of promoter interference phenomenon). In some embodiments, the problem of promoter interference may be overcome, e.g., by producing multicistronic expression constructs comprising only one promoter driving transcription of multiple encoding nucleic acid sequences separated by internal ribosomal entry sites, or by separating cistrons comprising their own promoter with transcriptional insulator elements. In some embodiments, single-promoter driven expression of multiple cistrons may result in uneven expression levels of the cistrons. In some embodiments, a promoter cannot efficiently be isolated and isolation elements may not be compatible with some gene transfer vectors, for example, some retroviral vectors.

[0798] MicroRNAs

[0799] miRNAs and other small interfering nucleic acids generally regulate gene expression via target RNA transcript cleavage/degradation or translational repression of the target messenger RNA (mRNA). miRNAs may, in some instances, be natively expressed, typically as final 19-25 non-translated RNA products. miRNAs generally exhibit their activity through sequence-specific interactions with the 3′ untranslated regions (UTR) of target mRNAs. These endogenously expressed miRNAs may form hairpin precursors that are subsequently processed into an miRNA duplex, and further into a mature single stranded miRNA molecule. This mature miRNA generally guides a multiprotein complex, miRISC, which identifies target 3′ UTR regions of target mRNAs based upon their complementarity to the mature miRNA. Useful transgene products may include, for example, miRNAs or miRNA binding sites that regulate the expression of a linked polypeptide. A non-limiting list of miRNA genes; the products of these genes and their homologues are useful as transgenes or as targets for small interfering nucleic acids (e.g. miRNA sponges, antisense oligonucleotides), e.g., in methods such as those listed in U.S. Ser. No. 10/300,146, 2:25-25:48, incorporated by reference. In some embodiments, one or more binding sites for one or more of the foregoing miRNAs are incorporated in a transgene, e.g., a transgene delivered by a rAAV vector, e.g., to inhibit the expression of the transgene in one or more tissues of an animal harboring the transgene in some embodiments, a binding site may be selected to control the expression of a transgene in a tissue specific manner. For example, binding sites for the liver-specific miR-122 may be incorporated into a transgene to inhibit expression of that transgene in the liver. Additional exemplary miRNA sequences are described, for example, in U.S. Pat. No. 10,300,146 (incorporated herein by reference in its entirety). For liver-specific Gene Writing, however, overexpression of miR-122 may be utilized instead of using binding sites to effect miR-122-specific degradation. This miRNA is positively associated with hepatic differentiation and maturation, as well as enhanced expression of liver specific genes. Thus, in some embodiments, the coding sequence for miR122 may be added to a component of a Gene Writing system to enhance a liver-directed therapy.

[0800] A miR inhibitor or miRNA inhibitor is generally an agent that blocks miRNA expression and/or processing. Examples of such agents include, but are not limited to, microRNA antagonists, microRNA specific antisense, microRNA sponges, and microRNA oligonucleotides (double-stranded, hairpin, short oligonucleotides) that inhibit miRNA interaction with a Drosha complex. MicroRNA inhibitors, e.g., miRNA sponges, can be expressed in cells from transgenes (e.g. as described in Ebert, M, S. Nature Methods, Epub Aug. 12, 2007; incorporated by reference herein in its entirety. In some embodiments, microRNA sponges, or other miR inhibitors, are used with the AAVs. microRNA sponges generally specifically inhibit miRNAs through a complementary heptameric seed sequence. In some embodiments, an entire family of miRNAs can be silenced using a single sponge sequence. Other methods for silencing miRNA function (derepression of miRNA targets) in cells will be apparent to one of ordinary skill in the art.

[0801] In some embodiments, a miRNA as described herein comprises a sequence listed in Table 4 of PCT Publication No. WO2020014209, incorporated herein by reference. Also incorporated herein by reference are the listing of exemplary miRNA sequences from WO2020014209.

[0802] In some embodiments, it is advantageous to silence one or more components of a Gene Writing system (e.g., mRNA encoding a Gene Writer polypeptide, a Gene Writer Template RNA, or a heterologous object sequence expressed from the genome after successful Gene Writing) in a portion of cells. In some embodiments, it is advantageous to restrict expression of a component of a Gene Writing system to select cell types within a tissue of interest.

[0803] For example, it is known that in a given tissue, e.g., liver, macrophages and immune cells, e.g., Kupffer cells in the liver, may engage in uptake of a delivery vehicle for one or more components of a Gene Writing system. In some embodiments, at least one binding site for at least one miRNA highly expressed in macrophages and immune cells, e.g., Kupffer cells, is included in at least one component of a Gene Writing system, e.g., nucleic acid encoding a Gene Writing polypeptide or a transgene. In some embodiments, a miRNA that targets the one or more binding sites is listed in a table referenced herein, e.g., miR-142, e.g., mature miRNA hsa-miR-142-5p or hsa-miR-142-3p.

[0804] In some embodiments, there may be a benefit to decreasing Gene Writer levels and/or Gene Writer activity in cells in which Gene Writer expression or overexpression of a transgene may have a toxic effect. For example, it has been shown that delivery of a transgene overexpression cassette to dorsal root ganglion neurons may result in toxicity of a gene therapy (see Hordeaux et al Sci Transl Med 12(569):eaba9188 (2020), incorporated herein by reference in its entirety). In some embodiments, at least one miRNA binding site may be incorporated into a nucleic acid component of a Gene Writing system to reduce expression of a system component in a neuron, e.g., a dorsal root ganglion neuron. In some embodiments, the at least one miRNA binding site incorporated into a nucleic acid component of a Gene Writing system to reduce expression of a system component in a neuron is a binding site of miR-182, e.g., mature miRNA hsa-miR-182-5p or hsa-miR-182-3p. In some embodiments, the at least one miRNA binding site incorporated into a nucleic acid component of a Gene Writing system to reduce expression of a system component in a neuron is a binding site of miR-183, e.g., mature miRNA hsa-miR-183-5p or hsa-miR-183-3p. In some embodiments, combinations of miRNA binding sites may be used to enhance the restriction of expression of one or more components of a Gene Writing system to a tissue or cell type of interest.

[0805] Table A5 below below provides exemplary miRNAs and corresponding expressing cells, e.g., a miRNA for which one can, in some embodiments, incorporate binding sites (complementary sequences) in the transgene or polypeptide nucleic acid, e.g., to decrease expression in that off-target cell.

TABLE A5
Exemplary miRNA from off-target
cells and tissues

| Silenced | | | | SEQ |
|---|---|---|---|---|
| cell | miRNA | Mature | miRNA | ID |
| type | name | miRNA | sequence | NO: |
| Kupffer | miR-142 | hsa-miR- | cauaaaguaga | 3567 |
| cells | | 142-5p | aagcacuacu | |
| Kupffer | miR-142 | hsa-miR- | uguaguguuuc | 1684 |
| cells | | 142-3p | cuacuuuaugga | |
| Dorsal | miR-182 | hsa-miR- | uuuggcaauggu | 3568 |
| root | | 182-5p | agaacucacacu | |
| ganglion | | | | |
| neurons | | | | |
| Dorsal | miR-182 | hsa-miR- | ugguucuagacu | 3569 |
| root | | 182-3p | ugccaacua | |
| ganglion | | | | |
| neurons | | | | |
| Dorsal | miR-183 | hsa-miR- | uauggcacuggu | 3570 |
| root | | 183-5p | agaauucacu | |
| ganglion | | | | |
| neurons | | | | |
| Dorsal | miR-183 | hsa-miR- | gugaauuaccga | 3571 |
| root | | 183-3p | agggccauaa | |
| ganglion | | | | |
| neurons | | | | |
| Hepatocytes | miR-122 | hsa-miR- | uggagugugaca | 3572 |
| | | 122-5p | augguguuug | |
| Hepatocytes | miR-122 | hsa-miR- | aacgccauuauc | 3573 |
| | | 122-3p | acacuaaaua | |

[0806] Anticrispr Systems for Regulating GeneWriter Activity

[0807] Various approaches for modulating Cas molecule activity may be used in conjunction with the systems and methods described herein. For instance, in some embodiments, a polypeptide described herein (e.g., a Cas molecule or a GeneWriter comprising a Cas domain) can be regulated using an anticrispr agent (e.g., an anticrispr protein or anticrispr small molecule). In some embodiments, the Cas molecule or Cas domain comprises a responsive intein such as, for example, a 4-hydroxytamoxifen (4-HT)-responsive intein, an iCas molecule (e.g., iCas9); a 4-HT-responsive Cas (e.g., allosterically regulated Cas9 (arC9) or dead Cas9 (dC9)). The systems and methods described herein can also utilize a chemically-induced dimerization system of split protein fragments (e.g., rapamycin-mediated dimerization of FK506 binding protein 12 (FKBP) and FKBP rapamycin binding domain (FRB), an abscisic acid-inducible ABI-PYL1 and gibberellin-inducible GID1-GAI heterodimerization domains); a dimer of BCL-xL peptide and BH3 peptides, a A385358 (A3) small molecule, a degron system (e.g., a FKBP-Cas9 destabilized system, an auxin-inducible degron (AID) or an E. coli DHFR degron system), an aptamer or aptazyme fused with gRNA (e.g., tetracycline- and theophylline-responsive bioswitches), AcrIIA2 and AcrIIA4 proteins, and BRD0539.

[0808] In some embodiments, a small molecule-responsive intein (e.g., 4-hydroxytamoxifen (4-HT)-responsive intein) is inserted at specific sites within a Cas molecule (e.g., Cas9). In some embodiments, the insertion of a 4HT-responsive intein disrupts Cas9 enzymatic activity. In some embodiments, a Cas molecule (e.g., iCas9) is fused to the hormone binding domain of the estrogen receptor (ERT2). In some embodiments, the ligand binding domain of the human estrogen receptor-α can be inserted into a Cas molecule (e.g., Cas9 or dead Cas9 (dC9)), e.g., at position 231, yielding a 4HT-responsive anticrispr Cas9 (e.g., arC9 or dC9). In some embodiments, dCas9 can provide 4-HT dose-dependent repression of Cas9 function. In some embodiments, arC9 can provide 4-HT dose-dependent control of Cas9 function. In some embodiments, a Cas molecule (e.g., Cas9) is fused to split protein fragments. In some embodiments, chemically-induced dimerization of split protein fragments (e.g., rapamycin-mediated dimerization of FK506 binding protein 12 (FKBP) and FKBP rapamycin binding domain (FRB)) can induce low levels of Cas9 molecule activity. In some embodiments, a chemically-induced dimerization system (e.g., abscisic acid-inducible ABI-PYL1 and gibberellin-inducible GID1-GAI heterodimerization domains) can induce a dose-dependent and reversible transcriptional activation/repression of Cas9. In some embodiments, a Cas9 inducible system (ciCas9) comprises the replacement of a Cas molecule (e.g., Cas9) REC2 domain with a BCL-xl peptide and attachment of a BH3 peptide to the N- and C-termini of the modified Cas9.BCL. In some embodiments, the interaction between BCL-xL and BH3 peptides can keep Cas9 in an inactive state. In some embodiments, a small molecule (e.g., A-385358 (A3)) can disrupt the interaction between BLC-xl and BH3 peptides to activate Cas9. In some embodiments, a Cas9 inducible system can exhibit dose-dependent control of nuclease activity. In some embodiments, a degron system can induce degradation of a Cas molecule (e.g., Cas9) upon activation or deactivation by an external factor (e.g., small-molecule ligand, light, temperature, or a protein). In some embodiments, a small molecule BRD0539 inhibits a Cas molecule (e.g., Cas9) reversibly. Additional information on anticrispr proteins or anticrispr small molecules can be found, for example, in Gangopadhyay, S. A. et al. Precision control of CRISPR-Cas9 using small molecules and light, Biochemistry, 2019, Maji, B. et al. A high-throughput platform to identify small molecule inhibitors of CRISPR-Cas9, and Pawluk Anti-CRISPR: discovery, mechanism and function Nature Reviews Microbiology volume 16, pages 12-17(2018), each of which is incorporated by reference in its entirety.

[0809] Self-Inactivating Modules for Regulating GeneWriter Activity

[0810] In some embodiments the Gene Writer systems described herein includes a self-inactivating module. The self-inactivating module leads to a decrease of expression of the Gene Writer polypeptide, the Gene Writer template, or both. Without wishing to be bound by the theory, the self-inactivating module provides for a temporary period of Gene Writer expression prior to inactivation. Without wishing to be bound by theory, the activity of the Gene Writer polypeptide at a target site introduces a mutation (e.g. a substitution, insertion, or deletion) into the DNA encoding the Gene Writer polypeptide or Gene Writer template which results in a decrease of Gene Writer polypeptide or template expression. In some embodiments of the self-inactivating module, a target site for the Gene Writer polypeptide is included in the DNA encoding the Gene Writer polypeptide or Gene Writer template. In some embodiments, one, two, three, four, five, or more copies of the target site are included in the DNA encoding the Gene Writer polypeptide or Gene Writer template. In some embodiments, the target site in the DNA encoding the Gene Writer polypeptide or Gene Writer template is the same target site as the target site on the genome. In some embodiments, the target site is a different target site than the target site on the genome. In some embodiments, the self-inactivation module target site uses the same or a different template RNA or guide RNA as the genome target site. In some embodiments, the target site is modified via target primed reverse transcription based upon a template RNA. In some embodiments the target side is nicked. The target site may be incorporated into an enhancer, a promoter, an untranslated region, an exon, an intron, an open reading frame, or a stuffer sequence.

[0811] In some embodiments, upon inactivation, the decrease of expression is 25%, 50%, 60%, 70%, 80%, 90%, 95%, 99%, 99.9%, or more lower than a Gene Writing system that does not contain the self-inactivating module. In some embodiments, a Gene Writer system that contains the self-inactivating module has a 5%, 10%, 15%, 20%, 25%, 30%, 40%, 50%, 60%, 70%, 80%, 90%, 95% 99%, or higher rate of integrations in target sites than off-target sites compared to a Gene Writing system that does not contain the self-inactivation module. a Gene Writer system that contains the self-inactivating module has a 10%, 15%, 20%, 25%, 30%, 40%, 50%, 60%, 70%, 80%, 90%, 95% 99%, or higher efficiency of target site modification compared to a Gene Writing system that does not contain the self-inactivation module. In some embodiments, the self-inactivating module is included when the Gene Writer polypeptide is delivered as DNA, e.g. via a viral vector.

[0812] Self-inactivating modules have been described for nucleases. See, e.g. in Li et al A Self-Deleting AAV-CRISPR System for In Vivo Genome Editing, Mol Ther Methods Clin Dev. 2019 Mar. 15; 12: 111-122, P. Singhal, Self-Inactivating Cas9: a method for reducing exposure while maintaining efficacy in virally delivered Cas9 applications (available at editasmedicine.com/wp-content/uploads/2019/10/aef_asgct_poster_2017_final_-_present_5-11-17_515pm1_1494537387_1494558495_1497467403.pdf), and Epstein and Schaffer Engineering a Self-Inactivating CRISPR System for AAV Vectors Targeted Genome Editing I|Volume 24, SUPPLEMENT 1, S50, May 1, 2016, and WO2018106693A1.

[0813] Small Molecule

[0814] In some embodiments a polypeptide described herein (e.g., a Gene Writer polypeptide) is controllable via a small molecule. In some embodiments the polypeptide is dimerized via a small molecule.

[0815] In some embodiment, the polypeptide is controllable via Chemical Induction of Dimerization (CID) with small molecules. CID is generally used to generate switches of protein function to alter cell physiology. An exemplary high specificity, efficient dimerizer is rimiducid (AP1903), which has two identical, protein-binding surfaces arranged tai-to-tail, each with high affinity and specificity for a mutant of FKBP12: FKBP12(F36V) (FKBP12v36, F_{V36} or Fᵥ). Attachment of one or more F_{V} domains onto one or more cell signaling molecules that normally rely on homodimerization can convert that protein to rimiducid control. Homodimerization with rimiducid is used in the context of an inducible caspase safety switch. This molecular switch that is controlled by a distinct dimerizer ligand, based on the heterodimerizing small molecule, rapamycin, or rapamycin analogs (“rapalogs”). Rapamycin binds to FKBP12, and its variants, and can induce heterodimerization of signaling domains that are fused to FKBP12 by binding to both FKBP12 and to polypeptides that contain the FKBP-rapamycin-binding (FRB) domain of mTOR. Provided in some embodiments of the present application are molecular switches that greatly augment the use of rapamycin, rapalogs and rimiducid as agents for therapeutic applications.

[0816] In some embodiments of the dual switch technology, a homodimerizer, such as AP1903 (rimiducid), directly induces dimerization or multimerization of polypeptides comprising an FKBP12 multimerizing region. In other embodiments, a polypeptide comprising an FKBP12 multimerization is multimerized, or aggregated by binding to a heterodimerizer, such as rapamycin or a rapalog, which also binds to an FRB or FRB variant multimerizing region on a chimeric polypeptide, also expressed in the modified cell, such as, for example, a chimeric antigen receptor. Rapamycin is a natural product macrolide that binds with high affinity (<1 nM) to FKBP12 and together initiates the high-affinity inhibitory interaction with the FKBP-Rapamycin-Binding (FRB) domain of mTOR. FRB is small (89 amino acids) and can thereby be used as a protein “tag” or “handle” when appended to many proteins. Coexpression of a FRB-fused protein with a FKBP12-fused protein renders their approximation rapamycin-inducible (12-16). This can serve as the basis for a cell safety switch regulated by the orally available ligand, rapamycin, or derivatives of rapamycin (rapalogs) that do not inhibit mTOR at a low, therapeutic dose but instead bind with selected, Caspase-9-fused mutant FRB domains. (see Sabatini D M, et al., Cell. 1994; 78(1):35-43; Brown E J, et al., Nature. 1994; 369(6483):756-8; Chen J, et al., Proc Natl Acad Sci USA. 1995; 92(11):4947-51; and Choi J, Science 1996; 273(5272):239-42).

[0817] In some embodiments, two levels of control are provided in the therapeutic cells. In embodiments, the first level of control may be tunable, i.e., the level of removal of the therapeutic cells may be controlled so that it results in partial removal of the therapeutic cells. In some embodiments, the chimeric antigen polypeptide comprises a binding site for rapamycin, or a rapamycin analog. In embodiments, also present in the therapeutic cell is a suicide gene, such as, for example, one encoding a caspase polypeptide. Using this controllable first level, the need for continued therapy may, in some embodiments, be balanced with the need to eliminate or reduce the level of negative side effects. In some embodiments, a rapamycin analog a rapalog is administered to the patient, which then binds to both the caspase polypeptide and the chimeric antigen receptor, thus recruiting the caspase polypeptide to the location, and aggregating the caspase polypeptide. Upon aggregation, the caspase polypeptide induces apoptosis. The amount of rapamycin or rapamycin analog administered to the patient may vary; if the removal of a lower level of cells by apoptosis is desired, a lower level of rapamycin or rapamycin may be administered to the patient. In some embodiments, the second level of control may be designed to achieve the maximum level of cell elimination. This second level may be based, for example, on the use of rimiducid, or AP1903. If there is a need to rapidly eliminate up to 100% of the therapeutic cells, the AP1903 may be administered to the patient. The multimeric AP1903 binds to the caspase polypeptide, leading to multimerization of the caspase polypeptide and apoptosis. In certain examples, second level may also be tunable, or controlled, by the level of AP1903 administered to the subject.

[0818] In certain embodiments, small molecules can be used to control genes, as described in for example, U.S. Pat. No. 10,584,351 at 47:53-56:47 (incorporated by reference herein in its entirety), together suitable ligands for the control features, e.g., in U.S. Pat. No. 10,584,351 at 56:48, et seq. as well as U10046049 at 43:27-52:20, incorporated by reference as well as the description of ligands for such control systems at 52:21, et seq.

### Resolution of Gene Writing™ Events

[0819] After writing of the template nucleic acid into the target site, additional activities may be performed to increase the overall efficiency of incorporation. In some embodiments, a nick may be initiated in the genome on the non-written DNA strand to encourage copying of the newly written DNA onto the second strand. In some embodiments, the nick may be within at least 10, 20, 30, 40, 50, 60, 70 80, 90, or 100 bases of the target site. In some embodiments, this second nick is performed by the same polypeptide performing the writing. In other embodiments, the second nick may be performed by an additional polypeptide encoding nickase activity, e.g. a Cas9 nickase.

[0820] For some Gene Writer™ systems, the writing process may leave a 3′ flap containing the newly written DNA that must displace the flanking target sequence to anneal to the second genomic strand to complete the edit. In some embodiments, the 3′ flap is designed to have enhanced strand invasion capability. In some embodiments, 5′-3′ exonuclease activity is supplemented to chew back the exposed 5′ end of the displaced strand. In some embodiments, DNA ligase activity is supplemented to complete the reaction. In some embodiments, the exonuclease and/or ligase activities are optionally provided on the Gene Writer™ polypeptide. In some embodiments, the exonuclease and/or ligase activities are optionally provided separately from the Gene Writer™ polypeptide.

[0821] Based on the published mechanism of non-LTR retrotransposons, Gene Writing™ systems derived therefrom may not require supplementation of additional functions for resolution of the writing event. In some embodiments, the system may result in complete writing without requiring endogenous host factors. In some embodiments, the system may result in complete writing without the need for DNA repair. In some embodiments, the system may result in complete writing without eliciting a DNA damage response.

### Chemically Modified Nucleic Acids and Nucleic Acid End Features

[0822] A nucleic acid described herein (e.g., a template nucleic acid, e.g., a template RNA; or a nucleic acid (e.g., mRNA) encoding a GeneWriter; or a gRNA) can comprise unmodified or modified nucleobases. Naturally occurring RNAs are synthesized from four basic ribonucleotides: ATP, CTP, UTP and GTP, but may contain post-transcriptionally modified nucleotides. Further, approximately one hundred different nucleoside modifications have been identified in RNA (Rozenski, J, Crain, P, and McCloskey, J. (1999). The RNA Modification Database: 1999 update. Nucl Acids Res 27: 196-197). An RNA can also comprise wholly synthetic nucleotides that do not occur in nature.

[0823] In some embodiments, the chemically modification is one provided in PCT/US2016/032454, US Pat. Pub. No. 20090286852, of International Application No. WO/2012/019168, WO/2012/045075, WO/2012/135805, WO/2012/158736, WO/2013/039857, WO/2013/039861, WO/2013/052523, WO/2013/090648, WO/2013/096709, WO/2013/101690, WO/2013/106496, WO/2013/130161, WO/2013/151669, WO/2013/151736, WO/2013/151672, WO/2013/151664, WO/2013/151665, WO/2013/151668, WO/2013/151671, WO/2013/151667, WO/2013/151670, WO/2013/151666, WO/2013/151663, WO/2014/028429, WO/2014/081507, WO/2014/093924, WO/2014/093574, WO/2014/113089, WO/2014/144711, WO/2014/144767, WO/2014/144039, WO/2014/152540, WO/2014/152030, WO/2014/152031, WO/2014/152027, WO/2014/152211, WO/2014/158795, WO/2014/159813, WO/2014/164253, WO/2015/006747, WO/2015/034928, WO/2015/034925, WO/2015/038892, WO/2015/048744, WO/2015/051214, WO/2015/051173, WO/2015/051169, WO/2015/058069, WO/2015/085318, WO/2015/089511, WO/2015/105926, WO/2015/164674, WO/2015/196130, WO/2015/196128, WO/2015/196118, WO/2016/011226, WO/2016/011222, WO/2016/011306, WO/2016/014846, WO/2016/022914, WO/2016/036902, WO/2016/077125, or WO/2016/077123, each of which is herein incorporated by reference in its entirety. It is understood that incorporation of a chemically modified nucleotide into a polynucleotide can result in the modification being incorporated into a nucleobase, the backbone, or both, depending on the location of the modification in the nucleotide. In some embodiments, the backbone modification is one provided in EP 2813570, which is herein incorporated by reference in its entirety. In some embodiments, the modified cap is one provided in US Pat. Pub. No. 20050287539, which is herein incorporated by reference in its entirety.

[0824] In some embodiments, the chemically modified nucleic acid (e.g., RNA, e.g., mRNA) comprises one or more of ARCA: anti-reverse cap analog (m27.3′-OGP3G), GP3G (Unmethylated Cap Analog), m7GP3G (Monomethylated Cap Analog), m32.2.7GP3G (Trimethylated Cap Analog), m5CTP (5′-methyl-cytidine triphosphate), m6ATP (N6-methyl-adenosine-5′-triphosphate), s2UTP (2-thio-uridine triphosphate), and Ψ (pseudouridine triphosphate).

[0825] In some embodiments, the chemically modified nucleic acid comprises a 5′ cap, e.g.: a 7-methylguanosine cap (e.g., a O-Me-m7G cap); a hypermethylated cap analog; an NAD+-derived cap analog (e.g., as described in Kiledjian, Trends in Cell Biology 28, 454-464 (2018)); or a modified, e.g., biotinylated, cap analog (e.g., as described in Bednarek et al., Phil Trans R Soc B 373, 20180167 (2018)).

[0826] In some embodiments, the chemically modified nucleic acid comprises a 3′ feature selected from one or more of: a polyA tail; a 16-nucleotide long stem-loop structure flanked by unpaired 5 nucleotides (e.g., as described by Mannironi et al., Nucleic Acid Research 17, 9113-9126 (1989)); a triple-helical structure (e.g., as described by Brown et al., PNAS 109, 19202-19207 (2012)); a tRNA, Y RNA, or vault RNA structure (e.g., as described by Labno et al., Biochemica et Biophysica Acta 1863, 3125-3147 (2016)); incorporation of one or more deoxyribonucleotide triphosphates (dNTPs), 2′O-Methylated NTPs, or phosphorothioate-NTPs; a single nucleotide chemical modification (e.g., oxidation of the 3′ terminal ribose to a reactive aldehyde followed by conjugation of the aldehyde-reactive modified nucleotide); or chemical ligation to another nucleic acid molecule.

[0827] In some embodiments, the the nucleic acid (e.g., template nucleic acid) comprises one or more modified nucleotides, e.g., selected from dihydrouridine, inosine, 7-methylguanosine, 5-methylcytidine (5mC), 5′ Phosphate ribothymidine, 2′-O-methyl ribothymidine, 2′-O-ethyl ribothymidine, 2′-fluoro ribothymidine, C-5 propynyl-deoxycytidine (pdC), C-5 propynyl-deoxyuridine (pdU), C-5 propynyl-cytidine (pC), C-5 propynyl-uridine (pU), 5-methyl cytidine, 5-methyl uridine, 5-methyl deoxycytidine, 5-methyl deoxyuridine methoxy, 2,6-diaminopurine, 5′-Dimethoxytrityl-N4-ethyl-2′-deoxycytidine, C-5 propynyl-f-cytidine (pfC), C-5 propynyl-f-uridine (pfU), 5-methyl f-cytidine, 5-methyl f-uridine, C-5 propynyl-m-cytidine (pmC), C-5 propynyl-f-uridine (pmU), 5-methyl m-cytidine, 5-methyl m-uridine, LNA (locked nucleic acid), MGB (minor groove binder) pseudouridine (Ψ), 1-N-methylpseudouridine (1-Me-Ψ), or 5-methoxyuridine (5-MO-U).

[0828] In some embodiments, the nucleic acid comprises a backbone modification, e.g., a modification to a sugar or phosphate group in the backbone. In some embodiments, the nucleic acid comprises a nucleobase modification.

[0829] In some embodiments, the nucleic acid comprises one or more chemically modified nucleotides of Table 6, one or more chemical backbone modifications of Table 7, one or more chemically modified caps of Table 7. For instance, in some embodiments, the nucleic acid comprises two or more (e.g., 3, 4, 5, 6, 7, 8, 9, or 10 or more) different types of chemical modifications. As an example, the nucleic acid may comprise two or more (e.g., 3, 4, 5, 6, 7, 8, 9, or 10 or more) different types of modified nucleobases, e.g., as described herein, e.g., in Table 6. Alternatively or in combination, the nucleic acid may comprise two or more (e.g., 3, 4, 5, 6, 7, 8, 9, or 10 or more) different types of backbone modifications, e.g., as described herein, e.g., in Table 7. Alternatively or in combination, the nucleic acid may comprise one or more modified cap, e.g., as described herein, e.g., in Table 8. For instance, in some embodiments, the nucleic acid comprises one or more type of modified nucleobase and one or more type of backbone modification; one or more type of modified nucleobase and one or more modified cap; one or more type of modified cap and one or more type of backbone modification; or one or more type of modified nucleobase, one or more type of backbone modification, and one or more type of modified cap.

[0830] In some embodiments, the nucleic acid comprises one or more (e.g., 2, 3, 4, 5, 6, 7, 8, 9, 10, 20, 30, 40, 50, 60, 70, 80, 90, 100, 150, 200, 250, 300, 350, 400, 450, 500, 600, 700, 800, 900, 1000, or more) modified nucleobases. In some embodiments, all nucleobases of the nucleic acid are modified. In some embodiments, the nucleic acid is modified at one or more (e.g., 2, 3, 4, 5, 6, 7, 8, 9, 10, 20, 30, 40, 50, 60, 70, 80, 90, 100, 150, 200, 250, 300, 350, 400, 450, 500, 600, 700, 800, 900, 1000, or more) positions in the backbone. In some embodiments, all backbone positions of the nucleic acid are modified.

TABLE 6
Modified nucleotides

| | |
|---|---|
| 5-aza-uridine | N2-methyl-6-thio-guanosine |
| 2-thio-5-aza-midine | N2,N2-dimethyl-6-thio-guanosine |
| 2-thiouridine | pyridin-4-one ribonucleoside |
| 4-thio-pseudouridine | 2-thio-5-aza-uridine |
| 2-thio-pseudouridine | 2-thiomidine |
| 5-hydroxyuridine | 4-thio-pseudomidine |
| 3-methyluridine | 2-thio-pseudowidine |
| 5-carboxymethyl-uridine | 3-methylmidine |
| 1-carboxymethyl-pseudouridine | 1-propynyl-pseudomidine |
| 5-propynyl-uridine | 1-methyl-1-deaza-pseudomidine |
| 1-propynyl-pseudouridine | 2-thio-1-methyl-1-deaza-pseudouridine |
| 5-taurinomethyluridine | 4-methoxy-pseudomidine |
| 1-taurinomethyl-pseudouridine | 5′-O-(1-Thiophosphate)-Adenosine |
| 5-taurinomethyl-2-thio-uridine | 5′-O-(1-Thiophosphate)-Cytidine |
| 1-taurinomethyl-4-thio-uridine | 5′-O-(1-thiophosphate)-Guanosine |
| 5-methyl-uridine | 5′-O-(1-Thiophophate)-Uridine |
| 1-methyl-pseudouridine | 5′-O-(1-Thiophosphate)-Pseudouridine |
| 4-thio-1-methyl-pseudouridine | 2′-O-methyl-Adenosine |
| 2-thio-1-methyl-pseudouridine | 2′-O-methyl-Cytidine |
| 1-methyl-1-deaza-pseudouridine | 2′-O-methyl-Guanosine |
| 2-thio-1-methyl-1-deaza-pseudomidine | 2′-O-methyl-Uridine |
| dihydrouridine | 2′-O-methyl-Pseudouridine |
| dihydropseudouridine | 2′-O-methyl-Inosine |
| 2-thio-dihydromidine | 2-methyladenosine |
| 2-thio-dihydropseudouridine | 2-methylthio-N6-methyladenosine |
| 2-methoxyuridine | 2-methylthio-N6 isopentenyladenosine |
| 2-methoxy-4-thio-uridine | 2-methylthio-N6-(cis- |
| 4-methoxy-pseudouridine | hydroxyisopentenyl)adenosine |
| 4-methoxy-2-thio-pseudouridine | N6-methyl-N6-threonylcarbamoyladenosine |
| 5-aza-cytidine | N6-hydroxynorvalylcarbamoyladenosine |
| pseudoisocytidine | 2-methylthio-N6-hydroxynorvalyl |
| 3-methyl-cytidine | carbamoyladenosine |
| N4-acetylcytidine | 2′-O-ribosyladenosine (phosphate) |
| 5-formylcytidine | 1,2′-O-dimethylinosine |
| N4-methylcytidine | 5,2′-O-dimethylcytidine |
| 5-hydroxymethylcytidine | N4-acetyl-2′-O-methylcytidine |
| 1-methyl-pseudoisocytidine | Lysidine |
| pyrrolo-cytidine | 7-methylguanosine |
| pyrrolo-pseudoisocytidine | N2,2′-O-dimethylguanosine |
| 2-thio-cytidine | N2,N2,2′-O-trimethylguanosine |
| 2-thio-5-methyl-cytidine | 2′-O-ribosylguanosine (phosphate) |
| 4-thio-pseudoisocytidine | Wybutosine |
| 4-thio-1-methyl-pseudoisocytidine | Peroxywybutosine |
| 4-thio-1-methyl-1-deaza-pseudoisocytidine | Hydroxywybutosine |
| 1-methyl-1-deaza-pseudoisocytidine | undermodified hydroxywybutosine |
| zebularine | methylwyosine |
| 5-aza-zebularine | queuosine |
| 5-methyl-zebularine | epoxyqueuosine |
| 5-aza-2-thio-zebularine | galactosyl-queuosine |
| 2-thio-zebularine | mannosyl-queuosine |
| 2-methoxy-cytidine | 7-cyano-7-deazaguanosine |
| 2-methoxy-5-methyl-cytidine | 7-aminomethyl-7-deazaguanosine |
| 4-methoxy-pseudoisocytidine | archaeosine |
| 4-methoxy-l-methyl-pseudoisocytidine | 5,2′-O-dimethyluridine |
| 2-aminopurine | 4-thiouridine |
| 2,6-diaminopurine | 5-methyl-2-thiouridine |
| 7-deaza-adenine | 2-thio-2′-O-methyluridine |
| 7-deaza-8-aza-adenine | 3-(3-amino-3-carboxypropyl)uridine |
| 7-deaza-2-aminopurine | 5-methoxyuridine |
| 7-deaza-8-aza-2-aminopurine | uridine 5-oxyacetic acid |
| 7-deaza-2,6-diaminopurine | uridine 5-oxyacetic acid methyl ester |
| 7-deaza-8-aza-2,6-diarninopurine | 5-(carboxyhydroxymethyl)uridine) |
| 1-methyladenosine | 5-(carboxyhydroxymethyl)uridine methyl ester |
| N6-isopentenyladenosine | 5-methoxycarbonylmethyluridine |
| N6-(cis-hydroxyisopentenyl)adenosine | 5-methoxycarbonylmethyl-2′-O-methyluridine |
| 2-methylthio-N6-(cis-hydroxyisopentenyl) | 5-methoxycarbonylmethyl-2-thiouridine |
| adenosine | 5-aminomethyl-2-thiouridine |
| N6-glycinylcarbamoyladenosine | 5-methylaminomethyluridine |
| N6-threonylcarbamoyladenosine | 5-methylaminomethyl-2-thiouridine |
| 2-methylthio-N6-threonyl | 5-methylaminomethyl-2-selenouridine |
| carbamoyladenosine | 5-carbamoylmethyluridine |
| N6,N6-dimethyladenosine | 5-carbamoylmethyl-2′-O-methyluridine |
| 7-methyladenine | 5-carboxymethylaminomethyluridine |
| 2-methylthio-adenine | 5-carboxymethylaminomethyl-2′-O- |
| 2-methoxy-adenine | methyluridine |
| inosine | 5-carboxymethylaminomethyl-2-thiouridine |
| 1-methyl-inosine | N4,2′-O-dimethylcytidine |
| wyosine | 5-carboxymethyluridine |
| wybutosine | N6,2′-O-dimethyladenosine |
| 7-deaza-guanosine | N,N6,O-2′-trimethyladenosine |
| 7-deaza-8-aza-guanosine | N2,7-dimethylguanosine |
| 6-thio-guanosine | N2,N2,7-trimethylguanosine |
| 6-thio-7-deaza-guanosine | 3,2′-O-dimethyluridine |
| 6-thio-7-deaza-8-aza-guanosine | 5-methyldihydrouridine |
| 7-methyl-guanosine | 5-formyl-2′-O-methylcytidine |
| 6-thio-7-methyl-guanosine | 1,2′-O-dimethylguanosine |
| 7-methylinosine | 4-demethylwyosine |
| 6-methoxy-guanosine | Isowyosine |
| 1-methylguanosine | N6-acetyladenosine |
| N2-methylguanosine | |
| N2,N2-dimethylguanosine | |
| 8-oxo-guanosine | |
| 7-methyl-8-oxo-guanosine | |
| 1-methyl-6-thio-guanosine | |

TABLE 7
Backbone modifications
2′-O-Methyl backbone
Peptide Nucleic Acid (PNA) backbone
phosphorothioate backbone
morpholino backbone
carbamate backbone
siloxane backbone
sulfide backbone
sulfoxide backbone
sulfone backbone
formacetyl backbone
thioformacetyl backbone
methyleneformacetyl backbone
riboacetyl backbone
alkene containing backbone
sulfamate backbone
sulfonate backbone
sulfonamide backbone
methyleneimino backbone
methylenehydrazino backbone
amide backbone

TABLE 8
Modified caps
m7GpppA
m7GpppC
m2,7GpppG
m2,2,7GpppG
m7Gpppm7G
m7,2′OmeGpppG
m72′dGpppG
m7,3′OmeGpppG
m7,3′dGpppG
GppppG
m7GppppG
m7GppppA
m7GppppC
m2,7GppppG
m2,2,7GppppG
m7Gppppm7G
m7,2′OmeGppppG
m72′dGppppG
m7,3′OmeGppppG
m7,3′dGppppG

### Production of Compositions and Systems

[0831] As will be appreciated by one of skill, methods of designing and constructing nucleic acid constructs and proteins or polypeptides (such as the systems, constructs and polypeptides described herein) are routine in the art. Generally, recombinant methods may be used. See, in general, Smales & James (Eds.), Therapeutic Proteins: Methods and Protocols (Methods in Molecular Biology), Humana Press (2005); and Crommelin, Sindelar & Meibohm (Eds.), Pharmaceutical Biotechnology: Fundamentals and Applications, Springer (2013). Methods of designing, preparing, evaluating, purifying and manipulating nucleic acid compositions are described in Green and Sambrook (Eds.), Molecular Cloning: A Laboratory Manual (Fourth Edition), Cold Spring Harbor Laboratory Press (2012).

[0832] The disclosure provides, in part, a nucleic acid, e.g., vector, encoding a Gene Writer polypeptide described herein, a template nucleic acid described herein, or both. In some embodiments, a vector comprises a selective marker, e.g., an antibiotic resistance marker. In some embodiments, the antibiotic resistance marker is a kanamycin resistance marker. In some embodiments, the antibiotic resistance marker does not confer resistance to beta-lactam antibiotics. In some embodiments, the vector does not comprise an ampicillin resistance marker. In some embodiments, the vector comprises a kanamycin resistance marker and does not comprise an ampicillin resistance marker. In some embodiments, a vector encoding a Gene Writer polypeptide is integrated into a target cell genome (e.g., upon administration to a target cell, tissue, organ, or subject). In some embodiments, a vector encoding a Gene Writer polypeptide is not integrated into a target cell genome (e.g., upon administration to a target cell, tissue, organ, or subject). In some embodiments, a vector encoding a template nucleic acid (e.g., template RNA) is not integrated into a target cell genome (e.g., upon administration to a target cell, tissue, organ, or subject). In some embodiments, if a vector is integrated into a target site in a target cell genome, the selective marker is not integrated into the genome. In some embodiments, if a vector is integrated into a target site in a target cell genome, genes or sequences involved in vector maintenance (e.g., plasmid maintenance genes) are not integrated into the genome. In some embodiments, if a vector is integrated into a target site in a target cell genome, transfer regulating sequences (e.g., inverted terminal repeats, e.g., from an AAV) are not integrated into the genome. In some embodiments, administration of a vector (e.g., encoding a Gene Writer polypeptide described herein, a template nucleic acid described herein, or both) to a target cell, tissue, organ, or subject results in integration of a portion of the vector into one or more target sites in the genome(s) of said target cell, tissue, organ, or subject. In some embodiments, less than 99, 95, 90, 80, 70, 60, 50, 40, 30, 20, 10, 5, 4, 3, 2, or 1% of target sites (e.g., no target sites) comprising integrated material comprise a selective marker (e.g., an antibiotic resistance gene), a transfer regulating sequence (e.g., an inverted terminal repeat, e.g., from an AAV), or both from the vector.

[0833] Exemplary methods for producing a therapeutic pharmaceutical protein or polypeptide described herein involve expression in mammalian cells, although recombinant proteins can also be produced using insect cells, yeast, bacteria, or other cells under control of appropriate promoters. Mammalian expression vectors may comprise non-transcribed elements such as an origin of replication, a suitable promoter, and other 5′ or 3′ flanking non-transcribed sequences, and 5′ or 3′ non-translated sequences such as necessary ribosome binding sites, a polyadenylation site, splice donor and acceptor sites, and termination sequences. DNA sequences derived from the SV40 viral genome, for example, SV40 origin, early promoter, splice, and polyadenylation sites may be used to provide other genetic elements required for expression of a heterologous DNA sequence. Appropriate cloning and expression vectors for use with bacterial, fungal, yeast, and mammalian cellular hosts are described in Green & Sambrook, Molecular Cloning: A Laboratory Manual (Fourth Edition), Cold Spring Harbor Laboratory Press (2012).

[0834] Various mammalian cell culture systems can be employed to express and manufacture recombinant protein. Examples of mammalian expression systems include CHO, COS, HEK293, HeLA, and BHK cell lines. Processes of host cell culture for production of protein therapeutics are described in Zhou and Kantardjieff (Eds.), Mammalian Cell Cultures for Biologics Manufacturing (Advances in Biochemical Engineering Biotechnology), Springer (2014). Compositions described herein may include a vector, such as a viral vector, e.g., a lentiviral vector, encoding a recombinant protein. In some embodiments, a vector, e.g., a viral vector, may comprise a nucleic acid encoding a recombinant protein.

[0835] Purification of protein therapeutics is described in Franks, Protein Biotechnology: Isolation, Characterization, and Stabilization, Humana Press (2013); and in Cutler, Protein Purification Protocols (Methods in Molecular Biology), Humana Press (2010).

[0836] In some embodiments, a Gene Writer™ system, polypeptide, and/or template nucleic acid (e.g., template RNA) conforms to certain quality standards. In some embodiments, a Gene Writer™ system, polypeptide, and/or template nucleic acid (e.g., template RNA) produced by a method described herein conforms to certain quality standards. Accordingly, the disclosure is directed in part to methods of manufacturing a Gene Writer™ system, polypeptide, and/or template nucleic acid (e.g., template RNA) that conforms to certain quality standards, e.g., in which said quality standards are assayed. The disclosure is further directed to methods of assaying said quality standards in a Gene Writer™ system, polypeptide, and/or template nucleic acid (e.g., template RNA). In some embodiments, quality standards include, but are not limited to:
[0837] (i) the length of the template RNA, e.g., whether the template RNA has a length that is above a reference length or within a reference length range, e.g., whether at least 80, 85, 90, 95, 96, 97, 98, or 99% of the template RNA present is greater than 100, 125, 150, 175, or 200 nucleotides long;
[0838] (ii) the presence, absence, and/or length of a polyA tail on the template RNA, e.g., whether at least 80, 85, 90, 95, 96, 97, 98, or 99% of the template RNA present contains a polyA tail (e.g., a polyA tail that is at least 5, 10, 20, 30, 50, 70, 100 nucleotides in length (SEQ ID NO: 3781));
[0839] (iii) the presence, absence, and/or type of a 5′ cap on the template RNA, e.g., whether at least 80, 85, 90, 95, 96, 97, 98, or 99% of the template RNA present contains a 5′ cap, e.g., whether that cap is a 7-methylguanosine cap, e.g., a O-Me-m7G cap;
[0840] (iv) the presence, absence, and/or type of one or more modified nucleotides (e.g., selected from pseudouridine, dihydrouridine, inosine, 7-methylguanosine, 1-N-methylpseudouridine (1-Me-Ψ), 5-methoxyuridine (5-MO-U), 5-methylcytidine (5mC), or a locked nucleotide) in the template RNA, e.g., whether at least 80, 85, 90, 95, 96, 97, 98, or 99% of the template RNA present contains one or more modified nucleotides;
[0841] (v) the stability of the template RNA (e.g., over time and/or under a pre-selected condition), e.g., whether at least 80, 85, 90, 95, 96, 97, 98, or 99% of the template RNA remains intact (e.g., greater than 100, 125, 150, 175, or 200 nucleotides long) after a stability test;
[0842] (vi) the potency of the template RNA in a system for modifying DNA, e.g., whether at least 1% of target sites are modified after a system comprising the template RNA is assayed for potency;
[0843] (vii) the length of the polypeptide, first polypeptide, or second polypeptide, e.g., whether the polypeptide, first polypeptide, or second polypeptide has a length that is above a reference length or within a reference length range, e.g., whether at least 80, 85, 90, 95, 96, 97, 98, or 99% of the polypeptide, first polypeptide, or second polypeptide present is greater than 600, 650, 700, 750, 800, 850, 900, 950, 1000, 1050, 1100, 1150, 1200, 1250, 1300, 1350, 1400, 1450, 1500, 1600, 1700, 1800, 1900, or 2000 amino acids long (and optionally, no larger than 2500, 2000, 1500, 1400, 1300, 1200, 1100, 1000, 900, 800, 700, or 600 amino acids long);
[0844] (viii) the presence, absence, and/or type of post-translational modification on the polypeptide, first polypeptide, or second polypeptide, e.g., whether at least 80, 85, 90, 95, 96, 97, 98, or 99% of the polypeptide, first polypeptide, or second polypeptide contains phosphorylation, methylation, acetylation, myristoylation, palmitoylation, isoprenylation, glipyatyon, or lipoylation, or any combination thereof;
[0845] (ix) the presence, absence, and/or type of one or more artificial, synthetic, or non-canonical amino acids (e.g., selected from ornithine, β-alanine, GABA, δ-Aminolevulinic acid, PABA, a D-amino acid (e.g., D-alanine or D-glutamate), aminoisobutyric acid, dehydroalanine, cystathionine, lanthionine, Djenkolic acid, Diaminopimelic acid, Homoalanine, Norvaline, Norleucine, Homonorleucine, homoserine, O-methyl-homoserine and O-ethyl-homoserine, ethionine, selenocysteine, selenohomocysteine, selenomethionine, selenoethionine, tellurocysteine, or telluromethionine) in the polypeptide, first polypeptide, or second polypeptide, e.g., whether at least 80, 85, 90, 95, 96, 97, 98, or 99% of the polypeptide, first polypeptide, or second polypeptide present contains one or more artificial, synthetic, or non-canonical amino acids;
[0846] (x) the stability of the polypeptide, first polypeptide, or second polypeptide (e.g., over time and/or under a pre-selected condition), e.g., whether at least 80, 85, 90, 95, 96, 97, 98, or 99% of the polypeptide, first polypeptide, or second polypeptide remains intact (e.g., greater than 600, 650, 700, 750, 800, 850, 900, 950, 1000, 1050, 1100, 1150, 1200, 1250, 1300, 1350, 1400, 1450, 1500, 1600, 1700, 1800, 1900, or 2000 amino acids long (and optionally, no larger than 2500, 2000, 1500, 1400, 1300, 1200, 1100, 1000, 900, 800, 700, or 600 amino acids long)) after a stability test;
[0847] (xi) the potency of the polypeptide, first polypeptide, or second polypeptide in a system for modifying DNA, e.g., whether at least 1% of target sites are modified after a system comprising the polypeptide, first polypeptide, or second polypeptide is assayed for potency; or
[0848] (xii) the presence, absence, and/or level of one or more of a pyrogen, virus, fungus, bacterial pathogen, or host cell protein, e.g., whether the system is free or substantially free of pyrogen, virus, fungus, bacterial pathogen, or host cell protein contamination.

[0849] In some embodiments, quality standards include, but are not limited to:
[0850] (i) the length of mRNA encoding the GeneWriter polypeptide, e.g., whether the mRNA has a length that is above a reference length or within a reference length range, e.g., whether at least 80, 85, 90, 95, 96, 97, 98, or 99% of the mRNA present is greater than 3000, 4000, or 5000 nucleotides long;
[0851] (ii) the presence, absence, and/or length of a polyA tail on the mRNA, e.g., whether at least 80, 85, 90, 95, 96, 97, 98, or 99% of the mRNA present contains a polyA tail (e.g., a polyA tail that is at least 5, 10, 20, 30, 50, 70, 100 nucleotides in length (SEQ ID NO: 3781));
[0852] (iii) the presence, absence, and/or type of a 5′ cap on the mRNA, e.g., whether at least 80, 85, 90, 95, 96, 97, 98, or 99% of the mRNA present contains a 5′ cap, e.g., whether that cap is a 7-methylguanosine cap, e.g., a O-Me-m7G cap;
[0853] (iv) the presence, absence, and/or type of one or more modified nucleotides (e.g., selected from pseudouridine, dihydrouridine, inosine, 7-methylguanosine, 1-N-methylpseudouridine (1-Me-Ψ), 5-methoxyuridine (5-MO-U), 5-methylcytidine (5mC), or a locked nucleotide) in the mRNA, e.g., whether at least 80, 85, 90, 95, 96, 97, 98, or 99% of the mRNA present contains one or more modified nucleotides;
[0854] (v) the stability of the mRNA (e.g., over time and/or under a pre-selected condition), e.g., whether at least 80, 85, 90, 95, 96, 97, 98, or 99% of the mRNA remains intact (e.g., greater than 100, 125, 150, 175, or 200 nucleotides long) after a stability test; or
[0855] (vi) the potency of the mRNA in a system for modifying DNA, e.g., whether at least 1% of target sites are modified after a system comprising the mRNA is assayed for potency.

### Circular RNAs in Gene Writing System

[0856] Circular RNAs (circRNA) have been found to occur naturally in cells and have been found to have diverse functions, including both non-coding and protein coding roles in human cells. It has been shown that a circRNA can be engineered by incorporating a self-splicing intron into an RNA molecule (or DNA encoding the RNA molecule) that results in circularization of the RNA, and that an engineered circRNA can have enhanced protein production and stability (Wesselhoeft et al. Nature Communications 2018). It is contemplated that it may be useful to employ circular and/or linear RNA states during the formulation, delivery, or Gene Writing reaction within the target cell. Thus, in some embodiments of any of the aspects described herein, a Gene Writing system comprises one or more circular RNAs (circRNAs). In some embodiments of any of the aspects described herein, a Gene Writing system comprises one or more linear RNAs. In some embodiments, a nucleic acid as described herein (e.g., a nucleic acid molecule encoding a Gene Writer polypeptide, or both) is a circRNA. In some embodiments, a circular RNA molecule encodes the Gene Writer™ polypeptide. In some embodiments, the circRNA molecule encoding the Gene Writer™ polypeptide is delivered to a host cell. In some embodiments, a circular RNA molecule encodes a recombinase, e.g., as described herein. In some embodiments, the circRNA molecule encoding the recombinase is delivered to a host cell. In some embodiments, the circRNA molecule encoding the Gene Writer polypeptide is linearized (e.g., in the host cell) prior to translation. Circular RNAs (circRNA) have been found to occur naturally in cells and have been found to have diverse functions, including both non-coding and protein coding roles in human cells. It has been shown that a circRNA can be engineered by incorporating a self-splicing intron into an RNA molecule (or DNA encoding the RNA molecule) that results in circularization of the RNA, and that an engineered circRNA can have enhanced protein production and stability (Wesselhoeft et al. Nature Communications 2018). In some embodiments, the Gene Writer™ polypeptide is encoded as circRNA.

[0857] In some embodiments, the Gene Writer™ polypeptide is encoded as circRNA. While in certain embodiments the template nucleic acid is a DNA, such as a ssDNA, in some embodiments it can be provided as an RNA, e.g., with a reverse transcriptase.

[0858] In some embodiments, the circRNA comprises one or more ribozyme sequences. In some embodiments, the ribozyme sequence is activated for autocleavage, e.g., in a host cell, e.g., thereby resulting in linearization of the circRNA. In some embodiments, the ribozyme is activated when the concentration of magnesium reaches a sufficient level for cleavage, e.g., in a host cell. In some embodiments the circRNA is maintained in a low magnesium environment prior to delivery to the host cell. In some embodiments, the ribozyme is a protein-responsive ribozyme. In some embodiments, the ribozyme is a nucleic acid-responsive ribozyme.

[0859] In some embodiments, the circRNA is linearized in the nucleus of a target cell. In some embodiments, linearization of a circRNA in the nucleus of a cell involves components present in the nucleus of the cell, e.g., to activate a cleavage event. For example, the B2 and ALU retrotransposons contain self-cleaving ribozymes whose activity is enhanced by interaction with the Polycomb protein, EZH2 (Hernandez et al. PNAS 117(1):415-425 (2020)). Thus, in some embodiments, a ribozyme, e.g., a ribozyme from a B2 or ALU element, that is responsive to a nuclear element, e.g., a nuclear protein, e.g., a genome-interacting protein, e.g., an epigenetic modifier, e.g., EZH2, is incorporated into a circRNA, e.g., of a Gene Writing system. In some embodiments, nuclear localization of the circRNA results in an increase in autocatalytic activity of the ribozyme and linearization of the circRNA.

[0860] In some embodiments, an inducible ribozyme (e.g., in a circRNA as described herein) is created synthetically, for example, by utilizing a protein ligand-responsive aptamer design. A system for utilizing the satellite RNA of tobacco ringspot virus hammerhead ribozyme with an MS2 coat protein aptamer has been described (Kennedy et al. Nucleic Acids Res 42(19):12306-12321 (2014), incorporated herein by reference in its entirety) that results in activation of the ribozyme activity in the presence of the MS2 coat protein. In embodiments, such a system responds to protein ligand localized to the cytoplasm or the nucleus. In some embodiments the protein ligand is not MS2. Methods for generating RNA aptamers to target ligands have been described, for example, based on the systematic evolution of ligands by exponential enrichment (SELEX) (Tuerk and Gold, Science 249(4968):505-510 (1990); Ellington and Szostak, Nature 346(6287):818-822 (1990); the methods of each of which are incorporated herein by reference) and have, in some instances, been aided by in silico design (Bell et al. PNAS 117(15):8486-8493, the methods of which are incorporated herein by reference). Thus, in some embodiments, an aptamer for a target ligand is generated and incorporated into a synthetic ribozyme system, e.g., to trigger ribozyme-mediated cleavage and circRNA linearization, e.g., in the presence of the protein ligand. In some embodiments, circRNA linearization is triggered in the cytoplasm, e.g., using an aptamer that associates with a ligand in the cytoplasm. In some embodiments, circRNA linearization is triggered in the nucleus, e.g., using an aptamer that associates with a ligand in the nucleus. In embodiments, the ligand in to the nucleus comprises an epigenetic modifier or a transcription factor. In some embodiments the ligand that triggers linearization is present at higher levels in on-target cells than off-target cells.

[0861] It is further contemplated that a nucleic acid-responsive ribozyme system can be employed for circRNA linearization. For example, biosensors that sense defined target nucleic acid molecules to trigger ribozyme activation are described, e.g., in Penchovsky (Biotechnology Advances 32(5):1015-1027 (2014), incorporated herein by reference). By these methods, a ribozyme naturally folds into an inactive state and is only activated in the presence of a defined target nucleic acid molecule (e.g., an RNA molecule). In some embodiments, a circRNA of a Gene Writing system comprises a nucleic acid-responsive ribozyme that is activated in the presence of a defined target nucleic acid, e.g., an RNA, e.g., an mRNA, miRNA, guide RNA, gRNA, sgRNA, ncRNA, lncRNA, tRNA, snRNA, or mtRNA. In some embodiments the nucleic acid that triggers linearization is present at higher levels in on-target cells than off-target cells.

[0862] In some embodiments of any of the aspects herein, a Gene Writing system incorporates one or more ribozymes with inducible specificity to a target tissue or target cell of interest, e.g., a ribozyme that is activated by a ligand or nucleic acid present at higher levels in a target tissue or target cell of interest. In some embodiments, the Gene Writing system incorporates a ribozyme with inducible specificity to a subcellular compartment, e.g., the nucleus, nucleolus, cytoplasm, or mitochondria. In some embodiments, the ribozyme that is activated by a ligand or nucleic acid present at higher levels in the target subcellular compartment. In some embodiments, an RNA component of a Gene Writing system is provided as circRNA, e.g., that is activated by linearization. In some embodiments, linearization of a circRNA encoding a Gene Writing polypeptide activates the molecule for translation. In some embodiments, a signal that activates a circRNA component of a Gene Writing system is present at higher levels in on-target cells or tissues, e.g., such that the system is specifically activated in these cells.

[0863] In some embodiments, an RNA component of a Gene Writing system is provided as a circRNA that is inactivated by linearization. In some embodiments, a circRNA encoding the Gene Writer polypeptide is inactivated by cleavage and degradation. In some embodiments, a circRNA encoding the Gene Writing polypeptide is inactivated by cleavage that separates a translation signal from the coding sequence of the polypeptide. In some embodiments, a signal that inactivates a circRNA component of a Gene Writing system is present at higher levels in off-target cells or tissues, such that the system is specifically inactivated in these cells.

[0864] In some embodiments, nucleic acid (e.g., encoding a polypeptide, or a template DNA, or both) delivered to cells is covalently closed linear DNA, or so-called “doggybone” DNA. During its lifecycle, the bacteriophage N15 employs protelomerase to convert its genome from circular plasmid DNA to a linear plasmid DNA (Ravin et al. J Mol Biol 2001). This process has been adapted for the production of covalently closed linear DNA in vitro (see, for example, WO2010086626A1). In some embodiments, a protelomerase is contacted with a DNA containing one or more protelomerase recognition sites, wherein protelomerase results in a cut at the one or more sites and subsequent ligation of the complementary strands of DNA, resulting in the covalent linkage between the complementary strands. In some embodiments, nucleic acid (e.g., encoding a transposase, or a template DNA, or both) is first generated as circular plasmid DNA containing a single protelomerase recognition site that is then contacted with protelomerase to yield a covalently closed linear DNA. In some embodiments, nucleic acid (e.g., encoding a transposase, or a template DNA, or both) flanked by protelomerase recognition sites on plasmid or linear DNA is contacted with protelomerase to generate a covalently closed linear DNA containing only the DNA contained between the protelomerase recognition sites. In some embodiments, the approach of flanking the desired nucleic acid sequence by protelomerase recognition sites results in covalently closed circular DNA lacking plasmid elements used for bacterial cloning and maintenance. In some embodiments, the plasmid or linear DNA containing the nucleic acid and one or more protelomerase recognition sites is optionally amplified prior to the protelomerase reaction, e.g., by rolling circle amplification or PCR.

[0865] In some embodiments, nucleic acid (e.g., encoding a polypeptide, or a template nucleic acid, or both) delivered to cells is designed as minicircles, where plasmid backbone sequences not pertaining to Gene Writing™ are removed before administration to cells. For example, a minicircle may lack a bacterial origin of replication and a selectable marker. In some embodiments, the minicircle does not comprise any bacterial sequence. Minicircles have been shown to result in higher transfection efficiencies and gene expression as compared to plasmids with backbones containing bacterial parts (e.g., bacterial origin of replication, antibiotic selection cassette) and have been used to improve the efficiency of transposition (Sharma et al Mol Ther Nucleic Acids 2013). In some embodiments, the DNA vector encoding the Gene Writer™ polypeptide is delivered as a minicircle. In some embodiments, the DNA vector containing the Gene Writer™ template nucleic acid (e.g., template RNA) is delivered as a minicircle. In some embodiments, the bacterial parts are flanked by recombination sites, e.g., attP/attB, loxP, FRT sites. In some embodiments, the addition of a cognate recombinase results in intramolecular recombination and excision of the bacterial parts. In some embodiments, the recombinase sites are recognized by phiC31 recombinase. In some embodiments, the recombinase sites are recognized by Cre recombinase. In some embodiments, the recombinase sites are recognized by FLP recombinase. In addition to plasmid DNA, minicircles can be generated by excising the desired construct, e.g., transposase expression cassettes or therapeutic expression cassette, from a viral backbone. Previously, it has been shown that excision and circularization of the donor sequence from a viral backbone may be important for transposase-mediated integration efficiency (Yant et al Nat Biotechnol 2002). In some embodiments, minicircles are first formulated and then delivered to target cells. In other embodiments, minicircles are formed from a DNA vector (e.g., plasmid DNA, rAAV, scAAV, ceDNA, doggybone DNA) intracellularly by co-delivery of a recombinase, resulting in excision and circularization of the recombinase recognition site-flanked nucleic acid, e.g., a nucleic acid encoding the Gene Writer™ polypeptide, template nucleic acid (e.g., template RNA) or nucleic acid encoding same, or both.

[0866] For optimizing protein expression, it can be helpful to provide tunable controls that can be used to modulate protein activity. In some embodiments, a tunable system may comprise at least one effector module that is responsive to at least one stimulus. The system may be, but is not limited to, a destabilizing domain (DD) system. This system is further taught in PCT/US2018/020704, as well as U.S. Provisional Patent Application No. 62/320,864 filed Apr. 11, 2016, 62/466,596 filed Mar. 3, 2017 and the International Publication WO2017/180587 (the contents each of which are herein incorporated by reference in their entirety). In some embodiments, the tunable system may comprise a first effector module. In some embodiments, the effector module may comprise a first stimulus response element (SRE) operably linked to at least one payload. In one aspect, the payload may be an immunotherapeutic agent. In one aspect, the first SRE of the composition may be responsive to or interact with at least one stimulus. In some embodiments, the first SRE may comprise a destabilizing domain (DD). The DD may be derived from a parent protein or from a mutant protein having one, two, three, or more amino acid mutations compared to the parent protein. In some embodiments, the parent protein may be selected from, but is not limited to, human protein FKBP, comprising the amino acid sequence of PCT/US2018/020704 SEQ. ID NO. 3; human DHFR (hDHFR), comprising the amino acid sequence of PCT/US2018/020704 SEQ. ID NO. 2; E. coli DHFR, comprising the amino acid sequence of PCT/US2018/020704 SEQ. ID NO. 1; PDE5, comprising the amino acid sequence of PCT/US2018/020704 SEQ. ID NO. 4; PPAR, gamma comprising the amino acid sequence of PCT/US2018/020704 SEQ. ID NO. 5; CA2, comprising the amino acid sequence of PCT/US2018/020704 SEQ. ID NO. 6; or NQ02, comprising the amino acid sequence of PCT/US2018/020704 SEQ. ID NO. 7. In some embodiments, the tunable controls are applied to the Gene Writer polypeptide, such that, e.g., a DD and stimulus can be used to modulate template integration efficiency. In some embodiments, the tunable controls are applied to one or more peptides encoded within the heterologous object sequence of the template, such that, e.g., a DD and stimulus can be used to modulate activity of a genomically integrated payload. In certain embodiments, the payload comprising the DD may be a therapeutic protein, e.g., a functional copy of an endogenously mutated gene. In certain embodiments, the payload comprising the DD may be a heterologous protein, e.g., a CAR.

### Kits, Articles of Manufacture, and Pharmaceutical Compositions

[0867] In an aspect the disclosure provides a kit comprising a Gene Writer or a Gene Writing system, e.g., as described herein. In some embodiments, the kit comprises a Gene Writer polypeptide (or a nucleic acid encoding the polypeptide) and a template RNA (or DNA encoding the template RNA). In some embodiments, the kit further comprises a reagent for introducing the system into a cell, e.g., transfection reagent, LNP, and the like. In some embodiments, the kit is suitable for any of the methods described herein. In some embodiments, the kit comprises one or more elements, compositions (e.g., pharmaceutical compositions), Gene Writers, and/or Gene Writer systems, or a functional fragment or component thereof, e.g., disposed in an article of manufacture. In some embodiments, the kit comprises instructions for use thereof.

[0868] In an aspect, the disclosure provides an article of manufacture, e.g., in which a kit as described herein, or a component thereof, is disposed.

[0869] In an aspect, the disclosure provides a pharmaceutical composition comprising a Gene Writer or a Gene Writing system, e.g., as described herein. In some embodiments, the pharmaceutical composition further comprises a pharmaceutically acceptable carrier or excipient. In some embodiments, the pharmaceutical composition comprises a template RNA and/or an RNA encoding the polypeptide. In embodiments, the pharmaceutical composition has one or more (e.g., 1, 2, 3, or 4) of the following characteristics:
[0870] (a) less than 1% (e.g., less than 0.5%, 0.4%, 0.3%, 0.2%, or 0.1%) DNA template relative to the template RNA and/or the RNA encoding the polypeptide, e.g., on a molar basis;
[0871] (b) less than 1% (e.g., less than 0.5%, 0.4%, 0.3%, 0.2%, or 0.1%) uncapped RNA relative to the template RNA and/or the RNA encoding the polypeptide, e.g., on a molar basis;
[0872] (c) less than 1% (e.g., less than 0.5%, 0.4%, 0.3%, 0.2%, or 0.1%) partial length RNAs relative to the template RNA and/or the RNA encoding the polypeptide, e.g., on a molar basis;
[0873] (d) substantially lacks unreacted cap dinucleotides.

### Chemistry, Manufacturing, and Controls (CMC)

[0874] Purification of protein therapeutics is described, for example, in Franks, Protein Biotechnology: Isolation, Characterization, and Stabilization, Humana Press (2013); and in Cutler, Protein Purification Protocols (Methods in Molecular Biology), Humana Press (2010).

[0875] In some embodiments, a Gene Writer™ system, polypeptide, and/or template nucleic acid (e.g., template RNA) conforms to certain quality standards. In some embodiments, a Gene Writer™ system, polypeptide, and/or template nucleic acid (e.g., template RNA) produced by a method described herein conforms to certain quality standards. Accordingly, the disclosure is directed, in some aspects, to methods of manufacturing a Gene Writer™ system, polypeptide, and/or template nucleic acid (e.g., template RNA) that conforms to certain quality standards, e.g., in which said quality standards are assayed. The disclosure is also directed, in some aspects, to methods of assaying said quality standards in a Gene Writer™ system, polypeptide, and/or template nucleic acid (e.g., template RNA). In some embodiments, quality standards include, but are not limited to, one or more (e.g., 1, 2, 3, 4, 5, 6, 7, 8, 9, 10, 11, or 12) of the following:
[0876] (i) the length of the template RNA, e.g., whether the template RNA has a length that is above a reference length or within a reference length range, e.g., whether at least 80, 85, 90, 95, 96, 97, 98, or 99% of the template RNA present is greater than 100, 125, 150, 175, or 200 nucleotides long;
[0877] (ii) the presence, absence, and/or length of a polyA tail on the template RNA, e.g., whether at least 80, 85, 90, 95, 96, 97, 98, or 99% of the template RNA present contains a polyA tail (e.g., a polyA tail that is at least 5, 10, 20, 30, 50, 70, 100 nucleotides in length (SEQ ID NO: 3781));
[0878] (iii) the presence, absence, and/or type of a 5′ cap on the template RNA, e.g., whether at least 80, 85, 90, 95, 96, 97, 98, or 99% of the template RNA present contains a 5′ cap, e.g., whether that cap is a 7-methylguanosine cap, e.g., a O-Me-m7G cap;
[0879] (iv) the presence, absence, and/or type of one or more modified nucleotides (e.g., selected from pseudouridine, dihydrouridine, inosine, 7-methylguanosine, 1-N-methylpseudouridine (1-Me-Ψ), 5-methoxyuridine (5-MO-U), 5-methylcytidine (5mC), or a locked nucleotide) in the template RNA, e.g., whether at least 80, 85, 90, 95, 96, 97, 98, or 99% of the template RNA present contains one or more modified nucleotides;
[0880] (v) the stability of the template RNA (e.g., over time and/or under a pre-selected condition), e.g., whether at least 80, 85, 90, 95, 96, 97, 98, or 99% of the template RNA remains intact (e.g., greater than 100, 125, 150, 175, or 200 nucleotides long) after a stability test;
[0881] (vi) the potency of the template RNA in a system for modifying DNA, e.g., whether at least 1% of target sites are modified after a system comprising the template RNA is assayed for potency;
[0882] (vii) the length of the polypeptide, first polypeptide, or second polypeptide, e.g., whether the polypeptide, first polypeptide, or second polypeptide has a length that is above a reference length or within a reference length range, e.g., whether at least 80, 85, 90, 95, 96, 97, 98, or 99% of the polypeptide, first polypeptide, or second polypeptide present is greater than 600, 650, 700, 750, 800, 850, 900, 950, 1000, 1050, 1100, 1150, 1200, 1250, 1300, 1350, 1400, 1450, 1500, 1600, 1700, 1800, 1900, or 2000 amino acids long (and optionally, no larger than 2500, 2000, 1500, 1400, 1300, 1200, 1100, 1000, 900, 800, 700, or 600 amino acids long);
[0883] (viii) the presence, absence, and/or type of post-translational modification on the polypeptide, first polypeptide, or second polypeptide, e.g., whether at least 80, 85, 90, 95, 96, 97, 98, or 99% of the polypeptide, first polypeptide, or second polypeptide contains phosphorylation, methylation, acetylation, myristoylation, palmitoylation, isoprenylation, glipyatyon, or lipoylation, or any combination thereof;
[0884] (ix) the presence, absence, and/or type of one or more artificial, synthetic, or non-canonical amino acids (e.g., selected from ornithine, β-alanine, GABA, δ-Aminolevulinic acid, PABA, a D-amino acid (e.g., D-alanine or D-glutamate), aminoisobutyric acid, dehydroalanine, cystathionine, lanthionine, Djenkolic acid, Diaminopimelic acid, Homoalanine, Norvaline, Norleucine, Homonorleucine, homoserine, O-methyl-homoserine and O-ethyl-homoserine, ethionine, selenocysteine, selenohomocysteine, selenomethionine, selenoethionine, tellurocysteine, or telluromethionine) in the polypeptide, first polypeptide, or second polypeptide, e.g., whether at least 80, 85, 90, 95, 96, 97, 98, or 99% of the polypeptide, first polypeptide, or second polypeptide present contains one or more artificial, synthetic, or non-canonical amino acids;
[0885] (x) the stability of the polypeptide, first polypeptide, or second polypeptide (e.g., over time and/or under a pre-selected condition), e.g., whether at least 80, 85, 90, 95, 96, 97, 98, or 99% of the polypeptide, first polypeptide, or second polypeptide remains intact (e.g., greater than 600, 650, 700, 750, 800, 850, 900, 950, 1000, 1050, 1100, 1150, 1200, 1250, 1300, 1350, 1400, 1450, 1500, 1600, 1700, 1800, 1900, or 2000 amino acids long (and optionally, no larger than 2500, 2000, 1500, 1400, 1300, 1200, 1100, 1000, 900, 800, 700, or 600 amino acids long)) after a stability test;
[0886] (xi) the potency of the polypeptide, first polypeptide, or second polypeptide in a system for modifying DNA, e.g., whether at least 1% of target sites are modified after a system comprising the polypeptide, first polypeptide, or second polypeptide is assayed for potency; or
[0887] (xii) the presence, absence, and/or level of one or more of a pyrogen, virus, fungus, bacterial pathogen, or host cell protein, e.g., whether the system is free or substantially free of pyrogen, virus, fungus, bacterial pathogen, or host cell protein contamination.

[0888] In some embodiments, a system or pharmaceutical composition described herein is endotoxin free.

[0889] In some embodiments, the presence, absence, and/or level of one or more of a pyrogen, virus, fungus, bacterial pathogen, and/or host cell protein is determined. In embodiments, whether the system is free or substantially free of pyrogen, virus, fungus, bacterial pathogen, and/or host cell protein contamination is determined.

[0890] In some embodiments, a pharmaceutical composition or system as described herein has one or more (e.g., 1, 2, 3, or 4) of the following characteristics:
[0891] (a) less than 1% (e.g., less than 0.5%, 0.4%, 0.3%, 0.2%, or 0.1%) DNA template relative to the template RNA and/or the RNA encoding the polypeptide, e.g., on a molar basis;
[0892] (b) less than 1% (e.g., less than 0.5%, 0.4%, 0.3%, 0.2%, or 0.1%) uncapped RNA relative to the template RNA and/or the RNA encoding the polypeptide, e.g., on a molar basis;
[0893] (c) less than 1% (e.g., less than 0.5%, 0.4%, 0.3%, 0.2%, or 0.1%) partial length RNAs relative to the template RNA and/or the RNA encoding the polypeptide, e.g., on a molar basis;
[0894] (d) substantially lacks unreacted cap dinucleotides.

### Applications

[0895] By integrating coding genes into a RNA sequence template, the Gene Writer™ system can address therapeutic needs, for example, by providing expression of a therapeutic transgene in individuals with loss-of-function mutations, by replacing gain-of-function mutations with normal transgenes, by providing regulatory sequences to eliminate gain-of-function mutation expression, and/or by controlling the expression of operably linked genes, transgenes and systems thereof. In certain embodiments, the RNA sequence template encodes a promotor region specific to the therapeutic needs of the host cell, for example a tissue specific promotor or enhancer. In still other embodiments, a promotor can be operably linked to a coding sequence. In embodiments, the Gene Writer™ gene editor system can provide therapeutic transgenes expressing, e.g., replacement blood factors or replacement enzymes, e.g., lysosomal enzymes. For example, the compositions, systems and methods described herein are useful to express, in a target human genome, agalsidase alpha or beta for treatment of Fabry Disease; imiglucerase, taliglucerase alfa, velaglucerase alfa, or alglucerase for Gaucher Disease; sebelipase alpha for lysosomal acid lipase deficiency (Wolman disease/CESD); laronidase, idursulfase, elosulfase alpha, or galsulfase for mucopolysaccharidoses; alglucosidase alpha for Pompe disease. For example, the compositions, systems and methods described herein are useful to express, in a target human genome factor I, II, V, VII, X, XI, XII or XIII for blood factor deficiencies.

[0896] In some embodiments, the heterologous object sequence encodes an intracellular protein (e.g., a cytoplasmic protein, a nuclear protein, an organellar protein such as a mitochondrial protein or lysosomal protein, or a membrane protein). In some embodiments, the heterologous object sequence encodes a membrane protein, e.g., a membrane protein other than a CAR, and/or an endogenous human membrane protein. In some embodiments, the heterologous object sequence encodes an extracellular protein. In some embodiments, the heterologous object sequence encodes an enzyme, a structural protein, a signaling protein, a regulatory protein, a transport protein, a sensory protein, a motor protein, a defense protein, or a storage protein. Other proteins include an immune receptor protein, e.g. a synthetic immune receptor protein such as a chimeric antigen receptor protein (CAR), a T cell receptor, a B cell receptor, or an antibody.

[0897] A Gene Writing™ system may be used to modify immune cells. In some embodiments, a Gene Writing™ system may be used to modify T cells. In some embodiments, T-cells may include any subpopulation of T-cells, e.g., CD4+, CD8+, gamma-delta, naïve T cells, stem cell memory T cells, central memory T cells, or a mixture of subpopulations. In some embodiments, a Gene Writing™ system may be used to deliver or modify a T-cell receptor (TCR) in a T cell. In some embodiments, a Gene Writing™ system may be used to deliver at least one chimeric antigen receptor (CAR) to T-cells. In some embodiments, a Gene Writing™ system may be used to deliver at least one CAR to natural killer (NK) cells. In some embodiments, a Gene Writing™ system may be used to deliver at least one CAR to natural killer T (NKT) cells. In some embodiments, a Gene Writing™ system may be used to deliver at least one CAR to a progenitor cell, e.g., a progenitor cell of T, NK, or NKT cells. In some embodiments, cells modified with at least one CAR (e.g., CAR-T cells, CAR-NK cells, CAR-NKT cells), or a combination of cells modified with at least one CAR (e.g., a mixture of CAR-NK/T cells) are used to treat a condition as identified in the targetable landscape of CAR therapies in MacKay, et al. Nat Biotechnol 38, 233-244 (2020), incorporated by reference herein in its entirety. In some embodiments, the immune cells comprise a CAR specific to a tumor or a pathogen antigen selected from a group consisting of AChR (fetal acetylcholine receptor), ADGRE2, AFP (alpha fetoprotein), BAFF-R, BCMA, CAIX (carbonic anhydrase IX), CCR1, CCR4, CEA (carcinoembryonic antigen), CD3, CD5, CD8, CD7, CD10, CD13, CD14, CD15, CD19, CD20, CD22, CD30, CD33, CLLI, CD34, CD38, CD41, CD44, CD49f, CD56, CD61, CD64, CD68, CD70, CD74, CD99, CD117, CD123, CD133, CD138, CD44v6, CD267, CD269, CDS, CLEC12A, CS1, EGP-2 (epithelial glycoprotein-2), EGP-40 (epithelial glycoprotein-40), EGFR(HER1), EGFR-VIII, EpCAM (epithelial cell adhesion molecule), EphA2, ERBB2 (HER2, human epidermal growth factor receptor 2), ERBB3, ERBB4, FBP (folate-binding protein), Flt3 receptor, folate receptor-a, GD2 (ganglioside G2), GD3 (ganglioside G3), GPC3 (glypican-3), GPI00, hTERT (human telomerase reverse transcriptase), ICAM-1, integrin B7, interleukin 6 receptor, IL13Ra2 (interleukin-13 receptor 30 subunit alpha-2), kappa-light chain, KDR (kinase insert domain receptor), LeY (Lewis Y), L1CAM (LI cell adhesion molecule), LILRB2 (leukocyte immunoglobulin like receptor B2), MARTI, MAGE-A1 (melanoma associated antigen A1), MAGE-A3, MSLN (mesothelin), MUC16 (mucin 16), MUCI (mucin I), KG2D ligands, NY-ESO-1 (cancer-testis antigen), PRI (proteinase 3), TRBCI, TRBC2, TFM-3, TACI, tyrosinase, survivin, hTERT, oncofetal antigen (h5T4), p53, PSCA (prostate stem cell antigen), PSMA (prostate-specific membrane antigen), hROR1, TAG-72 (tumor-associated glycoprotein 72), VEGF-R2 (vascular endothelial growth factor R2), WT-1 (Wilms tumor protein), and antigens of HIV (human immunodeficiency virus), hepatitis B, hepatitis C, CMV (cytomegalovirus), EBV (Epstein-Barr virus), HPV (human papilloma virus).

[0898] In some embodiments, immune cells, e.g., T-cells, NK cells, NKT cells, or progenitor cells are modified ex vivo and then delivered to a patient. In some embodiments, a Gene Writer™ system is delivered by one of the methods mentioned herein, and immune cells, e.g., T-cells, NK cells, NKT cells, or progenitor cells are modified in vivo in the patient.

[0899] In some embodiments, a Gene Writer™ system described herein is delivered to a tissue or cell from the cerebrum, cerebellum, adrenal gland, ovary, pancreas, parathyroid gland, hypophysis, testis, thyroid gland, breast, spleen, tonsil, thymus, lymph node, bone marrow, lung, cardiac muscle, esophagus, stomach, small intestine, colon, liver, salivary gland, kidney, prostate, blood, or other cell or tissue type. In some embodiments, a Gene Writer™ system described herein is used to treat a disease, such as a cancer, inflammatory disease, infectious disease, genetic defect, or other disease. A cancer can be cancer of the cerebrum, cerebellum, adrenal gland, ovary, pancreas, parathyroid gland, hypophysis, testis, thyroid gland, breast, spleen, tonsil, thymus, lymph node, bone marrow, lung, cardiac muscle, esophagus, stomach, small intestine, colon, liver, salivary gland, kidney, prostate, blood, or other cell or tissue type, and can include multiple cancers.

[0900] In some embodiments, a Gene Writer™ system described herein described herein is administered by enteral administration (e.g. oral, rectal, gastrointestinal, sublingual, sublabial, or buccal administration). In some embodiments, a Gene Writer™ system described herein is administered by parenteral administration (e.g., intravenous, intramuscular, subcutaneous, intradermal, epidural, intracerebral, intracerebroventricular, epicutaneous, nasal, intra-arterial, intra-articular, intracavernous, intraocular, intraosseous infusion, intraperitoneal, intrathecal, intrauterine, intravaginal, intravesical, perivascular, or transmucosal administration). In some embodiments, a Gene Writer™ system described herein is administered by topical administration (e.g., transdermal administration).

[0901] In some embodiments, a Gene Writing system can be used to make an insertion, deletion, substitution, or combination thereof in a cell, tissue, or subject. In some embodiments, an insertion, deletion, substitution, or combination thereof, increases or decreases expression (e.g. transcription or translation) of a gene. In some embodiments, an insertion, deletion, substitution, or combination thereof, increases or decreases expression (e.g. transcription or translation) of a gene by altering, adding, or deleting sequences in a promoter or enhancer, e.g. sequences that bind transcription factors. In some embodiments, an insertion, deletion, substitution, or combination thereof alters translation of a gene (e.g. alters an amino acid sequence), inserts or deletes a start or stop codon, alters or fixes the translation frame of a gene. In some embodiments, an insertion, deletion, substitution, or combination thereof alters splicing of a gene, e.g. by inserting, deleting, or altering a splice acceptor or donor site. In some embodiments, an insertion, deletion, substitution, or combination thereof alters transcript or protein half-life. In some embodiments, an insertion, deletion, substitution, or combination thereof alters protein localization in the cell (e.g. from the cytoplasm to a mitochondria, from the cytoplasm into the extracellular space (e.g. adds a secretion tag)). In some embodiments, an insertion, deletion, substitution, or combination thereof alters (e.g. improves) protein folding (e.g. to prevent accumulation of misfolded proteins). In some embodiments, an insertion, deletion, substitution, or combination thereof, alters, increases, decreases the activity of a gene, e.g. a protein encoded by the gene.

[0902] In some embodiments, a Gene Writing system can be used to make multiple modifications (e.g., multiple insertions, deletions, or substitutions, and all combinations thereof) to a target cell, either simultaneously or sequentially. In some embodiments, a Gene Writing system can be used to further modify an already modified cell. In some embodiments, a Gene Writing system can be use to modify a cell edited by a complementary technology, e.g., a gene edited cell, e.g., a cell with one or more CRISPR knockouts. In some embodiments, the previously edited cell is a T-cell. In some embodiments, the previous modifications comprise gene knockouts in a T-cell, e.g., endogenous TCR (e.g., TRAC, TRBC), HLA Class I (B2M), PD1, CD52, CTLA-4, TIM-3, LAG-3, DGK. In some embodiments, a Gene Writing system is used to insert a TCR or CAR into a T-cell that has been previously modified.

[0903] In some embodiments, a Gene Writer™ system as described herein can be used to modify an animal cell, plant cell, or fungal cell. In some embodiments, a Gene Writer™ system as described herein can be used to modify a mammalian cell (e.g., a human cell). In some embodiments, a Gene Writer™ system as described herein can be used to modify a cell from a livestock animal (e.g., a cow, horse, sheep, goat, pig, llama, alpaca, camel, yak, chicken, duck, goose, or ostrich). In some embodiments, a Gene Writer™ system as described herein can be used as a laboratory tool or a research tool, or used in a laboratory method or research method, e.g., to modify an animal cell, e.g., a mammalian cell (e.g., a human cell), a plant cell, or a fungal cell.

[0904] In some embodiments, a Gene Writer™ system as described herein can be used to express a protein, template, or heterologous object sequence (e.g., in an animal cell, e.g., a mammalian cell (e.g., a human cell), a plant cell, or a fungal cell). In some embodiments, a Gene Writer™ system as described herein can be used to express a protein, template, or heterologous object sequence under the control of an inducible promoter (e.g., a small molecule inducible promoter). In some embodiments, a Gene Writing system or payload thereof is designed for tunable control, e.g., by the use of an inducible promoter. For example, a promoter, e.g., Tet, driving a gene of interest may be silent at integration, but may, in some instances, activated upon exposure to a small molecule inducer, e.g., doxycycline. In some embodiments, the tunable expression allows post-treatment control of a gene (e.g., a therapeutic gene), e.g., permitting a small molecule-dependent dosing effect. In embodiments, the small molecule-dependent dosing effect comprises altering levels of the gene product temporally and/or spatially, e.g., by local administration. In some embodiments, a promoter used in a system described herein may be inducible, e.g., responsive to an endogenous molecule of the host and/or an exogenous small molecule administered thereto.

[0905] In some embodiments, a Gene Writing system is used to make changes to non-coding and/or regulatory control regions, e.g., to tune the expression of endogenous genes. In some embodiments, a Gene Writing system is used to induce upregulation or downregulation of gene expression. In some embodiments, a regulatory control region comprises one or more of a promoter, enhancer, UTR, CTCF site, and/or a gene expression control region.

[0906] In some embodiments, a Gene Writing system may be used to treat or prevent a repeat expansion disease (e.g., a disease of Table 26), or to reduce the severity or a symptom thereof. In some embodiments, the repeat expansion disease comprises expansion of a trinucleotide repeat. In some embodiments, the subject has at least 10, 20, 30, 40, or 50 copies of the repeat. In embodiments, the repeat expansion disease is an inherited disease. Non-limiting examples of repeat expansion diseases include Huntington's disease (HD) and myotonic dystrophy. For example, healthy individuals may possess between 10 and 35 tandem copies of the CAG trinucleotide repeat, while Huntington's patients frequently possess >40 copies, which can result, e.g., in an elongated and dysfunctional Huntingtin protein. In some embodiments, a Gene Writer corrects a repeat expansion, e.g., by recognizing DNA at the terminus of the repeat region and nicking one strand (FIG. 30). In some embodiments, the template RNA component of the Gene Writer comprises a region with a number of repeats characteristic of a healthy subject, e.g., about 20 repeats (e.g., between 5-10, 10-15, 15-20, 20-25, 25-30, 30-35, or 35-40 repeats). In some embodiments, the template RNA component of the Gene Writer is copied by TPRT into the target site. In some embodiments, a second strand nick and second strand synthesis then results in the integration of the newly copied DNA comprising a correct number of repeats (e.g., as described herein). In some embodiments, the system recognizes DNA at the terminus of the repeat region and the template carries the information for the new number of repeats. In embodiments, a Gene Writer can be used in this way regardless of the number of repeats present in an individual and/or in an individual cell. Owing to the presence of multiple repeats, an alternative non-GeneWriter therapeutic (e.g., a CRISPR-based homologous recombination therapeutic) might, in some embodiments, result in unpredictable repair behavior. Further non-limiting examples of repeat expansion diseases and the causative repeats can be found, for example, in La Spada and Taylor Nat Rev Genet 11(4):247-258 (2010), which is incorporated herein by reference in its entirety.

[0907] In some embodiments, a Gene Writing system may be used to treat a healthy individual, e.g., as a preventative therapy. Gene Writing systems can, in some embodiments, be targeted to generate mutations, e.g., that have been shown to be protective towards a disease of interest. An exemplary list of such diseases and protective mutation targets can be found in Table 22.

[0908] In some embodiments, a Gene Writer system described herein is used to treat an indication of any of Tables 9-12. For instance, in some embodiments the GeneWriter system modifies a target site in genomic DNA in a cell, wherein the target site is in a gene of any of Tables 9-12, e.g., in a subject having the corresponding indication listed in any of Tables 9-12. In some embodiments, the cell is a liver cell and the target site is in a gene of Table 9, e.g., in a subject having the corresponding indication listed in Table 9. In some embodiments, the cell is an HSC and the target site is in a gene of Table 10, e.g., in a subject having the corresponding indication listed in Table 10. In some embodiments, the cell is a CNS cell and the target site is in a gene of Table 11, e.g., in a subject having the corresponding indication listed in Table 11. In some embodiments, the cell is a cell of the eye and the target site is in a gene of Table 12, e.g., in a subject having the corresponding indication listed in Table 12. In some embodiments, the target site is in a coding region in the gene. In some embodiments, the target site is in a promoter. In some embodiments, the target site is in a 5′ UTR or a 3′ UTR of the gene of any of Tables 9-12. In some embodiments, the target site is in an intron or exon of the gene. In some embodiments, the GeneWriter corrects a mutation in the gene. In some embodiments, the GeneWriter inserts a sequence that had been deleted from the gene (e.g., through a disease-causing mutation). In some embodiments, the GeneWriter deletes a sequence that had been duplicated in the gene (e.g., through a disease-causing mutation). In some embodiments, the GeneWriter replaces a mutation (e.g., a disease-causing mutation) with the corresponding wild-type sequence. In some embodiments, the mutation is a substitution, insertion, deletion, or inversion.

TABLE 9
Indications and genetic targets, e.g., in the liver

| Disease | Gene Affected |
|---|---|
| Acute intermittent porphyria | HMBS |
| Alpha-1-antitrypsin deficiency (AAT) | SERPINA1 |
| Arginase deficiency | ARG1 |
| Argininosuccinate lyase deficiency | ASL |
| Carbamoyl phosphate synthetase I deficiency | CPS1 |
| Citrin deficiency | SLC25A13 |
| Citrullinemia type I | ASS1 |
| Crigler-Najjar syndrome (Hyperbilirubinemia) | UGT1A1 |
| Fabry disease | GLA |
| Familial hypercholesterolemia 4 (homozygous | LDLRAP1 |
| familial cholesterolemia) | |
| Glutaric aciduria I | GCDH |
| Glutaric aciduria II (multiple acyl-CoA | GA IIA: ETFA |
| dehydrogenase deficiency) | GA IIB: ETFB |
| | GA IIC: ETFDH |
| Glycogen storage disease type IV | GBE1 |
| Hemophilia A | F8 |
| Hemophilia B | F9 |
| Hereditary hemochromatosis | HFE |
| Homocystinuria | CBS |
| Maple syrup urine disease (MSUD) | Type Ia: BCKDHA |
| | Type Ib: BCKDHB |
| | Type II: DBT |
| Methylmalonic acidemia (methylmalonyl-CoA | MMUT |
| mutase deficiency) | |
| MPS 1S (Scheie syndrome) | IDUA |
| MPS2 | IDS |
| MPS3 (San Filippo Syndrome) | Type IIIa: SGSH |
| | Type IIIb: NAGLU |
| | Type IIIc: HGSNAT |
| | Type IIId: GNS |
| MPS4 | Type IVA: GALNS |
| | Type IVB: GLB1 |
| MPS6 | ARSB |
| MPS7 | GUSB |
| Ornithine transcarbamylase deficiency | OTC |
| Phenylketonuria (phenylalanine hydroxylase | PAH |
| deficiency) | |
| Polycystic Liver Disease | PCLD1: PRKCSH |
| | PCLD2: SEC63 |
| | PLCD3: ALG8 |
| | PCLD4: LRP5 |
| Pompe disease | GAA |
| Primary Hyperoxaluria 1 (oxalosis) | AGXT |
| Progressive familial intrahepatic cholestasis type 1 | ATP8B1 |
| Progressive familial intrahepatic cholestasis type 2 | ABCB11 |
| Progressive familial intrahepatic cholestasis type 3 | ABCB4 |
| Propionic acidemia | PCCB; PCCA |
| Pyruvate carboxylase deficiency | PC |
| Tyrosinemia type I | FAH |
| Wilson's disease | ATP7B |

TABLE 10
Indications and genetic targets for HSCs

| Disease | Gene Affected |
|---|---|
| Adrenoleukodystrophy (CALD) | ABCD1 |
| Alpha-mannosidosis | MAN2B1 |
| Blackfan-Diamond Anemia | |
| Congenital amegakaryocytic thrombocytopenia | MPL |
| Dyskeratosis Congenita | TERC |
| Fanconi anemia | FANC |
| Gaucher disease | GBA |
| Globoid cell leukodystrophy (Krabbe disease) | GALC |
| Hemophagocytic lymphohistiocytosis | PRF1; STX11; |
| | STXBP2; UNC13D |
| Malignant infantile osteopetrosis- autosomal | Many genes |
| recessive osteopetrosis | implicated |
| Metachromatic leukodystrophy | PSAP |
| MPS 1S (Scheie syndrome) | IDUA |
| MPS2 | IDS |
| MPS7 | GUSB |
| Mucolipidosis II | GNPTAB |
| Niemann-Pick disease A and B | SMPD1 |
| Niemann-Pick disease C | NPC1 |
| Pompe disease | GAA |
| Pyruvate kinase deficiency (PKD) | PKLR |
| Sickle cell disease (SCD) | HBB |
| Tay Sachs | HEXA |
| Thalassemia | HBB |

TABLE 11
Indications and genetic targets for the CNS

| Disease | Gene Affected |
|---|---|
| Alpha-mannosidosis | MAN2B1 |
| Ataxia-telangiectasia | ATM |
| CADASIL | NOTCH3 |
| Canavan disease | ASPA |
| Carbamoyl-phosphate synthetase 1 deficiency | CPS1 |
| CLN1 disease | PPT1 |
| CLN2 Disease | TPP1 |
| CLN3 Disease (Juvenile neuronal ceroid | CLN3 |
| lipofuscinosis, Batten Disease) | |
| Coffin-Lowry syndrome | RPS6KA3 |
| Congenital myasthenic syndrome 5 | COLQ |
| Cornelia de Lange syndrome (NIPBL) | NIPBL |
| Cornelia de Lange syndrome (SMC1A) | SMC1A |
| Dravet syndrome (SCN1A) | SCN1A |
| Glycine encephalopathy (GLDC) | GLDC |
| GM1 gangliosidosis | GLB1 |
| Huntington's Disease | HTT |
| Hydrocephalus with stenosis of the aqueduct | L1CAM |
| of Sylvius | |
| Leigh Syndrome | SURF1 |
| Metachromatic leukodystrophy (ARSA) | ARSA |
| MPS type 2 | IDS |
| MPS type 3 | Type 3a: SGSH |
| | Type 3b: NAGLU |
| Mucolipidosis IV | MCOLN1 |
| Neurofibromatosis Type 1 | NF1 |
| Neurofibromatosis type 2 | NF2 |
| Pantothenate kinase-associated neurodegeneration | PANK2 |
| Pyridoxine-dependent epilepsy | ALDH7A1 |
| Rett syndrome (MECP2) | MECP2 |
| Sandhoff disease | HEXB |
| Semantic dementia (Frontotemporal dementia) | MAPT |
| Spinocerebellar ataxia with axonal neuropathy | SETX |
| (Ataxia with Oculomotor Apraxia) | |
| Tay-Sachs disease | HEXA |
| X-linked Adrenoleukodystrophy | ABCD1 |

TABLE 12
Indications and genetic targets for the eye

| Disease | Gene Affected |
|---|---|
| Achromatopsia | CNGB3 |
| Amaurosis Congenita (LCA1) | GUCY2D |
| Amaurosis Congenita (LCA10) | CEP290 |
| Amaurosis Congenita (LCA2) | RPE65 |
| Amaurosis Congenita (LCA8) | CRB1 |
| Choroideremia | CHM |
| Cone Rod Dystrophy (ABCA4) | ABCA4 |
| Cone Rod Dystrophy (GUCY2D) | GUCY2D |
| Cystinosis, Ocular Nonnephropathic | CTNS |
| Doyne Honeycomb Retinal Dystrophy (DHRD) | EFEMP1 |
| Familial Oculoleptomeningeal Amyloidosis | TTR |
| Keratitis-ichthyosis-deafness (KID) | GJB2 |
| Lattice corneal dystrophy type I | TGFBI |
| Macular Corneal Dystrophy (MCD) | CHST6 |
| Meesmann Corneal Dystrophy | KRT12; KRT3 |
| Optic Atrophy | OPA1 |
| Retinitis Pigmentosa (AR) | USH2A |
| Retinitis Rigmentosa (AD) | RHO |
| Sorsby Fundus Dystrophy | TIMP3 |
| Stargardt Disease | ABCA4 |

### Additional Suitable Indications

[0909] Exemplary suitable diseases and disorders that can be treated by the systems or methods provided herein, for example, those comprising Gene Writers, include, without limitation: Baraitser-Winter syndromes 1 and 2; Diabetes mellitus and insipidus with optic atrophy and deafness; Alpha-1-antitrypsin deficiency; Heparin cofactor II deficiency; Adrenoleukodystrophy; Keppen-Lubinsky syndrome; Treacher collins syndrome 1; Mitochondrial complex I, II, III, III (nuclear type 2, 4, or 8) deficiency; Hypermanganesemia with dystonia, polycythemia and cirrhosis; Carcinoid tumor of intestine; Rhabdoid tumor predisposition syndrome 2; Wilson disease; Hyperphenylalaninemia, bh4-deficient, a, due to partial pts deficiency, BH4-deficient, D, and non-pku; Hyperinsulinemic hypoglycemia familial 3, 4, and 5; Keratosis follicularis; Oral-facial-digital syndrome; SeSAME syndrome; Deafness, nonsyndromic sensorineural, mitochondrial; Proteinuria; Insulin-dependent diabetes mellitus secretory diarrhea syndrome; Moyamoya disease 5; Diamond-Blackfan anemia 1, 5, 8, and 10; Pseudoachondroplastic spondyloepiphyseal dysplasia syndrome; Brittle cornea syndrome 2; Methylmalonic acidemia with homocystinuria; Adams-Oliver syndrome 5 and 6; autosomal recessive Agammaglobulinemia 2; Cortical malformations, occipital; Febrile seizures, familial, 11; Mucopolysaccharidosis type VI, type VI (severe), and type VII; Marden Walker like syndrome; Pseudoneonatal adrenoleukodystrophy; Spheroid body myopathy; Cleidocranial dysostosis; Multiple Cutaneous and Mucosal Venous Malformations; Liver failure acute infantile; Neonatal intrahepatic cholestasis caused by citrin deficiency; Ventricular septal defect 1; Oculodentodigital dysplasia; Wilms tumor 1; Weill-Marchesani-like syndrome; Renal adysplasia; Cataract 1, 4, autosomal dominant, autosomal dominant, multiple types, with microcornea, coppock-like, juvenile, with microcornea and glucosuria, and nuclear diffuse nonprogressive; Odontohypophosphatasia; Cerebro-oculo-facio-skeletal syndrome; Schizophrenia 15; Cerebral amyloid angiopathy, APP-related; Hemophagocytic lymphohistiocytosis, familial, 3; Porphobilinogen synthase deficiency; Episodic ataxia type 2; Trichorhinophalangeal syndrome type 3; Progressive familial heart block type IB; Glioma susceptibility 1; Lichtenstein-Knorr Syndrome; Hypohidrotic X-linked ectodermal dysplasia; Bartter syndrome types 3, 3 with hypocalciuria, and 4; Carbonic anhydrase VA deficiency, hyperammonemia due to; Cardiomyopathy; Poikiloderma, hereditary fibrosing, with tendon contractures, myopathy, and pulmonary fibrosis; Combined d-2- and 1-2-hydroxyglutaric aciduria; Arginase deficiency; Cone-rod dystrophy 2 and 6; Smith-Lemli-Opitz syndrome; Mucolipidosis III Gamma; Blau syndrome; Werner syndrome; Meningioma; Iodotyrosyl coupling defect; Dubin-Johnson syndrome; 3-Oxo-5 alpha-steroid delta 4-dehydrogenase deficiency; Boucher Neuhauser syndrome; Iron accumulation in brain; Mental Retardation, X-Linked 102 and syndromic 13; familial, Pituitary adenoma predisposition; Hypoplasia of the corpus callosum; Hyperalphalipoproteinemia 2; Deficiency of ferroxidase; Growth hormone insensitivity with immunodeficiency; Marinesco-Sj\xc3\xb6gren syndrome; Martsolf syndrome; Gaze palsy, familial horizontal, with progressive scoliosis; Mitchell-Riley syndrome; Hypocalciuric hypercalcemia, familial, types 1 and 3; Rubinstein-Taybi syndrome; Epstein syndrome; Juvenile retinoschisis; Becker muscular dystrophy; Loeys-Dietz syndrome 1, 2, 3; Congenital muscular hypertrophy-cerebral syndrome; Familial juvenile gout; Spermatogenic failure 11, 3, and 8; Orofacial cleft 11 and 7, Cleft lip/palate-ectodermal dysplasia syndrome; Mental retardation, X-linked, nonspecific, syndromic, Hedera type, and syndromic, wu type; Combined oxidative phosphorylation deficiencies 1, 3, 4, 12, 15, and 25; Frontotemporal dementia; Kniest dysplasia; Familial cardiomyopathy; Benign familial hematuria; Pheochromocytoma; Aminoglycoside-induced deafness; Gamma-aminobutyric acid transaminase deficiency; Oculocutaneous albinism type IB, type 3, and type 4; Renal coloboma syndrome; CNS hypomyelination; Hennekam lymphangiectasia-lymphedema syndrome 2; Migraine, familial basilar; Distal spinal muscular atrophy, X-linked 3; X-linked periventricular heterotopia; Microcephaly; Mucopolysaccharidosis, MPS-I-H/S, MPS-II, MPS-III-A, MPS-III-B, MPS-III-C, MPS-IV-A, MPS-IV-B; Infantile Parkinsonism-dystonia; Frontotemporal dementia with TDP43 inclusions, TARDBP-related; Hereditary diffuse gastric cancer; Sialidosis type I and II; Microcephaly-capillary malformation syndrome; Hereditary breast and ovarian cancer syndrome; Brain small vessel disease with hemorrhage; Non-ketotic hyperglycinemia; Navajo neurohepatopathy; Auriculocondylar syndrome 2; Spastic paraplegia 15, 2, 3, 35, 39, 4, autosomal dominant, 55, autosomal recessive, and 5A; Autosomal recessive cutis laxa type IA and IB; Hemolytic anemia, nonspherocytic, due to glucose phosphate isomerase deficiency; Hutchinson-Gilford syndrome; Familial amyloid nephropathy with urticaria and deafness; Supravalvar aortic stenosis; Diffuse palmoplantar keratoderma, Bothnian type; Holt-Oram syndrome; Coffin Siris/Intellectual Disability; Left-right axis malformations; Rapadilino syndrome; Nanophthalmos 2; Craniosynostosis and dental anomalies; Paragangliomas 1; Snyder Robinson syndrome; Ventricular fibrillation; Activated PI3K-delta syndrome; Howel-Evans syndrome; Larsen syndrome, dominant type; Van Maldergem syndrome 2; MYH-associated polyposis; 6-pymvoyl-tetrahydropterin synthase deficiency; Alagille syndromes 1 and 2; Lymphangiomyomatosis; Muscle eye brain disease; WFS1-Related Disorders; Primary hypertrophic osteoarthropathy, autosomal recessive 2; Infertility; Nestor-Guillermo progeria syndrome; Mitochondrial trifunctional protein deficiency; Hypoplastic left heart syndrome 2; Primary dilated cardiomyopathy; Retinitis pigmentosa; Hirschsprung disease 3; Upshaw-Schulman syndrome; Desbuquois dysplasia 2; Diarrhea 3 (secretory sodium, congenital, syndromic) and 5 (with tufting enteropathy, congenital); Pachyonychia congenita 4 and type 2; Cerebral autosomal dominant and recessive arteriopathy with subcortical infarcts and leukoencephalopathy; Vi tel 1i form dystrophy; type II, type IV, IV (combined hepatic and myopathic), type V, and type VI; Atypical Rett syndrome; Atrioventricular septal defect 4; Papillon-Lef\xc3\xa8vre syndrome; Leber amaurosis; X-linked hereditary motor and sensory neuropathy; Progressive sclerosing poliodystrophy; Goldmann-Favre syndrome; Renal-hepatic-pancreatic dysplasia; Pallister-Hall syndrome; Amyloidogenic transthyretin amyloidosis; Melnick-Needles syndrome; Hyperimmunoglobulin E syndrome; Posterior column ataxia with retinitis pigmentosa; Chondrodysplasia punctata 1, X-linked recessive and 2 X-linked dominant; Ectopia lentis, isolated autosomal recessive and dominant; Familial cold urticarial; Familial adenomatous polyposis 1 and 3; Porokeratosis 8, disseminated superficial actinic type; PIK3CA Related Overgrowth Spectrum; Cerebral cavernous malformations 2; Exudative vitreoretinopathy 6; Megalencephaly cutis marmorata telangiectatica congenital; TARP syndrome; Diabetes mellitus, permanent neonatal, with neurologic features; Short-rib thoracic dysplasia 11 or 3 with or without polydactyly; Hypertrichotic osteochondrodysplasia; beta Thalassemia; Niemann-Pick disease type C1, C2, type A, and type Cl, adult form; Charcot-Marie-Tooth disease types IB, 2B2, 2C, 2F, 2I, 2U (axonal), 1C (demyelinating), dominant intermediate C, recessive intermediate A, 2A2, 4C, 4D, 4H, IF, IVF, and X; Tyrosinemia type I; Paroxysmal atrial fibrillation; UV-sensitive syndrome; Tooth agenesis, selective, 3 and 4; Merosin deficient congenital muscular dystrophy; Long-chain 3-hydroxyacyl-CoA dehydrogenase deficiency; Congenital aniridia; Left ventricular noncompaction 5; Deficiency of aromatic-L-amino-acid decarboxylase; Coronary heart disease; Leukonychia totalis; Distal arthrogryposis type 2B; Retinitis pigmentosa 10, 11, 12, 14, 15, 17, and 19; Robinow Sorauf syndrome; Tenorio Syndrome; Prolactinoma; Neurofibromatosis, type 1 and type 2; Congenital muscular dystrophy-dystroglycanopathy with brain and eye anomalies, types A2, A7, A8, A11, and A14; Heterotaxy, visceral, 2, 4, and 6, autosomal; Jankovic Rivera syndrome; Lipodystrophy, familial partial, type 2 and 3; Hemoglobin H disease, nondeletional; Multicentric osteolysis, nodulosis and arthropathy; Thyroid agenesis; deficiency of Acyl-CoA dehydrogenase family, member 9; Alexander disease; Phytanic acid storage disease; Breast-ovarian cancer, familial 1, 2, and 4; Proline dehydrogenase deficiency; Childhood hypophosphatasia; Pancreatic agenesis and congenital heart disease; Vitamin D-dependent rickets, types land 2, Iridogoniodysgenesis dominant type and type 1; Autosomal recessive hypohidrotic ectodermal dysplasia syndrome; Mental retardation, X-linked, 3, 21, 30, and 72; Hereditary hemorrhagic telangiectasia type 2; Blepharophimosis, ptosis, and epicanthus inversus; Adenine phosphoribosyltransferase deficiency; Seizures, benign familial infantile, 2; Acrodysostosis 2, with or without hormone resistance; Tetralogy of Fallot, Retinitis pigmentosa 2, 20, 25, 35, 36, 38, 39, 4, 40, 43, 45, 48, 66, 7, 70, 72; Lysosomal acid lipase deficiency; Eichsfeld type congenital muscular dystrophy; Walker-Warburg congenital muscular dystrophy; TNF receptor-associated periodic fever syndrome (TRAPS); Progressive myoclonus epilepsy with ataxia; Epilepsy, childhood absence 2, 12 (idiopathic generalized, susceptibility to) 5 (nocturnal frontal lobe), nocturnal frontal lobe type 1, partial, with variable foci, progressive myoclonic 3, and X-linked, with variable learning disabilities and behavior disorders; Long QT syndrome; Dicarboxylic aminoaciduria; Brachydactyly types A1 and A2; Pseudoxanthoma elasticum-like disorder with multiple coagulation factor deficiency; Multisystemic smooth muscle dysfunction syndrome; Syndactyly Cenani Lenz type; Joubert syndrome 1, 6, 7, 9/15 (digenic), 14, 16, and 17, and Orofaciodigital syndrome xiv; Digitorenocerebral syndrome; Retinoblastoma; Dyskinesia, familial, with facial myokymia; Hereditary sensory and autonomic neuropathy type IIB and IIA; familial hyperinsulinism; Megalencephalic leukoencephalopathy with subcortical cysts 1 and 2a; Aase syndrome; Wiedemann-Steiner syndrome; Ichthyosis exfoliativa; Myotonia congenital; Granulomatous disease, chronic, X-linked, variant; Deficiency of 2-methylbutyryl-CoA dehydrogenase; Sarcoidosis, early-onset; Glaucoma, congenital and Glaucoma, congenital, Coloboma; Breast cancer, susceptibility to; Ceroid lipofuscinosis neuronal 2, 6, 7, and 10; Congenital generalized lipodystrophy type 2; Fructose-biphosphatase deficiency; Congenital contractural arachnodactyly; Lynch syndrome I and II; Phosphoglycerate dehydrogenase deficiency; Burn-Mckeown syndrome; Myocardial infarction 1; Achromatopsia 2 and 7; Retinitis Pigmentosa 73; Protan defect; Polymicrogyria, asymmetric, bilateral frontoparietal; Spinal muscular atrophy, distal, autosomal recessive, 5; Methylmalonic aciduria due to methylmalonyl-CoA mutase deficiency; Familial porencephaly; Hurler syndrome; Oto-palato-digital syndrome, types I and II; Sotos syndrome 1 or 2; Cardioencephalomyopathy, fatal infantile, due to cytochrome c oxidase deficiency; Parastremmatic dwarfism; Thyrotropin releasing hormone resistance, generalized; Diabetes mellitus, type 2, and insulin-dependent, 20; Thoracic aortic aneurysms and aortic dissections; Estrogen resistance; Maple syrup urine disease type 1A and type 3; Hypospadias 1 and 2, X-linked; Metachromatic leukodystrophy juvenile, late infantile, and adult types; Early T cell progenitor acute lymphoblastic leukemia; Neuropathy, Hereditary Sensory, Type IC; Mental retardation, autosomal dominant 31; Retinitis pigmentosa 39; Breast cancer, early-onset; May-Hegglin anomaly; Gaucher disease type 1 and Subacute neuronopathic; Temtamy syndrome; Spinal muscular atrophy, lower extremity predominant 2, autosomal dominant; Fanconi anemia, complementation group E, I, N, and O; Alkaptonuria; Hirschsprung disease; Combined malonic and methylmalonic aciduria; Arrhythmogenic right ventricular cardiomyopathy types 5, 8, and 10; Congenital lipomatous overgrowth, vascular malformations, and epidermal nevi; Timothy syndrome; Deficiency of guanidinoacetate methyltransferase; Myoclonic dystonia; Kanzaki disease; Neutral 1 amino acid transport defect; Neurohypophyseal diabetes insipidus; Thyroid hormone metabolism, abnormal; Benign scapuloperoneal muscular dystrophy with cardiomyopathy; Hypoglycemia with deficiency of glycogen synthetase in the liver; Hypertrophic cardiomyopathy; Myasthenic Syndrome, Congenital, 11, associated with acetylcholine receptor deficiency; Mental retardation X-linked syndromic 5; Stormorken syndrome; Aplastic anemia; Intellectual disability; Normokalemic periodic paralysis, potassium-sensitive; Danon disease; Nephronophthisis 13, 15 and 4; Thyrotoxic periodic paralysis and Thyrotoxic periodic paralysis 2; Infertility associated with multi-tailed spermatozoa and excessive DNA; Glaucoma, primary open angle, juvenile-onset; Afibrinogenemia and congenital Afibrinogenemia; Polycystic kidney disease 2, adult type, and infantile type; Familial porphyria cutanea tarda; Cerebello-oculo-renal syndrome (nephronophthisis, oculomotor apraxia and cerebellar abnormalities); Frontotemporal Dementia Chromosome 3-Linked and Frontotemporal dementia ubiquitin-positive; Metatrophic dysplasia; Immunodeficiency-centromeric instability-facial anomalies syndrome 2; Anemia, nonspherocytic hemolytic, due to G6PD deficiency; Bronchiectasis with or without elevated sweat chloride 3; Congenital myopathy with fiber type disproportion; Carney complex, type 1; Cryptorchidism, unilateral or bilateral; Ichthyosis bullosa of Siemens; Isolated lutropin deficiency; DFNA 2 Nonsyndromic Hearing Loss; Klein-Waardenberg syndrome; Gray platelet syndrome; Bile acid synthesis defect, congenital, 2; 46, XY sex reversal, type 1, 3, and 5; Acute intermittent porphyria; Cornelia de Fange syndromes 1 and 5; Hyperglycinuria; Cone-rod dystrophy 3; Dysfibrinogenemia; Karak syndrome; Congenital muscular dystrophy-dystroglycanopathy without mental retardation, type B5; Infantile nystagmus, X-linked; Dyskeratosis congenita, autosomal recessive, 1, 3, 4, and 5; Microcephaly with or without chorioretinopathy, lymphedema, or mental retardation; Hyperlysinemia; Bardet-Biedl syndromes 1, 11, 16, and 19; Autosomal recessive centronuclear myopathy; Frasier syndrome; Caudal regression syndrome; Fibrosis of extraocular muscles, congenital, 1, 2, 3a (with or without extraocular involvement), 3b; Prader-Willi-like syndrome; Malignant melanoma; Bloom syndrome; Darier disease, segmental; Multicentric osteolysis nephropathy; Hemochromatosis type 1, 2B, and 3; Cerebellar ataxia infantile with progressive external ophthalmoplegi and Cerebellar ataxia, mental retardation, and dysequilibrium syndrome 2; Hypoplastic left heart syndrome, Epilepsy, Hearing Loss, And Mental Retardation Syndrome; Transferrin serum level quantitative trait locus 2; Ocular albinism, type I; Marfan syndrome; Congenital muscular dystrophy-dystroglycanopathy with brain and eye anomalies, type A14 and B14; Hyperammonemia, type III; Cryptophthalmos syndrome; Alopecia universalis congenital; Adult hypophosphatasia; Mannose-binding protein deficiency; Bull eye macular dystrophy; Autosomal dominant torsion dystonia 4; Nephrotic syndrome, type 3, type 5, with or without ocular abnormalities, type 7, and type 9; Seizures, Early infantile epileptic encephalopathy 7; Persistent hyperinsulinemic hypoglycemia of infancy; Thrombocytopenia, X-linked; Neonatal hypotonia; Orstavik Lindemann Solberg syndrome; Pulmonary hypertension, primary, 1, with hereditary hemorrhagic telangiectasia; Pituitary dependent hypercortisolism; Epidermodysplasia verruciformis; Epidermolysis bullosa, junctional, localisata variant; Cytochrome c oxidase i deficiency; Kindler syndrome; Myosclerosis, autosomal recessive; Truncus arteriosus; Duane syndrome type 2; ADULT syndrome; Zellweger syndrome spectrum; Leukoencephalopathy with ataxia, with Brainstem and Spinal Cord Involvement and Lactate Elevation, with vanishing white matter, and progressive, with ovarian failure; Antithrombin III deficiency; Holoprosencephaly 7; Roberts-SC phocomelia syndrome; Mitochondrial DNA-depletion syndrome 3 and 7, hepatocerebral types, and 13 (encephalomyopathic type); Porencephaly 2; Microcephaly, normal intelligence and immunodeficiency; Giant axonal neuropathy; Sturge-Weber syndrome, Capillary malformations, congenital, 1; Fabry disease and Fabry disease, cardiac variant; Glutamate formiminotransferase deficiency; Fanconi-Bickel syndrome; Acromicric dysplasia; Epilepsy, idiopathic generalized, susceptibility to, 12; Basal ganglia calcification, idiopathic, 4; Polyglucosan body myopathy 1 with or without immunodeficiency; Malignant tumor of prostate; Congenital ectodermal dysplasia of face; Congenital heart disease; Age-related macular degeneration 3, 6, 11, and 12; Congenital myotonia, autosomal dominant and recessive forms; Hypomagnesemia 1, intestinal; Sulfite oxidase deficiency, isolated; Pick disease; Plasminogen deficiency, type I; Syndactyly type 3; Cone-rod dystrophy amelogenesis imperfecta; Pseudoprimary hyperaldosteronism; Terminal osseous dysplasia; Bartter syndrome antenatal type 2; Congenital muscular dystrophy-dystroglycanopathy with mental retardation, types B2, B3, B5, and B15; Familial infantile myasthenia; Lymphoproliferative syndrome 1, 1 (X-linked), and 2; Hypercholesterolaemia and Hypercholesterolemia, autosomal recessive; Neoplasm of ovary; Infantile GM1 gangliosidosis; Syndromic X-linked mental retardation 16; Deficiency of ribose-5-phosphate isomerase; Alzheimer disease, types, 1, 3, and 4; Andersen Tawil syndrome; Multiple synostoses syndrome 3; Chilbain lupus 1; Hemophagocytic lymphohistiocytosis, familial, 2; Axenfeld-Rieger syndrome type 3; Myopathy, congenital with cores; Osteoarthritis with mild chondrodysplasia; Peroxisome biogenesis disorders; Severe congenital neutropenia; Hereditary neuralgic amyotrophy; Palmoplantar keratoderma, nonepidermolytic, focal or diffuse; Dysplasminogenemia; Familial colorectal cancer; Spastic ataxia 5, autosomal recessive, Charlevoix-Saguenay type, 1, 10, or 11, autosomal recessive; Frontometaphyseal dysplasia land 3; Hereditary factors II, IX, VIII deficiency disease; Spondylocheirodysplasia, Ehlers-Danlos syndrome-like, with immune dysregulation, Aggrecan type, with congenital joint dislocations, short limb-hand type, Sedaghatian type, with cone-rod dystrophy, and Kozlowski type; Ichthyosis prematurity syndrome; Stickler syndrome type 1; Focal segmental glomerulosclerosis 5; 5-Oxoprolinase deficiency; Microphthalmia syndromic 5, 7, and 9; Juvenile polyposis/hereditary hemorrhagic telangiectasia syndrome; Deficiency of butyryl-CoA dehydrogenase; Maturity-onset diabetes of the young, type 2; Mental retardation, syndromic, Claes-Jensen type, X-linked; Deafness, cochlear, with myopia and intellectual impairment, without vestibular involvement, autosomal dominant, X-linked 2; Spondylocarpotarsal synostosis syndrome; Sting-associated vasculopathy, infantile-onset; Neutral lipid storage disease with myopathy; Immune dysfunction with T-cell inactivation due to calcium entry defect 2; Cardiofaciocutaneous syndrome; Corticosterone methyloxidase type 2 deficiency; Hereditary myopathy with early respiratory failure; Interstitial nephritis, karyomegalic; Trimethylaminuria; Hyperimmunoglobulin D with periodic fever; Malignant hyperthermia susceptibility type 1; Trichomegaly with mental retardation, dwarfism and pigmentary degeneration of retina Breast adenocarcinoma; Complement factor B deficiency; Ullrich congenital muscular dystrophy; Left ventricular noncompaction cardiomyopathy; Fish-eye disease; Finnish congenital nephrotic syndrome; Limb-girdle muscular dystrophy, type IB, 2A, 2B, 2D, C1, C5, C9, C14; Idiopathic fibrosing alveolitis, chronic form; Primary familial hypertrophic cardiomyopathy; Angiotensin i-converting enzyme, benign serum increase; Cd8 deficiency, familial; Proteus syndrome; Glucose-6-phosphate transport defect; Borjeson-Forssman-Lehmann syndrome; Zellweger syndrome; Spinal muscular atrophy, type II; Prostate cancer, hereditary, 2; Thrombocytopenia, platelet dysfunction, hemolysis, and imbalanced globin synthesis; Congenital disorder of glycosylation types IB, ID, 1G, 1H, 1 J, IK, IN, IP, 2C, 2J, 2K, Ilm; Junctional epidermolysis bullosa gravis of Herlitz; Generalized epilepsy with febrile seizures plus 3, type 1, type 2; Schizophrenia 4; Coronary artery disease, autosomal dominant 2; Dyskeratosis congenita, autosomal dominant, 2 and 5; Subcortical laminar heterotopia, X-linked; Adenylate kinase deficiency; X-linked severe combined immunodeficiency; Coproporphyria; Amyloid Cardiomyopathy, Transthyretin-related; Hypocalcemia, autosomal dominant 1; Brugada syndrome; Congenital myasthenic syndrome, acetazolamide-responsive; Primary hypomagnesemia; Sclerosteosis; Frontotemporal dementia and/or amyotrophic lateral sclerosis 3 and 4; Mevalonic aciduria; Schwannomatosis 2; Hereditary motor and sensory neuropathy with optic atrophy; Porphyria cutanea tarda; Osteochondritis dissecans; Seizures, benign familial neonatal, 1, and/or myokymia; Long QT syndrome, LQT1 subtype; Mental retardation, anterior maxillary protrusion, and strabismus; Idiopathic hypercalcemia of infancy; Hypogonadotropic hypogonadism 11 with or without anosmia; Polycystic lipomembranous osteodysplasia with sclerosing leukoencephalopathy; Primary autosomal recessive microcephaly 10, 2, 3, and 5; Interrupted aortic arch; Congenital amegakaryocytic thrombocytopenia; Hermansky-Pudlak syndrome 1, 3, 4, and 6; Long QT syndrome 1, 2, 2/9, 2/5, (digenic), 3, 5 and 5, acquired, susceptibility to; Andermann syndrome; Retinal cone dystrophy 3B; Erythropoietic protoporphyria; Sepiapterin reductase deficiency; Very long chain acyl-CoA dehydrogenase deficiency; Hyperferritinemia cataract syndrome; Silver spastic paraplegia syndrome; Charcot-Marie-Tooth disease; Atrial septal defect 2; Carnevale syndrome; Hereditary insensitivity to pain with anhidrosis; Catecholaminergic polymorphic ventricular tachycardia; Hypokalemic periodic paralysis 1 and 2; Sudden infant death syndrome; Hypochromic microcytic anemia with iron overload; GLUT1 deficiency syndrome 2; Leukodystrophy, Hypomyelinating, 11 and 6; Cone monochromatism; Osteopetrosis autosomal dominant type 1 and 2, recessive 4, recessive 1, recessive 6; Severe congenital neutropenia 3, autosomal recessive or dominant; Methionine adenosyltransferase deficiency, autosomal dominant; Paroxysmal familial ventricular fibrillation; Pyruvate kinase deficiency of red cells; Schneckenbecken dysplasia; Torsades de pointes; Distal myopathy Markesbery-Griggs type; Deficiency of UDPglucose-hexose-1-phosphate uridylyltransferase; Sudden cardiac death; Neu-Laxova syndrome 1; Atransferrinemia; Hyperparathyroidism 1 and 2; Cutaneous malignant melanoma 1; Symphalangism, proximal, 1b; Progressive pseudorheumatoid dysplasia; Werdnig-Hoffmann disease; Achondrogenesis type 2; Holoprosencephaly 2, 3, 7, and 9; Schindler disease, type 1; Cerebroretinal microangiopathy with calcifications and cysts; Heterotaxy, visceral, X-linked; Tuberous sclerosis syndrome; Kartagener syndrome; Thyroid hormone resistance, generalized, autosomal dominant; Bestrophinopathy, autosomal recessive; Nail disorder, nonsyndromic congenital, 8; Mohr-Tranebjaerg syndrome; Cone-rod dystrophy 12; Hearing impairment; Ovarioleukodystrophy; Renal tubular acidosis, proximal, with ocular abnormalities and mental retardation; Dihydropteridine reductase deficiency; Focal epilepsy with speech disorder with or without mental retardation; Ataxia-telangiectasia syndrome; Brown-Vialetto-Van laere syndrome and Brown-Vialetto-Van Laere syndrome 2; Cardiomyopathy; Peripheral demyelinating neuropathy, central dysmyelination; Corneal dystrophy, Fuchs endothelial, 4; Cowden syndrome 3; Dystonia 2 (torsion, autosomal recessive), 3 (torsion, X-linked), 5 (Dopa-responsive type), 10, 12, 16, 25, 26 (Myoclonic); Epiphyseal dysplasia, multiple, with myopia and conductive deafness; Cardiac conduction defect, nonspecific; Branchiootic syndromes 2 and 3; Peroxisome biogenesis disorder 14B, 2A, 4A, 5B, 6A, 7A, and 7B; Familial renal glucosuria; Candidiasis, familial, 2, 5, 6, and 8; Autoimmune disease, multisystem, infantile-onset; Early infantile epileptic encephalopathy 2, 4, 7, 9, 10, 11, 13, and 14; Segawa syndrome, autosomal recessive; Deafness, autosomal dominant 3a, 4, 12, 13, 15, autosomal dominant nonsyndromic sensorineural 17, 20, and 65; Congenital dyserythropoietic anemia, type I and II; Enhanced s-cone syndrome; Adult neuronal ceroid lipofuscinosis; Atrial fibrillation, familial, 11, 12, 13, and 16; Norum disease; Osteosarcoma; Partial albinism; Biotinidase deficiency; Combined cellular and humoral immune defects with granulomas; Alpers encephalopathy; Holocarboxylase synthetase deficiency; Maturity-onset diabetes of the young, type 1, type 2, type 11, type 3, and type 9; Variegate porphyria; Infantile cortical hyperostosis; Testosterone 17-beta-dehydrogenase deficiency; L-2-hydroxyglutaric aciduria; Tyrosinase-negative oculocutaneous albinism; Primary ciliary dyskinesia 24; Pontocerebellar hypoplasia type 4; Ciliary dyskinesia, primary, 7, 11, 15, 20 and 22; Idiopathic basal ganglia calcification 5; Brain atrophy; Craniosynostosis 1 and 4; Keratoconus 1; Rasopathy; Congenital adrenal hyperplasia and Congenital adrenal hypoplasia, X-linked; Mitochondrial DNA depletion syndrome 11, 12 (cardiomyopathic type), 2, 4B (MNGIE type), 8B (MNGIE type); Brachydactyly with hypertension; Cornea plana 2; Aarskog syndrome; Multiple epiphyseal dysplasia 5 or Dominant; Corneal endothelial dystrophy type 2; Aminoacylase 1 deficiency; Delayed speech and language development; Nicolaides-Baraitser syndrome; Enterokinase deficiency; Ectrodactyly, ectodermal dysplasia, and cleft lip/palate syndrome 3; Arthrogryposis multiplex congenita, distal, X-linked; Perrault syndrome 4; Jervell and Lange-Nielsen syndrome 2; Hereditary Nonpolyposis Colorectal Neoplasms; Robinow syndrome, autosomal recessive, autosomal recessive, with brachy-syn-polydactyly, Neurofibrosarcoma; Cytochrome-c oxidase deficiency; Vesicoureteral reflux 8; Dopamine beta hydroxylase deficiency; Carbohydrate-deficient glycoprotein syndrome type I and II; Progressive familial intrahepatic cholestasis 3; Benign familial neonatal-infantile seizures; Pancreatitis, chronic, susceptibility to; Rhizomelic chondrodysplasia punctata type 2 and type 3; Disordered steroidogenesis due to cytochrome p450 oxidoreductase deficiency; Deafness with labyrinthine aplasia microtia and microdontia (FAMM); Rothmund-Thomson syndrome; Cortical dysplasia, complex, with other brain malformations 5 and 6; Myasthenia, familial infantile, 1; Trichorhinophalangeal dysplasia type I; Worth disease; Splenic hypoplasia; Molybdenum cofactor deficiency, complementation group A; Sebastian syndrome; Progressive familial intrahepatic cholestasis 2 and 3; Weill-Marchesani syndrome 1 and 3; Microcephalic osteodysplastic primordial dwarfism type 2; Surfactant metabolism dysfunction, pulmonary, 2 and 3; Severe X-linked myotubular myopathy; Pancreatic cancer 3; Platelet-type bleeding disorder 15 and 8; Tyrosinase-positive oculocutaneous albinism; Borrone Di Rocco Crovato syndrome; ATR-X syndrome; Sucrase-isomaltose deficiency; Complement component 4, partial deficiency of, due to dysfunctional cl inhibitor; Congenital central hypoventilation; Infantile hypophosphatasia; Plasminogen activator inhibitor type I deficiency; Malignant lymphoma, non-Hodgkin; Hyperomithinemia-hyperammonemia-homocitrullinuria syndrome; Schwartz Jampel syndrome type 1; Fetal hemoglobin quantitative trait locus 1; Myopathy, distal, with anterior tibial onset; Noonan syndrome 1 and 4, LEOPARD syndrome 1; Glaucoma 1, open angle, e, F, and G; Kenny-Caffey syndrome type 2; PTEN hamartoma tumor syndrome; Duchenne muscular dystrophy; Insulin-resistant diabetes mellitus and acanthosis nigricans; Microphthalmia, isolated 3, 5, 6, 8, and with coloboma 6; Raine syndrome; Premature ovarian failure 4, 5, 7, and 9; Allan-Hemdon-Dudley syndrome; Citrullinemia type I; Alzheimer disease, familial, 3, with spastic paraparesis and apraxia; Familial hemiplegic migraine types 1 and 2; Ventriculomegaly with cystic kidney disease; Pseudoxanthoma elasticum; Homocysteinemia due to MTHFR deficiency, CBS deficiency, and Homocystinuria, pyridoxine-responsive; Dilated cardiomyopathy 1A, 1AA, 1C, 1G, IBB, 1DD, IFF, IHH, II, IKK, IN, IS, 1Y, and 3B; Muscle AMP guanine oxidase deficiency; Familial cancer of breast; Hereditary sideroblastic anemia; Myoglobinuria, acute recurrent, autosomal recessive; Neuroferritinopathy; Cardiac arrhythmia; Glucose transporter type 1 deficiency syndrome; Holoprosencephaly sequence; Angiopathy, hereditary, with nephropathy, aneurysms, and muscle cramps; Isovaleryl-CoA dehydrogenase deficiency; Kallmann syndrome 1, 2, and 6; Permanent neonatal diabetes mellitus; Acrocallosal syndrome, Schinzel type; Gordon syndrome; MYH9 related disorders; Donnai Barrow syndrome; Severe congenital neutropenia and 6, autosomal recessive; Charcot-Marie-Tooth disease, types ID and IVF; Coffin-Lowry syndrome; mitochondrial 3-hydroxy-3-methylglutaryl-CoA synthase deficiency; Hypomagnesemia, seizures, and mental retardation; Ischiopatellar dysplasia; Multiple congenital anomalies—hypotonia—seizures syndrome 3; Spastic paraplegia 50, autosomal recessive; Short stature with nonspecific skeletal abnormalities; Severe myoclonic epilepsy in infancy; Propionic academia; Adolescent nephronophthisis; Macrocephaly, macrosomia, facial dysmorphism syndrome; Stargardt disease 4; Ehlers-Danlos syndrome type 7 (autosomal recessive), classic type, type 2 (progeroid), hydroxylysine-deficient, type 4, type 4 variant, and due to tenascin-X deficiency; Myopia 6; Coxa plana; Familial cold autoinflammatory syndrome 2; Malformation of the heart and great vessels; von Willebrand disease type 2M and type 3; Deficiency of galactokinase; Brugada syndrome 1; X-linked ichthyosis with stearyl-sulfatase deficiency; Congenital ocular coloboma; Histiocytosis-lymphadenopathy plus syndrome; Aniridia, cerebellar ataxia, and mental retardation; Left ventricular noncompaction 3; Amyotrophic lateral sclerosis types 1, 6, 15 (with or without frontotemporal dementia), 22 (with or without frontotemporal dementia), and 10; Osteogenesis imperfecta type 12, type 5, type 7, type 8, type I, type III, with normal sclerae, dominant form, recessive perinatal lethal; Hematologic neoplasm; Favism, susceptibility to; Pulmonary Fibrosis And/Or Bone Marrow Failure. Telomere-Related, 1 and 3; Dominant hereditary optic atrophy; Dominant dystrophic epidermolysis bullosa with absence of skin; Muscular dystrophy, congenital, megaconial type; Multiple gastrointestinal atresias; McCune-Albright syndrome; Nail-patella syndrome; McLeod neuroacanthocytosis syndrome; Common variable immunodeficiency 9; Partial hypoxanthine-guanine phosphoribosyltransferase deficiency; Pseudohypoaldosteronism type 1 autosomal dominant and recessive and type 2; Urocanate hydratase deficiency; Heterotopia; Meckel syndrome type 7; Ch\xc3\xa9diak-Higashi syndrome, Chediak-Higashi syndrome, adult type; Severe combined immunodeficiency due to ADA deficiency, with microcephaly, growth retardation, and sensitivity to ionizing radiation, atypical, autosomal recessive, T cell-negative, B cell-positive, NK cell-negative of NK-positive; Insulin resistance; Deficiency of steroid 11-beta-monooxygenase; Popliteal pterygium syndrome; Pulmonary arterial hypertension related to hereditary hemorrhagic telangiectasia; Deafness, autosomal recessive 1A, 2, 3, 6, 8, 9, 12, 15, 16, 18b, 22, 28, 31, 44, 49, 63, 77, 86, and 89; Primary hyperoxaluria, type I, type, and type III; Paramyotonia congenita of von Eulenburg; Desbuquois syndrome; Carnitine palmitoyltransferase I, II, II (late onset), and II (infantile) deficiency; Secondary hypothyroidism; Mandibulofacial dysostosis, Treacher Collins type, autosomal recessive; Cowden syndrome 1; Li-Fraumeni syndrome 1; Asparagine synthetase deficiency; Malattia leventinese; Optic atrophy 9; Infantile convulsions and paroxysmal choreoathetosis, familial; Ataxia with vitamin E deficiency; Islet cell hyperplasia; Miyoshi muscular dystrophy 1; Thrombophilia, hereditary, due to protein C deficiency, autosomal dominant and recessive; Fechtner syndrome; Properdin deficiency, X-linked; Mental retardation, stereotypic movements, epilepsy, and/or cerebral malformations; Creatine deficiency, X-linked; Pilomatrixoma; Cyanosis, transient neonatal and atypical nephropathic; Adult onset ataxia with oculomotor apraxia; Hemangioma, capillary infantile; PC-K6a; Generalized dominant dystrophic epidermolysis bullosa; Pelizaeus-Merzbacher disease; Myopathy, centronuclear, 1, congenital, with excess of muscle spindles, distal, 1, lactic acidosis, and sideroblastic anemia 1, mitochondrial progressive with congenital cataract, hearing loss, and developmental delay, and tubular aggregate, 2; Benign familial neonatal seizures 1 and 2; Primary pulmonary hypertension; Lymphedema, primary, with myelodysplasia; Congenital long QT syndrome; Familial exudative vitreoretinopathy, X-linked; Autosomal dominant hypohidrotic ectodermal dysplasia; Primordial dwarfism; Familial pulmonary capillary hemangiomatosis; Carnitine acylcarnitine translocase deficiency; Visceral myopathy; Familial Mediterranean fever and Familial mediterranean fever, autosomal dominant; Combined partial and complete 17-alpha-hydroxylase/17, 20-lyase deficiency; Oto-palato-digital syndrome, type I; Nephrolithiasis/osteoporosis, hypophosphatemic, 2; Familial type 1 and 3 hyperlipoproteinemia; Phenotypes; CHARGE association; Fuhrmann syndrome; Hypotrichosis-lymphedema-telangiectasia syndrome; Chondrodysplasia Blomstrand type; Acroerythrokeratoderma; Slowed nerve conduction velocity, autosomal dominant; Hereditary cancer-predisposing syndrome; Craniodiaphyseal dysplasia, autosomal dominant; Spinocerebellar ataxia autosomal recessive 1 and 16; Proprotein convertase 1/3 deficiency; D-2-hydroxyglutaric aciduria 2; Hyperekplexia 2 and Hyperekplexia hereditary; Central core disease; Opitz G/BBB syndrome; Cystic fibrosis; Thiel-Behnke corneal dystrophy; Deficiency of bisphosphoglycerate mutase; Mitochondrial short-chain Enoyl-CoA Hydratase 1 deficiency; Ectodermal dysplasia skin fragility syndrome; Wolfram-like syndrome, autosomal dominant; Microcytic anemia; Pyruvate carboxylase deficiency; Leukocyte adhesion deficiency type I and III; Multiple endocrine neoplasia, types 1 and 4; Transient bullous dermolysis of the newborn; Primrose syndrome; Non-small cell lung cancer; Congenital muscular dystrophy; Lipase deficiency combined; COLE-CARPENTER SYNDROME 2; Atrioventricular septal defect and common atrioventricular junction; Deficiency of xanthine oxidase; Waardenburg syndrome type 1, 4C, and 2E (with neurologic involvement); Stickler syndrome, types 1 (nonsyndromic ocular) and 4; Corneal fragility keratoglobus, blue sclerae and joint hypermobility; Microspherophakia; Chudley-McCullough syndrome; Epidermolysa bullosa simplex and limb girdle muscular dystrophy, simplex with mottled pigmentation, simplex with pyloric atresia, simplex, autosomal recessive, and with pyloric atresia; Rett disorder; Abnormality of neuronal migration; Growth hormone deficiency with pituitary anomalies; Leigh disease; Keratosis palmoplantaris striata 1; Weissenbacher-Zweymuller syndrome; Medium-chain acyl-coenzyme A dehydrogenase deficiency; UDPglucose-4-epimerase deficiency; susceptibility to Autism, X-linked 3; Rhegmatogenous retinal detachment, autosomal dominant; Familial febrile seizures 8; Ulna and fibula absence of with severe limb deficiency; Left ventricular noncompaction 6; Centromeric instability of chromosomes 1, 9 and 16 and immunodeficiency; Hereditary diffuse leukoencephalopathy with spheroids; Cushing syndrome; Dopamine receptor d2, reduced brain density of; C-like syndrome; Renal dysplasia, retinal pigmentary dystrophy, cerebellar ataxia and skeletal dysplasia; Ovarian dysgenesis 1; Pierson syndrome; Polyneuropathy, hearing loss, ataxia, retinitis pigmentosa, and cataract; Progressive intrahepatic cholestasis; autosomal dominant, autosomal recessive, and X-linked recessive Alport syndromes; Angelman syndrome; Amish infantile epilepsy syndrome; Autoimmune lymphoproliferative syndrome, type 1a; Hydrocephalus, Marfanoid habitus; Bare lymphocyte syndrome type 2, complementation group E; Recessive dystrophic epidermolysis bullosa; Factor H, VII, X, v and factor viii, combined deficiency of 2, xiii, a subunit, deficiency; Zonular pulverulent cataract 3; Warts, hypogammaglobulinemia, infections, and myelokathexis; Benign hereditary chorea; Deficiency of hyaluronoglucosaminidase; Microcephaly, hiatal hernia and nephrotic syndrome; Growth and mental retardation, mandibulofacial dysostosis, microcephaly, and cleft palate; Lymphedema, hereditary, id; Delayed puberty; Apparent mineralocorticoid excess; Generalized arterial calcification of infancy 2; METHYLMALONIC ACIDURIA, mut(0) TYPE; Congenital heart disease, multiple types, 2; Familial hypoplastic, glomerulocystic kidney; Cerebrooculofacioskeletal syndrome 2, Stargardt disease 1; Mental retardation, autosomal recessive 15, 44, 46, and 5; Prolidase deficiency; Methylmalonic aciduria cblB type; Oguchi disease; Endocrine-cerebroosteodysplasia; Lissencephaly 1, 2 (X-linked), 3, 6 (with microcephaly), X-linked; Somatotroph adenoma; Gamstorp-Wohlfart syndrome; Lipid proteinosis; Inclusion body myopathy 2 and 3; Enlarged vestibular aqueduct syndrome; Osteoporosis with pseudoglioma; Acquired long QT syandrome; Phenylketonuria; CHOPS syndrome; Global developmental delay; Bietti crystalline corneoretinal dystrophy; Noonan syndrome-like disorder with or without juvenile myelomonocytic leukemia; Congenital erythropoietic porphyria; Atrophia bulborum hereditaria; Paragangliomas 3; Van der Woude syndrome; Aromatase deficiency; Birk Barel mental retardation dysmorphism syndrome; Amyotrophic lateral sclerosis type 5; Methemoglobinemia types I 1 and 2; Congenital stationary night blindness, type 1A, IB, 1C, IE, IF, and 2A; Seizures; Thyroid cancer, follicular; Lethal congenital contracture syndrome 6; Distal hereditary motor neuronopathy type 2B; Sex cord-stromal tumor; Epileptic encephalopathy, childhood-onset, early infantile, 1, 19, 23, 25, 30, and 32; Myofibrillar myopathy 1 and ZASP-related; Cerebellar ataxia infantile with progressive external ophthalmoplegia; Purine-nucleoside phosphorylase deficiency; Forebrain defects; Epileptic encephalopathy Lennox-Gastaut type; Obesity; 4, Left ventricular noncompaction 10; Verheij syndrome; Mowat-Wilson syndrome; Odontotrichomelic syndrome; Patterned dystrophy of retinal pigment epithelium; Lig4 syndrome; Barakat syndrome; IRAK4 deficiency; Somatotroph adenoma; Branched-chain ketoacid dehydrogenase kinase deficiency; Cystinuria; Familial aplasia of the vernis; Succinyl-CoA acetoacetate transferase deficiency; Scapuloperoneal spinal muscular atrophy; Pigmentary retinal dystrophy; Glanzmann thrombasthenia; Primary open angle glaucoma juvenile onset 1; Aicardi Goutieres syndromes 1, 4, and 5; Renal dysplasia; Intrauterine growth retardation, metaphyseal dysplasia, adrenal hypoplasia congenita, and genital anomalies; Beaded hair; Short stature, onychodysplasia, facial dysmorphism, and hypotrichosis; Metachromatic leukodystrophy; Cholestanol storage disease; Three M syndrome 2; Leber congenital amaurosis 11, 12, 13, 16, 4, 7, and 9; Mandibuloacral dysplasia with type A or B lipodystrophy, atypical; Meier-Gorlin syndromes 1 and 4; Hypotrichosis 8 and 12; Short QT syndrome 3; Ectodermal dysplasia 1 ib; Anonychia; Pseudohypoparathyroidism type 1A, Pseudopseudohypoparathyroidism; Leber optic atrophy; Bainbridge-Ropers syndrome; Weaver syndrome; Short stature, auditory canal atresia, mandibular hypoplasia, skeletal abnormalities; Deficiency of alpha-mannosidase; Macular dystrophy, vitelliform, adult-onset; Glutaric aciduria, type 1; Gangliosidosis GM1 type1 (with cardiac involvement) 3; Mandibuloacral dysostosis; Hereditary lymphedema type I; Atrial standstill 2; Kabuki make-up syndrome; Bethlem myopathy and Bethlem myopathy 2; Myeloperoxidase deficiency; Fleck corneal dystrophy; Hereditary acrodermatitis enteropathica; Hypobetalipoproteinemia, familial, associated with apob32; Cockayne syndrome type A; Hyperparathyroidism, neonatal severe; Ataxia-telangiectasia-like disorder; Pendred syndrome; I blood group system; Familial benign pemphigus; Visceral heterotaxy 5, autosomal; Nephrogenic diabetes insipidus, Nephrogenic diabetes insipidus, X-linked; Minicore myopathy with external ophthalmoplegia; Perry syndrome; hypohidrotic/hair/tooth type, autosomal recessive; Hereditary pancreatitis; Mental retardation and microcephaly with pontine and cerebellar hypoplasia; Glycogen storage disease 0 (muscle), II (adult form), IXa2, IXc, type 1A; Osteopathia striata with cranial sclerosis; Gluthathione synthetase deficiency; Brugada syndrome and Brugada syndrome 4; Endometrial carcinoma; Hypohidrotic ectodermal dysplasia with immune deficiency; Cholestasis, intrahepatic, of pregnancy 3; Bernard-Soulier syndrome, types A1 and A2 (autosomal dominant); Salla disease; Ornithine aminotransferase deficiency; PTEN hamartoma tumor syndrome; Distichiasis-lymphedema syndrome; Corticosteroid-binding globulin deficiency; Adult neuronal ceroid lipofuscinosis; Dejerine-Sottas disease; Tetraamelia, autosomal recessive; Senior-Loken syndrome 4 and 5; Glutaric acidemia IIA and IIB; Aortic aneurysm, familial thoracic 4, 6, and 9; Hyperphosphatasia with mental retardation syndrome 2, 3, and 4; Dyskeratosis congenita X-linked; Arthrogryposis, renal dysfunction, and cholestasis 2; Bannayan-Riley-Ruvalcaba syndrome; 3-Methylglutaconic aciduria; Isolated 17,20-lyase deficiency; Gorlin syndrome; Hand foot uterus syndrome; Tay-Sachs disease, B1 variant, Gm2-gangliosidosis (adult), Gm2-gangliosidosis (adult-onset); Dowling-degos disease 4; Parkinson disease 14, 15, 19 (juvenile-onset), 2, 20 (early-onset), 6, (autosomal recessive early-onset, and 9; Ataxia, sensory, autosomal dominant; Congenital microvillous atrophy; Myoclonic-Atonic Epilepsy; Tangier disease; 2-methyl-3-hydroxybutyric aciduria; Familial renal hypouricemia; Schizencephaly; Mitochondrial DNA depletion syndrome 4B, MNGIE type; Feingold syndrome 1; Renal carnitine transport defect; Familial hypercholesterolemia; Townes-Brocks-branchiootorenal-like syndrome; Griscelli syndrome type 3; Meckel-Gruber syndrome; Bullous ichthyosiform erythroderma; Neutrophil immunodeficiency syndrome; Myasthenic Syndrome, Congenital, 17, 2A (slow-channel), 4B (fast-channel), and without tubular aggregates; Microvascular complications of diabetes 7; McKusick Kaufman syndrome; Chronic granulomatous disease, autosomal recessive cytochrome b-positive, types 1 and 2; Arginino succinate lyase deficiency; Mitochondrial phosphate carrier and pyruvate carrier deficiency; Lattice corneal dystrophy Type III; Ectodermal dysplasia-syndactyly syndrome 1; Hypomyelinating leukodystrophy 7; Mental retardation, autosomal dominant 12, 13, 15, 24, 3, 30, 4, 5, 6, and 9; Generalized epilepsy with febrile seizures plus, types 1 and 2; Psoriasis susceptibility 2; Frank Ter Haar syndrome; Thoracic aortic aneurysms and aortic dissections; Crouzon syndrome; Granulosa cell tumor of the ovary; Epidermolytic palmoplantar keratoderma; Leri Weill dyschondrosteosis; 3 beta-Hydroxysteroid dehydrogenase deficiency; Familial restrictive cardiomyopathy 1; Autosomal dominant progressive external ophthalmoplegia with mitochondrial DNA deletions 1 and 3; Antley-Bixler syndrome with genital anomalies and disordered steroidogenesis; Hajdu-Cheney syndrome; Pigmented nodular adrenocortical disease, primary, 1; Episodic pain syndrome, familial, 3; Dejerine-Sottas syndrome, autosomal dominant; FG syndrome and FG syndrome 4; Dendritic cell, monocyte, B lymphocyte, and natural killer lymphocyte deficiency; Hypothyroidism, congenital, nongoitrous, 1; Miller syndrome; Nemaline myopathy 3 and 9; Oligodontia-colorectal cancer syndrome; Cold-induced sweating syndrome 1; Van Buchem disease type 2; Glaucoma 3, primary congenital, d; Citrullinemia type I and II; Nonaka myopathy; Congenital muscular dystrophy due to partial LAMA2 deficiency; Myoneural gastrointestinal encephalopathy syndrome; Leigh syndrome due to mitochondrial complex I deficiency; Medulloblastoma; Pyruvate dehvdrogenase El-alpha deficiency; Carcinoma of colon; Nance-Horan syndrome; Sandhoff disease, adult and infantil types; Arthrogryposis renal dysfunction cholestasis syndrome; Autosomal recessive hypophosphatemic bone disease; Doyne honeycomb retinal dystrophy; Spinocerebellar ataxia 14, 21, 35, 40, and 6; Lewy body dementia; RRM2B-related mitochondrial disease; Brody myopathy; Megalencephaly-polymicrogyria-polydactyly-hydrocephalus syndrome 2; Usher syndrome, types I, IB, ID, IG, 2A, 2C, and 2D; hypocalcification type and hypomaturation type, IIA1 Amelogenesis imperfecta; Pituitary hormone deficiency, combined 1, 2, 3, and 4; Cushing symphalangism; Renal tubular acidosis, distal, autosomal recessive, with late-onset sensorineural hearing loss, or with hemolytic anemia; Infantile nephronophthisis; Juvenile polyposis syndrome; Sensory ataxic neuropathy, dysarthria, and ophthalmoparesis; Deficiency of 3-hydroxyacyl-CoA dehydrogenase; Parathyroid carcinoma; X-linked agammaglobulmemia; Megaloblastic anemia, thiamine-responsive, with diabetes mellitus and sensorineural deafness; Multiple sulfatase deficiency; Neurodegeneration with brain iron accumulation 4 and 6; Cholesterol monooxygenase (side-chain cleaving) deficiency; hemolytic anemia due to Adenylosuccinate lyase deficiency; Myoclonus with epilepsy with ragged red fibers; Pitt-Hopkins syndrome; Multiple pterygium syndrome Escobar type; Homocystinuria-Megaloblastic anemia due to defect in cobalamin metabolism, cblE complementation type; Cholecystitis; Spherocytosis types 4 and 5; Multiple congenital anomalies; Xeroderma pigmentosum, complementation group b, group D, group E, and group G; Leiner disease; Groenouw corneal dystrophy type I; Coenzyme Q10 deficiency, primary 1, 4, and 7; Distal spinal muscular atrophy, congenital nonprogressive; Warburg micro syndrome 2 and 4; Bile acid synthesis defect, congenital, 3; Acth-independent macronodular adrenal hyperplasia 2; Acrocapitofemoral dysplasia; Paget disease of bone, familial; Severe neonatal-onset encephalopathy with microcephaly; Zimmermann-Laband syndrome and Zimmermann-Laband syndrome 2; Reifenstein syndrome; Familial hypokalemia-hypomagnesemia; Photosensitive trichothiodystrophy; Adult junctional epidermolysis bullosa; Lung cancer; Freeman-Sheldon syndrome; Hyperinsulinism-hyperammonemia syndrome; Posterior polar cataract type 2; Sclerocornea, autosomal recessive; Juvenile GM>1<gangliosidosis; Cohen syndrome; Hereditary Paraganglioma-Pheochromocytoma Syndromes; Neonatal insulin-dependent diabetes mellitus; Hypochondrogenesis; Floating-Harbor syndrome; Cutis laxa with osteodystrophy and with severe pulmonary, gastrointestinal, and urinary abnormalities; Congenital contractures of the limbs and face, hypotonia, and developmental delay; Dyskeratosis congenita autosomal dominant and autosomal dominant, 3; Histiocytic medullary reticulosis; Costello syndrome; Immunodeficiency 15, 16, 19, 30, 31C, 38, 40, 8, due to defect in cd3-zeta, with hyper IgM type 1 and 2, and X-Linked, with magnesium defect, Epstein-Barr virus infection, and neoplasia; Atrial septal defects 2, 4, and 7 (with or without atrioventricular conduction defects); GTP cyclohydrolase I deficiency; Talipes equinovarus; Phosphoglycerate kinase 1 deficiency; Tuberous sclerosis 1 and 2; Autosomal recessive congenital ichthyosis 1, 2, 3, 4A, and 4B; and Familial hypertrophic cardiomyopathy 1, 2, 3, 4, 7, 10, 23 and 24.

### Indications by Tissue

[0910] Additional suitable diseases and disorders that can be treated by the systems and methods provided herein include, without limitation, diseases of the central nervous system (CNS) (see exemplary diseases and affected genes in Table 13), diseases of the eye (see exemplary diseases and affected genes in Table 14), diseases of the heart (see exemplary diseases and affected genes in Table 15), diseases of the hematopoietic stem cells (HSC) (see exemplary diseases and affected genes in Table 16), diseases of the kidney (see exemplary diseases and affected genes in Table 17), diseases of the liver (see exemplary diseases and affected genes in Table 18), diseases of the lung (see exemplary diseases and affected genes in Table 19), diseases of the skeletal muscle (see exemplary diseases and affected genes in Table 20), and diseases of the skin (see exemplary diseases and affected genes in Table 21). Table 22 provides exemplary protective mutations that reduce risks of the indicated diseases. In some embodiments, a Gene Writer system described herein is used to treat an indication of any of Tables 13-21. In some embodiments, the GeneWriter system modifies a target site in genomic DNA in a cell, wherein the target site is in a gene of any of Tables 13-21, e.g., in a subject having the corresponding indication listed in any of Tables 13-21. In some embodiments, the GeneWriter corrects a mutation in the gene. In some embodiments, the GeneWriter inserts a sequence that had been deleted from the gene (e.g., through a disease-causing mutation). In some embodiments, the GeneWriter deletes a sequence that had been duplicated in the gene (e.g., through a disease-causing mutation). In some embodiments, the GeneWriter replaces a mutation (e.g., a disease-causing mutation) with the corresponding wild-type sequence. In some embodiments, the mutation is a substitution, insertion, deletion, or inversion.

TABLE 13
CNS diseases and genes affected.

| | Gene |
|---|---|
| Disease | Affected |
| Alpha-mannosidosis | MAN2B1 |
| Ataxia-telangiectasia | ATM |
| CADASIL | NOTCH3 |
| Canavan disease | ASPA |
| Carbamoyl-phosphate synthetase 1 deficiency | CPS1 |
| CLN1 disease | PPT1 |
| CLN2 Disease | TPP1 |
| CLN3 Disease (Juvenile neuronal ceroid lipofuscinosis, | CLN3 |
| Batten Disease) | |
| Coffin-Lowry syndrome | RPS6KA3 |
| Congenital myasthenic syndrome 5 | COLQ |
| Cornelia de Lange syndrome (NIPBL) | NIPBL |
| Cornelia de Lange syndrome (SMC1A) | SMC1A |
| Dravet syndrome (SCN1A) | SCN1A |
| Glycine encephalopathy (GLDC) | GLDC |
| GM1 gangliosidosis | GLB1 |
| Huntington's Disease | HTT |
| Hydrocephalus with stenosis of the aqueduct of Sylvius | L1CAM |
| Leigh Syndrome | SURF1 |
| Metachromatic leukodystrophy (ARSA) | ARSA |
| MPS type 2 | IDS |
| MPS type 3 | SGSH |
| Mucolipidosis IV | MCOLN1 |
| Neurofibromatosis Type 1 | NF1 |
| Neurofibromatosis type 2 | NF2 |
| Pantothenate kinase-associated neurodegeneration | PANK2 |
| Pyridoxine-dependent epilepsy | ALDH7A1 |
| Rett syndrome (MECP2) | MECP2 |
| Sandhoff disease | HEXB |
| Semantic dementia (Frontotemporal dementia) | MAPT |
| Spinocerebellar ataxia with axonal neuropathy (Ataxia with | SETX |
| Oculomotor Apraxia) | |
| Tay-Sachs disease | HEXA |
| X-linked Adrenoleukodystrophy | ABCD1 |

TABLE 14
Eye diseases and genes affected.

| Disease | Gene Affected |
|---|---|
| Achromatopsia | CNGB3 |
| Amaurosis Congenita (LCA1) | GUCY2D |
| Amaurosis Congenita (LCA10) | CEP290 |
| Amaurosis Congenita (LCA2) | RPE65 |
| Amaurosis Congenita (LCA8) | CRB1 |
| Choroideremia | CHM |
| Cone Rod Dystrophy (ABCA4) | ABCA4 |
| Cone Rod Dystrophy (CRX) | CRX |
| Cone Rod Dystrophy (GUCY2D) | GUCY2D |
| Cystinosis, Ocular Nonnephropathic | CTNS |
| Lattice corneal dystrophy type I | TGFBI |
| Macular Corneal Dystrophy (MCD) | CHST6 |
| Optic Atrophy | OPA1 |
| Retinitis Pigmentosa (AR) | USH2A |
| Retinitis Rigmentosa (AD) | RHO |
| Stargardt Disease | ABCA4 |
| Vitelliform Macular Dystrophy | BEST1; PRPH2 |

TABLE 15
Heart diseases and genes affected.

| | Gene |
|---|---|
| Disease | Affected |
| Arrhythmogenic right ventricular cardiomyopathy (ARVC) | PKP2 |
| Barth syndrome | TAZ |
| Becker muscular dystrophy | DMD |
| Brugada syndrome | SCN5A |
| Catecholaminergic polymorphic ventricular tachycardia | RYR2 |
| (RYR2) | |
| Dilated cardiomyopathy (LMNA) | LMNA |
| Dilated cardiomyopathy (TTN) | TTN |
| Duchenne muscular dystrophy | DMD |
| Emery-Dreifuss Muscular Dystrophy Type I | EMD |
| Familial hypertrophic cardiomyopathy | MYH7 |
| Familial hypertrophic cardiomyopathy | MYBPC3 |
| Jervell Lange-Nielsen syndrome | KCNQ1 |
| LCHAD deficiency | HADHA |
| Limb-girdle muscular dystrophy type IB (Emery-Dreifuss | LMNA |
| EDMD2) | |
| Limb-girdle muscular dystrophy, type 2D | SGCA |
| Long QT syndrome 1 (Romano Ward) | KCNQ1 |

TABLE 16
HSC diseases and genes affected.

| | Gene |
|---|---|
| Disease | Affected |
| ADA-SCID | ADA |
| Adrenoleukodystrophy (CALD) | ABCD1 |
| Alpha-mannosidosis | MAN2B1 |
| Chronic granulomatous disease | CYBB; CYBA; |
| | NCF1; NCF2; |
| | NCF4 |
| Common variable immunodeficiency | TNFRSF13B |
| Fanconi anemia | FANCA; FANCC; |
| | FANCG |
| Gaucher disease | GBA |
| Globoid cell leukodystrophy (Krabbe disease) | GALC |
| Hemophagocytic lymphohistiocytosis | PRF1; STX11; |
| | STXBP2; UNC13D |
| IL-7R SCID | IL7R |
| JAK-3 SCID | JAK3 |
| Malignant infantile osteopetrosis- autosomal | TCIRG1; |
| recessive osteopetrosis | Many genes |
| | implicated |
| Metachromatic leukodystrophy | ARSA; PSAP |
| MPS 1S (Scheie syndrome) | IDUA |
| MPS2 | IDS |
| MPS7 | GUSB |
| Mucolipidosis II | GNPTAB |
| Niemann-Pick disease A and B | SMPD1 |
| Niemann-Pick disease C | NPC1 |
| Paroxysmal Nocturnal Hemoglobinuria | PIGA |
| Pompe disease | GAA |
| Pyruvate kinase deficiency (PKD) | PKLR |
| RAG 1/2 Deficiency (SCID with granulomas) | RAG1/RAG2 |
| Severe Congenital Neutropenia | ELANE; HAX1 |
| Sickle cell disease (SCD) | HBB |
| Tay Sachs | HEXA |
| Thalassemia | HBB |
| Wiskott-Aldrich Syndrome | WAS |
| X-linked agammaglobulinemia | BTK |
| X-linked SCID | IL2RG |

TABLE 17
Kidney diseases and genes affected.

| | Gene |
|---|---|
| Disease | Affected |
| Alport syndrome | COL4A5 |
| Autosomal dominant polycystic kidney disease (PKD1) | PKD1 |
| Autosomal dominant polycystic kidney disease (PKD2) | PDK2 |
| Autosomal dominant tubulointerstitial kidney disease | MUC1 |
| (MUC1) | |
| Autosomal dominant tubulointerstitial kidney disease | UMOD |
| (UMOD) | |
| Autosomal recessive polycystic kidney disease | PKHD1 |
| Congenital nephrotic syndrome | NPHS2 |
| Cystinosis | CTNS |

TABLE 18
Liver diseases and genes affected.

| | Gene |
|---|---|
| Disease | Affected |
| Acute intermittent porphyria | HMBS |
| Alagille syndrome | JAG1 |
| Alpha-1-antitrypsin deficiency | SERPINA1 |
| Carbamoyl phosphate synthetase I deficiency | CPS1 |
| Citrullinemia I | ASS1 |
| Crigler-Najjar | UGT1A1 |
| Fabry | LPL |
| Familial chylomicronemia syndrome | GLA |
| Gaucher | GBE1 |
| GSD IV | GBA |
| Heme A | F8 |
| Heme B | F9 |
| Hereditary amyloidosis (hTTR) | TTR |
| Hereditary angioedema | SERPING1 |
| | (KLKB1 |
| | for CRISPR) |
| HoFH | LDLRAP1 |
| Hypercholesterolemia | PCSK9 |
| Methylmalonic acidemia | MMUT |
| MPS II | IDS |
| MPS III | Type IIIa: SGSH |
| | Type IIIb: NAGLU |
| | Type IIIc: HGSNAT |
| | Type IIId: GNS |
| MPS IV | Type IVA: GALNS |
| | Type IVB: GLB1 |
| MPS VI | ARSB |
| MSUD | Type Ia: BCKDHA |
| | Type Ib: BCKDHB |
| | Type II: DBT |
| OTC Deficiency | OTC |
| Polycystic Liver Disease | PRKCSH |
| Pompe | GAA |
| Primary Hyperoxaluria 1 | AGXT (HAO1 or |
| | LDHA for CRISPR) |
| Progressive familial intrahepatic cholestasis type 1 | ATP8B1 |
| Progressive familial intrahepatic cholestasis type 2 | ABCB11 |
| Progressive familial intrahepatic cholestasis type 3 | ABCB4 |
| Propionic acidemia | PCCB; PCCA |
| Wilson's Disease | ATP7B |
| Glycogen storage disease, Type la | G6PC |
| Glycogen storage disease, Type IHb | AGL |
| Isovaleric acidemia | IVD |
| Wolman disease | LIPA |

TABLE 19
Lung diseases and genes affected.

| | Gene |
|---|---|
| Disease | Affected |
| Alpha-1 antitrypsin deficiency | SERPINA1 |
| Cystic fibrosis | CFTR |
| Primary ciliary dyskinesia | DNAI1 |
| Primary ciliary dyskinesia | DNAH5 |
| Primary pulmonary hypertension I | BMPR2 |
| Surfactant Protein B (SP-B) Deficiency (pulmonary | SFTPB |
| surfactant metabolism dysfunction 1) | |

TABLE 20
Skeletal muscle diseases and genes affected.

| | Gene |
|---|---|
| Disease | Affected |
| Becker muscular dystrophy | DMD |
| Becker myotonia | CLCN1 |
| Bethlem myopathy | COL6A2 |
| Centronuclear myopathy, X-linked (myotubular) | MTM1 |
| Congenital myasthenic syndrome | CHRNE |
| Duchenne muscular dystrophy | DMD |
| Emery-Dreifuss muscular dystrophy, AD | LMNA |
| Facioscapulohumeral Muscular Dystrophy | DUX4 - D4Z4 |
| | chromosomal |
| | region |
| Hyperkalemic periodic paralysis | SCN4A |
| Hypokalemic periodic paralysis | CACNA1S |
| Limb-girdle muscular dystrophy 2A | CAPN3 |
| Limb-girdle muscular dystrophy 2B | DYSF |
| Limb-girdle muscular dystrophy, type 2D | SGCA |
| Miyoshi muscular dystrophy 1 | DYSF |
| Paramyotonia congenita | SCN4A |
| Thomsen myotonia | CLCN1 |
| VCP myopathy (IBMPFD) 1 | VCP |

TABLE 21
Skin diseases and genes affected.

| | Gene |
|---|---|
| Disease | Affected |
| Epidermolysis Bullosa Dystrophica Dominant | COL7A1 |
| Epidermolysis Bullosa Dystrophica Recessive | COL7A1 |
| (Hallopeau-Siemens) | |
| Epidermolysis Bullosa Junctional | LAMB3 |
| Epidermolysis Bullosa Simplex | KRT5; KRT14 |
| Epidermolytic Ichthyosis | KRT1; KRT10 |
| Hailey-Hailey Disease | ATP2C1 |
| Lamellar Ichthyosis/Nonbullous Congenital | TGM1 |
| Ichthyosiform Erythroderma (ARCI) | |
| Netherton Syndrome | SPINK5 |

TABLE 22
Exemplary protective mutations that reduce disease risk.

| Disease | Gene | Exemplary Protective Mutation |
|---|---|---|
| Alzheimer's | APP | A673T |
| Parkinson's | SGK1 | |
| Diabetes (Type II) | SLC30A8 | p. Arg138X; p. Lys34SerfsX50 |
| Cardiovascular | PCSK9 | R46L |
| Disease | | |
| Cardiovascular | ASGR1 | NM_001671.4, c. 284-36_283 + |
| Disease | | 33delCTGGGGCTGGGG (SEQ ID NO: |
| | | 1605); NP_001662.1, p. W158X |
| Cardiovascular | NPC1L1 | p.Arg406X |
| Disease | | |
| Cardiovascular | APOC3 | R19X; IVS2 + 1G→A; A43T |
| Disease | | |
| Cardiovascular | LPA | |
| Disease | | |
| Cardiovascular | ANGPTL4 | E40K |
| Disease | | |
| Cardiovascular | ANGPTL3 | p. Ser17Ter; p. Asn121fs; p. Asn147fs; |
| Disease | | c. 495 + 6T→C |
| HIV infection | CCR5 | CCR5-delta32 |

### Pathogenic Mutations

[0911] In some embodiments, the systems or methods provided herein can be used to correct a pathogenic mutation. The pathogenic mutation can be a genetic mutation that increases an individual's susceptibility or predisposition to a certain disease or disorder. In some embodiments, the pathogenic mutation is a disease-causing mutation in a gene associated with a disease or disorder. In some embodiments, the systems or methods provided herein can be used to revert the pathogenic mutation to its wild-type counterpart. In some embodiments, the systems or methods provided herein can be used to change the pathogenic mutation to a sequence not causing the disease or disorder.

[0912] Table 23 provides exemplary indications (column 1), underlying genes (column 2), and pathogenic mutations that can be corrected using the systems or methods described herein (column 3).

TABLE 23
Indications, genes, and causitive pathogenic mutations.

| Disease | Gene | Pathogenic Mutation^{#} |
|---|---|---|
| Achromatopsia | CNGB3 | 1148delC |
| Alpha-1 Antitrypsin Deficiency | SERPINAI | E342K |
| Alpha-1 Antitrypsin Deficiency | SERPINAI | E342K |
| Alpha-1 Antitrypsin Deficiency | SERPINAI | R48C (R79C) |
| Amaurosis Congenita (LCA10) | CEP290 | 2991 + 1655A > G |
| Andersen-Tawil syndrome | KCNJ2 | R218W |
| Arrhythmogenic right ventricular | PKP2 | c. 235C > T |
| cardiomyopathy (ARVC) | | |
| associated with congenital factor XI | F11 | E117* |
| deficiency | | |
| associated with congenital factor XI | F11 | F283L |
| deficiency | | |
| ATTR amyloidosis | TTR | V50M/N30M |
| autosomal dominant deafness | COCH | G88E |
| autosomal dominant deafness | TECTA | Y1870C |
| autosomal dominant Parkinson's | SNCA | A53T |
| disease | | |
| autosomal dominant Parkinson's | SNCA | A30P |
| disease | | |
| Autosomal dominant rickets | FGF23 | R176Q |
| autosomal recessive deafness | CX30 | T5M |
| autosomal recessive deafness | DFNB59 | R183W |
| autosomal recessive deafness | TMC1 | Y182C |
| autosomal recessive | ARH | Q136* |
| hypercholesterolemia | | |
| Blackfan-Diamond anemia | RPS19 | R62Q |
| blue-cone monochromatism | OPN1LW | C203R |
| Brugada syndrome | SCN5A | E1784K |
| CADASIL syndrome | NOTCH3 | R90C |
| | gene | |
| CADASIL syndrome | NOTCH3 | R141C |
| | gene | |
| Canavan disease | ASPA | E285A |
| Canavan disease | ASPA | Y231X |
| Canavan disease | ASPA | A305E |
| carnitine palmitoyltransferase II | CPT2 | S113L |
| deficiency | | |
| choroideremia | CHM | R293* |
| choroideremia | CHM | R270* |
| choroideremia | CHM | A117A |
| Citrullinemia Type I | ASS | G390R |
| classic galactosemia | GALT | Q188R |
| classic horoocystoinuria | CBS | T191M |
| classic homocystemuria | CBS | G307S |
| CLN2 Disease | TPP1 | c. 509 − 1 G > C |
| CLN2 Disease | TPP1 | c. 622 C < T |
| CLN2 Disease | TPP1 | c. 851 G > T |
| cone-rod dystrophy | GUCY2D | R838C |
| congenital factor V deficiency | F5 | R506Q |
| congenital factor V deficiency | F5 | R534Q |
| congenital factor VII deficiency | F7 | A294V |
| congenital factor VII deficiency | F7 | C310F |
| congenital factor VII deficiency | F7 | R304Q |
| congenital factor VII deficiency | F7 | QI00R |
| Creutzfeldt-Jakob disease (CJD) | PRNP | E200K |
| Creutzfeldt-Jakob disease (CJD) | PRNP | M129V |
| Creutzfeldt-Jakob disease (CJD) | PRNP | P102L |
| Creutzfeldt-Jakob disease (CJD) | PRNP | D178N |
| cystic fibrosis | CFTR | G551D |
| cystic fibrosis | CFTR | W1282* |
| cystic fibrosis | CFTR | R553* |
| cystic fibrosis | CFTR | R117H |
| cystic fibrosis | CFTR | delta F508 |
| eystinosis | CTNS | W138* |
| Darier disease | ATP2A2 | N767S |
| Darier disease | ATP2A2 | N767S |
| Darier disease | ATP2A2 | N767S |
| Epidermolysis Bullosa Junctional | LAMB3 | R42X |
| Epidermolysis Bullosa Junctional | LAMB3 | R635X |
| familial amyotrophic lateral | SOD1 | A4V |
| sclerosis (ALS) | | |
| familial amyotrophic lateral | SOD1 | H46R |
| sclerosis (ALS) | | |
| familial amyotrophic lateral | SOD1 | G37R |
| sclerosis (ALS) | | |
| Gaucher disease | GBA | N370S |
| Gaucher disease | GBA | N370S |
| Gaucher disease | GBA | L444P |
| Gaucher disease | GBA | L444P |
| Gaucher disease | GBA | L483P |
| glutarvl-CoA dehydrogenase | GCDH | R138G |
| deficiency | | |
| glutaryl-CoA dehydrogenase | GCDH | M263V |
| deficiency | | |
| glutaryl-Co A dehydrogenase | GCDH | R402W |
| deficiency | | |
| glycine encephalopathy | GLDC | A389V |
| glycine encephalopathy | GLDC | G771R |
| glycine encephalopathy | GLDC | T269M |
| hemophilia A | F8 | R2178C |
| hemophilia A | F8 | R550C |
| hemophilia A | F8 | R2169H |
| hemophilia A | F8 | R1985Q |
| hemophilia B | F9 | T342M |
| hemophilia B | F9 | R294Q |
| hemophilia B | F9 | R43Q |
| hemophilia B | F9 | R191H |
| hemophilia B | F9 | G106S |
| hemophilia B | F9 | A279T |
| hemophilia B | F9 | P75* |
| hemophilia B | F9 | R294* |
| hemophilia B | F9 | R379Q |
| Hereditary antithrombin deficiency | SERPINCI | R48C (R79C) |
| type I | | |
| hereditary chronic pancreatitis | PRSS1 | R122H |
| Hunter syndrome | IDS | R88C |
| Hunter syndrome | IDS | G374G |
| Hurler syndrome (MPS1) | IDUA | Q70* |
| Hurler syndrome (MPS1) | IDUA | W402* |
| Hyperkalemic periodic paralysis | SCN4A | T704M |
| Hyperkalemic periodic paralysis | SCN4A | M1592V |
| Hyperkalemic periodic paralysis | CACNA1S | p. Arg528X |
| Hyperkalemic periodic paralysis | CACNA1S | p. Arg1239 |
| intermittent porphyria | HMBS | R173W |
| isolated agammaglobulin em ia | E47 | E555K |
| Lattice corneal dystrophy type I | TGFBI | Arg124Cys |
| LCHAD deficiency | HADHA | Glu474Gln |
| Leber congenital amaurosis 2 | RPE65 | R44* |
| Leber congenital amaurosis 2 | RPE65 | IVS1 |
| Leber congenital amaurosis 2 | RPE65 | G − A, +5 |
| Lesch-Nyhan syndrome | HPRTI | R51* |
| Lesch-Nyhan syndrome | HPRTI | R170* |
| Limb-girdle muscular dystrophy, | SGCA | Arg77Cys |
| type 2D | | |
| Marteauz-Lamy Syndrome | ARSB | Y210C |
| (MSPVI) | | |
| Mediterranean G6PD deficiency | G6PD | S188D |
| medium-chain acyl-CoA | ACADM | K329E |
| dehydrogenase deficiency | | |
| medium-chain acyl-CoA | ACADM | K329E |
| dehydrogenase deficiency | | |
| medium-chain acyl-CoA | ACADM | K329E |
| dehydrogenase deficiency | | |
| Meesmann epithelial corneal | KRT12 | L132P |
| dystrophy | | |
| metachfoniatic leukodystrophy | ARSA | P426L |
| metachromatic leukodystrophy | ARSA | c. 459 + 1G > A |
| Morquio Syndrome (MPSIVA) | GALNS | R386C |
| Mucolipidosis IV | MCOLN1 | 406 − 2A > G |
| Mucolipidosis IV | MCOLN1 | 511_6943del |
| Neimann-Pick disease type A | SMPDI | L302P |
| Neuronal ceroid lipofuscinosis | CLN2 | R208* |
| (NCL) | | |
| neuronal ceroid lipofuscinosis 1 | PPT1 | R151* |
| Parkinsons disease | LRRK2 | G2019S |
| Pendred syndrome | PDS | T461P |
| Pendred syndrome | PDS | L236P |
| Pendred syndrome | PDS | c. 1001 + 1G > A |
| Pendred syndrome | PDS | IVS8, +1 G > A, |
| phenylketonuria | PAH | R408W |
| phenylketonuria | PAH | I65T |
| phenylketonuria | PAH | R261Q |
| phenylketonuria | PAH | IVS10 − 11G > A |
| phenylketonuria | PCDH15 | R245* |
| phenylketonuria | PCDH15 | R245* |
| Pompe disease | GAA | c. −32 − 13T > G |
| Primary ciliary dyskinesia | DNAI1 | IVS1 + 2 3insT |
| Primary ciliary dyskinesia | DNAH5 | 10815delT |
| primary hypoxalimia | AGXT | G170R |
| Progressive familial intrahepatic | ABCB11 | D482G (c. 1445A > |
| cholestasis type 2 | | G) |
| Progressive familial intrahepatic | ABCB11 | E297G |
| cholestasis type 2 | | |
| Propionic acidemia | PCCB; | c. |
| | PCCA | 1218_1231del14ins12 |
| pseudoxanthoma eiasticum | ABCC6 | R1141* |
| Pyruvate kinase deficiency (PKD) | PKLR | c. 1456c −> T |
| retinitis pignientos | USH2a | C759F |
| retinitis pigmentosa | IMPDHI | D226N |
| retinitis pigmentosa | PDE6A | V685M |
| retinitis pigmentosa | PDE6A | D670G |
| retinitis pigmentosa | PRPF3 | T494M |
| retinitis pigmentosa | PRPF8 | H2309R |
| retinitis pigmentosa | RHO | P23H |
| retinitis pigmentosa | RHO | P347L |
| retinitis pigmentosa | RHO | P347L |
| retinitis pigmentosa | RHO | D190N |
| retinitis pigmentosa | RPI | R667* |
| retinitis pigmentosa/Usher | USH1C | V72V |
| syndrome type 1C | | |
| Rett syndrome | MECP2 | R106W |
| Rett syndrome | MECP2 | R133C |
| Rett syndrome | MECP2 | R306C |
| Rett syndrome | MECP2 | R168* |
| Rett syndrome | MECP2 | R255* |
| Sanfilippo syndrome A (MPSIIIA) | SGSH | R74C |
| Sanfilippo syndrome A (MPSIIIA) | SGSH | R245H |
| Sanfilippo syndrome B (MPSIIIB) | NAGLU | R297* |
| Sanfilippo syndrome B (MPSIIIB) | NAGLU | Y140C |
| severe combined immunodeficiency | ADA | G216R |
| severe combined immunodeficiency | ADA | G216R |
| severe combined immunodeficiency | ADA | Q3* |
| sickle cell disease | HBB | E6V |
| sickle cell disease | HBB | E6V |
| sickle cell disease | HBB | E6V |
| sickle cell disease | HBB | E26K |
| sickle cell disease | HBB | E26K |
| sickle cell disease | HBB | E7K |
| sickle cell disease | HBB | c. −138C > T |
| sickle cell disease | HBB | IVS2 |
| sickle cell disease | HBB | 654 C > T |
| Sly Syndrome (MPSVH) | GUSB | L175F |
| Stargardt disease | ABCA4 | A1038V |
| Stargardt disease | ABCA4 | A1038V |
| Stargardt disease | ABCA4 | L541P |
| Stargardt disease | ABCA4 | G1961E |
| Stargardt disease | ABCA4 | G1961E |
| Stargardt disease | ABCA4 | G1961E |
| Stargardt disease | ABCA4 | G1961E |
| Stargardt disease | ABCA4 | c. 2588G > C |
| Stargardt disease | ABCA4 | c. 5461 − 10 T > C |
| Stargardt disease | ABCA4 | c. 5714 + 5G > A |
| Tay Sachs | HEXA | InsTATC1278 |
| tyrosinemia type 1 | FAH | P261L |
| Usher syndrome type 1F | PCDH15 | R245* |
| variegate porphyria | PPOX | R59W |
| VCP myopathy (IBMPFD) 1 | VCP | R1555X |
| von Gierke disease | G6PC | Q347* |
| von Gierke disease | G6PC | Q347* |
| von Gierke disease | G6PC | Q347* |
| von Gierke disease | G6PC | R83C |
| Wilson's Disease | ATP7B | E297G |
| X-linked myotubular myopathy | MTMI | c. 1261 − 10A > G |
| X-linked retinoschisis | RS1 | R102W |
| X-linked retinoschisis | RS1 | R141C |

^{#}See J T den Dunnen and S E Antonarakis, Hum Mutat. 2000; 15(1): 7-12, herein incorporated by reference in its entirety, for details of the nomenclatures of gene mutations.
*means a stop codon.

### Compensatory Edits

[0913] In some embodiments, the systems or methods provided herein can be used to introduce a compensatory edit. In some embodiments, the compensatory edit is at a position of a gene associated with a disease or disorder, which is different from the position of a disease-causing mutation. In some embodiments, the compensatory mutation is not in the gene containing the causative mutation. In some embodiments, the compensatory edit can negate or compensate for a disease-causing mutation. In some embodiments, the compensatory edit can be introduced by the systems or methods provided herein to suppress or reverse the mutant effect of a disease-causing mutation.

[0914] Table 24 provides exemplary indications (column 1), genes (column 2), and compensatory edits that can be introduced using the systems or methods described herein (column 3). In some embodiments, the compensatory edits provided in Table 24 can be introduced to suppress or reverse the mutant effect of a disease-causing mutation.

TABLE 24
Indications, genes, compensatory edits,
and exemplary design features.

| Disease | Gene | Nucleotide Change^{#} |
|---|---|---|
| Alpha-1 Antitrypsin Deficiency | SERPINAI | F51L |
| Alpha-1 Antitrypsin Deficiency | SERPINAI | M374I |
| Alpha-1 Antitrypsin Deficiency | SERPINAI | A348V/A347V |
| Alpha-1 Antitrypsin Deficiency | SERPINAI | K387R |
| Alpha-1 Antitrypsin Deficiency | SERPINAI | T59A |
| Alpha-1 Antitiypsin Deficiency | SERPINAI | T68A |
| ATTR amyloidosis | TTR | Al08V |
| ATTR amyloidosis | TTR | Rl04H |
| ATTR amyloidosis | TTR | T119M |
| Cystic fibroses | CFTR | R555K |
| Cystic fibrosis | CFTR | F409L |
| Cystic fibrosis | CFTR | F433L |
| Cystic fibrosis | CFTR | H667R |
| Cystic fibrosis | CFTR | Rl070W |
| Cystic fibrosis | CFTR | R29K |
| Cystic fibrosis | CFTR | R553Q |
| Cystic fibrosis | CFTR | 1539T |
| Cystic fibrosis | CFTR | G550E |
| Cystic fibroses | CFTR | F429S |
| Cystic fibrosis | CFTR | Q637R |
| Sickle cell disease | HBB | A70T |
| Sickle cell disease | HBB | A70V |
| Sickle cell disease | HBB | L88P |
| Sickle cell disease | HBB | F85L and/or F85P |
| Sickle cell disease | HBB | E22G |
| Sickle cell disease | HBB | G16D and/or G16N |

^{#}See J T den Dunnen and S E Antonarakis, Hum Mutat. 2000; 15(1): 7-12, herein incorporated by reference in its entirety, for details of the nomenclatures of gene mutations.

### Regulatory Edits

[0915] In some embodiments, the systems or methods provided herein can be used to introduce a regulatory edit. In some embodiments, the regulatory edit is introduced to a regulatory sequence of a gene, for example, a gene promoter, gene enhancer, gene repressor, or a sequence that regulates gene splicing. In some embodiments, the regulatory edit increases or decreases the expression level of a target gene. In some embodiments, the target gene is the same as the gene containing a disease-causing mutation. In some embodiment, the target gene is different from the gene containing a disease-causing mutation. For example, the systems or methods provided herein can be used to upregulate the expression of fetal hemoglobin by introducing a regulatory edit at the promoter of bcl11a, thereby treating sickle cell disease.

[0916] Table 25 provides exemplary indications (column 1), genes (column 2), and regulatory edits that can be introduced using the systems or methods described herein (column 3).

TABLE 25
Indications, genes, and compensatory regulatory edits.

| Disease | Gene | Nucleotide Change^{#} |
|---|---|---|
| homozygous familial | LDLR | c. 81C > T |
| hypercholesterolaemia | | |
| Porphyrias | ALAS1 | c. 3G > A |
| Porphyrias | ALAS1 | c. 2T > C |
| Porphyrias | ALAS1 | c. 46C > T |
| Porphyrias | ALAS1 | c. 91C > T |
| Porphyrias | ALAS1 | c. 91C > T |
| Porphyrias | ALAS1 | c. 226C > T |
| Porphyrias | ALAS1 | c. 226C > T |
| Porphyrias | ALAS1 | c. 226C > T |
| Porphyrias | ALAS1 | c. 229C > T |
| Porphyrias | ALAS1 | c. 247C > T |
| Porphyrias | ALAS1 | c. 247C > T |
| Porphyrias | ALAS1 | c. 250C > T |
| Porphyrias | ALAS1 | c. 250C > T |
| Porphyrias | ALAS1 | c. 340C > T |
| Porphyrias | ALAS1 | c. 340C > T |
| Porphyrias | ALAS1 | c. 349C > T |
| Porphyrias | ALAS1 | c. 391C > T |
| Porphyrias | ALAS1 | c. 391C > T |
| Porphyrias | ALAS1 | c. 403C > T |
| Porphyrias | ALAS1 | c. 403C > T |
| Porphyrias | ALAS1 | c. 199 + 1G > A |
| Porphyrias | ALAS1 | c. 199 + 1G > A |
| Porphyrias | ALAS1 | c. 199 + 1G > A |
| Porphyrias | ALAS1 | c. 199 + 1G > A |
| Porphyrias | ALAS1 | c. 199 + 2T > C |
| Porphyrias | ALAS1 | c. 199 + 2T > C |
| Porphyrias | ALAS1 | c. 199 + 2T > C |
| Porphyrias | ALAS1 | c. 199 + 2T > C |
| Porphyrias | ALAS1 | c. 200 − 2A > G |
| Porphyrias | ALAS1 | c. 427 + 1G > A |
| Porphyrias | ALAS1 | c. 427 + 2T > C |
| Porphyrias | ALAS1 | c. 1165 + 1G > A |
| Porphyrias | ALAS1 | c. 1165 + 2T > C |
| Porphyrias | ALAS1 | c. 1166 − 1A > G |
| Porphyrias | ALAS1 | c. 133 1 − 2A > G |
| sickle cell disease | BCL11A | c. 386 − 24278G > A |
| sickle cell disease | BCL11A | c. 386 − 24983T > C |
| sickle cell disease | HBG1 | c. −167C > T |
| sickle cell disease | HBG1 | c. −170G > A |
| sickle cell disease | HBG1 | c. −249C > T |
| sickle cell disease | HBG2 | c. −211C > T |
| sickle cell disease | HBG2 | c. −228T > C |
| sickle cell disease | HBG1/2 | C. −198 T > C |
| sickle cell disease | HBG1/2 | C. −198 T > C |
| sickle cell disease | HBG1/2 | C. −198 T > C |
| sickle cell disease | HBG1/2 | C. −198 T > C |
| sickle cell disease | HBG1/2 | C. −198 T > C |
| sickle cell disease | HBG1/2 | C. −198 T > C |
| sickle cell disease | HBG1/2 | C. −198 T > C |
| sickle cell disease | HBG1/2 | C. −175 T > C |
| sickle cell disease | HBG1/2 | C. −175 T > C |
| sickle cell disease | HBG1/2 | C. −175 T > C |
| sickle cell disease | HBG1/2 | C. −175 T > C |
| sickle cell disease | HBG1/2 | C. −175 T > C |
| sickle cell disease | HBG1/2 | C. −114~−102 deletion |
| sickle cell disease | HBG1/2 | C. −114~−102 deletion |
| sickle cell disease | HBG1/2 | C. −114~−102 deletion |
| sickle cell disease | HBG1/2 | C. −114~−102 deletion |
| sickle cell disease | HBG1/2 | C. −114~−102 deletion |
| sickle cell disease | HBG1/2 | C. −114~−102 deletion |
| sickle cell disease | HBG1/2 | C. −114~−102 deletion |
| sickle cell disease | HBG1/2 | C. −114~−102 deletion |
| sickle cell disease | HBG1/2 | C. −114~−102 deletion |
| sickle cell disease | HBG1/2 | C. −114~−102 deletion |
| sickle cell disease | HBG1/2 | C. −114~−102 deletion |
| sickle cell disease | HBG1/2 | c. −90 BCL11A Binding |
| sickle cell disease | HBG1/2 | c. −90 BCL11A Binding |
| sickle cell disease | HBG1/2 | C. −202 C > T, −201 C > T, |
| | | −198 T > C, −197 C > T, |
| | | −196 C > T, −195 C > G |
| sickle cell disease | HBG1/2 | C. −197 C > T, −196 C > T, |
| | | −195 C > G |

^{#}See J T den Dunnen and S E Antonarakis, Hum Mutat. 2000; 15(1): 7-12, herein incorporated by reference in its entirety, for details of the nomenclatures of gene mutations.

### Repeat Expansion Diseases

[0917] In some embodiments, the systems or methods provided herein can be used to treat a repeat expansion disease, for example, a repeat expansion disease provided in Table 26. Table 26 provides the indication (column 1), the gene (column 2), minimal repeat sequence of the repeat that is expanded in the condition (column 3), and the location of the repeat relative to the listed gene for each indication (column 4). In some embodiments, the systems or methods provided herein, for example, those comprising Gene Writers, can be used to treat repeat expansion diseases by resetting the number of repeats at the locus according to a customized RNA template (see, e.g., Example 24).

TABLE 26
Exemplary repeat expansion diseases, genes,
causal repeats, and repeat locations.

| | | Causal | Repeat |
|---|---|---|---|
| Disease | Gene | repeat | location |
| myotonic | DMPK/DM1 | CTG | 3′ UTR |
| dystrophy 1 | | | |
| myotonic | ZNF9/ | CCTG | Intron 1 |
| dystrophy 2 | CNBP | | |
| dentatorubral- | ATN1 | CAG | Coding |
| pallidoluysian | | | |
| atrophy | | | |
| fragile X mental | FMR1 | CGG | 5′ UTR |
| retardation | | | |
| syndrome | | | |
| fragile X E mental | FMR2 | GCC | 5′ UTR |
| retardation | | | |
| Friedreich's ataxia | FXN | GAA | Intron |
| fragile X tremor | FMR1 | CGG | 5′ UTR |
| ataxia syndrome | | | |
| Huntington's | HTT | CAG | Coding |
| disease | | | |
| Huntington's | JPH3 | CTG | 3′ UTR, |
| disease-like 2 | | | coding |
| myoclonic epilepsy | CSTB | CCCC | Promoter |
| of Unverricht | | GCCC | |
| and Lundborg | | CGCG | |
| | | (SEQ | |
| | | ID | |
| | | NO: | |
| | | 1606) | |
| oculopharyngeal | PABPN1 | GCG | Coding |
| muscular | | | |
| dystrophy | | | |
| spinal and bulbar | AR | CAG | Coding |
| muscular atrophy | | | |
| spinocerebellar | ATXN1 | CAG | Coding |
| ataxia 1 | | | |
| spinocerebellar | ATXN2 | CAG | Coding |
| ataxia 2 | | | |
| spinocerebellar | ATXN3 | CAG | Coding |
| ataxia 3 | | | |
| spinocerebellar | CACNA1A | CAG | Coding |
| ataxia 6 | | | |
| spinocerebellar | ATXN7 | CAG | Coding |
| ataxia 7 | | | |
| spinocerebellar | ATXN8 | CTG/CAG | CTG/CAG |
| ataxia 8 | | | (ATXN8) |
| spinocerebellar | ATXN10 | ATTCT | Intron |
| ataxia 10 | | | |
| spinocerebellar | PPP2R2B | CAG | Promoter, |
| ataxia 12 | | | 5′ UTR? |
| spinocerebellar | TBP | CAG | Coding |
| ataxia 17 | | | |
| Syndromic/non- | ARX | GCG | Coding |
| syndromic X- | | | |
| linked mental | | | |
| retardation | | | |

### Exemplary Templates

[0918] In some embodiments, the systems or methods provided herein use the template sequences listed in Table 27. Table 27 provides exemplary template RNA sequences (column 5) and optional second-nick gRNA sequences (column 6) designed to be paired with a Gene Writing polypeptide to correct the indicated pathogenic mutations (column 4). All the templates in Table 27 are meant to exemplify the total sequence of: (1) targeting gRNA for first strand nick, (2) polypeptide binding domain, (3) heterologous object sequence, and (4) target homology domain for setting up TPRT at first strand nick.

TABLE 27
Exemplary diseases, tissues, genes, pathogenic mutations, template RNA sequences,
and second nick gRNA sequences.

| | | | | | Second |
|---|---|---|---|---|---|
| | | | | | nick |
| Disease | Tissue | Gene | Mutation | Template RNA | gRNA |
| Alpha-1 | Liver | SERPINA1 | PiZ | TCCCCTCCAGGCCGTGCATAGTTTT | TTTGTT |
| antitrypsin | | | | AGAGCTAGAAATAGCAAGTTAAAA | GAACTT |
| | | | | TAAGGCTAGTCCGTTATCAACTTGA | GACCTC |
| | | | | AAAAGTGGGACCGAGTCGGTCCTcG | GG (SEQ |
| | | | | TCGATGGTCAGCACAGCCTTATGCA | ID NO: |
| | | | | CGGCCTGGA (SEQ ID NO: 1607) | 1608) |
| Cystic | Lung | CFTR | deltaF508 | ACCATTAAAGAAAATATCATGTTTT | AaagAT |
| fibrosis | | | | AGAGCTAGAAATAGCAAGTTAAAA | GATATT |
| | | | | TAAGGCTAGTCCGTTATCAACTTGA | TTCTTT |
| | | | | AAAAGTGGGACCGAGTCGGTCCAC | AA (SEQ |
| | | | | CAaagATGATATTTTCTTTA (SEQ ID | ID NO: |
| | | | | NO: 1609) | 1610) |
| Sickle cell | HSC | HBB | HbS | GTAACGGCAGACTTCTCCACGTTTT | TGGTGA |
| | | | | AGAGCTAGAAATAGCAAGTTAAAA | GGCCCT |
| | | | | TAAGGCTAGTCCGTTATCAACTTGA | GGGCA |
| | | | | AAAAGTGGGACCGAGTCGGTCCGA | GGT |
| | | | | CTCCTGaGGAGAAGTCTGCC (SEQ ID | (SEQ ID |
| | | | | NO: 1611) | NO: |
| | | | | | 1612) |
| Wilson's | Liver | ATP7B | H1069Q | TTGGTGACTGCCACGCCCAAGTTTT | GGCCA |
| Disease | | | | AGAGCTAGAAATAGCAAGTTAAAA | GCAGT |
| | | | | TAAGGCTAGTCCGTTATCAACTTGA | GAACAc |
| | | | | AAAAGTGGGACCGAGTCGGTCCAC | CCCT |
| | | | | AcCCCTTGGGCGTGGCAGTC (SEQ ID | (SEQ ID |
| | | | | NO: 1613) | NO: |
| | | | | | 1614) |
| ARVC | Heart | PKP2 | 235C > T | ACTCAGGAACACTGCTGGTTGTTTT | TTGGTT |
| | | | | AGAGCTAGAAATAGCAAGTTAAAA | GAAAA |
| | | | | TAAGGCTAGTCCGTTATCAACTTGA | TGATTT |
| | | | | AAAAGTGGGACCGAGTCGGTCCTTC | TGT |
| | | | | ACtGAACCAGCAGTGTTCC (SEQ ID | (SEQ ID |
| | | | | NO: 1615) | NO: |
| | | | | | 1616) |
| Long QT | Heart | KCNQ1 | P343S | CCAGGGAAAACGCACCCACGGTTTT | CTCCTT |
| syndrome 1 | | | | AGAGCTAGAAATAGCAAGTTAAAA | CTTTGC |
| | | | | TAAGGCTAGTCCGTTATCAACTTGA | GCTCcC |
| | | | | AAAAGTGGGACCGAGTCGGTCCTCc | AG (SEQ |
| | | | | CAGCGGTAGGTGCCCCGTGGGTGC | ID NO: |
| | | | | GTTTTC (SEQ ID NO: 1617) | 1618) |
| Mucolipidosis | CNS | MCOLN1 | 406-2A > G | GCCCTCCCCTTCTCTGCCCAGTTTTA | TCAGGC |
| IV | | | | GAGCTAGAAATAGCAAGTTAAAAT | AACGC |
| | | | | AAGGCTAGTCCGTTATCAACTTGAA | CAGGT |
| | | | | AAAGTGGGACCGAGTCGGTCCGGT | ACtG |
| | | | | ACtGTGGGCAGAGAAGGGG (SEQ ID | (SEQ ID |
| | | | | NO: 1619) | NO: |
| | | | | | 1620) |

[0919] In some embodiments, the systems or methods provided herein use the template sequences listed in Table 35. Table 35 provides exemplary template RNA sequences (column 5) and optional second-nick gRNA sequences (column 6) designed to be paired with a Gene Writing polypeptide to correct the indicated pathogenic mutations (column 4). All the templates in Table 35 are meant to exemplify the total sequence of: (1) targeting gRNA for first strand nick, (2) polypeptide binding domain, (3) heterologous object sequence, and (4) target homology domain for setting up TPRT at first strand nick.

TABLE 35
Exemplary Gene Writing templates and second nick gRNA sequences for the correction
of exemplary repeat expansion diseases. The region of the template spanning the
repeat(s) is indicated in lowercase.

| | | | | | | Second- |
|---|---|---|---|---|---|---|
| | | Reference | | | | nick |
| Disease | Gene | Accession | Repeat | Location | Template RNA | gRNA |
| myotonic | DMPK | NC_00019.10 | CTG | 3′ UTR | CTCGAAGGGTC | ATCA |
| dystrophy | | (45769709 . . . | | | CTTGTAGCCGTT | CAGG |
| 1 | | 45782490, | | | TTAGAGCTAGA | ACTG |
| | | complement) | | | AATAGCAAGTT | GAGC |
| | | | | | AAAATAAGGCT | TGGG |
| | | | | | AGTCCGTTATCA | (SEQ |
| | | | | | ACTTGAAAAAG | ID NO: |
| | | | | | TGGGACCGAGT | 1622) |
| | | | | | CGGTCCGTGAT | |
| | | | | | CCCCCcagcagcagc | |
| | | | | | agcagcagcagcagcag | |
| | | | | | cagcagcagcagcagca | |
| | | | | | gcagcagcagcagcag | |
| | | | | | CATTCCCGGCTA | |
| | | | | | CAAGGACCCT | |
| | | | | | (SEQ ID NO: 1621) | |
| myotonic | CNBP | NC_00003.12 | CCTG | Intron 1 | ACCACTGCACT | GCCT |
| dystrophy | | (129167827 . . . | | | CCAGCCTAGGT | CAGC |
| 2 | | 129183896, | | | TTTAGAGCTAG | CTCC |
| | | complement) | | | AAATAGCAAGT | TGAG |
| | | | | | TAAAATAAGGC | TAGC |
| | | | | | TAGTCCGTTATC | (SEQ |
| | | | | | AACTTGAAAAA | ID NO: |
| | | | | | GTGGGACCGAG | 1624) |
| | | | | | TCGGTCCGTGTC | |
| | | | | | TGTCTGTCTGTC | |
| | | | | | TGTCTGTCTGTC | |
| | | | | | TGTCTGTCTGTC | |
| | | | | | TGcctgcctgcctgcctg | |
| | | | | | cctgcctgcctgcctggct | |
| | | | | | gcctgtctgcctgtctgcct | |
| | | | | | gcctgcctgcctgcctgcc | |
| | | | | | tgcctgTCTGTCTC | |
| | | | | | ACTTTGTCCCCT | |
| | | | | | AGGCTGGAGTG | |
| | | | | | CA (SEQ ID NO: | |
| | | | | | 1623) | |
| fragile X | FMR1 | NC_00023.11 | CGG | 5′ UTR | GGGGGCGTGCG | GCTC |
| mental | | (147911919 . . . | | | GCAGCGCGGGT | AGAG |
| retardation | | 147951127) | | | TTTAGAGCTAG | GCGG |
| syndrome | | | | | AAATAGCAAGT | CCCT |
| | | | | | TAAAATAAGGC | CCAC |
| | | | | | TAGTCCGTTATC | (SEQ |
| | | | | | AACTTGAAAAA | ID NO: |
| | | | | | GTGGGACCGAG | 1626) |
| | | | | | TCGGTCCTGCG | |
| | | | | | GGCGCTCGAGG | |
| | | | | | CCCAGccgccgccgc | |
| | | | | | cgccgccgccgccgccg | |
| | | | | | cctccgccgccgccgcc | |
| | | | | | gccgccgccgccgccg | |
| | | | | | CGCTGCCGCAC | |
| | | | | | G (SEQ ID NO: | |
| | | | | | 1625) | |
| Friedreich's | FXN | NC_00009.12 | GAA | Intron | CAGGCGCGCGA | CGCT |
| ataxia | | (69035752 . . . | | | CACCACGCCGT | TGAG |
| | | 69079076) | | | TTTAGAGCTAG | CCCG |
| | | | | | AAATAGCAAGT | GGAG |
| | | | | | TAAAATAAGGC | GCAG |
| | | | | | TAGTCCGTTATC | (SEQ |
| | | | | | AACTTGAAAAA | ID NO: |
| | | | | | GTGGGACCGAG | 1628) |
| | | | | | TCGGTCCAACC | |
| | | | | | CAGTATCTACTA | |
| | | | | | AAAAATACAAA | |
| | | | | | AAAAAAAAAAA | |
| | | | | | AAgaagaagaagaaga | |
| | | | | | agaaAATAAAGA | |
| | | | | | AAAGTTAGCCG | |
| | | | | | GGCGTGGTGTC | |
| | | | | | GCGC (SEQ ID | |
| | | | | | NO: 1627) | |
| Huntington | HTT | NC_00004.12 | CAG | Coding | GGCGGCTGAGG | CGCT |
| disease | | (3074681 . . . | | | AAGCTGAGGGT | GCAC |
| | | 3243960) | | | TTTAGAGCTAG | CGAC |
| | | | | | AAATAGCAAGT | CGTG |
| | | | | | TAAAATAAGGC | AGTT |
| | | | | | TAGTCCGTTATC | (SEQ |
| | | | | | AACTTGAAAAA | ID NO: |
| | | | | | GTGGGACCGAG | 1630) |
| | | | | | TCGGTCCAGTCC | |
| | | | | | CTCAAGTCCTTC | |
| | | | | | cagcagcagcagcagca | |
| | | | | | gcagcagcagcagcage | |
| | | | | | agcagcagcagcagcag | |
| | | | | | cagcagcaacagccgcc | |
| | | | | | accgccgccgccgccgc | |
| | | | | | cgccgcctcctCAGCT | |
| | | | | | TCCTCAG (SEQ | |
| | | | | | ID NO: 1629) | |
| spinocer- | ATXN1 | NC_00006.12 | CAG | Coding | TGAGCCCCGGA | TCCA |
| ebellar | | (16299112 . . . | | | GCCCTGCTGGTT | GTTC |
| ataxia 1 | | 16761490, | | | TTAGAGCTAGA | TCCG |
| | | complement) | | | AATAGCAAGTT | CAGA |
| | | | | | AAAATAAGGCT | ACAC |
| | | | | | AGTCCGTTATCA | (SEQ |
| | | | | | ACTTGAAAAAG | ID NO: |
| | | | | | TGGGACCGAGT | 1632) |
| | | | | | CGGTCCACAAG | |
| | | | | | GCTGAGcagcagca | |
| | | | | | gcagcagcagcagcagc | |
| | | | | | agcagcagcagcatcag | |
| | | | | | catcagcagcagcagca | |
| | | | | | gcagcagcagcagcagc | |
| | | | | | agcagcagcagCACC | |
| | | | | | TCAGCAGGGCT | |
| | | | | | CCGGG (SEQ ID | |
| | | | | | NO: 1631) | |

### Exemplary Heterologous Object Sequences

[0920] In some embodiments, the systems or methods provided herein comprise a heterologous object sequence, wherein the heterologous object sequence or a reverse complementary sequence thereof, encodes a protein (e.g., an antibody) or peptide. In some embodiments, the therapy is one approved by a regulatory agency such as FDA.

[0921] In some embodiments, the protein or peptide is a protein or peptide from the THPdb database (Usmani et al. PLoS One 12(7):e0181748 (2017), herein incorporated by reference in its entirety. In some embodiments, the protein or peptide is a protein or peptide disclosed in Table 28. In some embodiments, the systems or methods disclosed herein, for example, those comprising Gene Writers, may be used to integrate an expression cassette for a protein or peptide from Table 28 into a host cell to enable the expression of the protein or peptide in the host. In some embodiments, the sequences of the protein or peptide in the first column of Table 28 can be found in the patents or applications provided in the third column of Table 28, incorporated by reference in their entireties.

[0922] In some embodiments, the protein or peptide is an antibody disclosed in Table 1 of Lu et al. J Biomed Sci 27(1):1 (2020), herein incorporated by reference in its entirety. In some embodiments, the protein or peptide is an antibody disclosed in Table 29. In some embodiments, the systems or methods disclosed herein, for example, those comprising Gene Writers, may be used to integrate an expression cassette for an antibody from Table 29 into a host cell to enable the expression of the antibody in the host. In some embodiments, a system or method described herein is used to express an agent that binds a target of column 2 of Table 29 (e.g., a monoclonal antibody of column 1 of Table 29) in a subject having an indication of column 3 of Table 29.

TABLE 28
Exemplary protein and peptide therapeutics.

| Therapeutic peptide | Category | Patent Number |
|---|---|---|
| Lepirudin | Antithrombins and | CA1339104 |
| | Fibrinolytic Agents | |
| Cetuximab | Antineoplastic Agents | CA1340417 |
| Dor se alpha | Enzymes | CA2184581 |
| Denileukin diftitox | Antineoplastic Agents | |
| Etanercept | Immunosuppressive | CA2476934 |
| | Agents | |
| Bivalirudin | Antithrombins | U.S. Pat. No. 7,582,727 |
| Leuprolide | Antineoplastic Agents | |
| Peginterferon alpha-2a | Immunosuppressive | CA2203480 |
| | Agents | |
| Altepla se | Thrombolytic Agents | |
| Interferon alpha-n1 | Antiviral Agents | |
| Darbepoetin alpha | Anti-anemic Agents | CA2165694 |
| Reteplase | Fibrinolytic Agents | CA2107476 |
| Epoetin alpha | Hematinics | CA1339047 |
| Salmon Calcitonin | Bone Density | U.S. Pat. No. 6,440,392 |
| | Conservation Agents | |
| Interferon alpha-n3 | Immunosuppressive | |
| | Agents | |
| Pegfilgrastim | Immunosuppressive | CA1341537 |
| | Agents | |
| Sargramostim | Immunosuppressive | CA1341150 |
| | Agents | |
| Secretin | Diagnostic Agents | |
| Peginterferon alpha-2b | Immunosuppressive | CA1341567 |
| | Agents | |
| Asparagi se | Antineoplastic Agents | |
| Thyrotropin alpha | Diagnostic Agents | U.S. Pat. No. 5,840,566 |
| Antihemophilic Factor | Coagulants and | CA2124690 |
| | Thrombotic agents | |
| A kinra | Antirheumatic Agents | CA2141953 |
| Gramicidin D | Anti-Bacterial Agents | |
| Intravenous | Immunologic Factors | |
| Immunoglobulin | | |
| Anistreplase | Fibrinolytic Agents | |
| Insulin Regular | Antidiabetic Agents | |
| Tenecteplase | Fibrinolytic Agents | CA2129660 |
| Menotropins | Fertility Agents | |
| Interferon gamma-1b | Immunosuppressive | U.S. Pat. No. 6,936,695 |
| | Agents | |
| Interferon alpha-2a, | | CA2172664 |
| Recombi nt | | |
| Coagulation factor | Coagulants | |
| Vila | | |
| Oprelvekin | Antineoplastic Agents | |
| Palifermin | Anti-Mucositis | |
| | Agents | |
| Glucagon recombi nt | Hypoglycemic Agents | |
| Aldesleukin | Antineoplastic Agents | |
| Botulinum Toxin Type | Antidystonic Agents | |
| B | | |
| Omalizumab | Anti-Allergic Agents | CA2113813 |
| Lutropin alpha | Fertility Agents | U.S. Pat. No. 5,767,251 |
| Insulin Lispro | Hypoglycemic Agents | U.S. Pat. No. 5,474,978 |
| Insulin Glargine | Hypoglycemic Agents | U.S. Pat. No. 7,476,652 |
| Collage se | | |
| Rasburicase | Gout Suppressants | CA2175971 |
| Adalimumab | Antirheumatic Agents | CA2243459 |
| Imiglucerase | Enzyme Replacement | U.S. Pat. No. 5,549,892 |
| | Agents | |
| Abciximab | Anticoagulants | CA1341357 |
| Alpha-1-protei se | Serine Protei se | |
| inhibitor | Inhibitors | |
| Pegaspargase | Antineoplastic Agents | |
| Interferon beta-1a | Antineoplastic Agents | CA1341604 |
| Pegademase bovine | Enzyme Replacement | |
| | Agents | |
| Human Serum | Serum substitutes | U.S. Pat. No. 6,723,303 |
| Albumin | | |
| Eptifibatide | Platelet Aggregation | U.S. Pat. No. 6,706,681 |
| | Inhibitors | |
| Serum albumin iodo | Diagnostic Agents | |
| ted | | |
| Infliximab | Antirheumatic Agents, | CA2106299 |
| | Anti-Inflammatory | |
| | Agents, Non- | |
| | Steroidal, | |
| | Dermatologic Agents, | |
| | Gastrointesti 1 Agents | |
| | and | |
| | Immunosuppressive | |
| | Agents | |
| Follitropin beta | Fertility Agents | U.S. Pat. No. 7,741,268 |
| Vasopressin | Anti diuretic Agents | |
| Interferon beta-1b | Adjuvants, | CA1340861 |
| | Immunologic and | |
| | Immunosuppressive | |
| | Agents | |
| Interferon alphacon-1 | Antiviral Agents and | CA1341567 |
| | Immunosuppressive | |
| | Agents | |
| Hyaluronidase | Adjuvants, Anesthesia | |
| | and Permeabilizing | |
| | Agents | |
| Insulin, porcine | Hypoglycemic Agents | |
| Trastuzumab | Antineoplastic Agents | CA2103059 |
| Rituximab | Antineoplastic | CA2149329 |
| | Agents, Immunologic | |
| | Factors and | |
| | Antirheumatic Agents | |
| Basiliximab | Immunosuppressive | CA2038279 |
| | Agents | |
| Muromo b | Immunologic Factors | |
| | and | |
| | Immunosuppressive | |
| | Agents | |
| Digoxin Immune Fab | Antidotes | |
| (Ovine) | | |
| Ibritumomab | | CA2149329 |
| Daptomycin | | U.S. Pat. No. 6,468,967 |
| Tositumomab | | |
| Pegvisomant | Hormone | U.S. Pat. No. 5,849,535 |
| | Replacement Agents | |
| Botulinum Toxin Type | Neuromuscular | CA2280565 |
| A | Blocking Agents, | |
| | Anti-Wrinkle Agents | |
| | and Antidystonic | |
| | Agents | |
| Pancrelipase | Gastrointesti 1 Agents | |
| | and Enzyme | |
| | Replacement Agents | |
| Streptoki se | Fibrinolytic Agents | |
| | and Thrombolytic | |
| | Agents | |
| Alemtuzumab | | CA1339198 |
| Alglucerase | Enzyme Replacement | |
| | Agents | |
| Capromab | Indicators, Reagents | |
| | and Diagnostic Agents | |
| Laronidase | Enzyme Replacement | |
| | Agents | |
| Urofollitropin | Fertility Agents | U.S. Pat. No. 5,767,067 |
| Efalizumab | Immunosuppressive | |
| | Agents | |
| Serum albumin | Serum substitutes | U.S. Pat. No. 6,723,303 |
| Choriogo dotropin | Fertility Agents and | U.S. Pat. No. 6,706,681 |
| alpha | Go dotropins | |
| Antithymocyte | Immunologic Factors | |
| globulin | and | |
| | Immunosuppressive | |
| | Agents | |
| Filgrastim | Immunosuppressive | CA1341537 |
| | Agents, | |
| | Antineutropenic | |
| | Agents and | |
| | Hematopoietic Agents | |
| Coagulation factor ix | Coagulants and | |
| | Thrombotic Agents | |
| Becaplermin | Angiogenesis | CA1340846 |
| | Inducing Agents | |
| Agalsidase beta | Enzyme Replacement | CA2265464 |
| | Agents | |
| Interferon alpha-2b | Immunosuppressive | CA1341567 |
| | Agents | |
| Oxytocin | Oxytocics, Anti- | |
| | tocolytic Agents and | |
| | Labor Induction | |
| | Agents | |
| Enfuvirtide | HIV Fusion Inhibitors | U.S. Pat. No. 6,475,491 |
| Palivizumab | Antiviral Agents | CA2197684 |
| Daclizumab | Immunosuppressive | |
| | Agents | |
| Bevacizumab | Angiogenesis | CA2286330 |
| | Inhibitors | |
| Arcitumomab | Diagnostic Agents | U.S. Pat. No. 8,420,081 |
| Arcitumomab | Diagnostic Agents | U.S. Pat. No. 7,790,142 |
| Eculizumab | | CA2189015 |
| Panitumumab | | |
| Ranibizumab | Ophthalmics | CA2286330 |
| Idursulfase | Enzyme Replacement | |
| | Agents | |
| Alglucosidase alpha | Enzyme Replacement | CA2416492 |
| | Agents | |
| Exe tide | Hypoglycemic Agents | U.S. Pat. No. 6,872,700 |
| Mecasermin | | U.S. Pat. No. 5,681,814 |
| Pramlintide | | U.S. Pat. No. 5,686,411 |
| Galsulfase | Enzyme Replacement | |
| | Agents | |
| Abatacept | Antirheumatic Agents | CA2110518 |
| | and | |
| | Immunosuppressive | |
| | Agents | |
| Cosyntropin | Hormones and | |
| | Diagnostic Agents | |
| Corticotropin | | |
| Insulin aspart | Hypoglycemic Agents | U.S. Pat. No. 5,866,538 |
| | and Antidiabetic | |
| | Agents | |
| Insulin detemir | Antidiabetic Agents | U.S. Pat. No. 5,750,497 |
| Insulin glulisine | Antidiabetic Agents | U.S. Pat. No. 6,960,561 |
| Pegaptanib | Intended for the | |
| | prevention of | |
| | respiratory distress | |
| | syndrome (RDS) in | |
| | premature infants at | |
| | high risk for RDS. | |
| Nesiritide | | |
| Thymalphasin | | |
| Defibrotide | Antithrombins | |
| tural alpha interferon | | |
| OR multiferon | | |
| Glatiramer acetate | | |
| Preotact | | |
| Teicoplanin | Anti-Bacterial Agents | |
| Ca kinumab | Anti-Inflammatory | |
| | Agents and Monoclo | |
| | 1 antibodies | |
| Ipilimumab | Antineoplastic Agents | CA2381770 |
| | and Monoclo 1 | |
| | antibodies | |
| Sulodexide | Antithrombins and | |
| | Fibrinolytic Agents | |
| | and Hypoglycemic | |
| | Agents and | |
| | Anticoagulants and | |
| | Hypolipidemic Agents | |
| Tocilizumab | | CA2201781 |
| Teriparatide | Bone Density | US6977077 |
| | Conservation Agents | |
| Pertuzumab | Monoclo 1 antibodies | CA2376596 |
| Rilo cept | Immunosuppressive | U.S. Pat. No. 5,844,099 |
| | Agents | |
| Denosumab | Bone Density | CA2257247 |
| | Conservation Agents | |
| | and Monoclo 1 | |
| | antibodies | |
| Liraglutide | | U.S. Pat. No. 6,268,343 |
| Golimumab | Antipsoriatic Agents | |
| | and Monoclo 1 | |
| | antibodies and TNF | |
| | inhibitor | |
| Belatacept | Antirheumatic Agents | |
| | and | |
| | Immunosuppressive | |
| | Agents | |
| Buserelin | | |
| Velaglucerase alpha | Enzymes | U.S. Pat. No. 7,138,262 |
| Tesamorelin | | U.S. Pat. No. 5,861,379 |
| Brentuximab vedotin | | |
| Taliglucerase alpha | Enzymes | |
| Belimumab | Monoclo 1 antibodies | |
| Aflibercept | Antineoplastic Agents | U.S. Pat. No. 7,306,799 |
| | and Ophthalmics | |
| Asparagi se erwinia | Enzymes | |
| chrysanthemi | | |
| Ocriplasmin | Ophthalmics | |
| Glucarpidase | Enzymes | |
| Teduglutide | | U.S. Pat. No. 5,789,379 |
| Raxibacumab | Anti-Infective Agents | |
| | and Monoclo 1 | |
| | antibodies | |
| Certolizumab pegol | TNF inhibitor | CA2380298 |
| Insulin, isophane | Hypoglycemic Agents | |
| | and Antidiabetic | |
| | Agents | |
| Epoetin zeta | | |
| Obinutuzumab | Antineoplastic Agents | |
| Fibrinolysin aka | | U.S. Pat. No. 3,234,106 |
| plasmin | | |
| Follitropin alpha | | |
| Romiplostim | Colony-Stimulating | |
| | Factors and | |
| | Thrombopoietic | |
| | Agents | |
| Luci ctant | Pulmo ry surfactants | U.S. Pat. No. 5,407,914 |
| talizumab | Immunosuppressive | |
| | agents | |
| Aliskiren | Renin inhibitor | |
| Ragweed Pollen | | |
| Extract | | |
| Secukinumab | Inhibitor | US20130202610 |
| Somatotropin Recombi | Hormone | CA1326439 |
| nt | Replacement Agents | |
| Drotrecogin alpha | Antisepsis | CA2036894 |
| Alefacept | Dermatologic and | |
| | Immunosupressive | |
| | agents | |
| OspA lipoprotein | Vaccines | |
| Uroki se | | U.S. Pat. No. 4,258,030 |
| Abarelix | Anti-Testosterone | U.S. Pat. No. 5,968,895 |
| | Agents | |
| Sermorelin | Hormone | |
| | Replacement Agents | |
| Aprotinin | | U.S. Pat. No. 5,198,534 |
| Gemtuzumab | Antineoplastic agents | U.S. Pat. No. 5,585,089 |
| ozogamicin | and Immunotoxins | |
| Satumomab Pendetide | Diagnostic Agents | |
| Albiglutide | Drugs used in | |
| | diabetes; alimentary | |
| | tract and metabolism; | |
| | blood glucose | |
| | lowering drugs, excl. | |
| | insulins. | |
| Alirocumab | | |
| Ancestim | | |
| Antithrombin alpha | | |
| Antithrombin III | | |
| human | | |
| Asfotase alpha | Enzymes Alimentary | |
| | Tract and Metabolism | |
| Atezolizumab | | |
| Autologous cultured | | |
| chondrocytes | | |
| B er actant | | |
| Bli tumomab | Antineoplastic Agents | US20120328618 |
| | Immunosuppressive | |
| | Agents Monoclo 1 | |
| | antibodies | |
| | Antineoplastic and | |
| | Immunomodulating | |
| | Agents | |
| C1 Esterase Inhibitor | | |
| (Human) | | |
| Coagulation Factor | | |
| XIII A-Subunit | | |
| (Recombi nt) | | |
| Conestat alpha | | |
| Daratumumab | Antineoplastic Agents | |
| Desirudin | | |
| Dulaglutide | Hypoglycemic | |
| | Agents; Drugs Used | |
| | in Diabetes; | |
| | Alimentary Tract and | |
| | Metabolism; Blood | |
| | Glucose Lowering | |
| | Drugs, Excl. Insulins | |
| Elosulfase alpha | Enzymes; Alimentary | |
| | Tract and Metabolism | |
| Elotuzumab | | US2014055370 |
| Evolocumab | Lipid Modifying | |
| | Agents, Plain; | |
| | Cardiovascular | |
| | System | |
| Fibrinogen | | |
| Concentrate (Human) | | |
| Filgrastim-sndz | | |
| Gastric intrinsic factor | | |
| Hepatitis B immune | | |
| globulin | | |
| Human calcitonin | | |
| Human Clostridium | | |
| tetani toxoid immune | | |
| globulin | | |
| Human rabies virus | | |
| immune globulin | | |
| Human Rho(D) | | |
| immune globulin | | |
| Hyaluronidase (Human | | U.S. Pat. No. 7,767,429 |
| Recombi nt) | | |
| Idarucizumab | Anticoagulant | |
| Immune Globulin | Immunologic Factors; | |
| Human | Immunosuppressive | |
| | Agents; Anti-Infective | |
| | Agents | |
| Vedolizumab | Immunosupressive | US2012151248 |
| | agent, Antineoplastic | |
| | agent | |
| Ustekinumab | Deramtologic agent, | |
| | Immunosuppressive | |
| | agent, antineoplastic | |
| | agent | |
| Turoctocog alpha | | |
| Tuberculin Purified | | |
| Protein Derivative | | |
| Simoctocog alpha | Antihaemorrhagics: | |
| | blood coagulation | |
| | factor VIII | |
| Siltuximab | Antineoplastic and | U.S. Pat. No. 7,612,182 |
| | Immunomodulating | |
| | Agents, | |
| | Immunosuppressive | |
| | Agents | |
| Sebelipase alpha | Enzymes | |
| Sacrosidase | Enzymes | |
| Ramucirumab | Antineoplastic and | US2013067098 |
| | Immunomodulating | |
| | Agents | |
| Prothrombin complex | | |
| concentrate | | |
| Poractant alpha | Pulmo ry Surfactants | |
| Pembrolizumab | Antineoplastic and | US2012135408 |
| | Immunomodulating | |
| | Agents | |
| Peginterferon beta-1a | | |
| Ofatumumab | Antineoplastic and | U.S. Pat. No. 8,337,847 |
| | Immunomodulating | |
| | Agents | |
| Obiltoxaximab | | |
| Nivolumab | Antineoplastic and | US2013173223 |
| | Immunomodulating | |
| | Agents | |
| Necitumumab | | |
| Metreleptin | | US20070099836 |
| Methoxy polyethylene | | |
| glycol-epoetin beta | | |
| Mepolizumab | Antineoplastic and | US2008134721 |
| | Immunomodulating | |
| | Agents, | |
| | Immunosuppressive | |
| | Agents, Interleukin | |
| | Inhibitors | |
| Ixekizumab | | |
| Insulin Pork | Hypoglycemic | |
| | Agents, Antidiabetic | |
| | Agents | |
| Insulin Degludec | | |
| Insulin Beef | | |
| Thyroglobulin | Hormone therapy | U.S. Pat. No. 5,099,001 |
| Anthrax immune | Plasma derivative | |
| globulin human | | |
| Anti-inhibitor | Blood Coagulation | |
| coagulant complex | Factors, | |
| | Antihemophilic Agent | |
| Anti-thymocyte | Antibody | |
| Globulin (Equine) | | |
| Anti-thymocyte | Antibody | |
| Globulin (Rabbit) | | |
| Brodalumab | Antineoplastic and | |
| | Immunomodulating | |
| | Agents | |
| C1 Esterase Inhibitor | Blood and Blood | |
| (Recombi nt) | Forming Organs | |
| Ca kinumab | Antineoplastic and | |
| | Immunomodulating | |
| | Agents | |
| Chorionic Go dotropin | Hormones | U.S. Pat. No. 6,706,681 |
| (Human) | | |
| Chorionic Go dotropin | Hormones | U.S. Pat. No. 5,767,251 |
| (Recombi nt) | | |
| Coagulation factor X | Blood Coagulation | |
| human | Factors | |
| Dinutuximab | Antibody, | US20140170155 |
| | Immunosuppresive | |
| | agent, Antineoplastic | |
| | agent | |
| Efmoroctocog alpha | Antihemophilic Factor | |
| Factor IX Complex | Antihemophilic agent | |
| (Human) | | |
| Hepatitis A Vaccine | Vaccine | |
| Human Varicella- | Antibody | |
| Zoster Immune | | |
| Globulin | | |
| Ibritumomab tiuxetan | Antibody, | CA2149329 |
| | Immunosuppressive | |
| | Agents | |
| Lenograstim | Antineoplastic and | |
| | Immunomodulating | |
| | Agents | |
| Pegloticase | Enzymes | |
| Protamine sulfate | Heparin Antagonists, | |
| | Hematologic Agents | |
| Protein S human | Anticoagulant plasma | |
| | protein | |
| Sipuleucel-T | Antineoplastic and | U.S. Pat. No. 8,153,120 |
| | Immunomodulating | |
| | Agents | |
| Somatropin recombi nt | Hormones, Hormone | CA1326439, CA2252535, |
| | Substitutes, and | U.S. Pat. No. 5,288,703, |
| | Hormone Antagonists | U.S. Pat. No. 5,849,700, |
| | | U.S. Pat. No. 5,849,704, |
| | | U.S. Pat. No. 5,898,030, |
| | | U.S. Pat. No. 6,004,297, |
| | | U.S. Pat. No. 6,152,897, |
| | | U.S. Pat. No. 6,235,004, |
| | | U.S. Pat. No. 6,899,699 |
| Susoctocog alpha | Blood coagulation | |
| | factors, | |
| | Antihaemorrhagics | |
| Thrombomodulin | Anticoagulant agent, | |
| alpha | Antiplatelet agent | |

TABLE 29
Exemplary monoclonal antibody therapies.

| mAb | Target | Indication |
|---|---|---|
| Muromonab-CD3 | CD3 | Kidney transplant rejection |
| Abciximab | GPIIb/IIIa | Prevention of blood dots in |
| | | angioplasty |
| Rituximab | CD20 | Non-Hodgkin lymphoma |
| Palivizumab | RSV | Prevention of respiratory syncytial |
| | | virus infection |
| Infliximab | TNFα | Crohn's disease |
| Trastuzumab | HER2 | Breast cancer |
| Alemtuzumab | CD52 | Chronic myeloid leukemia |
| Adalimumab | TNFα | Rheumatoid arthritis |
| Ibritumomab | CD20 | Non-Hodgkin lymphoma |
| tiuxetan | | |
| Omalizumab | IgE | Asthma |
| Cetuximab | EGER | Colorectal cancer |
| Bevacizumab | VEGF-A | Colorectal cancer |
| Natalizumab | ITGA4 | Multiple sclerosis |
| Panitumumab | EGFR | Colorectal cancer |
| Ranibizumab | VEGF-A | Macular degeneration |
| Eculizumab | C5 | Paroxysmal nocturnal |
| | | hemoglobinuria |
| Certolizumab | TNFα | Crohn's disease |
| pegol | | |
| Ustekinumab | IL-12/23 | Psoriasis |
| Canakinumab | IL-1β | Muckle-Wells syndrome |
| Golimumab | TNFα | Rheumatoid and psoriatic arthritis, |
| | | ankylosing spondylitis |
| Ofatumumab | CD20 | Chronic lymphocytic leukemia |
| Tocilizumab | IL-6R | Rheumatoid arthritis |
| Denosumab | RANKE | Bone loss |
| Belimumab | BLyS | Systemic lupus erythematosus |
| Ipilimumab | CTLA-4 | Metastatic melanoma |
| Brentuximab | CD30 | Hodgkin lymphoma, systemic |
| vedotin | | anaplastic large cell lymphoma |
| Pertuzumab | HER2 | Breast Cancer |
| Trastuzumab | HER2 | Breast cancer |
| emtansine | | |
| Raxibacumab | B. anthrasis PA | Anthrax infection |
| Obinutuzumab | CD20 | Chronic lymphocytic leukemia |
| Siltuximab | IL-6 | Castleman disease |
| Ramucirumab | VEGFR2 | Gastric cancer |
| Vedolizumab | α4β7 integrin | Ulcerative colitis, Crohn disease |
| Blinatumomab | CD19, CD3 | Acute lymphoblastic leukemia |
| Nivolumab | PD-1 | Melanoma, non-small cell lung |
| | | cancer |
| Pembrolizumab | PD-1 | Melanoma |
| Idarucizumab | Dabigatran | Reversal of dabigatran-induced |
| | | anticoagulation |
| Necitumumab | EGFR | Non-small cell lung cancer |
| Dinutuximab | GD2 | Neuroblastoma |
| Secukinumab | IL-17α | Psoriasis |
| Mepolizumab | IL-5 | Severe eosinophilic asthma |
| Alirocurnab | PCSK9 | High cholesterol |
| Evoloeumab | PCSK9 | High cholesterol |
| Daratumumab | CD38 | Multiple myeloma |
| Elotuzumab | SLAMF7 | Muitiple myeloma |
| Ixekizumab | IL-17α | Psoriasis |
| Reslizumab | IL-5 | Asthma |
| Olaratumab | PDGFRα | Soft tissue sarcoma |
| Bezlotoxumab | Clostridium | Prevention of Clostridium difficile |
| | difficile | infection recurrence |
| | enterotoxin B | |
| Atezoiizumab | PD-L1 | Bladder cancer |
| Obiltoxaximab | B. anthrasis PA | Prevention of inhalational anthrax |
| Inotuzumab | CD22 | Acute lymphoblastic leukemia |
| ozogamicin | | |
| Brodalumab | IL-17R | Plaque psoriasis |
| Guselkumab | IL-23 p19 | Plaque psoriasis |
| Dupilumab | IL-4Rα | Atopic dermatitis |
| Sarilumab | IL-6R | Rheumatoid arthritis |
| Avelumab | PD-L1 | Merkel cell carcinoma |
| Ocrelizumab | CD20 | Multiple sclerosis |
| Emicizumab | Factor IXa, X | Hemophilia A |
| Benralizumab | IL-5Rα | Asthma |
| Gemtuzumab | CD33 | Acute myeloid leukemia |
| ozogamicin | | |
| Durvalumab | PD-L1 | Bladder cancer |
| Burosumab | FGF23 | X-linked hypophosphatemia |
| Lanadelumab | Plasma kallikrein | Hereditary angioedema attacks |
| Mogamulizumab | CCR4 | Mycosis fungoides or Sézary |
| | | syndrome |
| Erenumab | CGRPR | Migraine prevention |
| Galcanezumab | CGRP | Migraine prevention |
| Tildrakizumab | IL-23 p19 | Plaque psoriasis |
| Cemiplimab | PD-1 | Cutaneous squamous cell |
| | | carcinoma |
| Emapalumab | IFNγ | Primary hemophagocytic |
| | | lymphohistiocytosis |
| Fremanezumab | CGRP | Migraine prevention |
| Ibalizumab | CD4 | HIV infection |
| Moxetumomab | CD22 | Hairy cell leukemia |
| pasudodox | | |
| Ravulizuniab | C5 | Paroxysmal nocturnal |
| | | hemoglobinuria |
| Caplacizumab | von Willebrand | Acquired thrombotic |
| | factor | thrombocytopenic purpura |
| Romosozurnab | Sclerostin | Osteoporosis in postmenopausal |
| | | women at increased risk of |
| | | fracture |
| Risankizumab | IL-23 p19 | Plaque psoriasis |
| Polatuzumab | CD79P | Diffuse large B-cell lymphoma |
| vedotin | | |
| Brolucizumab | VEGF-A | Macular degeneration |
| Crizanlizumab | P-selectin | Sickle cell disease |

### Plant-Modification Methods

[0923] Gene Writer systems described herein may be used to modify a plant or a plant part (e.g., leaves, roots, flowers, fruits, or seeds), e.g., to increase the fitness of a plant.

### A. Delivery to a Plant

[0924] Provided herein are methods of delivering a Gene Writer system described herein to a plant. Included are methods for delivering a Gene Writer system to a plant by contacting the plant, or part thereof, with a Gene Writer system. The methods are useful for modifying the plant to, e.g., increase the fitness of a plant.

[0925] More specifically, in some embodiments, a nucleic acid described herein (e.g., a nucleic acid encoding a GeneWriter) may be encoded in a vector, e.g., inserted adjacent to a plant promoter, e.g., a maize ubiquitin promoter (ZmUBI) in a plant vector (e.g., pHUC411). In some embodiments, the nucleic acids described herein are introduced into a plant (e.g., japonica rice) or part of a plant (e.g., a callus of a plant) via agrobacteria. In some embodiments, the systems and methods described herein can be used in plants by replacing a plant gene (e.g., hygromycin phosphotransferase (HPT)) with a null allele (e.g., containing a base substitution at the start codon). Systems and methods for modifying a plant genome are described in Xu et. al. Development of plant prime-editing systems for precise genome editing, 2020, Plant Communications.

[0926] In one aspect, provided herein is a method of increasing the fitness of a plant, the method including delivering to the plant the Gene Writer system described herein (e.g., in an effective amount and duration) to increase the fitness of the plant relative to an untreated plant (e.g., a plant that has not been delivered the Gene Writer system).

[0927] An increase in the fitness of the plant as a consequence of delivery of a Gene Writer system can manifest in a number of ways, e.g., thereby resulting in a better production of the plant, for example, an improved yield, improved vigor of the plant or quality of the harvested product from the plant, an improvement in pre- or post-harvest traits deemed desirable for agriculture or horticulture (e.g., taste, appearance, shelf life), or for an improvement of traits that otherwise benefit humans (e.g., decreased allergen production). An improved yield of a plant relates to an increase in the yield of a product (e.g., as measured by plant biomass, grain, seed or fruit yield, protein content, carbohydrate or oil content or leaf area) of the plant by a measurable amount over the yield of the same product of the plant produced under the same conditions, but without the application of the instant compositions or compared with application of conventional plant-modifying agents. For example, yield can be increased by at least about 0.5%, about 1%, about 2%, about 3%, about 4%, about 5%, about 10%, about 20%, about 30%, about 40%, about 50%, about 60%, about 70%, about 80%, about 90%, about 100%, or more than 100%. In some instances, the method is effective to increase yield by about 2×-fold, 5×-fold, 10×-fold, 25×-fold, 50×-fold, 75×-fold, 100×-fold, or more than 100×-fold relative to an untreated plant. Yield can be expressed in terms of an amount by weight or volume of the plant or a product of the plant on some basis. The basis can be expressed in terms of time, growing area, weight of plants produced, or amount of a raw material used. For example, such methods may increase the yield of plant tissues including, but not limited to: seeds, fruits, kernels, bolls, tubers, roots, and leaves.

[0928] An increase in the fitness of a plant as a consequence of delivery of a Gene Writer system can also be measured by other means, such as an increase or improvement of the vigor rating, the stand (the number of plants per unit of area), plant height, stalk circumference, stalk length, leaf number, leaf size, plant canopy, visual appearance (such as greener leaf color), root rating, emergence, protein content, increased tillering, bigger leaves, more leaves, less dead basal leaves, stronger tillers, less fertilizer needed, less seeds needed, more productive tillers, earlier flowering, early grain or seed maturity, less plant verse (lodging), increased shoot growth, earlier germination, or any combination of these factors, by a measurable or noticeable amount over the same factor of the plant produced under the same conditions, but without the administration of the instant compositions or with application of conventional plant-modifying agents.

[0929] Accordingly, provided herein is a method of modifying a plant, the method including delivering to the plant an effective amount of any of the Gene Writer systems provided herein, wherein the method modifies the plant and thereby introduces or increases a beneficial trait in the plant (e.g., by about 1%, 2%, 5%, 10%, 20%, 30%, 40%, 50%, 60%, 70%, 80%, 90%, 100%, or more than 100%) relative to an untreated plant. In particular, the method may increase the fitness of the plant (e.g., by about 1%, 2%, 5%, 10%, 20%, 30%, 40%, 50%, 60%, 70%, 80%, 90%, 100%, or more than 100%) relative to an untreated plant.

[0930] In some instances, the increase in plant fitness is an increase (e.g., by about 1%, 2%, 5%, 10%, 20%, 30%, 40%, 50%, 60%, 70%, 80%, 90%, 100%, or more than 100%) in disease resistance, drought tolerance, heat tolerance, cold tolerance, salt tolerance, metal tolerance, herbicide tolerance, chemical tolerance, water use efficiency, nitrogen utilization, resistance to nitrogen stress, nitrogen fixation, pest resistance, herbivore resistance, pathogen resistance, yield, yield under water-limited conditions, vigor, growth, photosynthetic capability, nutrition, protein content, carbohydrate content, oil content, biomass, shoot length, root length, root architecture, seed weight, or amount of harvestable produce.

[0931] In some instances, the increase in fitness is an increase (e.g., by about 1%, 2%, 5%, 10%, 20%, 30%, 40%, 50%, 60%, 70%, 80%, 90%, 100%, or more than 100%) in development, growth, yield, resistance to abiotic stressors, or resistance to biotic stressors. An abiotic stress refers to an environmental stress condition that a plant or a plant part is subjected to that includes, e.g., drought stress, salt stress, heat stress, cold stress, and low nutrient stress. A biotic stress refers to an environmental stress condition that a plant or plant part is subjected to that includes, e.g. nematode stress, insect herbivory stress, fungal pathogen stress, bacterial pathogen stress, or viral pathogen stress. The stress may be temporary, e.g. several hours, several days, several months, or permanent, e.g. for the life of the plant.

[0932] In some instances, the increase in plant fitness is an increase (e.g., by about 1%, 2%, 5%, 10%, 20%, 30%, 40%, 50%, 60%, 70%, 80%, 90%, 100%, or more than 100%) in quality of products harvested from the plant. For example, the increase in plant fitness may be an improvement in commercially favorable features (e.g., taste or appearance) of a product harvested from the plant. In other instances, the increase in plant fitness is an increase in shelf-life of a product harvested from the plant (e.g., by about 1%, 2%, 5%, 10%, 20%, 30%, 40%, 50%, 60%, 70%, 80%, 90%, 100%, or more than 100%).

[0933] Alternatively, the increase in fitness may be an alteration of a trait that is beneficial to human or animal health, such as a reduction in allergen production. For example, the increase in fitness may be a decrease (e.g., by about 1%, 2%, 5%, 10%, 20%, 30%, 40%, 50%, 60%, 70%, 80%, 90%, 100%, or more than 100%) in production of an allergen (e.g., pollen) that stimulates an immune response in an animal (e.g., human).

[0934] The modification of the plant (e.g., increase in fitness) may arise from modification of one or more plant parts. For example, the plant can be modified by contacting leaf, seed, pollen, root, fruit, shoot, flower, cells, protoplasts, or tissue (e.g., meristematic tissue) of the plant. As such, in another aspect, provided herein is a method of increasing the fitness of a plant, the method including contacting pollen of the plant with an effective amount of any of the plant-modifying compositions herein, wherein the method increases the fitness of the plant (e.g., by about 1%, 2%, 5%, 10%, 20%, 30%, 40%, 50%, 60%, 70%, 80%, 90%, 100%, or more than 100%) relative to an untreated plant.

[0935] In yet another aspect, provided herein is a method of increasing the fitness of a plant, the method including contacting a seed of the plant with an effective amount of any of the Gene Writer systems disclosed herein, wherein the method increases the fitness of the plant (e.g., by about 1%, 2%, 5%, 10%, 20%, 30%, 40%, 50%, 60%, 70%, 80%, 90%, 100%, or more than 100%) relative to an untreated plant.

[0936] In another aspect, provided herein is a method including contacting a protoplast of the plant with an effective amount of any of the Gene Writer systems described herein, wherein the method increases the fitness of the plant (e.g., by about 1%, 2%, 5%, 10%, 20%, 30%, 40%, 50%, 60%, 70%, 80%, 90%, 100%, or more than 100%) relative to an untreated plant.

[0937] In a further aspect, provided herein is a method of increasing the fitness of a plant, the method including contacting a plant cell of the plant with an effective amount of any of the Gene Writer system described herein, wherein the method increases the fitness of the plant (e.g., by about 1%, 2%, 5%, 10%, 20%, 30%, 40%, 50%, 60%, 70%, 80%, 90%, 100%, or more than 100%) relative to an untreated plant.

[0938] In another aspect, provided herein is a method of increasing the fitness of a plant, the method including contacting meristematic tissue of the plant with an effective amount of any of the plant-modifying compositions herein, wherein the method increases the fitness of the plant (e.g., by about 1%, 2%, 5%, 10%, 20%, 30%, 40%, 50%, 60%, 70%, 80%, 90%, 100%, or more than 100%) relative to an untreated plant.

[0939] In another aspect, provided herein is a method of increasing the fitness of a plant, the method including contacting an embryo of the plant with an effective amount of any of the plant-modifying compositions herein, wherein the method increases the fitness of the plant (e.g., by about 1%, 2%, 5%, 10%, 20%, 30%, 40%, 50%, 60%, 70%, 80%, 90%, 100%, or more than 100%) relative to an untreated plant.

### B. Application Methods

[0940] A plant described herein can be exposed to any of the Gene Writer system compositions described herein in any suitable manner that permits delivering or administering the composition to the plant. The Gene Writer system may be delivered either alone or in combination with other active (e.g., fertilizing agents) or inactive substances and may be applied by, for example, spraying, injection (e.g, microinjection), through plants, pouring, dipping, in the form of concentrated liquids, gels, solutions, suspensions, sprays, powders, pellets, briquettes, bricks and the like, formulated to deliver an effective concentration of the plant-modifying composition. Amounts and locations for application of the compositions described herein are generally determined by the habitat of the plant, the lifecycle stage at which the plant can be targeted by the plant-modifying composition, the site where the application is to be made, and the physical and functional characteristics of the plant-modifying composition.

[0941] In some instances, the composition is sprayed directly onto a plant, e.g., crops, by e.g., backpack spraying, aerial spraying, crop spraying/dusting etc. In instances where the Gene Writer system is delivered to a plant, the plant receiving the Gene Writer system may be at any stage of plant growth. For example, formulated plant-modifying compositions can be applied as a seed-coating or root treatment in early stages of plant growth or as a total plant treatment at later stages of the crop cycle. In some instances, the plant-modifying composition may be applied as a topical agent to a plant.

[0942] Further, the Gene Writer system may be applied (e.g., in the soil in which a plant grows, or in the water that is used to water the plant) as a systemic agent that is absorbed and distributed through the tissues of a plant. In some instances, plants or food organisms may be genetically transformed to express the Gene Writer system.

[0943] Delayed or continuous release can also be accomplished by coating the Gene Writer system or a composition with the plant-modifying composition(s) with a dissolvable or bioerodable coating layer, such as gelatin, which coating dissolves or erodes in the environment of use, to then make the plant-modifying corn Gene Writer system position available, or by dispersing the agent in a dissolvable or erodable matrix. Such continuous release and/or dispensing means devices may be advantageously employed to consistently maintain an effective concentration of one or more of the plant-modifying compositions described herein.

[0944] In some instances, the Gene Writer system is delivered to a part of the plant, e.g., a leaf, seed, pollen, root, fruit, shoot, or flower, or a tissue, cell, or protoplast thereof. In some instances, the Gene Writer system is delivered to a cell of the plant. In some instances, the Gene Writer system is delivered to a protoplast of the plant. In some instances, the Gene Writer system is delivered to a tissue of the plant. For example, the composition may be delivered to meristematic tissue of the plant (e.g., apical meristem, lateral meristem, or intercalary meristem). In some instances, the composition is delivered to permanent tissue of the plant (e.g., simple tissues (e.g., parenchyma, collenchyma, or sclerenchyma) or complex permanent tissue (e.g., xylem or phloem)). In some instances, the Gene Writer system is delivered to a plant embryo.

### C. Plants

[0945] A variety of plants can be delivered to or treated with a Gene Writer system described herein. Plants that can be delivered a Gene Writer system (i.e., “treated”) in accordance with the present methods include whole plants and parts thereof, including, but not limited to, shoot vegetative organs/structures (e.g., leaves, stems and tubers), roots, flowers and floral organs/structures (e.g., bracts, sepals, petals, stamens, carpels, anthers and ovules), seed (including embryo, endosperm, cotyledons, and seed coat) and fruit (the mature ovary), plant tissue (e.g., vascular tissue, ground tissue, and the like) and cells (e.g., guard cells, egg cells, and the like), and progeny of same. Plant parts can further refer parts of the plant such as the shoot, root, stem, seeds, stipules, leaves, petals, flowers, ovules, bracts, branches, petioles, internodes, bark, pubescence, tillers, rhizomes, fronds, blades, pollen, stamen, and the like.

[0946] The class of plants that can be treated in a method disclosed herein includes the class of higher and lower plants, including angiosperms (monocotyledonous and dicotyledonous plants), gymnosperms, ferns, horsetails, psilophytes, lycophytes, bryophytes, and algae (e.g., multicellular or unicellular algae). Plants that can be treated in accordance with the present methods further include any vascular plant, for example monocotyledons or dicotyledons or gymnosperms, including, but not limited to alfalfa, apple, Arabidopsis, banana, barley, canola, castor bean, chrysanthemum, clover, cocoa, coffee, cotton, cottonseed, corn, crambe, cranberry, cucumber, dendrobium, dioscorea, eucalyptus, fescue, flax, gladiolus, liliacea, linseed, millet, muskmelon, mustard, oat, oil palm, oilseed rape, papaya, peanut, pineapple, ornamental plants, Phaseolus, potato, rapeseed, rice, rye, ryegrass, safflower, sesame, sorghum, soybean, sugarbeet, sugarcane, sunflower, strawberry, tobacco, tomato, turfgrass, wheat and vegetable crops such as lettuce, celery, broccoli, cauliflower, cucurbits; fruit and nut trees, such as apple, pear, peach, orange, grapefruit, lemon, lime, almond, pecan, walnut, hazel; vines, such as grapes (e.g., a vineyard), kiwi, hops; fruit shrubs and brambles, such as raspberry, blackberry, gooseberry; forest trees, such as ash, pine, fir, maple, oak, chestnut, popular; with alfalfa, canola, castor bean, corn, cotton, crambe, flax, linseed, mustard, oil palm, oilseed rape, peanut, potato, rice, safflower, sesame, soybean, sugarbeet, sunflower, tobacco, tomato, and wheat. Plants that can be treated in accordance with the methods of the present invention include any crop plant, for example, forage crop, oilseed crop, grain crop, fruit crop, vegetable crop, fiber crop, spice crop, nut crop, turf crop, sugar crop, beverage crop, and forest crop. In certain instances, the crop plant that is treated in the method is a soybean plant. In other certain instances, the crop plant is wheat. In certain instances, the crop plant is corn. In certain instances, the crop plant is cotton. In certain instances, the crop plant is alfalfa. In certain instances, the crop plant is sugarbeet. In certain instances, the crop plant is rice. In certain instances, the crop plant is potato. In certain instances, the crop plant is tomato.

[0947] In certain instances, the plant is a crop. Examples of such crop plants include, but are not limited to, monocotyledonous and dicotyledonous plants including, but not limited to, fodder or forage legumes, ornamental plants, food crops, trees, or shrubs selected from Acer spp., Allium spp., Amaranthus spp., Ananas comosus, Apium graveolens, Arachis spp, Asparagus officinalis, Beta vulgaris, Brassica spp. (e.g., Brassica napus, Brassica rapa ssp. (canola, oilseed rape, turnip rape), Camellia sinensis, Canna indica, Cannabis saliva, Capsicum spp., Castanea spp., Cichorium endivia, Citrullus lanatus, Citrus spp., Cocos spp., Coffea spp., Coriandrum sativum, Corylus spp., Crataegus spp., Cucurbita spp., Cucumis spp., Daucus carota, Fagus spp., Ficus carica, Fragaria spp., Ginkgo biloba, Glycine spp. (e.g., Glycine max, Soja hispida or Soja max), Gossypium hirsutum, Helianthus spp. (e.g., Helianthus annuus), Hibiscus spp., Hordeum spp. (e.g., Hordeum vulgare), Ipomoea batatas, Juglans spp., Lactuca sativa, Linum usitatissimum, Litchi chinensis, Lotus spp., Luffa acutangula, Lupinus spp., Lycopersicon spp. (e.g., Lycopersicon esculenturn, Lycopersicon lycopersicum, Lycopersicon pyriforme), Malus spp., Medicago sativa, Mentha spp., Miscanthus sinensis, Morus nigra, Musa spp., Nicotiana spp., Olea spp., Oryza spp. (e.g., Oryza sativa, Oryza latifolia), Panicum miliaceum, Panicum virgatum, Passiflora edulis, Petroselinum crispum, Phaseolus spp., Pinus spp., Pistacia vera, Pisum spp., Poa spp., Populus spp., Prunus spp., Pyrus communis, Quercus spp., Raphanus sativus, Rheum rhabarbarum, Ribes spp., Ricinus communis, Rubus spp., Saccharum spp., Salix sp., Sambucus spp., Secale cereale, Sesamum spp., Sinapis spp., Solanum spp. (e.g., Solanum tuberosum, Solanum integrifolium or Solanum lycopersicum), Sorghum bicolor, Sorghum halepense, Spinacia spp., Tamarindus indica, Theobroma cacao, Trifolium spp., Triticosecale rimpaui, Triticum spp. (e.g., Triticum aestivum, Triticum durum, Triticum turgidum, Triticum hybernum, Triticum macha, Triticum sativum or Triticum vulgare), Vaccinium spp., Vicia spp., Vigna spp., Viola odorata, Vitis spp., and Zea mays. In certain embodiments, the crop plant is rice, oilseed rape, canola, soybean, corn (maize), cotton, sugarcane, alfalfa, sorghum, or wheat.

[0948] The plant or plant part for use in the present invention include plants of any stage of plant development. In certain instances, the delivery can occur during the stages of germination, seedling growth, vegetative growth, and reproductive growth. In certain instances, delivery to the plant occurs during vegetative and reproductive growth stages. In some instances, the composition is delivered to pollen of the plant. In some instances, the composition is delivered to a seed of the plant. In some instances, the composition is delivered to a protoplast of the plant. In some instances, the composition is delivered to a tissue of the plant. For example, the composition may be delivered to meristematic tissue of the plant (e.g., apical meristem, lateral meristem, or intercalary meristem). In some instances, the composition is delivered to permanent tissue of the plant (e.g., simple tissues (e.g., parenchyma, collenchyma, or sclerenchyma) or complex permanent tissue (e.g., xylem or phloem)). In some instances, the composition is delivered to a plant embryo. In some instances, the composition is delivered to a plant cell. The stages of vegetative and reproductive growth are also referred to herein as “adult” or “mature” plants.

[0949] In instances where the Gene Writer system is delivered to a plant part, the plant part may be modified by the plant-modifying agent. Alternatively, the Gene Writer system may be distributed to other parts of the plant (e.g., by the plant's circulatory system) that are subsequently modified by the plant-modifying agent.

### Administration

[0950] The composition and systems described herein may be used in vitro or in vivo. In some embodiments the system or components of the system are delivered to cells (e.g., mammalian cells, e.g., human cells), e.g., in vitro or in vivo. In some embodiments, the cells are eukaryotic cells, e.g., cells of a multicellular organism, e.g., an animal, e.g., a mammal (e.g., human, swine, bovine) a bird (e.g., poultry, such as chicken, turkey, or duck), or a fish. In some embodiments, the cells are non-human animal cells (e.g., a laboratory animal, a livestock animal, or a companion animal). In some embodiments, the cell is a stem cell (e.g., a hematopoietic stem cell), a fibroblast, or a T cell. In some embodiments, the cell is a non-dividing cell, e.g., a non-dividing fibroblast or non-dividing T cell. In some embodiments, the cell is an HSC and p53 is not upregulated or is upregulated by less than 10%, 5%, 2%, or 1%, e.g., as determined according to the method described in Example 30 of PCT/US2019/048607 which is hereby incorporated by reference. The skilled artisan will understand that the components of the Gene Writer™ system may be delivered in the form of polypeptide, nucleic acid (e.g., DNA, RNA), and combinations thereof.

[0951] For instance, delivery can use any of the following combinations for delivering the retrotransposase (e.g., as DNA encoding the retrotransposase protein, as RNA encoding the retrotransposase protein, or as the protein itself) and the template RNA (e.g., as DNA encoding the RNA, or as RNA):
[0952] 1. Retrotransposase DNA+template DNA
[0953] 2. Retrotransposase RNA+template DNA
[0954] 3. Retrotransposase DNA+template RNA
[0955] 4. Retrotransposase RNA+template RNA
[0956] 5. Retrotransposase protein+template DNA
[0957] 6. Retrotransposase protein+template RNA
[0958] 7. Retrotransposase virus+template virus
[0959] 8. Retrotransposase virus+template DNA
[0960] 9. Retrotransposase virus+template RNA
[0961] 10. Retrotransposase DNA+template virus
[0962] 11. Retrotransposase RNA+template virus
[0963] 12. Retrotransposase protein+template virus

[0964] As indicated above, in some embodiments, the DNA or RNA that encodes the retrotransposase protein is delivered using a virus, and in some embodiments, the template RNA (or the DNA encoding the template RNA) is delivered using a virus.

[0965] In one embodiments the system and/or components of the system are delivered as nucleic acid. For example, the Gene Writer™ polypeptide may be delivered in the form of a DNA or RNA encoding the polypeptide, and the template RNA may be delivered in the form of RNA or its complementary DNA to be transcribed into RNA. In some embodiments the system or components of the system are delivered on 1, 2, 3, 4, or more distinct nucleic acid molecules. In some embodiments the system or components of the system are delivered as a combination of DNA and RNA. In some embodiments the system or components of the system are delivered as a combination of DNA and protein. In some embodiments the system or components of the system are delivered as a combination of RNA and protein. In some embodiments the Gene Writer™ genome editor polypeptide is delivered as a protein.

[0966] In some embodiments the system or components of the system are delivered to cells, e.g. mammalian cells or human cells, using a vector. The vector may be, e.g., a plasmid or a virus. In some embodiments delivery is in vivo, in vitro, ex vivo, or in situ. In some embodiments the virus is an adeno associated virus (AAV), a lentivirus, an adenovirus. In some embodiments the system or components of the system are delivered to cells with a viral-like particle or a virosome. In some embodiments the delivery uses more than one virus, viral-like particle or virosome.

[0967] In one embodiment, the compositions and systems described herein can be formulated in liposomes or other similar vesicles. Liposomes are spherical vesicle structures composed of a uni- or multilamellar lipid bilayer surrounding internal aqueous compartments and a relatively impermeable outer lipophilic phospholipid bilayer. Liposomes may be anionic, neutral or cationic. Liposomes are biocompatible, nontoxic, can deliver both hydrophilic and lipophilic drug molecules, protect their cargo from degradation by plasma enzymes, and transport their load across biological membranes and the blood brain barrier (BBB) (see, e.g., Spuch and Navarro, Journal of Drug Delivery, vol. 2011, Article ID 469679, 12 pages, 2011. doi:10.1155/2011/469679 for review).

[0968] Vesicles can be made from several different types of lipids; however, phospholipids are most commonly used to generate liposomes as drug carriers. Methods for preparation of multilamellar vesicle lipids are known in the art (see for example U.S. Pat. No. 6,693,086, the teachings of which relating to multilamellar vesicle lipid preparation are incorporated herein by reference). Although vesicle formation can be spontaneous when a lipid film is mixed with an aqueous solution, it can also be expedited by applying force in the form of shaking by using a homogenizer, sonicator, or an extrusion apparatus (see, e.g., Spuch and Navarro, Journal of Drug Delivery, vol. 2011, Article ID 469679, 12 pages, 2011. doi:10.1155/2011/469679 for review). Extruded lipids can be prepared by extruding through filters of decreasing size, as described in Templeton et al., Nature Biotech, 15:647-652, 1997, the teachings of which relating to extruded lipid preparation are incorporated herein by reference.

[0969] A variety of nanoparticles can be used for delivery, such as a liposome, a lipid nanoparticle, a cationic lipid nanoparticle, an ionizable lipid nanoparticle, a polymeric nanoparticle, a gold nanoparticle, a dendrimer, a cyclodextrin nanoparticle, a micelle, or a combination of the foregoing.

[0970] Lipid nanoparticles are an example of a carrier that provides a biocompatible and biodegradable delivery system for the pharmaceutical compositions described herein. Nanostructured lipid carriers (NLCs) are modified solid lipid nanoparticles (SLNs) that retain the characteristics of the SLN, improve drug stability and loading capacity, and prevent drug leakage. Polymer nanoparticles (PNPs) are an important component of drug delivery. These nanoparticles can effectively direct drug delivery to specific targets and improve drug stability and controlled drug release. Lipid-polymer nanoparticles (PLNs), a new type of carrier that combines liposomes and polymers, may also be employed. These nanoparticles possess the complementary advantages of PNPs and liposomes. A PLN is composed of a core-shell structure; the polymer core provides a stable structure, and the phospholipid shell offers good biocompatibility. As such, the two components increase the drug encapsulation efficiency rate, facilitate surface modification, and prevent leakage of water-soluble drugs. For a review, see, e.g., Li et al. 2017, Nanomaterials 7, 122; doi:10.3390/nano7060122.

[0971] Exosomes can also be used as drug delivery vehicles for the compositions and systems described herein. For a review, see Ha et al. July 2016. Acta Pharmaceutica Sinica B. Volume 6, Issue 4, Pages 287-296; doi.org/10.1016/j.apsb.2016.02.001.

[0972] Fusosomes interact and fuse with target cells, and thus can be used as delivery vehicles for a variety of molecules. They generally consist of a bilayer of amphipathic lipids enclosing a lumen or cavity and a fusogen that interacts with the amphipathic lipid bilayer. The fusogen component has been shown to be engineerable in order to confer target cell specificity for the fusion and payload delivery, allowing the creation of delivery vehicles with programmable cell specificity (see for example Patent Application WO2020014209, the teachings of which relating to fusosome design, preparation, and usage are incorporated herein by reference).

[0973] In some embodiments, the protein component(s) of the Gene Writing™ system may be pre-associated with the template nucleic acid (e.g., template RNA). For example, in some embodiments, the Gene Writer™ polypeptide may be first combined with the template nucleic acid (e.g., template RNA) to form a ribonucleoprotein (RNP) complex. In some embodiments, the RNP may be delivered to cells via, e.g., transfection, nucleofection, virus, vesicle, LNP, exosome, fusosome.

[0974] A Gene Writer™ system can be introduced into cells, tissues and multicellular organisms. In some embodiments the system or components of the system are delivered to the cells via mechanical means or physical means.

[0975] Formulation of protein therapeutics is described in Meyer (Ed.), Therapeutic Protein Drug Products: Practical Approaches to formulation in the Laboratory, Manufacturing, and the Clinic, Woodhead Publishing Series (2012).

### Tissue Specific Activity/Administration

[0976] In some embodiments, a system, template RNA, or polypeptide described herein is administered to or is active in (e.g., is more active in) a target tissue, e.g., a first tissue. In some embodiments, the system, template RNA, or polypeptide is not administered to or is less active in (e.g., not active in) a non-target tissue. In some embodiments, a system, template RNA, or polypeptide described herein is useful for modifying DNA in a target tissue, e.g., a first tissue, (e.g., and not modifying DNA in a non-target tissue).

[0977] In some embodiments, a system comprises (a) a polypeptide described herein or a nucleic acid encoding the same, (b) a template nucleic acid (e.g., template RNA) described herein, and (c) one or more first tissue-specific expression-control sequences specific to the target tissue, wherein the one or more first tissue-specific expression-control sequences specific to the target tissue are in operative association with (a), (b), or (a) and (b), wherein, when associated with (a), (a) comprises a nucleic acid encoding the polypeptide.

[0978] In some embodiments, the nucleic acid in (b) comprises RNA.

[0979] In some embodiments, the nucleic acid in (b) comprises DNA.

[0980] In some embodiments, the nucleic acid in (b): (i) is single-stranded or comprises a single-stranded segment, e.g., is single-stranded DNA or comprises a single-stranded segment and one or more double stranded segments; (ii) has inverted terminal repeats; or (iii) both (i) and (ii).

[0981] In some embodiments, the nucleic acid in (b) is double-stranded or comprises a double-stranded segment.

[0982] In some embodiments, (a) comprises a nucleic acid encoding the polypeptide.

[0983] In some embodiments, the nucleic acid in (a) comprises RNA.

[0984] In some embodiments, the nucleic acid in (a) comprises DNA.

[0985] In some embodiments, the nucleic acid in (a): (i) is single-stranded or comprises a single-stranded segment, e.g., is single-stranded DNA or comprises a single-stranded segment and one or more double stranded segments; (ii) has inverted terminal repeats; or (iii) both (i) and (ii).

[0986] In some embodiments, the nucleic acid in (a) is double-stranded or comprises a double-stranded segment.

[0987] In some embodiments, the nucleic acid in (a), (b), or (a) and (b) is linear.

[0988] In some embodiments, the nucleic acid in (a), (b), or (a) and (b) is circular, e.g., a plasmid or minicircle.

[0989] In some embodiments, the heterologous object sequence is in operative association with a first promoter.

[0990] In some embodiments, the one or more first tissue-specific expression-control sequences comprises a tissue specific promoter.

[0991] In some embodiments, the tissue-specific promoter comprises a first promoter in operative association with: i. the heterologous object sequence, ii. a nucleic acid encoding the transposase, or iii. (i) and (ii).

[0992] In some embodiments, the one or more first tissue-specific expression-control sequences comprises a tissue-specific microRNA recognition sequence in operative association with: i. the heterologous object sequence, ii. a nucleic acid encoding the transposase, or iii. (i) and (ii).

[0993] In some embodiments, a system comprises a tissue-specific promoter, and the system further comprises one or more tissue-specific microRNA recognition sequences, wherein: i. the tissue specific promoter is in operative association with: I. the heterologous object sequence, II. a nucleic acid encoding the transposase, or III. (I) and (II); and/or ii. the one or more tissue-specific microRNA recognition sequences are in operative association with: I. the heterologous object sequence, II. a nucleic acid encoding the transposase, or III. (I) and (II).

[0994] In some embodiments, wherein (a) comprises a nucleic acid encoding the polypeptide, the nucleic acid comprises a promoter in operative association with the nucleic acid encoding the polypeptide.

[0995] In some embodiments, the nucleic acid encoding the polypeptide comprises one or more second tissue-specific expression-control sequences specific to the target tissue in operative association with the polypeptide coding sequence.

[0996] In some embodiments, the one or more second tissue-specific expression-control sequences comprises a tissue specific promoter.

[0997] In some embodiments, the tissue-specific promoter is the promoter in operative association with the nucleic acid encoding the polypeptide.

[0998] In some embodiments, the one or more second tissue-specific expression-control sequences comprises a tissue-specific microRNA recognition sequence.

[0999] In some embodiments, the promoter in operative association with the nucleic acid encoding the polypeptide is a tissue-specific promoter, the system further comprising one or more tissue-specific microRNA recognition sequences.

[1000] In some embodiments, a nucleic acid component of a system provided by the invention a sequence (e.g., encoding the polypeptide or comprising a heterologous object sequence) is flanked by untranslated regions (UTRs) that modify protein expression levels. Various 5′ and 3′ UTRs can affect protein expression. For example, in some embodiments, the coding sequence may be preceded by a 5′ UTR that modifies RNA stability or protein translation. In some embodiments, the sequence may be followed by a 3′ UTR that modifies RNA stability or translation. In some embodiments, the sequence may be preceded by a 5′ UTR and followed by a 3′ UTR that modify RNA stability or translation. In some embodiments, the 5′ and/or 3′ UTR may be selected from the 5′ and 3′ UTRs of complement factor 3 (C3) (cactcctccccatcctctccctctgtccctctgtccctctgaccctgcactgtcccagcacc (SEQ ID NO: 1633)) or orosomucoid 1 (ORM1) (caggacacagccttggatcaggacagagacttgggggccatcctgcccctccaacccgacatgtgtacctcagctttttccctcacttgcatcaataaagcttctgtgtttggaacagctaa (SEQ ID NO: 1634)) (Asrani et al. RNA Biology 2018). In certain embodiments, the 5′ UTR is the 5′ UTR from C3 and the 3′ UTR is the 3′ UTR from ORM1. In certain embodiments, a 5′ UTR and 3′ UTR for protein expression, e.g., mRNA (or DNA encoding the RNA) for a Gene Writer polypeptide or heterologous object sequence, comprise optimized expression sequences. In some embodiments, the 5′ UTR comprises GGGAAAUAAGAGAGAAAAGAAGAGUAAGAAGAAAUAUAAGAGCCACC (SEQ ID NO: 1603) and/or the 3′ UTR comprising UGAUAAUAGGCUGGAGCCUCGGUGGCCAUGCUUCUUGCCCCUUGGGCCUCCCCCCAGCCCCUCCUCCCCUUCCUGCACCCGUACCCCCGUGGUCUUUGAAUAAAGUCUGA (SEQ ID NO: 1604), e.g., as described in Richner et al. Cell 168(6): P 1114-1125 (2017), the sequences of which are incorporated herein by reference.

[1001] In some embodiments, a 5′ and/or 3′ UTR may be selected to enhance protein expression. In some embodiments, a 5′ and/or 3′ UTR may be selected to modify protein expression such that overproduction inhibition is minimized. In some embodiments, UTRs are around a coding sequence, e.g., outside the coding sequence and in other embodiments proximal to the coding sequence, In some embodiments additional regulatory elements (e.g., miRNA binding sites, cis-regulatory sites) are included in the UTRs.

[1002] In some embodiments, an open reading frame of a Gene Writer system, e.g., an ORF of an mRNA (or DNA encoding an mRNA) encoding a Gene Writer polypeptide or one or more ORFs of an mRNA (or DNA encoding an mRNA) of a heterologous object sequence, is flanked by a 5′ and/or 3′ untranslated region (UTR) that enhances the expression thereof. In some embodiments, the 5′ UTR of an mRNA component (or transcript produced from a DNA component) of the system comprises the sequence 5′-GGGAAAUAAGAGAGAAAAGAAGAGUAAGAAGAAAUAUAAGAGCCACC-3′ (SEQ ID NO: 1603). In some embodiments, the 3′ UTR of an mRNA component (or transcript produced from a DNA component) of the system comprises the sequence 5′-UGAUAAUAGGCUGGAGCCUCGGUGGCCAUGCUUCUUGCCCCUUGGGCCUCCCCCCAGCCCCUCCUCCCCUUCCUGCACCCGUACCCCCGUGGUCUUUGAAUAAAGUCUGA-3′ (SEQ ID NO: 1604). This combination of 5′ UTR and 3′ UTR has been shown to result in desirable expression of an operably linked ORF by Richner et al. Cell 168(6): P 1114-1125 (2017), the teachings and sequences of which are incorporated herein by reference. In some embodiments, a system described herein comprises a DNA encoding a transcript, wherein the DNA comprises the corresponding 5′ UTR and 3′ UTR sequences, with T substituting for U in the above-listed sequence). In some embodiments, a DNA vector used to produce an RNA component of the system further comprises a promoter upstream of the 5′ UTR for initiating in vitro transcription, e.g, a T7, T3, or SP6 promoter. The 5′ UTR above begins with GGG, which is a suitable start for optimizing transcription using T7 RNA polymerase. For tuning transcription levels and altering the transcription start site nucleotides to fit alternative 5′ UTRs, the teachings of Davidson et al. Pac Symp Biocomput 433-443 (2010) describe T7 promoter variants, and the methods of discovery thereof, that fulfill both of these traits.

### Viral Vectors and Components Thereof

[1003] Viruses are a useful source of delivery vehicles for the systems described herein, in addition to a source of relevant enzymes or domains as described herein, e.g., as sources of polymerases and polymerase functions used herein, e.g., DNA-dependent DNA polymerase, RNA-dependent RNA polymerase, RNA-dependent DNA polymerase, DNA-dependent RNA polymerase, reverse transcriptase. Some enzymes, e.g., reverse transcriptases, may have multiple activities, e.g., be capable of both RNA-dependent DNA polymerization and DNA-dependent DNA polymerization, e.g., first and second strand synthesis. In some embodiments, the virus used as a Gene Writer delivery system or a source of components thereof may be selected from a group as described by Baltimore Bacteriol Rev 35(3):235-241 (1971).

[1004] In some embodiments, the virus is selected from a Group I virus, e.g., is a DNA virus and packages dsDNA into virions. In some embodiments, the Group I virus is selected from, e.g., Adenoviruses, Herpesviruses, Poxviruses.

[1005] In some embodiments, the virus is selected from a Group II virus, e.g., is a DNA virus and packages ssDNA into virions. In some embodiments, the Group II virus is selected from, e.g., Parvoviruses. In some embodiments, the parvovirus is a dependoparvovirus, e.g., an adeno-associated virus (AAV).

[1006] In some embodiments, the virus is selected from a Group III virus, e.g., is an RNA virus and packages dsRNA into virions. In some embodiments, the Group III virus is selected from, e.g., Reoviruses. In some embodiments, one or both strands of the dsRNA contained in such virions is a coding molecule able to serve directly as mRNA upon transduction into a host cell, e.g., can be directly translated into protein upon transduction into a host cell without requiring any intervening nucleic acid replication or polymerization steps.

[1007] In some embodiments, the virus is selected from a Group IV virus, e.g., is an RNA virus and packages ssRNA(+) into virions. In some embodiments, the Group IV virus is selected from, e.g., Coronaviruses, Picornaviruses, Togaviruses. In some embodiments, the ssRNA(+) contained in such virions is a coding molecule able to serve directly as mRNA upon transduction into a host cell, e.g., can be directly translated into protein upon transduction into a host cell without requiring any intervening nucleic acid replication or polymerization steps.

[1008] In some embodiments, the virus is selected from a Group V virus, e.g., is an RNA virus and packages ssRNA(−) into virions. In some embodiments, the Group V virus is selected from, e.g., Orthomyxoviruses, Rhabdoviruses. In some embodiments, an RNA virus with an ssRNA(−) genome also carries an enzyme inside the virion that is transduced to host cells with the viral genome, e.g., an RNA-dependent RNA polymerase, capable of copying the ssRNA(−) into ssRNA(+) that can be translated directly by the host.

[1009] In some embodiments, the virus is selected from a Group VI virus, e.g., is a retrovirus and packages ssRNA(+) into virions. In some embodiments, the Group VI virus is selected from, e.g., Retroviruses. In some embodiments, the retrovirus is a lentivirus, e.g., HIV-1, HIV-2, SIV, BIV. In some embodiments, the retrovirus is a spumavirus, e.g., a foamy virus, e.g., HFV, SFV, BFV. In some embodiments, the ssRNA(+) contained in such virions is a coding molecule able to serve directly as mRNA upon transduction into a host cell, e.g., can be directly translated into protein upon transduction into a host cell without requiring any intervening nucleic acid replication or polymerization steps. In some embodiments, the ssRNA(+) is first reverse transcribed and copied to generate a dsDNA genome intermediate from which mRNA can be transcribed in the host cell. In some embodiments, an RNA virus with an ssRNA(+) genome also carries an enzyme inside the virion that is transduced to host cells with the viral genome, e.g., an RNA-dependent DNA polymerase, capable of copying the ssRNA(+) into dsDNA that can be transcribed into mRNA and translated by the host. In some embodiments, the reverse transcriptase from a Group VI retrovirus is incorporated as the reverse transcriptase domain of a Gene Writer polypeptide.

[1010] In some embodiments, the virus is selected from a Group VII virus, e.g., is a retrovirus and packages dsRNA into virions. In some embodiments, the Group VII virus is selected from, e.g., Hepadnaviruses. In some embodiments, one or both strands of the dsRNA contained in such virions is a coding molecule able to serve directly as mRNA upon transduction into a host cell, e.g., can be directly translated into protein upon transduction into a host cell without requiring any intervening nucleic acid replication or polymerization steps. In some embodiments, one or both strands of the dsRNA contained in such virions is first reverse transcribed and copied to generate a dsDNA genome intermediate from which mRNA can be transcribed in the host cell. In some embodiments, an RNA virus with a dsRNA genome also carries an enzyme inside the virion that is transduced to host cells with the viral genome, e.g., an RNA-dependent DNA polymerase, capable of copying the dsRNA into dsDNA that can be transcribed into mRNA and translated by the host. In some embodiments, the reverse transcriptase from a Group VII retrovirus is incorporated as the reverse transcriptase domain of a Gene Writer polypeptide.

[1011] In some embodiments, virions used to deliver nucleic acid in this invention may also carry enzymes involved in the process of Gene Writing. For example, a retroviral virion may contain a reverse transcriptase domain that is delivered into a host cell along with the nucleic acid. In some embodiments, an RNA template may be associated with a Gene Writer polypeptide within a virion, such that both are co-delivered to a target cell upon transduction of the nucleic acid from the viral particle. In some embodiments, the nucleic acid in a virion may comprise DNA, e.g., linear ssDNA, linear dsDNA, circular ssDNA, circular dsDNA, minicircle DNA, dbDNA, ceDNA. In some embodiments, the nucleic acid in a virion may comprise RNA, e.g., linear ssRNA, linear dsRNA, circular ssRNA, circular dsRNA. In some embodiments, a viral genome may circularize upon transduction into a host cell, e.g., a linear ssRNA molecule may undergo a covalent linkage to form a circular ssRNA, a linear dsRNA molecule may undergo a covalent linkage to form a circular dsRNA or one or more circular ssRNA. In some embodiments, a viral genome may replicate by rolling circle replication in a host cell. In some embodiments, a viral genome may comprise a single nucleic acid molecule, e.g., comprise a non-segmented genome. In some embodiments, a viral genome may comprise two or more nucleic acid molecules, e.g., comprise a segmented genome. In some embodiments, a nucleic acid in a virion may be associated with one or proteins. In some embodiments, one or more proteins in a virion may be delivered to a host cell upon transduction. In some embodiments, a natural virus may be adapted for nucleic acid delivery by the addition of virion packaging signals to the target nucleic acid, wherein a host cell is used to package the target nucleic acid containing the packaging signals.

[1012] In some embodiments, a virion used as a delivery vehicle may comprise a commensal human virus. In some embodiments, a virion used as a delivery vehicle may comprise an anellovirus, the use of which is described in WO2018232017A1, which is incorporated herein by reference in its entirety.

### AAV Administration

[1013] In some embodiments, an adeno-associated virus (AAV) is used in conjunction with the system, template nucleic acid, and/or polypeptide described herein. In some embodiments, an AAV is used to deliver, administer, or package the system, template nucleic acid, and/or polypeptide described herein. In some embodiments, the AAV is a recombinant AAV (rAAV).

[1014] In some embodiments, a system comprises (a) a polypeptide described herein or a nucleic acid encoding the same, (b) a template nucleic acid (e.g., template RNA) described herein, and (c) one or more first tissue-specific expression-control sequences specific to the target tissue, wherein the one or more first tissue-specific expression-control sequences specific to the target tissue are in operative association with (a), (b), or (a) and (b), wherein, when associated with (a), (a) comprises a nucleic acid encoding the polypeptide.

[1015] In some embodiments, a system described herein further comprises a first recombinant adeno-associated virus (rAAV) capsid protein; wherein the at least one of (a) or (b) is associated with the first rAAV capsid protein, wherein at least one of (a) or (b) is flanked by AAV inverted terminal repeats (ITRs).

[1016] In some embodiments, (a) and (b) are associated with the first rAAV capsid protein.

[1017] In some embodiments, (a) and (b) are on a single nucleic acid.

[1018] In some embodiments, the system further comprises a second rAAV capsid protein, wherein at least one of (a) or (b) is associated with the second rAAV capsid protein, and wherein the at least one of (a) or (b) associated with the second rAAV capsid protein is different from the at least one of (a) or (b) is associated with the first rAAV capsid protein.

[1019] In some embodiments, the at least one of (a) or (b) is associated with the first or second rAAV capsid protein is dispersed in the interior of the first or second rAAV capsid protein, which first or second rAAV capsid protein is in the form of an AAV capsid particle.

[1020] In some embodiments, the system further comprises a nanoparticle, wherein the nanoparticle is associated with at least one of (a) or (b).

[1021] In some embodiments, (a) and (b), respectively are associated with: a) a first rAAV capsid protein and a second rAAV capsid protein; b) a nanoparticle and a first rAAV capsid protein; c) a first rAAV capsid protein; d) a first adenovirus capsid protein; e) a first nanoparticle and a second nanoparticle; or f) a first nanoparticle.

[1022] Viral vectors are useful for delivering all or part of a system provided by the invention, e.g., for use in methods provided by the invention. Systems derived from different viruses have been employed for the delivery of polypeptides, nucleic acids, or transposons; for example: integrase-deficient lentivirus, adenovirus, adeno-associated virus (AAV), herpes simplex virus, and baculovirus (reviewed in Hodge et al. Hum Gene Ther 2017; Narayanavari et al. Crit Rev Biochem Mol Biol 2017; Boehme et al. Curr Gene Ther 2015).

[1023] Adenoviruses are common viruses that have been used as gene delivery vehicles given well-defined biology, genetic stability, high transduction efficiency, and ease of large-scale production (see, for example, review by Lee et al. Genes & Diseases 2017). They possess linear dsDNA genomes and come in a variety of serotypes that differ in tissue and cell tropisms. In order to prevent replication of infectious virus in recipient cells, adenovirus genomes used for packaging are deleted of some or all endogenous viral proteins, which are provided in trans in viral production cells. This renders the genomes helper-dependent, meaning they can only be replicated and packaged into viral particles in the presence of the missing components provided by so-called helper functions. A helper-dependent adenovirus system with all viral ORFs removed may be compatible with packaging foreign DNA of up to ˜37 kb (Parks et al. J Virol 1997). In some embodiments, an adenoviral vector is used to deliver DNA corresponding to the polypeptide or template component of the Gene Writing™ system, or both are contained on separate or the same adenoviral vector. In some embodiments, the adenovirus is a helper-dependent adenovirus (HD-AdV) that is incapable of self-packaging. In some embodiments, the adenovirus is a high-capacity adenovirus (HC-AdV) that has had all or a substantial portion of endogenous viral ORFs deleted, while retaining the necessary sequence components for packaging into adenoviral particles. For this type of vector, the only adenoviral sequences required for genome packaging are noncoding sequences: the inverted terminal repeats (ITRs) at both ends and the packaging signal at the 5′-end (Jager et al. Nat Protoc 2009). In some embodiments, the adenoviral genome also comprises stuffer DNA to meet a minimal genome size for optimal production and stability (see, for example, Hausl et al. Mol Ther 2010). Adenoviruses have been used in the art for the delivery of transposons to various tissues. In some embodiments, an adenovirus is used to deliver a Gene Writing™ system to the liver.

[1024] In some embodiments, an adenovirus is used to deliver a Gene Writing™ system to HSCs, e.g., HDAd5/35++. HDAd5/35++ is an adenovirus with modified serotype 35 fibers that de-target the vector from the liver (Wang et al. Blood Adv 2019). In some embodiments, the adenovirus that delivers a Gene Writing™ system to HSCs utilizes a receptor that is expressed specifically on primitive HSCs, e.g., CD46.

[1025] Adeno-associated viruses (AAV) belong to the parvoviridae family and more specifically constitute the dependoparvovirus genus. The AAV genome is composed of a linear single-stranded DNA molecule which contains approximately 4.7 kilobases (kb) and consists of two major open reading frames (ORFs) encoding the non-structural Rep (replication) and structural Cap (capsid) proteins. A second ORF within the cap gene was identified that encodes the assembly-activating protein (AAP). The DNAs flanking the AAV coding regions are two cis-acting inverted terminal repeat (ITR) sequences, approximately 145 nucleotides in length, with interrupted palindromic sequences that can be folded into energetically stable hairpin structures that function as primers of DNA replication. In addition to their role in DNA replication, the ITR sequences have been shown to be involved in viral DNA integration into the cellular genome, rescue from the host genome or plasmid, and encapsidation of viral nucleic acid into mature virions (Muzyczka, (1992) Curr. Top. Micro. Immunol. 158:97-129). In some embodiments, one or more Gene Writing™ nucleic acid components is flanked by ITRs derived from AAV for viral packaging. See, e.g., WO2019113310.

[1026] In some embodiments, one or more components of the Gene Writing™ system are carried via at least one AAV vector. In some embodiments, the at least one AAV vector is selected for tropism to a particular cell, tissue, organism. In some embodiments, the AAV vector is pseudotyped, e.g., AAV2/8, wherein AAV2 describes the design of the construct but the capsid protein is replaced by that from AAV8. It is understood that any of the described vectors could be pseudotype derivatives, wherein the capsid protein used to package the AAV genome is derived from that of a different AAV serotype. In some embodiments, an AAV to be employed for Gene Writing™ may be evolved for novel cell or tissue tropism as has been demonstrated in the literature (e.g., Davidsson et al. Proc Natl Acad Sci USA 2019).

[1027] In some embodiments, the AAV delivery vector is a vector which has two AAV inverted terminal repeats (ITRs) and a nucleotide sequence of interest (for example, a sequence coding for a Gene Writer™ polypeptide or a DNA template, or both), each of said ITRs having an interrupted (or noncontiguous) palindromic sequence, i.e., a sequence composed of three segments: a first segment and a last segment that are identical when read 5′→3′ but hybridize when placed against each other, and a segment that is different that separates the identical segments. Such sequences, notably the ITRs, form hairpin structures. See, for example, WO2012123430.

[1028] Conventionally, AAV virions with capsids are produced by introducing a plasmid or plasmids encoding the rAAV or scAAV genome, Rep proteins, and Cap proteins (Grimm et al, 1998). Upon introduction of these helper plasmids in trans, the AAV genome is “rescued” (i.e., released and subsequently recovered) from the host genome, and is further encapsidated to produce infectious AAV. In some embodiments, one or more Gene Writing™ nucleic acids are packaged into AAV particles by introducing the ITR-flanked nucleic acids into a packaging cell in conjunction with the helper functions.

[1029] In some embodiments, the AAV genome is a so called self-complementary genome (referred to as scAAV), such that the sequence located between the ITRs contains both the desired nucleic acid sequence (e.g., DNA encoding the Gene Writer™ polypeptide or template, or both) in addition to the reverse complement of the desired nucleic acid sequence, such that these two components can fold over and self-hybridize. In some embodiments, the self-complementary modules are separated by an intervening sequence that permits the DNA to fold back on itself, e.g., forms a stem-loop. An scAAV has the advantage of being poised for transcription upon entering the nucleus, rather than being first dependent on ITR priming and second-strand synthesis to form dsDNA. In some embodiments, one or more Gene Writing™ components is designed as an scAAV, wherein the sequence between the AAV ITRs contains two reverse complementing modules that can self-hybridize to create dsDNA.

[1030] In some embodiments, nucleic acid (e.g., encoding a polypeptide, or a template, or both) delivered to cells is closed-ended, linear duplex DNA (CELiD DNA or ceDNA). In some embodiments, ceDNA is derived from the replicative form of the AAV genome (Li et al. PLoS One 2013). In some embodiments, the nucleic acid (e.g., encoding a polypeptide, or a template DNA, or both) is flanked by ITRs, e.g., AAV ITRs, wherein at least one of the ITRs comprises a terminal resolution site and a replication protein binding site (sometimes referred to as a replicative protein binding site). In some embodiments, the ITRs are derived from an adeno-associated virus, e.g., AAV1, AAV2, AAV3, AAV4, AAV5, AAV6, AAV7, AAV8, AAV9, AAV10, AAV 11, AAV12, or a combination thereof. In some embodiments, the ITRs are symmetric. In some embodiments, the ITRs are asymmetric. In some embodiments, at least one Rep protein is provided to enable replication of the construct. In some embodiments, the at least one Rep protein is derived from an adeno-associated virus, e.g., AAV1, AAV2, AAV3, AAV4, AAV5, AAV6, AAV7, AAV8, AAV9, AAV10, AAV 11, AAV12, or a combination thereof. In some embodiments, ceDNA is generated by providing a production cell with (i) DNA flanked by ITRs, e.g., AAV ITRs, and (ii) components required for ITR-dependent replication, e.g., AAV proteins Rep78 and Rep52 (or nucleic acid encoding the proteins). In some embodiments, ceDNA is free of any capsid protein, e.g., is not packaged into an infectious AAV particle. In some embodiments, ceDNA is formulated into LNPs (see, for example, WO2019051289A1).

[1031] In some embodiments, the ceDNA vector consists of two self complementary sequences, e.g., asymmetrical or symmetrical or substantially symmetrical ITRs as defined herein, flanking said expression cassette, wherein the ceDNA vector is not associated with a capsid protein. In some embodiments, the ceDNA vector comprises two self-complementary sequences found in an AAV genome, where at least one ITR comprises an operative Rep-binding element (RBE) (also sometimes referred to herein as “RBS”) and a terminal resolution site (trs) of AAV or a functional variant of the RBE. See, for example, WO2019113310.

[1032] In some embodiments, the AAV genome comprises two genes that encode four replication proteins and three capsid proteins, respectively. In some embodiments, the genes are flanked on either side by 145-bp inverted terminal repeats (ITRs). In some embodiments, the virion comprises up to three capsid proteins (Vp1, Vp2, and/or Vp3), e.g., produced in a 1:1:10 ratio. In some embodiments, the capsid proteins are produced from the same open reading frame and/or from differential splicing (Vp1) and alternative translational start sites (Vp2 and Vp3, respectively). Generally, Vp3 is the most abundant subunit in the virion and participates in receptor recognition at the cell surface defining the tropism of the virus. In some embodiments, Vp1 comprises a phospholipase domain, e.g., which functions in viral infectivity, in the N-terminus of Vp1.

[1033] In some embodiments, packaging capacity of the viral vectors limits the size of the base editor that can be packaged into the vector. For example, the packaging capacity of the AAVs can be about 4.5 kb (e.g., about 3.0, 3.5, 4.0, 4.5, 5.0, 5.5, or 6.0 kb), e.g., including one or two inverted terminal repeats (ITRs), e.g., 145 base ITRs.

[1034] In some embodiments, recombinant AAV (rAAV) comprises cis-acting 145-bp ITRs flanking vector transgene cassettes, e.g., providing up to 4.5 kb for packaging of foreign DNA. Subsequent to infection, rAAV can, in some instances, express a fusion protein of the invention and persist without integration into the host genome by existing episomally in circular head-to-tail concatemers. rAAV can be used, for example, in vitro and in vivo. In some embodiments, AAV-mediated gene delivery requires that the length of the coding sequence of the gene is equal or greater in size than the wild-type AAV genome.

[1035] AAV delivery of genes that exceed this size and/or the use of large physiological regulatory elements can be accomplished, for example, by dividing the protein(s) to be delivered into two or more fragments. In some embodiments, the N-terminal fragment is fused to a split intein-N. In some embodiments, the C-terminal fragment is fused to a split intein-C. In embodiments, the fragments are packaged into two or more AAV vectors.

[1036] In some embodiments, dual AAV vectors are generated by splitting a large transgene expression cassette in two separate halves (5 and 3 ends, or head and tail), e.g., wherein each half of the cassette is packaged in a single AAV vector (of <5 kb). The re-assembly of the full-length transgene expression cassette can, in some embodiments, then be achieved upon co-infection of the same cell by both dual AAV vectors. In some embodiments, co-infection is followed by one or more of: (1) homologous recombination (HR) between 5 and 3 genomes (dual AAV overlapping vectors); (2) ITR-mediated tail-to-head concatemerization of 5 and 3 genomes (dual AAV trans-splicing vectors); and/or (3) a combination of these two mechanisms (dual AAV hybrid vectors). In some embodiments, the use of dual AAV vectors in vivo results in the expression of full-length proteins. In some embodiments, the use of the dual AAV vector platform represents an efficient and viable gene transfer strategy for transgenes of greater than about 4.0, 4.1, 4.2, 4.3, 4.4, 4.5, 4.6, 4.7, 4.8, 4.9, or 5.0 kb in size. In some embodiments, AAV vectors can also be used to transduce cells with target nucleic acids, e.g., in the in vitro production of nucleic acids and peptides. In some embodiments, AAV vectors can be used for in vivo and ex vivo gene therapy procedures (see, e.g., West et al., Virology 160:38-47 (1987); U.S. Pat. No. 4,797,368; WO 93/24641; Kotin, Human Gene Therapy 5:793-801 (1994); Muzyczka, J. Clin. Invest. 94:1351 (1994); each of which is incorporated herein by reference in their entirety). The construction of recombinant AAV vectors is described in a number of publications, including U.S. Pat. No. 5,173,414; Tratschin et al., Mol. Cell. Biol. 5:3251-3260 (1985); Tratschin, et al., Mol. Cell. Biol. 4:2072-2081 (1984); Hermonat & Muzyczka, PNAS 81:6466-6470 (1984); and Samulski et al., J. Virol. 63:03822-3828 (1989) (incorporated by reference herein in their entirety).

[1037] In some embodiments, a Gene Writer described herein (e.g., with or without one or more guide nucleic acids) can be delivered using AAV, lentivirus, adenovirus or other plasmid or viral vector types, in particular, using formulations and doses from, for example, U.S. Pat. No. 8,454,972 (formulations, doses for adenovirus), U.S. Pat. No. 8,404,658 (formulations, doses for AAV) and U.S. Pat. No. 5,846,946 (formulations, doses for DNA plasmids) and from clinical trials and publications regarding the clinical trials involving lentivirus, AAV and adenovirus. For example, for AAV, the route of administration, formulation and dose can be as described in U.S. Pat. No. 8,454,972 and as in clinical trials involving AAV. For Adenovirus, the route of administration, formulation and dose can be as described in U.S. Pat. No. 8,404,658 and as in clinical trials involving adenovirus. For plasmid delivery, the route of administration, formulation and dose can be as described in U.S. Pat. No. 5,846,946 and as in clinical studies involving plasmids. Doses can be based on or extrapolated to an average 70 kg individual (e.g. a male adult human), and can be adjusted for patients, subjects, mammals of different weight and species. Frequency of administration is within the ambit of the medical or veterinary practitioner (e.g., physician, veterinarian), depending on usual factors including the age, sex, general health, other conditions of the patient or subject and the particular condition or symptoms being addressed. In some embodiments, the viral vectors can be injected into the tissue of interest. For cell-type specific Gene Writing, the expression of the Gene Writer and optional guide nucleic acid can, in some embodiments, be driven by a cell-type specific promoter.

[1038] In some embodiments, AAV allows for low toxicity, for example, due to the purification method not requiring ultracentrifugation of cell particles that can activate the immune response. In some embodiments, AAV allows low probability of causing insertional mutagenesis, for example, because it does not substantially integrate into the host genome.

[1039] In some embodiments, AAV has a packaging limit of about 4.4, 4.5, 4.6, 4.7, or 4.75 kb. In some embodiments, a Gene Writer, promoter, and transcription terminator can fit into a single viral vector. SpCas9 (4.1 kb) may, in some instances, be difficult to package into AAV. Therefore, in some embodiments, a Gene Writer is used that is shorter in length than other Gene Writers or base editors. In some embodiments, the Gene Writers are less than about 4.5 kb, 4.4 kb, 4.3 kb, 4.2 kb, 4.1 kb, 4 kb, 3.9 kb, 3.8 kb, 3.7 kb, 3.6 kb, 3.5 kb, 3.4 kb, 3.3 kb, 3.2 kb, 3.1 kb, 3 kb, 2.9 kb, 2.8 kb, 2.7 kb, 2.6 kb, 2.5 kb, 2 kb, or 1.5 kb.

[1040] An AAV can be AAV1, AAV2, AAV5 or any combination thereof. In some embodiments, the type of AAV is selected with respect to the cells to be targeted; e.g., AAV serotypes 1, 2, 5 or a hybrid capsid AAV1, AAV2, AAV5 or any combination thereof can be selected for targeting brain or neuronal cells; or AAV4 can be selected for targeting cardiac tissue. In some embodiments, AAV8 is selected for delivery to the liver. Exemplary AAV serotypes as to these cells are described, for example, in Grimm, D. et al, J. Virol. 82: 5887-5911 (2008) (incorporated herein by reference in its entirety). In some embodiments, AAV refers all serotypes, subtypes, and naturally-occurring AAV as well as recombinant AAV. AAV may be used to refer to the virus itself or a derivative thereof. In some embodiments, AAV includes AAV1, AAV2, AAV3, AAV3B, AAV4, AAV5, AAV6, AAV6.2, AAV7, AAVrh.64R1, AAVhu.37, AAVrh.8, AAVrh.32.33, AAV8, AAV9, AAV-DJ, AAV2/8, AAVrhlO, AAVLK03, AV10, AAV11, AAV12, rhlO, and hybrids thereof, avian AAV, bovine AAV, canine AAV, equine AAV, primate AAV, nonprimate AAV, and ovine AAV. The genomic sequences of various serotypes of AAV, as well as the sequences of the native terminal repeats (TRs), Rep proteins, and capsid subunits are known in the art. Such sequences may be found in the literature or in public databases such as GenBank. Additional exemplary AAV serotypes are listed in Table 36.

TABLE 36
Exemplary AAV serotypes.

| Target | | |
|---|---|---|
| Tissue | Vehicle | Reference |
| Liver | AAV (AAV8¹, AAVrh.8¹, | 1. Wang et al., Mol. Ther. 18, |
| | AAVhu.37¹, AAV2/8, | 118-25 (2010) |
| | AAV2/rh10², AAV9, AAV2, | 2. Ginn et al., JHEP Reports, |
| | NP40³, NP59^{2, 3}, AAV3B⁵, | 100065 (2019) |
| | AAV-DJ⁴, AAV-LK01⁴, | 3. Paulk et al., Mol. Ther. 26, |
| | AAV-LK02⁴, AAV-LK03⁴, | 289-303 (2018). |
| | AAV-LK19⁴ | 4. L. Lisowski et al., Nature. |
| | Adenovirus (Ad5, | 506, 382-6 (2014). |
| | HC-AdV⁶) | 5. L. Wang et al., Mol. Ther. |
| | | 23, 1877-87 (2015). |
| | | 6. Hausl Mol Ther (2010) |
| Lung | AAV (AAV4, AAV5, | 1. Duncan et al., Mol Ther |
| | AAV6¹, AAV9, H22²) | Methods Clin Dev (2018) |
| | Adenovirus (Ad5, Ad3, | 2. Cooney et al., Am J Respir |
| | Ad21, Ad14)³ | Cell Mol Biol (2019) |
| | | 3. Li et al., Mol Ther Methods |
| | | Clin Dev (2019) |
| Skin | AAV (AAV6¹, AAV-LK19²) | 1. Petek et al., Mol. Ther. |
| | | (2010) |
| | | 2. L. Lisowski et al., Nature. |
| | | 506, 382-6 (2014). |
| HSCs | Adenovirus (HDAd5/35⁺⁺) | Wang et al. Blood Adv (2019) |

[1041] In some embodiments, a pharmaceutical composition (e.g., comprising an AAV as described herein) has less than 10% empty capsids, less than 8% empty capsids, less than 7% empty capsids, less than 5% empty capsids, less than 3% empty capsids, or less than 1% empty capsids. In some embodiments, the pharmaceutical composition has less than about 5% empty capsids. In some embodiments, the number of empty capsids is below the limit of detection. In some embodiments, it is advantageous for the pharmaceutical composition to have low amounts of empty capsids, e.g., because empty capsids may generate an adverse response (e.g., immune response, inflammatory response, liver response, and/or cardiac response), e.g., with little or no substantial therapeutic benefit.

[1042] In some embodiments, the residual host cell protein (rHCP) in the pharmaceutical composition is less than or equal to 100 ng/ml rHCP per 1×10¹³ vg/ml, e.g., less than or equal to 40 ng/ml rHCP per 1×10¹³ vg/ml or 1-50 ng/ml rHCP per 1×10¹³ vg/ml. In some embodiments, the pharmaceutical composition comprises less than 10 ng rHCP per 1.0×10¹³ vg, or less than 5 ng rHCP per 1.0×10¹³ vg, less than 4 ng rHCP per 1.0×10¹³ vg, or less than 3 ng rHCP per 1.0×10¹³ vg, or any concentration in between. In some embodiments, the residual host cell DNA (hcDNA) in the pharmaceutical composition is less than or equal to 5×10⁶ pg/ml hcDNA per 1×10¹³ vg/ml, less than or equal to 1.2×10⁶ pg/ml hcDNA per 1×10¹³ vg/ml, or 1×10⁵ pg/ml hcDNA per 1×10¹³ vg/ml. In some embodiments, the residual host cell DNA in said pharmaceutical composition is less than 5.0×10⁵ pg per 1×10¹³ vg, less than 2.0×10⁵ pg per 1.0×10¹³ vg, less than 1.1×10⁵ pg per 1.0×10¹³ vg, less than 1.0×10⁵ pg hcDNA per 1.0×10¹³ vg, less than 0.9×10⁵ pg hcDNA per 1.0×10¹³ vg, less than 0.8×10⁵ pg hcDNA per 1.0×10¹³ vg, or any concentration in between.

[1043] In some embodiments, the residual plasmid DNA in the pharmaceutical composition is less than or equal to 1.7×10⁵ pg/ml per 1.0×10¹³ vg/ml, or 1×10⁵ pg/ml per 1×1.0×10¹³ vg/ml, or 1.7×10⁶ pg/ml per 1.0×10¹³ vg/ml. In some embodiments, the residual DNA plasmid in the pharmaceutical composition is less than 10.0×10⁵ pg by 1.0×10¹³ vg, less than 8.0×10⁵ pg by 1.0×10¹³ vg or less than 6.8×10⁵ pg by 1.0×10¹³ vg. In embodiments, the pharmaceutical composition comprises less than 0.5 ng per 1.0×10¹³ vg, less than 0.3 ng per 1.0×10¹³ vg, less than 0.22 ng per 1.0×10¹³ vg or less than 0.2 ng per 1.0×10¹³ vg or any intermediate concentration of bovine serum albumin (BSA). In embodiments, the benzonase in the pharmaceutical composition is less than 0.2 ng by 1.0×10¹³ vg, less than 0.1 ng by 1.0×10¹³ vg, less than 0.09 ng by 1.0×10¹³ vg, less than 0.08 ng by 1.0×10¹³ vg or any intermediate concentration. In embodiments, Poloxamer 188 in the pharmaceutical composition is about 10 to 150 ppm, about 15 to 100 ppm or about 20 to 80 ppm. In embodiments, the cesium in the pharmaceutical composition is less than 50 pg/g (ppm), less than 30 pg/g (ppm) or less than 20 pg/g (ppm) or any intermediate concentration.

[1044] In embodiments, the pharmaceutical composition comprises total impurities, e.g., as determined by SDS-PAGE, of less than 10%, less than 8%, less than 7%, less than 6%, less than 5%, less than 4%, less than 3%, less than 2%, or any percentage in between. In embodiments, the total purity, e.g., as determined by SDS-PAGE, is greater than 90%, greater than 92%, greater than 93%, greater than 94%, greater than 95%, greater than 96%, greater than 97%, greater than 98%, or any percentage in between. In embodiments, no single unnamed related impurity, e.g., as measured by SDS-PAGE, is greater than 5%, greater than 4%, greater than 3% or greater than 2%, or any percentage in between. In embodiments, the pharmaceutical composition comprises a percentage of filled capsids relative to total capsids (e.g., peak 1+peak 2 as measured by analytical ultracentrifugation) of greater than 85%, greater than 86%, greater than 87%, greater than 88%, greater than 89%, greater than 90%, greater than 91%, greater than 91.9%, greater than 92%, greater than 93%, or any percentage in between. In embodiments of the pharmaceutical composition, the percentage of filled capsids measured in peak 1 by analytical ultracentrifugation is 20-80%, 25-75%, 30-75%, 35-75%, or 37.4-70.3%. In embodiments of the pharmaceutical composition, the percentage of filled capsids measured in peak 2 by analytical ultracentrifugation is 20-80%, 20-70%, 22-65%, 24-62%, or 24.9-60.1%.

[1045] In one embodiment, the pharmaceutical composition comprises a genomic titer of 1.0 to 5.0×10¹³ vg/mL, 1.2 to 3.0×10¹³ vg/mL or 1.7 to 2.3×10¹³ vg/ml. In one embodiment, the pharmaceutical composition exhibits a biological load of less than 5 CFU/mL, less than 4 CFU/mL, less than 3 CFU/mL, less than 2 CFU/mL or less than 1 CFU/mL or any intermediate contraction. In embodiments, the amount of endotoxin according to USP, for example, USP <85> (incorporated by reference in its entirety) is less than 1.0 EU/mL, less than 0.8 EU/mL or less than 0.75 EU/mL. In embodiments, the osmolarity of a pharmaceutical composition according to USP, for example, USP <785> (incorporated by reference in its entirety) is 350 to 450 mOsm/kg, 370 to 440 mOsm/kg or 390 to 430 mOsm/kg. In embodiments, the pharmaceutical composition contains less than 1200 particles that are greater than 25 μm per container, less than 1000 particles that are greater than 25 μm per container, less than 500 particles that are greater than 25 μm per container or any intermediate value. In embodiments, the pharmaceutical composition contains less than 10,000 particles that are greater than 10 μm per container, less than 8000 particles that are greater than 10 μm per container or less than 600 particles that are greater than 10 pm per container.

[1046] In one embodiment, the pharmaceutical composition has a genomic titer of 0.5 to 5.0×10¹³ vg/mL, 1.0 to 4.0×10¹³ vg/mL, 1.5 to 3.0×10¹³ vg/ml or 1.7 to 2.3×10¹³ vg/ml. In one embodiment, the pharmaceutical composition described herein comprises one or more of the following: less than about 0.09 ng benzonase per 1.0×10¹³ vg, less than about 30 pg/g (ppm) of cesium, about 20 to 80 ppm Poloxamer 188, less than about 0.22 ng BSA per 1.0×10¹³ vg, less than about 6.8×10⁵ pg of residual DNA plasmid per 1.0×10¹³ vg, less than about 1.1×10⁵ pg of residual hcDNA per 1.0×10¹³ vg, less than about 4 ng of rHCP per 1.0×10¹³ vg, pH 7.7 to 8.3, about 390 to 430 mOsm/kg, less than about 600 particles that are >25 μm in size per container, less than about 6000 particles that are >10 μm in size per container, about 1.7×10¹³-2.3×10¹³ vg/mL genomic titer, infectious titer of about 3.9×10⁸ to 8.4×10¹⁰ IU per 1.0×10¹³ vg, total protein of about 100-300 μg per 1.0×10¹³ vg, mean survival of >24 days in A7SMA mice with about 7.5×10¹³ vg/kg dose of viral vector, about 70 to 130% relative potency based on an in vitro cell based assay and/or less than about 5% empty capsid. In various embodiments, the pharmaceutical compositions described herein comprise any of the viral particles discussed here, retain a potency of between ±20%, between ±15%, between ±10% or within ±5% of a reference standard. In some embodiments, potency is measured using a suitable in vitro cell assay or in vivo animal model.

[1047] Additional methods of preparation, characterization, and dosing AAV particles are taught in WO2019094253, which is incorporated herein by reference in its entirety.

[1048] Additional rAAV constructs that can be employed consonant with the invention include those described in Wang et al 2019, available at: doi.org/10.1038/s41573-019-0012-9, including Table 1 thereof, which is incorporated by reference in its entirety.

[1049] Inteins

[1050] In some embodiments, as described in more detail below, Intein-N may be fused to the N-terminal portion of a first domain described herein, and and intein-C may be fused to the C-terminal portion of a second domain described herein for the joining of the N-terminal portion to the C-terminal portion, thereby joining the first and second domains. In some embodiments, the first and second domains are each independent chosen from a DNA binding domain, an RNA binding domain, an RT domain, and an endonuclease domain.

[1051] As used herein, “intein” refers to a self-splicing protein intron (e.g., peptide), e.g., which ligates flanking N-terminal and C-terminal exteins (e.g., fragments to be joined). An intein may, in some instances, comprise a fragment of a protein that is able to excise itself and join the remaining fragments (the exteins) with a peptide bond in a process known as protein splicing. Inteins are also referred to as “protein introns.” The process of an intein excising itself and joining the remaining portions of the protein is herein termed “protein splicing” or “intein-mediated protein splicing.” In some embodiments, an intein of a precursor protein (an intein containing protein prior to intein-mediated protein splicing) comes from two genes. Such intein is referred to herein as a split intein (e.g., split intein-N and split intein-C). For example, in cyanobacteria, DnaE, the catalytic subunit a of DNA polymerase III, is encoded by two separate genes, dnaE-n and dnaE-c. The intein encoded by the dnaE-n gene may be herein referred as “intein-N.” The intein encoded by the dnaE-c gene may be herein referred as “intein-C.”

[1052] Use of inteins for joining heterologous protein fragments is described, for example, in Wood et al., J. Biol. Chem. 289(21); 14512-9 (2014) (incorporated herein by reference in its entirety). For example, when fused to separate protein fragments, the inteins IntN and IntC may recognize each other, splice themselves out, and/or simultaneously ligate the flanking N- and C-terminal exteins of the protein fragments to which they were fused, thereby reconstituting a full-length protein from the two protein fragments.

[1053] In some embodiments, a synthetic intein based on the dnaE intein, the Cfa-N (e.g., split intein-N) and Cfa-C (e.g., split intein-C) intein pair, is used. Examples of such inteins have been described, e.g., in Stevens et al., J Am Chem Soc. 2016 Feb. 24; 138(7):2162-5 (incorporated herein by reference in its entirety). Non-limiting examples of intein pairs that may be used in accordance with the present disclosure include: Cfa DnaE intein, Ssp GyrB intein, Ssp DnaX intein, Ter DnaE3 intein, Ter ThyX intein, Rma DnaB intein and Cne Prp8 intein (e.g., as described in U.S. Pat. No. 8,394,604, incorporated herein by reference.

[1054] In some embodiments, Intein-N and intein-C may be fused to the N-terminal portion of the split Cas9 and the C-terminal portion of a split Cas9, respectively, for the joining of the N-terminal portion of the split Cas9 and the C-terminal portion of the split Cas9. For example, in some embodiments, an intein-N is fused to the C-terminus of the N-terminal portion of the split Cas9, i.e., to form a structure of N—[N-terminal portion of the split Cas9]-[intein-N]˜C. In some embodiments, an intein-C is fused to the N-terminus of the C-terminal portion of the split Cas9, i.e., to form a structure of N-[intein-C]˜[C-terminal portion of the split Cas9]-C. The mechanism of intein-mediated protein splicing for joining the proteins the inteins are fused to (e.g., split Cas9) is described in Shah et al., Chem Sci. 2014; 5(1):446-461, incorporated herein by reference. Methods for designing and using inteins are known in the art and described, for example by WO2020051561, WO2014004336, WO2017132580, US20150344549, and US20180127780, each of which is incorporated herein by reference in their entirety.

[1055] In some embodiments, a split refers to a division into two or more fragments. In some embodiments, a split Cas9 protein or split Cas9 comprises a Cas9 protein that is provided as an N-terminal fragment and a C-terminal fragment encoded by two separate nucleotide sequences. The polypeptides corresponding to the N-terminal portion and the C-terminal portion of the Cas9 protein may be spliced to form a reconstituted Cas9 protein. In embodiments, the Cas9 protein is divided into two fragments within a disordered region of the protein, e.g., as described in Nishimasu et al., Cell, Volume 156, Issue 5, pp. 935-949, 2014, or as described in Jiang et al. (2016) Science 351: 867-871 and PDB file: 5F9R (each of which is incorporated herein by reference in its entirety). A disordered region may be determined by one or more protein structure determination techniques known in the art, including, without limitation, X-ray crystallography, NMR spectroscopy, electron microscopy (e.g., cryoEM), and/or in silico protein modeling. In some embodiments, the protein is divided into two fragments at any C, T, A, or S, e.g., within a region of SpCas9 between amino acids A292-G364, F445-K483, or E565-T637, or at corresponding positions in any other Cas9, Cas9 variant (e.g., nCas9, dCas9), or other napDNAbp. In some embodiments, protein is divided into two fragments at SpCas9 T310, T313, A456, S469, or C574. In some embodiments, the process of dividing the protein into two fragments is referred to as splitting the protein.

[1056] In some embodiments, a protein fragment ranges from about 2-1000 amino acids (e.g., between 2-10, 10-50, 50-100, 100-200, 200-300, 300-400, 400-500, 500-600, 600-700, 700-800, 800-900, or 900-1000 amino acids) in length. In some embodiments, a protein fragment ranges from about 5-500 amino acids (e.g., between 5-10, 10-50, 50-100, 100-200, 200-300, 300-400, or 400-500 amino acids) in length. In some embodiments, a protein fragment ranges from about 20-200 amino acids (e.g., between 20-30, 30-40, 40-50, 50-100, or 100-200 amino acids) in length.

[1057] In some embodiments, a portion or fragment of a Gene Writer (e.g., Cas9-R2Tg) is fused to an intein. The nuclease can be fused to the N-terminus or the C-terminus of the intein. In some embodiments, a portion or fragment of a fusion protein is fused to an intein and fused to an AAV capsid protein. The intein, nuclease and capsid protein can be fused together in any arrangement (e.g., nuclease-intein-capsid, intein-nuclease-capsid, capsid-intein-nuclease, etc.). In some embodiments, the N-terminus of an intein is fused to the C-terminus of a fusion protein and the C-terminus of the intein is fused to the N-terminus of an AAV capsid protein.

[1058] In some embodiments, an endonuclease domain (e.g., a nickase Cas9 domain) is fused to intein-N and a polypeptide comprising an RT domain is fused to an intein-C.

[1059] Exemplary nucleotide and amino acid sequences of interns are provided below:

DnaE Intein-N DNA:
(SEQ ID NO: 1637)
TGCCTGTCATACGAAACCGAGATACTGACAGTAGAATATGGCCTTCTGC
CAATCGGGAAGATTGTGGAGAAACGGATAGAATGCACAGTTTACTCTGT
CGATAACAATGGTAACATTTATACTCAGCCAGTTGCCCAGTGGCACGAC
CGGGGAGAGCAGGAAGTATTCGAATACTGTCTGGAGGATGGAAGTCTCA
TTAGGGCCACTAAGGACCACAAATTTATGACAGTCGATGGCCAGATGCT
GCCTATAGACGAAATCTTTGAGCGAGAGTTGGACCTCATGCGAGTTGAC
AACCTTCCTAAT
DnaE Intein-N Protein:
(SEQ ID NO: 1638)
CLSYETEILTVEYGLLPIGKIVEKRIECTVYSVDNNGNIYTQPVAQWHD
RGEQEVFEYCLEDGSLIRATKDHKFMTVDGQMLPIDEIFERELDLMRVD
NLPN
DnaE Intein-C DNA:
(SEQ ID NO: 1639)
ATGATCAAGATAGCTACAAGGAAGTATCTTGGCAAACAAAACGTTTATG
ATATTGGAGTCGAAAGAGATCACAACTTTGCTCTGAAGAACGGATTCAT
AGCTTCTAAT
Intein-C:
(SEQ ID NO: 1640)
MIKIATRKYLGKQNVYDIGVERDHNFALKNGFIASN
Cfa-N DNA:
(SEQ ID NO: 1641)
TGCCTGTCTTATGATACCGAGATACTTACCGTTGAATATGGCTTCTTGC
CTATTGGAAAGATTGTCGAAGAGAGAATTGAATGCACAGTATATACTGT
AGACAAGAATGGTTTCGTTTACACACAGCCCATTGCTCAATGGCACAAT
CGCGGCGAACAAGAAGTATTTGAGTACTGTCTCGAGGATGGAAGCATCA
TACGAGCAACTAAAGATCATAAATTCATGACCACTGACGGGCAGATGTT
GCCAATAGATGAGATATTCGAGCGGGGCTTGGATCTCAAACAAGTGGAT
GGATTG CCA
Cfa-N Protein:
(SEQ ID NO: 1642)
CLSYDTEILTVEYGFLPIGKIVEERIECTVYTVDKNGFVYTQPIAQWHN
RGEQEVFEYCLEDGSIIRATKDHKFMTTDGQMLPIDEIFERGLDLKQVD
GLP
Cfa-C DNA:
(SEQ ID NO: 1643)
ATGAAGAGGACTGCCGATGGATCAGAGTTTGAATCTCCCAAGAAGAAGA
GGAAAGTAAAGATAATATCTCGAAAAAGTCTTGGTACCCAAAATGTCTA
TGATATTGGAGTGGAGAAAGATCACAACTTCCTTCTCAAGAACGGTCTC
GTAGCCAGCAAC
Cfa-C Protein:
(SEQ ID NO: 1644)
MKRTADGSEFESPKKKRKVKIISRKSLGTQNVYDIGVEKDHNFLLKNGL
VASN

### Lipid Nanoparticles

[1060] The methods and systems provided by the invention, may employ any suitable carrier or delivery modality, including, in certain embodiments, lipid nanoparticles (LNPs). Lipid nanoparticles, in some embodiments, comprise one or more ionic lipids, such as non-cationic lipids (e.g., neutral or anionic, or zwitterionic lipids); one or more conjugated lipids (such as PEG-conjugated lipids or lipids conjugated to polymers described in Table 5 of WO2019217941; incorporated herein by reference in its entirety); one or more sterols (e.g., cholesterol); and, optionally, one or more targeting molecules (e.g., conjugated receptors, receptor ligands, antibodies); or combinations of the foregoing.

[1061] Lipids that can be used in nanoparticle formations (e.g., lipid nanoparticles) include, for example those described in Table 4 of WO2019217941, which is incorporated by reference—e.g., a lipid-containing nanoparticle can comprise one or more of the lipids in table 4 of WO2019217941. Lipid nanoparticles can include additional elements, such as polymers, such as the polymers described in table 5 of WO2019217941, incorporated by reference.

[1062] In some embodiments, conjugated lipids, when present, can include one or more of PEG-diacylglycerol (DAG) (such as 1-(monomethoxy-polyethyleneglycol)-2,3-dimyristoylglycerol (PEG-DMG)), PEG-dialkyloxypropyl (DAA), PEG-phospholipid, PEG-ceramide (Cer), a pegylated phosphatidylethanolamine (PEG-PE), PEG succinate diacylglycerol (PEGS-DAG) (such as 4-O-(2′,3′-di(tetradecanoyloxy)propyl-1-O-(w-methoxy(polyethoxy)ethyl) butanedioate (PEG-S-DMG)), PEG dialkoxypropylcarbam, N-(carbonyl-methoxypoly ethylene glycol 2000)-1,2-distearoyl-sn-glycero-3-phosphoethanolamine sodium salt, and those described in Table 2 of WO2019051289 (incorporated by reference), and combinations of the foregoing.

[1063] In some embodiments, sterols that can be incorporated into lipid nanoparticles include one or more of cholesterol or cholesterol derivatives, such as those in WO2009/127060 or US2010/0130588, which are incorporated by reference. Additional exemplary sterols include phytosterols, including those described in Eygeris et al (2020), dx.doi.org/10.1021/acs.nanolett.0c01386, incorporated herein by reference.

[1064] In some embodiments, the lipid particle comprises an ionizable lipid, a non-cationic lipid, a conjugated lipid that inhibits aggregation of particles, and a sterol. The amounts of these components can be varied independently and to achieve desired properties. For example, in some embodiments, the lipid nanoparticle comprises an ionizable lipid is in an amount from about 20 mol % to about 90 mol % of the total lipids (in other embodiments it may be 20-70% (mol), 30-60% (mol) or 40-50% (mol); about 50 mol % to about 90 mol % of the total lipid present in the lipid nanoparticle), a non-cationic lipid in an amount from about 5 mol % to about 30 mol % of the total lipids, a conjugated lipid in an amount from about 0.5 mol % to about 20 mol % of the total lipids, and a sterol in an amount from about 20 mol % to about 50 mol % of the total lipids. The ratio of total lipid to nucleic acid (e.g., encoding the Gene Writer or template nucleic acid) can be varied as desired. For example, the total lipid to nucleic acid (mass or weight) ratio can be from about 10:1 to about 30:1.

[1065] In some embodiments, an ionizable lipid may be a cationic lipid, a ionizable cationic lipid, e.g., a cationic lipid that can exist in a positively charged or neutral form depending on pH, or an amine-containing lipid that can be readily protonated. In some embodiments, the cationic lipid is a lipid capable of being positively charged, e.g., under physiological conditions. Exemplary cationic lipids include one or more amine group(s) which bear the positive charge. In some embodiments, the lipid particle comprises a cationic lipid in formulation with one or more of neutral lipids, ionizable amine-containing lipids, biodegradable alkyne lipids, steroids, phospholipids including polyunsaturated lipids, structural lipids (e.g., sterols), PEG, cholesterol and polymer conjugated lipids. In some embodiments, the cationic lipid may be an ionizable cationic lipid. An exemplary cationic lipid as disclosed herein may have an effective pKa over 6.0. In embodiments, a lipid nanoparticle may comprise a second cationic lipid having a different effective pKa (e.g., greater than the first effective pKa), than the first cationic lipid. A lipid nanoparticle may comprise between 40 and 60 mol percent of a cationic lipid, a neutral lipid, a steroid, a polymer conjugated lipid, and a therapeutic agent, e.g., a nucleic acid (e.g., RNA) described herein (e.g., a template nucleic acid or a nucleic acid encoding a GeneWriter), encapsulated within or associated with the lipid nanoparticle. In some embodiments, the nucleic acid is co-formulated with the cationic lipid. The nucleic acid may be adsorbed to the surface of an LNP, e.g., an LNP comprising a cationic lipid. In some embodiments, the nucleic acid may be encapsulated in an LNP, e.g., an LNP comprising a cationic lipid. In some embodiments, the lipid nanoparticle may comprise a targeting moiety, e.g., coated with a targeting agent. In embodiments, the LNP formulation is biodegradable. In some embodiments, a lipid nanoparticle comprising one or more lipid described herein, e.g., Formula (i), (ii), (ii), (vii) and/or (ix) encapsulates at least 1%, at least 5%, at least 10%, at least 20%, at least 30%, at least 40%, at least 50%, at least 60%, at least 70%, at least 80%, at least 90%, at least 92%, at least 95%, at least 97%, at least 98% or 100% of an RNA molecule, e.g., template RNA and/or a mRNA encoding the Gene Writer polypeptide.

[1066] In some embodiments, the lipid to nucleic acid ratio (mass/mass ratio; w/w ratio) can be in the range of from about 1:1 to about 25:1, from about 10:1 to about 14:1, from about 3:1 to about 15:1, from about 4:1 to about 10:1, from about 5:1 to about 9:1, or about 6:1 to about 9:1. The amounts of lipids and nucleic acid can be adjusted to provide a desired N/P ratio, for example, N/P ratio of 3, 4, 5, 6, 7, 8, 9, 10 or higher. Generally, the lipid nanoparticle formulation's overall lipid content can range from about 5 mg/ml to about 30 mg/mL.

[1067] Exemplary ionizable lipids that can be used in lipid nanoparticle formulations include, without limitation, those listed in Table 1 of WO2019051289, incorporated herein by reference. Additional exemplary lipids include, without limitation, one or more of the following formulae: X of US2016/0311759; I of US20150376115 or in US2016/0376224; I, II or III of US20160151284; I, IA, II, or IIA of US20170210967; I-c of US20150140070; A of US2013/0178541; I of US2013/0303587 or US2013/0123338; I of US2015/0141678; II, III, IV, or V of US2015/0239926; I of US2017/0119904; I or II of WO2017/117528; A of US2012/0149894; A of US2015/0057373; A of WO2013/116126; A of US2013/0090372; A of US2013/0274523; A of US2013/0274504; A of US2013/0053572; A of WO2013/016058; A of WO2012/162210; I of US2008/042973; I, II, III, or IV of US2012/01287670; I or II of US2014/0200257; 1, 11, or III of US2015/0203446; I or III of US2015/0005363; I, IA, IB, IC, ID, II, IIA, IIB, IIC, IID, or III-XXIV of US2014/0308304; of US2013/0338210; I, II, III, or IV of WO2009/132131; A of US2012/01011478; I or XXXV of US2012/0027796; XIV or XVII of US2012/0058144; of US2013/0323269; I of US2011/0117125; I, II, or III of US2011/0256175; I, II, III, IV, V, VI, VII, VIII, IX, X, XI, XII of US2012/0202871; I, II, III, IV, V, VI, VII, VIII, X, XII, XIII, XIV, XV, or XVI of US2011/0076335; I or II of US2006/008378; I of US2013/0123338; I or X-A-Y-Z of US2015/0064242; XVI, XVII, or XVIII of US2013/0022649; I, II, or III of US2013/0116307; I, II, or III of US2013/0116307; I or II of US2010/0062967; I-X of US2013/0189351; I of US2014/0039032; V of US2018/0028664; I of US2016/0317458; I of US2013/0195920; 5, 6, or 10 of U.S. Pat. No. 10,221,127; III-3 of WO2018/081480; I-5 or I-8 of WO2020/081938; 18 or 25 of U.S. Pat. No. 9,867,888; A of US2019/0136231; II of WO2020/219876; 1 of US2012/0027803; OF-02 of US2019/0240349; 23 of U.S. Pat. No. 10,086,013; cKK-E12/A6 of Miao et al (2020); C12-200 of WO2010/053572; 7C1 of Dahlman et al (2017); 304-O13 or 503-O13 of Whitehead et al; TS-P4C2 of U.S. Pat. No. 9,708,628; I of WO2020/106946; I of WO2020/106946.

[1068] In some embodiments, the ionizable lipid is MC3 (6Z,9Z,28Z,31Z)-heptatriaconta-6,9,28,31-tetraen-19-yl-4-(dimethylamino) butanoate (DLin-MC3-DMA or MC3), e.g., as described in Example 9 of WO2019051289A9 (incorporated by reference herein in its entirety). In some embodiments, the ionizable lipid is the lipid ATX-002, e.g., as described in Example 10 of WO2019051289A9 (incorporated by reference herein in its entirety). In some embodiments, the ionizable lipid is (13Z,16Z)-A,A-dimethyl-3-nonyldocosa-13, 16-dien-1-amine (Compound 32), e.g., as described in Example 11 of WO2019051289A9 (incorporated by reference herein in its entirety). In some embodiments, the ionizable lipid is Compound 6 or Compound 22, e.g., as described in Example 12 of WO2019051289A9 (incorporated by reference herein in its entirety) In some embodiments, the ionizable lipid is heptadecan-9-yl 8-((2-hydroxyethyl)(6-oxo-6-(undecyloxy)hexyl)amino)octanoate (SM-102); e.g., as described in Example 1 of U.S. Pat. No. 9,867,888 (incorporated by reference herein in its entirety). In some embodiments, the ionizable lipid is 9Z,12Z)-3-((4,4-bis(octyloxy)butanoyl)oxy)-2-((((3-(diethylamino)propoxy)carbonyl)oxy)methyl)propyl octadeca-9,12-dienoate (LP01) e.g., as synthesized in Example 13 of WO2015/095340 (incorporated by reference herein in its entirety). In some embodiments, the ionizable lipid is Di((Z)-non-2-en-1-yl) 9-((4-dimethylamino)butanoyl)oxy)heptadecanedioate (L319), e.g. as synthesized in Example 7, 8, or 9 of US2012/0027803 (incorporated by reference herein in its entirety). In some embodiments, the ionizable lipid is 1,1′-((2-(4-(2-((2-(Bis(2-hydroxydodecyl)amino)ethyl)(2-hydroxydodecyl) amino)ethyl)piperazin-1-yl)ethyl)azanediyl)bis(dodecan-2-ol) (C12-200), e.g., as synthesized in Examples 14 and 16 of WO2010/053572 (incorporated by reference herein in its entirety). In some embodiments, the ionizable lipid is; Imidazole cholesterol ester (ICE) lipid (3S, 10R, 13R, 17R)-10, 13-dimethyl-17-((R)-6-methylheptan-2-yl)-2, 3, 4, 7, 8, 9, 10, 11, 12, 13, 14, 15, 16, 17-tetradecahydro-1H-cyclopenta[a]phenanthren-3-yl 3-(1H-imidazol-4-yl)propanoate, e.g., Structure (I) from WO2020/106946 (incorporated by reference herein in its entirety).

[1069] Some non-limiting example of lipid compounds that may be used (e.g., in combination with other lipid components) to form lipid nanoparticles for the delivery of compositions described herein, e.g., nucleic acid (e.g., RNA) described herein (e.g., a template nucleic acid or a nucleic acid encoding a GeneWriter) includes,

[chemical structure]

[1070] In some embodiments an LNP comprising Formula (i) is used to deliver a GeneWriter composition described herein to the liver and/or hepatocyte cells.

[chemical structure]

[1071] In some embodiments an LNP comprising Formula (ii) is used to deliver a GeneWriter composition described herein to the liver and/or hepatocyte cells.

[chemical structure]

[1072] In some embodiments an LNP comprising Formula (iii) is used to deliver a GeneWriter composition described herein to the liver and/or hepatocyte cells.

[chemical structure]

[1073] In some embodiments an LNP comprising Formula (v) is used to deliver a GeneWriter composition described herein to the liver and/or hepatocyte cells.

[chemical structure]

[1074] In some embodiments an LNP comprising Formula (vi) is used to deliver a GeneWriter composition described herein to the liver and/or hepatocyte cells.

[chemical structure]

[1075] In some embodiments an LNP comprising Formula (viii) is used to deliver a GeneWriter composition described herein to the liver and/or hepatocyte cells.

[chemical structure]

[1076] In some embodiments an LNP comprising Formula (ix) is used to deliver a GeneWriter composition described herein to the liver and/or hepatocyte cells.

[chemical structure]

wherein
[1077] X¹ is O, NR¹, or a direct bond, X² is C2-5 alkylene, X³ is C(=0) or a direct bond, R¹ is H or Me R³ is Ci-3 alkyl, R² is Ci-3 alky, or R² taken together with the nitrogen atom to which it is attached and 1-3 carbon atoms of X² form a 4-, 5-, or 6-membered ring, or X¹ is NR¹, R¹ and R² taken together with the nitrogen atoms to which they are attached form a 5- or 6-membered ring, or R² taken together with R³ and the nitrogen atom to which they are attached form a 5-, 6-, or 7-membered ring, Y¹ is C2-12 alkylene, Y² is selected from

[chemical structure]

[1078] n is 0 to 3, R⁴ is Ci-15 alkyl, Z¹ is Ci-6 alkylene or a direct bond, Z² is

[chemical structure]

(in either orientation) or absent, provided that if Z¹ is a direct bond, Z² is absent;
[1079] R⁵ is C5-9 alkyl or C6-10 alkoxy, R⁶ is C5-9 alkyl or C6-10 alkoxy, W is methylene or a direct bond, and R⁷ is H or Me, or a salt thereof, provided that if R³ and R² are C2 alkyls, X¹ is O, X² is linear C3 alkylene, X³ is C(=0), Y¹ is linear Ce alkylene, (Y²)n-R⁴ is

[chemical structure]

R⁴ is linear C5 alkyl, Z¹ is C2 alkylene, Z² is absent, W is methylene, and R⁷ is H, then R⁵ and R⁶ are not Cx alkoxy.
In some embodiments an LNP comprising Formula (xii) is used to deliver a GeneWriter composition described herein to the liver and/or hepatocyte cells.

[chemical structure]

[1080] In some embodiments an LNP comprising Formula (xi) is used to deliver a GeneWriter composition described herein to the liver and/or hepatocyte cells.

[chemical structure]

where R=

[chemical structure]

[1081] In some embodiments, a lipid of Formula (xii) can be represented by the following structure

[chemical structure]

[1082] In some embodiments an LNP comprises a compound of Formula (xiii) and a compound of Formula (xiv).

[chemical structure]

In some embodiments an LNP comprising Formula (xv) is used to deliver a GeneWriter composition described herein to the liver and/or hepatocyte cells.

[chemical structure]

[1083] In some embodiments an LNP comprising a formulation of Formula (xvi) is used to deliver a GeneWriter composition described herein to the lung endothelial cells.

[chemical structure]

where X=

[chemical structure]

[chemical structure]

[chemical structure]

[1084] In some embodiments, a lipid compound used to form lipid nanoparticles for the delivery of compositions described herein, e.g., nucleic acid (e.g., RNA) described herein (e.g., a template nucleic acid or a nucleic acid encoding a GeneWriter) is made by one of the following reactions:

[chemical structure]

[1085] Exemplary non-cationic lipids include, but are not limited to, distearoyl-sn-glycero-phosphoethanolamine, distearoylphosphatidylcholine (DSPC), dioleoylphosphatidylcholine (DOPC), dipalmitoylphosphatidylcholine (DPPC), dioleoylphosphatidylglycerol (DOPG), dipalmitoylphosphatidylglycerol (DPPG), dioleoyl-phosphatidylethanolamine (DOPE), palmitoyloleoylphosphatidylcholine (POPC), palmitoyloleoylphosphatidylethanolamine (POPE), 1,2-dioleoyl-sn-glycero-3-phosphoethanolamine (DOPE), dioleoyl-phosphatidylethanolamine 4-(N-maleimidomethyl)-cyclohexane-1-carboxylate (DOPE-mal), dipalmitoyl phosphatidyl ethanolamine (DPPE), dimyristoylphosphoethanolamine (DMPE), distearoyl-phosphatidyl-ethanolamine (DSPE), monomethyl-phosphatidylethanolamine (such as 16-O-monomethyl PE), dimethyl-phosphatidylethanolamine (such as 16-O-dimethyl PE), 18-1-trans PE, 1-stearoyl-2-oleoyl-phosphatidyethanolamine (SOPE), hydrogenated soy phosphatidylcholine (HSPC), egg phosphatidylcholine (EPC), dioleoylphosphatidylserine (DOPS), sphingomyelin (SM), dimyristoyl phosphatidylcholine (DMPC), dimyristoyl phosphatidylglycerol (DMPG), distearoylphosphatidylglycerol (DSPG), dierucoylphosphatidylcholine (DEPC), palmitoyloleyolphosphatidylglycerol (POPG), dielaidoyl-phosphatidylethanolamine (DEPE), lecithin, phosphatidylethanolamine, lysolecithin, lysophosphatidylethanolamine, phosphatidylserine, phosphatidylinositol, sphingomyelin, egg sphingomyelin (ESM), cephalin, cardiolipin, phosphatidic acid, cerebrosides, dicetylphosphate, lysophosphatidylcholine, dilinoleoylphosphatidylcholine, or mixtures thereof. It is understood that other diacylphosphatidylcholine and diacylphosphatidylethanolamine phospholipids can also be used. The acyl groups in these lipids are preferably acyl groups derived from fatty acids having C10-C24 carbon chains, e.g., lauroyl, myristoyl, palmitoyl, stearoyl, or oleoyl. Additional exemplary lipids, in certain embodiments, include, without limitation, those described in Kim et al. (2020) dx.doi.org/10.1021/acs.nanolett.0c01386, incorporated herein by reference. Such lipids include, in some embodiments, plant lipids found to improve liver transfection with mRNA (e.g., DGTS).

[1086] In some embodiments, the non-cationic lipid may have the following structure

[chemical structure]

[1087] Other examples of non-cationic lipids suitable for use in the lipid nanoparticles include, without limitation, nonphosphorous lipids such as, e.g., stearylamine, dodeeylamine, hexadecylamine, acetyl palmitate, glycerol ricinoleate, hexadecyl stearate, isopropyl myristate, amphoteric acrylic polymers, triethanolamine-lauryl sulfate, alkyl-aryl sulfate polyethyoxylated fatty acid amides, dioctadecyl dimethyl ammonium bromide, ceramide, sphingomyelin, and the like. Other non-cationic lipids are described in WO2017/099823 or US patent publication US2018/0028664, the contents of which is incorporated herein by reference in their entirety.

[1088] In some embodiments, the non-cationic lipid is oleic acid or a compound of Formula I, II, or IV of US2018/0028664, incorporated herein by reference in its entirety. The non-cationic lipid can comprise, for example, 0-30% (mol) of the total lipid present in the lipid nanoparticle. In some embodiments, the non-cationic lipid content is 5-20% (mol) or 10-15% (mol) of the total lipid present in the lipid nanoparticle. In embodiments, the molar ratio of ionizable lipid to the neutral lipid ranges from about 2:1 to about 8:1 (e.g., about 2:1, 3:1, 4:1, 5:1, 6:1, 7:1, or 8:1).

[1089] In some embodiments, the lipid nanoparticles do not comprise any phospholipids.

[1090] In some aspects, the lipid nanoparticle can further comprise a component, such as a sterol, to provide membrane integrity. One exemplary sterol that can be used in the lipid nanoparticle is cholesterol and derivatives thereof. Non-limiting examples of cholesterol derivatives include polar analogues such as 5a-cholestanol, 53-coprostanol, cholesteryl-(2′-hydroxy)-ethyl ether, cholesteryl-(4′-hydroxy)-butyl ether, and 6-ketocholestanol; non-polar analogues such as 5a-cholestane, cholestenone, 5a-cholestanone, 5p-cholestanone, and cholesteryl decanoate; and mixtures thereof. In some embodiments, the cholesterol derivative is a polar analogue, e.g., cholesteryl-(4′-hydroxy)-butyl ether. Exemplary cholesterol derivatives are described in PCT publication WO2009/127060 and US patent publication US2010/0130588, each of which is incorporated herein by reference in its entirety.

[1091] In some embodiments, the component providing membrane integrity, such as a sterol, can comprise 0-50% (mol) (e.g., 0-10%, 10-20%, 20-30%, 30-40%, or 40-50%) of the total lipid present in the lipid nanoparticle. In some embodiments, such a component is 20-50% (mol) 30-40% (mol) of the total lipid content of the lipid nanoparticle.

[1092] In some embodiments, the lipid nanoparticle can comprise a polyethylene glycol (PEG) or a conjugated lipid molecule. Generally, these are used to inhibit aggregation of lipid nanoparticles and/or provide steric stabilization. Exemplary conjugated lipids include, but are not limited to, PEG-lipid conjugates, polyoxazoline (POZ)-lipid conjugates, polyamide-lipid conjugates (such as ATTA-lipid conjugates), cationic-polymer lipid (CPL) conjugates, and mixtures thereof. In some embodiments, the conjugated lipid molecule is a PEG-lipid conjugate, for example, a (methoxy polyethylene glycol)-conjugated lipid.

[1093] Exemplary PEG-lipid conjugates include, but are not limited to, PEG-diacylglycerol (DAG) (such as 1-(monomethoxy-polyethyleneglycol)-2,3-dimyristoylglycerol (PEG-DMG)), PEG-dialkyloxypropyl (DAA), PEG-phospholipid, PEG-ceramide (Cer), a pegylated phosphatidylethanoloamine (PEG-PE), PEG succinate diacylglycerol (PEGS-DAG) (such as 4-O-(2′,3′-di(tetradecanoyloxy)propyl-1-0-(w-methoxy(polyethoxy)ethyl) butanedioate (PEG-S-DMG)), PEG dialkoxypropylcarbam, N-(carbonyl-methoxypolyethylene glycol 2000)-1,2-distearoyl-sn-glycero-3-phosphoethanolamine sodium salt, 1,2-dimyristoyl-sn-glycerol, methoxypoly ethylene glycol (DMG-PEG-2K), or a mixture thereof. Additional exemplary PEG-lipid conjugates are described, for example, in U.S. Pat. Nos. 5,885,613, 6,287,591, US2003/0077829, US2003/0077829, US2005/0175682, US2008/0020058, US2011/0117125, US2010/0130588, US2016/0376224, US2017/0119904, and US/099823, the contents of all of which are incorporated herein by reference in their entirety. In some embodiments, a PEG-lipid is a compound of Formula III, III-a-I, III-a-2, III-b-1, III-b-2, or V of US2018/0028664, the content of which is incorporated herein by reference in its entirety. In some embodiments, a PEG-lipid is of Formula II of US20150376115 or US2016/0376224, the content of both of which is incorporated herein by reference in its entirety. In some embodiments, the PEG-DAA conjugate can be, for example, PEG-dilauryloxypropyl, PEG-dimyristyloxypropyl, PEG-dipalmityloxypropyl, or PEG-distearyloxypropyl. The PEG-lipid can be one or more of PEG-DMG, PEG-dilaurylglycerol, PEG-dipalmitoylglycerol, PEG-distearoylglycerol, PEG-dilaurylglycamide, PEG-dimyristylglycamide, PEG-dipalmitoylglycamide, PEG-disterylglycamide, PEG-cholesterol (1-[8′-(Cholest-5-en-3[beta]-oxy)carboxamido-3′,6′-dioxaoctanyl] carbamoyl-[omega]-methyl-poly(ethylene glycol), PEG-DMB (3,4-Ditetradecoxylbenzyl-[omega]-methyl-poly(ethylene glycol) ether), and 1,2-dimyristoyl-sn-glycero-3-phosphoethanolamine-N-[methoxy(polyethylene glycol)-2000]. In some embodiments, the PEG-lipid comprises PEG-DMG, 1,2-dimyristoyl-sn-glycero-3-phosphoethanolamine-N-[methoxy(polyethylene glycol)-2000]. In some embodiments, the PEG-lipid comprises a structure selected from:

[chemical structure]

[1094] In some embodiments, lipids conjugated with a molecule other than a PEG can also be used in place of PEG-lipid. For example, polyoxazoline (POZ)-lipid conjugates, polyamide-lipid conjugates (such as ATTA-lipid conjugates), and cationic-polymer lipid (GPL) conjugates can be used in place of or in addition to the PEG-lipid.

[1095] Exemplary conjugated lipids, i.e., PEG-lipids, (POZ)-lipid conjugates, ATTA-lipid conjugates and cationic polymer-lipids are described in the PCT and LIS patent applications listed in Table 2 of WO2019051289A9 and in WO2020106946A1, the contents of all of which are incorporated herein by reference in their entirety.

[1096] In some embodiments an LNP comprises a compound of Formula (xix), a compound of Formula (xxi) and a compound of Formula (xxv). In some embodiments a LNP comprising a formulation of Formula (xix), Formula (xxi) and Formula (xxv) is used to deliver a GeneWriter composition described herein to the lung or pulmonary cells.

[1097] In some embodiments, the PEG or the conjugated lipid can comprise 0-20% (mol) of the total lipid present in the lipid nanoparticle. In some embodiments, PEG or the conjugated lipid content is 0.5-10% or 2-5% (mol) of the total lipid present in the lipid nanoparticle. Molar ratios of the ionizable lipid, non-cationic-lipid, sterol, and PEG/conjugated lipid can be varied as needed. For example, the lipid particle can comprise 30-70% ionizable lipid by mole or by total weight of the composition, 0-60% cholesterol by mole or by total weight of the composition, 0-30% non-cationic-lipid by mole or by total weight of the composition and 1-10% conjugated lipid by mole or by total weight of the composition. Preferably, the composition comprises 30-40% ionizable lipid by mole or by total weight of the composition, 40-50% cholesterol by mole or by total weight of the composition, and 10-20% non-cationic-lipid by mole or by total weight of the composition. In some other embodiments, the composition is 50-75% ionizable lipid by mole or by total weight of the composition, 20-40% cholesterol by mole or by total weight of the composition, and 5 to 10% non-cationic-lipid, by mole or by total weight of the composition and 1-10% conjugated lipid by mole or by total weight of the composition. The composition may contain 60-70% ionizable lipid by mole or by total weight of the composition, 25-35% cholesterol by mole or by total weight of the composition, and 5-10% non-cationic-lipid by mole or by total weight of the composition. The composition may also contain up to 90% ionizable lipid by mole or by total weight of the composition and 2 to 15% non-cationic lipid by mole or by total weight of the composition. The formulation may also be a lipid nanoparticle formulation, for example comprising 8-30% ionizable lipid by mole or by total weight of the composition, 5-30% non-cationic lipid by mole or by total weight of the composition, and 0-20% cholesterol by mole or by total weight of the composition; 4-25% ionizable lipid by mole or by total weight of the composition, 4-25% non-cationic lipid by mole or by total weight of the composition, 2 to 25% cholesterol by mole or by total weight of the composition, 10 to 35% conjugate lipid by mole or by total weight of the composition, and 5% cholesterol by mole or by total weight of the composition; or 2-30% ionizable lipid by mole or by total weight of the composition, 2-30% non-cationic lipid by mole or by total weight of the composition, 1 to 15% cholesterol by mole or by total weight of the composition, 2 to 35% conjugate lipid by mole or by total weight of the composition, and 1-20% cholesterol by mole or by total weight of the composition; or even up to 90% ionizable lipid by mole or by total weight of the composition and 2-10% non-cationic lipids by mole or by total weight of the composition, or even 100% cationic lipid by mole or by total weight of the composition. In some embodiments, the lipid particle formulation comprises ionizable lipid, phospholipid, cholesterol and a PEG-ylated lipid in a molar ratio of 50:10:38.5:1.5. In some other embodiments, the lipid particle formulation comprises ionizable lipid, cholesterol and a PEG-ylated lipid in a molar ratio of 60:38.5:1.5.

[1098] In some embodiments, the lipid particle comprises ionizable lipid, non-cationic lipid (e.g. phospholipid), a sterol (e.g., cholesterol) and a PEG-ylated lipid, where the molar ratio of lipids ranges from 20 to 70 mole percent for the ionizable lipid, with a target of 40-60, the mole percent of non-cationic lipid ranges from 0 to 30, with a target of 0 to 15, the mole percent of sterol ranges from 20 to 70, with a target of 30 to 50, and the mole percent of PEG-ylated lipid ranges from 1 to 6, with a target of 2 to 5.

[1099] In some embodiments, the lipid particle comprises ionizable lipid/non-cationic-lipid/sterol/conjugated lipid at a molar ratio of 50:10:38.5:1.5.

[1100] In an aspect, the disclosure provides a lipid nanoparticle formulation comprising phospholipids, lecithin, phosphatidylcholine and phosphatidylethanolamine.

[1101] In some embodiments, one or more additional compounds can also be included. Those compounds can be administered separately or the additional compounds can be included in the lipid nanoparticles of the invention. In other words, the lipid nanoparticles can contain other compounds in addition to the nucleic acid or at least a second nucleic acid, different than the first. Without limitations, other additional compounds can be selected from the group consisting of small or large organic or inorganic molecules, monosaccharides, disaccharides, trisaccharides, oligosaccharides, polysaccharides, peptides, proteins, peptide analogs and derivatives thereof, peptidomimetics, nucleic acids, nucleic acid analogs and derivatives, an extract made from biological materials, or any combinations thereof.

[1102] In some embodiments, a lipid nanoparticle (or a formulation comprising lipid nanoparticles) lacks reactive impurities (e.g., aldehydes or ketones), or comprises less than a preselected level of reactive impurities (e.g., aldehydes or ketones). While not wishing to be bound by theory, in some embodiments, a lipid reagent is used to make a lipid nanoparticle formulation, and the lipid reagent may comprise a contaminating reactive impurity (e.g., an aldehyde or ketone). A lipid regent may be selected for manufacturing based on having less than a preselected level of reactive impurities (e.g., aldehydes or ketones). Without wishing to be bound by theory, in some embodiments, aldehydes can cause modification and damage of RNA, e.g., cross-linking between bases and/or covalently conjugating lipid to RNA (e.g., forming lipid-RNA adducts). This may, in some instances, lead to failure of a reverse transcriptase reaction and/or incorporation of inappropriate bases, e.g., at the site(s) of lesion(s), e.g., a mutation in a newly synthesized target DNA.

[1103] In some embodiments, a lipid nanoparticle formulation is produced using a lipid reagent comprising less than 5%, 4%, 3%, 2%, 1%, 0.9%, 0.8%, 0.7%, 0.6%, 0.5%, 0.4%, 0.3%, 0.2%, or 0.1% total reactive impurity (e.g., aldehyde) content. In some embodiments, a lipid nanoparticle formulation is produced using a lipid reagent comprising less than 5%, 4%, 3%, 2%, 1%, 0.9%, 0.8%, 0.7%, 0.6%, 0.5%, 0.4%, 0.3%, 0.2%, or 0.1% of any single reactive impurity (e.g., aldehyde) species. In some embodiments, a lipid nanoparticle formulation is produced using a lipid reagent comprising: (i) less than 5%, 4%, 3%, 2%, 1%, 0.9%, 0.8%, 0.7%, 0.6%, 0.5%, 0.4%, 0.3%, 0.2%, or 0.1% total reactive impurity (e.g., aldehyde) content; and (ii) less than 5%, 4%, 3%, 2%, 1%, 0.9%, 0.8%, 0.7%, 0.6%, 0.5%, 0.4%, 0.3%, 0.2%, or 0.1% of any single reactive impurity (e.g., aldehyde) species. In some embodiments, the lipid nanoparticle formulation is produced using a plurality of lipid reagents, and each lipid reagent of the plurality independently meets one or more criterion described in this paragraph. In some embodiments, each lipid reagent of the plurality meets the same criterion, e.g., a criterion of this paragraph.

[1104] In some embodiments, the lipid nanoparticle formulation comprises less than 5%, 4%, 3%, 2%, 1%, 0.9%, 0.8%, 0.7%, 0.6%, 0.5%, 0.4%, 0.3%, 0.2%, or 0.1% total reactive impurity (e.g., aldehyde) content. In some embodiments, the lipid nanoparticle formulation comprises less than 5%, 4%, 3%, 2%, 1%, 0.9%, 0.8%, 0.7%, 0.6%, 0.5%, 0.4%, 0.3%, 0.2%, or 0.1% of any single reactive impurity (e.g., aldehyde) species. In some embodiments, the lipid nanoparticle formulation comprises: (i) less than 5%, 4%, 3%, 2%, 1%, 0.9%, 0.8%, 0.7%, 0.6%, 0.5%, 0.4%, 0.3%, 0.2%, or 0.1% total reactive impurity (e.g., aldehyde) content; and (ii) less than 5%, 4%, 3%, 2%, 1%, 0.9%, 0.8%, 0.7%, 0.6%, 0.5%, 0.4%, 0.3%, 0.2%, or 0.1% of any single reactive impurity (e.g., aldehyde) species.

[1105] In some embodiments, one or more, or optionally all, of the lipid reagents used for a lipid nanoparticle as described herein or a formulation thereof comprise less than 5%, 4%, 3%, 2%, 1%, 0.9%, 0.8%, 0.7%, 0.6%, 0.5%, 0.4%, 0.3%, 0.2%, or 0.1% total reactive impurity (e.g., aldehyde) content. In some embodiments, one or more, or optionally all, of the lipid reagents used for a lipid nanoparticle as described herein or a formulation thereof comprise less than 5%, 4%, 3%, 2%, 1%, 0.9%, 0.8%, 0.7%, 0.6%, 0.5%, 0.4%, 0.3%, 0.2%, or 0.1% of any single reactive impurity (e.g., aldehyde) species. In some embodiments, one or more, or optionally all, of the lipid reagents used for a lipid nanoparticle as described herein or a formulation thereof comprise: (i) less than 5%, 4%, 3%, 2%, 1%, 0.9%, 0.8%, 0.7%, 0.6%, 0.5%, 0.4%, 0.3%, 0.2%, or 0.1% total reactive impurity (e.g., aldehyde) content; and (ii) less than 5%, 4%, 3%, 2%, 1%, 0.9%, 0.8%, 0.7%, 0.6%, 0.5%, 0.4%, 0.3%, 0.2%, or 0.1% of any single reactive impurity (e.g., aldehyde) species.

[1106] In some embodiments, total aldehyde content and/or quantity of any single reactive impurity (e.g., aldehyde) species is determined by liquid chromatography (LC), e.g., coupled with tandem mass spectrometry (MS/MS), e.g., according to the method described in Example 40. In some embodiments, reactive impurity (e.g., aldehyde) content and/or quantity of reactive impurity (e.g., aldehyde) species is determined by detecting one or more chemical modifications of a nucleic acid molecule (e.g., an RNA molecule, e.g., as described herein) associated with the presence of reactive impurities (e.g., aldehydes), e.g., in the lipid reagents. In some embodiments, reactive impurity (e.g., aldehyde) content and/or quantity of reactive impurity (e.g., aldehyde) species is determined by detecting one or more chemical modifications of a nucleotide or nucleoside (e.g., a ribonucleotide or ribonucleoside, e.g., comprised in or isolated from a template nucleic acid, e.g., as described herein) associated with the presence of reactive impurities (e.g., aldehydes), e.g., in the lipid reagents, e.g., as described in Example 41. In embodiments, chemical modifications of a nucleic acid molecule, nucleotide, or nucleoside are detected by determining the presence of one or more modified nucleotides or nucleosides, e.g., using LC-MS/MS analysis, e.g., as described in Example 41.

[1107] In some embodiments, a nucleic acid (e.g., RNA) described herein (e.g., a template nucleic acid or a nucleic acid encoding a GeneWriter) does not comprise an aldehyde modification, or comprises less than a preselected amount of aldehyde modifications. In some embodiments, on average, a nucleic acid has less than 50, 20, 10, 5, 2, or 1 aldehyde modifications per 1000 nucleotides, e.g., wherein a single cross-linking of two nucleotides is a single aldehyde modification. In some embodiments, the aldehyde modification is an RNA adduct (e.g., a lipid-RNA adduct). In some embodiments, the aldehyde-modified nucleotide is cross-linking between bases. In some embodiments, a nucleic acid (e.g., RNA) described herein comprises less than 50, 20, 10, 5, 2, or 1 cross-links between nucleotide.

[1108] In some embodiments, LNPs are directed to specific tissues by the addition of targeting domains. For example, biological ligands may be displayed on the surface of LNPs to enhance interaction with cells displaying cognate receptors, thus driving association with and cargo delivery to tissues wherein cells express the receptor. In some embodiments, the biological ligand may be a ligand that drives delivery to the liver, e.g., LNPs that display GalNAc result in delivery of nucleic acid cargo to hepatocytes that display asialoglycoprotein receptor (ASGPR). The work of Akinc et al. Mol Ther 18(7):1357-1364 (2010) teaches the conjugation of a trivalent GalNAc ligand to a PEG-lipid (GalNAc-PEG-DSG) to yield LNPs dependent on ASGPR for observable LNP cargo effect (see, e.g., FIG. 6). Other ligand-displaying LNP formulations, e.g., incorporating folate, transferrin, or antibodies, are discussed in WO2017223135, which is incorporated herein by reference in its entirety, in addition to the references used therein, namely Kolhatkar et al., Curr Drug Discov Technol. 2011 8:197-206; Musacchio and Torchilin, Front Biosci. 2011 16:1388-1412; Yu et al., Mol Membr Biol. 2010 27:286-298; Patil et al., Crit Rev Ther Drug Carrier Syst. 2008 25:1-61; Benoit et al., Biomacromolecules. 2011 12:2708-2714; Zhao et al., Expert Opin Drug Deliv. 2008 5:309-319; Akinc et al., Mol Ther. 2010 18:1357-1364; Srinivasan et al., Methods Mol Biol. 2012 820:105-116; Ben-Arie et al., Methods Mol Biol. 2012 757:497-507; Peer 2010 J Control Release. 20:63-68; Peer et al., Proc Natl Acad Sci USA. 2007 104:4095-4100; Kim et al., Methods Mol Biol. 2011 721:339-353; Subramanya et al., Mol Ther. 2010 18:2028-2037; Song et al., Nat Biotechnol. 2005 23:709-717; Peer et al., Science. 2008 319:627-630; and Peer and Lieberman, Gene Ther. 2011 18:1127-1133.

[1109] In some embodiments, LNPs are selected for tissue-specific activity by the addition of a Selective ORgan Targeting (SORT) molecule to a formulation comprising traditional components, such as ionizable cationic lipids, amphipathic phospholipids, cholesterol and poly(ethylene glycol) (PEG) lipids. The teachings of Cheng et al. Nat Nanotechnol 15(4):313-320 (2020) demonstrate that the addition of a supplemental “SORT” component precisely alters the in vivo RNA delivery profile and mediates tissue-specific (e.g., lungs, liver, spleen) gene delivery and editing as a function of the percentage and biophysical property of the SORT molecule.

[1110] In some embodiments, the LNPs comprise biodegradable, ionizable lipids. In some embodiments, the LNPs comprise (9Z,12Z)-3-((4,4-bis(octyloxy)butanoyl)oxy)-2-((((3-(diethylamino)propoxy)carbonyl)oxy)methyl)propyl octadeca-9,12-dienoate, also called 3-((4,4-bis(octyloxy)butanoyl)oxy)-2-((((3-(diethylamino)propoxy)carbonyl)oxy)methyl)propyl (9Z,12Z)-octadeca-9,12-dienoate) or another ionizable lipid. See, e.g, lipids of WO2019/067992, WO/2017/173054, WO2015/095340, and WO2014/136086, as well as references provided therein. In some embodiments, the term cationic and ionizable in the context of LNP lipids is interchangeable, e.g., wherein ionizable lipids are cationic depending on the pH.

[1111] In some embodiments, multiple components of a Gene Writer system may be prepared as a single LNP formulation, e.g., an LNP formulation comprises mRNA encoding for the Gene Writer polypeptide and an RNA template. Ratios of nucleic acid components may be varied in order to maximize the properties of a therapeutic. In some embodiments, the ratio of RNA template to mRNA encoding a Gene Writer polypeptide is about 1:1 to 100:1, e.g., about 1:1 to 20:1, about 20:1 to 40:1, about 40:1 to 60:1, about 60:1 to 80:1, or about 80:1 to 100:1, by molar ratio. In other embodiments, a system of multiple nucleic acids may be prepared by separate formulations, e.g., one LNP formulation comprising a template RNA and a second LNP formulation comprising an mRNA encoding a Gene Writer polypeptide. In some embodiments, the system may comprise more than two nucleic acid components formulated into LNPs. In some embodiments, the system may comprise a protein, e.g., a Gene Writer polypeptide, and a template RNA formulated into at least one LNP formulation.

[1112] In some embodiments, the average LNP diameter of the LNP formulation may be between 10s of nm and 100s of nm, e.g., measured by dynamic light scattering (DLS). In some embodiments, the average LNP diameter of the LNP formulation may be from about 40 nm to about 150 nm, such as about 40 nm, 45 nm, 50 nm, 55 nm, 60 nm, 65 nm, 70 nm, 75 nm, 80 nm, 85 nm, 90 nm, 95 nm, 100 nm, 105 nm, 110 nm, 115 nm, 120 nm, 125 nm, 130 nm, 135 nm, 140 nm, 145 nm, or 150 nm. In some embodiments, the average LNP diameter of the LNP formulation may be from about 50 nm to about 100 nm, from about 50 nm to about 90 nm, from about 50 nm to about 80 nm, from about 50 nm to about 70 nm, from about 50 nm to about 60 nm, from about 60 nm to about 100 nm, from about 60 nm to about 90 nm, from about 60 nm to about 80 nm, from about 60 nm to about 70 nm, from about 70 nm to about 100 nm, from about 70 nm to about 90 nm, from about 70 nm to about 80 nm, from about 80 nm to about 100 nm, from about 80 nm to about 90 nm, or from about 90 nm to about 100 nm. In some embodiments, the average LNP diameter of the LNP formulation may be from about 70 nm to about 100 nm. In a particular embodiment, the average LNP diameter of the LNP formulation may be about 80 nm. In some embodiments, the average LNP diameter of the LNP formulation may be about 100 nm. In some embodiments, the average LNP diameter of the LNP formulation ranges from about 1 mm to about 500 mm, from about 5 mm to about 200 mm, from about 10 mm to about 100 mm, from about 20 mm to about 80 mm, from about 25 mm to about 60 mm, from about 30 mm to about 55 mm, from about 35 mm to about 50 mm, or from about 38 mm to about 42 mm.

[1113] A LNP may, in some instances, be relatively homogenous. A polydispersity index may be used to indicate the homogeneity of a LNP, e.g., the particle size distribution of the lipid nanoparticles. A small (e.g., less than 0.3) polydispersity index generally indicates a narrow particle size distribution. A LNP may have a polydispersity index from about 0 to about 0.25, such as 0.01, 0.02, 0.03, 0.04, 0.05, 0.06, 0.07, 0.08, 0.09, 0.10, 0.11, 0.12, 0.13, 0.14, 0.15, 0.16, 0.17, 0.18, 0.19, 0.20, 0.21, 0.22, 0.23, 0.24, or 0.25. In some embodiments, the polydispersity index of a LNP may be from about 0.10 to about 0.20.

[1114] The zeta potential of a LNP may be used to indicate the electrokinetic potential of the composition. In some embodiments, the zeta potential may describe the surface charge of a LNP. Lipid nanoparticles with relatively low charges, positive or negative, are generally desirable, as more highly charged species may interact undesirably with cells, tissues, and other elements in the body. In some embodiments, the zeta potential of a LNP may be from about −10 mV to about +20 mV, from about −10 mV to about +15 mV, from about −10 mV to about +10 mV, from about −10 mV to about +5 mV, from about −10 mV to about 0 mV, from about −10 mV to about −5 mV, from about −5 mV to about +20 mV, from about −5 mV to about +15 mV, from about −5 mV to about +10 mV, from about −5 mV to about +5 mV, from about −5 mV to about 0 mV, from about 0 mV to about +20 mV, from about 0 mV to about +15 mV, from about 0 mV to about +10 mV, from about 0 mV to about +5 mV, from about +5 mV to about +20 mV, from about +5 mV to about +15 mV, or from about +5 mV to about +10 mV.

[1115] The efficiency of encapsulation of a protein and/or nucleic acid, e.g., Gene Writer polypeptide or mRNA encoding the polypeptide, describes the amount of protein and/or nucleic acid that is encapsulated or otherwise associated with a LNP after preparation, relative to the initial amount provided. The encapsulation efficiency is desirably high (e.g., close to 100%). The encapsulation efficiency may be measured, for example, by comparing the amount of protein or nucleic acid in a solution containing the lipid nanoparticle before and after breaking up the lipid nanoparticle with one or more organic solvents or detergents. An anion exchange resin may be used to measure the amount of free protein or nucleic acid (e.g., RNA) in a solution. Fluorescence may be used to measure the amount of free protein and/or nucleic acid (e.g., RNA) in a solution. For the lipid nanoparticles described herein, the encapsulation efficiency of a protein and/or nucleic acid may be at least 50%, for example 50%, 55%, 60%, 65%, 70%, 75%, 80%, 85%, 90%, 91%, 92%, 93%, 94%, 95%, 96%, 97%, 98%, 99%, or 100%. In some embodiments, the encapsulation efficiency may be at least 80%. In some embodiments, the encapsulation efficiency may be at least 90%. In some embodiments, the encapsulation efficiency may be at least 95%.

[1116] A LNP may optionally comprise one or more coatings. In some embodiments, a LNP may be formulated in a capsule, film, or table having a coating. A capsule, film, or tablet including a composition described herein may have any useful size, tensile strength, hardness or density.

[1117] Additional exemplary lipids, formulations, methods, and characterization of LNPs are taught by WO2020061457, which is incorporated herein by reference in its entirety.

[1118] In some embodiments, in vitro or ex vivo cell lipofections are performed using Lipofectamine MessengerMax (Thermo Fisher) or TransIT-mRNA Transfection Reagent (Mirus Bio). In certain embodiments, LNPs are formulated using the GenVoy_ILM ionizable lipid mix (Precision NanoSystems). In certain embodiments, LNPs are formulated using 2,2-dilinoleyl-4-dimethylaminoethyl-[1,3]-dioxolane (DLin-KC2-DMA) or dilinoleylmethyl-4-dimethylaminobutyrate (DLin-MC3-DMA or MC3), the formulation and in vivo use of which are taught in Jayaraman et al. Angew Chem Int Ed Engl 51(34):8529-8533 (2012), incorporated herein by reference in its entirety.

[1119] LNP formulations optimized for the delivery of CRISPR-Cas systems, e.g., Cas9-gRNA RNP, gRNA, Cas9 mRNA, are described in WO2019067992 and WO2019067910, both incorporated by reference.

[1120] Additional specific LNP formulations useful for delivery of nucleic acids are described in U.S. Pat. Nos. 8,158,601 and 8,168,775, both incorporated by reference, which include formulations used in patisiran, sold under the name ONPATTRO.

[1121] Exemplary dosing of Gene Writer LNP may include about 0.1, 0.25, 0.3, 0.5, 1, 2, 3, 4, 5, 6, 8, 10, or 100 mg/kg (RNA). Exemplary dosing of AAV comprising a nucleic acid encoding one or more components of the system may include an MOI of about 10¹¹, 10¹², 10¹³, and 10¹⁴ vg/kg.

[1122] All publications, patent applications, patents, and other publications and references (e.g., sequence database reference numbers) cited herein are incorporated by reference in their entirety. For example, all GenBank, Unigene, and Entrez sequences referred to herein, e.g., in any Table herein, are incorporated by reference. Unless otherwise specified, the sequence accession numbers specified herein, including in any Table herein, refer to the database entries current as of Mar. 4, 2020. When one gene or protein references a plurality of sequence accession numbers, all of the sequence variants are encompassed.

### EXAMPLES

[1123] The invention is further illustrated by the following examples. The examples are provided for illustrative purposes only and are not to be construed as limiting the scope or content of the invention in any way.

### Example 1: Gene Writer™ Enabling Nucleotide Substitution in Genomic DNA to Correct Alpha-1 Antitrypsin Deficiency Mutation in Human Cells

[1124] This example describes the use of a Gene Writer™ gene editing system to alter a genomic sequence at a single nucleotide.

[1125] In this example, the Gene Writer™ polypeptide and writing template are provided as DNA transfected into HEK293T cells that possess the PiZ genotype (E342K), a common allele associated with alpha-1 antitrypsin deficiency. The Gene Writer™ polypeptide uses a Cas9 nickase for both DNA-binding and endonuclease functions. The writing template is designed to have homology to the target sequence, while incorporating additional nucleotides at the desired position, such that reverse transcription of the template RNA results in the generation of a new DNA strand containing the substitution.

[1126] To create the transversion in the affected human SERPINA1 gene that restores the GAG triplet coding for glutamate in healthy patients, the Gene Writer™ polypeptide is used with a specific template nucleic acid, which encodes a gRNA scaffold for polypeptide binding, a spacer for polypeptide homing, target homology domain to set up TPRT, and a template sequence for reverse transcription that includes the required substitution. An exemplary template RNA carries the sequence (1) TCCCCTCCAGGCCGTGCATA (2) GTTTTAGAGCTAGAAATAGCAAGTTAAAATAAGGCTAGTCCGTTATCAACTTGAAAAAGTGGGACCGAGTCGGTCC (3) TcGTCGATGGTCAGCACAGCCTTAT (4) GCACGGCCTGGA (SEQ ID NO: 1607), where numbers are used to delineate the modules of the template in the order (5′-3′) (1) gRNA spacer, (2) gRNA scaffold, (3) heterologous object sequence, (4) 3′ homology priming domain, and the lowercase “c” indicates the position in the template carrying the nucleotide substitution to be written into the target site to correct the E342K mutation. An exemplary gRNA for providing a second nick as described in embodiments of this system comprises the spacer sequence TTTGTTGAACTTGACCTCGG (SEQ ID NO: 1608) and directs a Cas9 nickase to nick the second strand of the target site within the homologous region. In some embodiments, this second nick improves the efficiency of the edit.

[1127] After transfection, cells are incubated for three days to allow for expression of the Gene Writing™ system and conversion of the genomic DNA target, and genomic DNA is extracted from cells. Genomic DNA is then subjected to PCR-based amplification using site-specific primers and amplicons are sequenced on an Illumina MiSeq according to manufacturer's protocols. Sequence analysis is then performed to determine the frequency of reads containing the desired edit.

### Example 2: Gene Writer™ Enabling Short Insertion in Genomic DNA to Correct CFTR

[1128] This example describes the use of a Gene Writer™ gene editing system to alter a genomic sequence by insertion of a short string of nucleotides.

[1129] In this example, the Gene Writer™ polypeptide and writing template are provided as DNA transfected into HEK293T cells that possess the CFTR delta-F508 mutation, a common allele associated with cystic fibrosis. The Gene Writer™ polypeptide uses a Cas9 nickase for both DNA-binding and endonuclease functions. The writing template is designed to have homology to the target sequence, while incorporating additional nucleotides at the desired position, such that reverse transcription of the template RNA results in the generation of a new DNA strand containing the short insertion.

[1130] To create a short insertion in the affected human CFTR locus that restores the TTT triplet coding for phenylalanine in healthy patients, the Gene Writer™ polypeptide is used with a specific template, which encodes a spacer for polypeptide homing, target homology domain to set up TPRT, and a template sequence for reverse transcription that includes the 3-nt insertion.

[1131] After transfection, cells are incubated for three days to allow for expression of the Gene Writing™ system and conversion of the genomic DNA target. After the incubation period, genomic DNA is extracted from cells. Genomic DNA is then subjected to PCR-based amplification using site-specific primers and amplicons are sequenced on an Illumina MiSeq according to manufacturer's protocols. Sequence analysis is then performed to determine the frequency of reads containing the desired edit.

### Example 3: Gene Writer™ Enabling Deletion of Genomic DNA to Correct Duchenne Muscular Dystrophy (DMD)

[1132] This example describes the use of a Gene Writer™ gene editing system to alter a genomic sequence by deletion of nucleotides.

[1133] One of the most common mutations found in patients with DMD is a deletion that eliminates exon 50 in the rod domain of dystrophin, which places exon 51 out of frame with preceding exons. Such a mutation results in production of truncated dystrophin, leading to the pathological effects of the disease. In order to ameliorate disease, the remainder of the 79 total exons, the splice acceptor site is deleted from exon 51, resulting in restoration of the full-length protein, an approach known as exon skipping.

[1134] In this example, the Gene Writer™ polypeptide and writing template are provided as RNA nucleofected into cells containing a deletion in exon 50 that results in a truncated dystrophin product, as described above. Target cells are either patient-derived iPSCs containing the mutation or are synthetically engineered using CRISPR-Cas to generate the deletion. The Gene Writer™ polypeptide uses a Cas9 nickase for both DNA-binding and endonuclease functions. The writing template is designed to have homology to the target sequence, while incorporating a deletion at the desired position, such that reverse transcription of the template RNA results in the generation of a new DNA strand lacking the deleted nucleotides.

[1135] To create a short deletion that removes the exon 51 5′ splice acceptor site, the Gene Writer™ polypeptide is used with a specific template that encodes a spacer for polypeptide homing, target homology domain to set up TPRT, and a template sequence for reverse transcription that includes a 5-nt deletion proximal to the Gene Writer™ polypeptide-induced nick, which includes the splice acceptor site.

[1136] After transfection, cells are incubated for three days to allow for expression of the Gene Writing™ system and conversion of the genomic DNA target. After the incubation period, genomic DNA is extracted from cells. Genomic DNA is then subjected to PCR-based amplification using site-specific primers and amplicons are sequenced on an Illumina MiSeq according to manufacturer's protocols. Sequence analysis is then performed to determine the frequency of reads containing the desired edit. Protein analysis by Western blot is used to further confirm the expression of the restored dystrophin, as compared to the truncated dystrophin produced in non-edited cells.

### Example 4: Gene Writer™ Enabling Large Insertion into Genomic DNA

[1137] This example describes the use of a Gene Writer™ gene editing system to alter a genomic sequence by insertion of a large string of nucleotides.

[1138] In this example, the Gene Writer™ polypeptide, gRNA, and writing template are provided as DNA transfected into HEK293T cells. The Gene Writer™ polypeptide uses a Cas9 nickase for both DNA-binding and endonuclease functions. The reverse transcriptase function is derived from the highly processive RT domain of an R2 retrotransposase. The writing template is designed to have homology to the target sequence, while incorporating the genetic payload at the desired position, such that reverse transcription of the template RNA results in the generation of a new DNA strand containing the desired insertion.

[1139] To create a large insertion in the human HEK293T cell DNA, the Gene Writer™ polypeptide is used in conjunction with a specific gRNA, which targets the Cas9-containing Gene Writer™ to the target locus, and a template RNA for reverse transcription, which contains an RT-binding motif (3′ UTR from an R2 element) for associating with the reverse transcriptase, a region of homology to the target site for priming reverse transcription, and a genetic payload (GFP expression unit). This complex nicks the target site and then performs TPRT on the template, initiating the reaction by using priming regions on the template that are complementary to the sequence immediately adjacent to the site of the nick and copying the GFP payload into the genomic DNA.

[1140] After transfection, cells are incubated for three days to allow for expression of the Gene Writing™ system and conversion of the genomic DNA target. After the incubation period, genomic DNA is extracted from cells. Genomic DNA is then subjected to PCR-based amplification using site-specific primers and amplicons are sequenced on an Illumina MiSeq according to manufacturer's protocols. Sequence analysis is then performed to determine the frequency of reads containing the desired edit.

### Example 5: Gene Writer™ Edits not Incorporating Binding Sequences from the Template RNA

[1141] This example describes the use of a Gene Writer™ gene editing system to alter a genomic sequence by insertion of a genetic payload without causing the insertion of additional sequence from the template molecule.

[1142] In this example, the Gene Writer™ polypeptide and writing template are provided as DNA transfected into HEK293T cells. The Gene Writer™ polypeptide uses a Cas9 nickase for both DNA-binding and endonuclease functions. The writing template is designed to have homology to the target sequence, while incorporating the genetic payload (e.g. GFP gene expression unit) at the desired position, such that reverse transcription of the template RNA results in the generation of a new DNA strand containing the desired insertion.

[1143] To accomplish specific insertion of a genetic payload without also incorporating extraneous template motifs (e.g. protein binding motif), the layout of the template RNA molecule is such that the protein binding sequences (e.g. UTRs) are terminal to the homology sequences used to write the new payload into the genomic target site.

[1144] After transfection, cells are incubated for three days to allow for expression of the Gene Writing™ system and conversion of the genomic DNA target. After the incubation period, genomic DNA is extracted from cells. Genomic DNA is then subjected to PCR-based amplification using site-specific primers and amplicons are sequenced on an Illumina MiSeq according to manufacturer's protocols. Sequence analysis is then performed to determine the frequency of reads containing the desired edit.

### Example 6: Gene Writer™ Genome Editing in the Presence of DNA Repair Inhibitors

[1145] This example describes the use of a Gene Writer™ gene editing system to alter a genomic sequence by insertion of a genetic payload without causing the insertion of additional sequence from the template molecule.

[1146] In this example, experiments will test the effect of different DNA repair pathways on Gene Writing™ via the application of DNA repair pathway inhibitors or DNA repair pathway deficient cell lines. When applying DNA repair pathway inhibitors, PrestoBlue cell viability assay is performed first to determine the toxicity of the inhibitors and whether any normalization should be applied for following assays. SCR7 is an inhibitor for NHEJ, which is applied at a series of dilutions during Gene Writer™ delivery. PARP protein is a nuclear enzyme that binds as homodimers to both single- and double-strand breaks. Thus, its inhibitors are be used in the test of relevant DNA repair pathways, including homologous recombination repair pathway and base excision repair pathway. The experiment procedure is the same with that of SCR7. Cell lines with deficient core proteins of nucleotide excision repair (NER) pathway are used to test the effect of NER on Gene Writing™. After the delivery of the Gene Writer™ system into the cell, ddPCR is used to evaluate the retrotransposition in the context of inhibition of DNA repair pathways. Sequencing analysis is also performed to evaluate whether certain DNA repair pathways play a role in the alteration of the integration junction. In some embodiments, Gene Writing™ into the genome will not be decreased by the knockdown of DNA repair pathways, suggesting that the system does not utilize host cell repair pathways for DNA integration. In some embodiments, Gene Writing™ into the genome will not be decreased by more than 50% by the knockdown of DNA repair pathways, suggesting that the system does not rely on host cell repair pathways for DNA integration.

### Example 7: Internal Gene Writer Deletions Demonstrating Protein Domain Modularity

[1147] This example describes deletions in a Gene Writer polypeptide that retain functionality and further demonstrate the modularity of the DNA binding domain.

[1148] In this example, a series of experiments were performed to test the activity of various mutant retrotransposases, as well as gaining structural knowledge about the protein modularity. This experiment tested removing a polypeptide stretch after the c-myb motif in the DNA binding domain (DBD) and replacing it with a flexible linker (FIG. 8a). The polypeptide stretch removed is referred to as the “natural linker” since it is the intervening region between the DNA binding motifs and the RNA binding domain. The polypeptide region removed spans the following: on the N terminal side at either, location A (predicted random coil following c-myb motif) or location B (end of predicted alpha helix that contains part of the c-myb motif) and the removed region ends at either location v1 (alpha helical region of R2Tg that preceded the predicted −1 RNA binding motif or at location v2 (C-terminal side of an alpha helical region of R2Tg that preceded the predicted −1 RNA binding motif). In place of the polypeptide stretch removed, “natural linker”, is the either of two linkers (Linker A, XTEN: SGSETPGTSESATPES (SEQ ID NO: 1023), and Linker B, 3GS: GGGS (SEQ ID NO: 1024)). For each of these mutant retrotransposases that contain different removed regions (location A—v1, location A—v2, location B—v1, or location B—v2) they were replaced with either linker A or linker B by PCR to a DNA plasmid that expressed R2Tg, thereby yielding these sequences: c-mybA—v1 replaced with 3GS linker (SEQ ID NO: 1024), c-mybA—v2 replaced with 3GS linker (SEQ ID NO: 1024), c-mybA—v1 replaced with XTEN linker, c-mybA—v2 replaced with XTEN linker, c-mybB—v1 replaced with 3GS linker (SEQ ID NO: 1024), c-mybB—v2 replaced with 3GS linker (SEQ ID NO: 1024), c-mybB—v1 replaced with XTEN linker, c-mybB—v2 replaced with XTEN linker, as shown in Table E1 below. The insertion of the linkers was verified by Sanger sequencing and the DNA plasmids were purified for transfection.

Table E1. Amino acid sequences of R2Tg mutants with linkers in place of the “natural linker” region that intervenes the DNA binding domain (DBD) and RNA binding domain.

[1149] The N-terminal DNA-binding domain is italicized and the linker connecting to the rest of the protein is in bold and underlined.

| R2Tg | | SEQ ID |
|---|---|---|
| Mutant | Amino Acid Sequence | NO: |
| R2Tg with | MASCPKPGPPVSAGAMSLESGLTTHSVLAIERGPNSLANSGSDFGGGGL | 1646 |
| natural linker | GLPLRLLRVSVGTQTSRSDWVDLVSWSHPGPTSKSQQVDLVSLFPKHRV | |
| deletion c- | DLLSKNDQVDLVAQFLPSKFPPNLAENDLALLVNLEFYRSDLHVYECVH | |
| mybA | FAAHWEGLSGLPEVYEQLAPQPCVGETLHSSLPRDSELFVPEEGSSEKE | |
| location-v1 | SEDAPKTSPPTPGKHGLEQTGEEKVMVTVPDKNPPCPCCGTRVNSVLNL | |
| replaced with | IEHLKVSHGKRGVCFRCAKCGKENSNYHSVVCHFPKCRGPETEKAPAGE | |
| 3GS linker | WICEVCNRDFTTKIGLGQHKRLAHPAVRNQERIVASQPKETSNRGAHKR | |
| (SEQ ID NO: | CWTKEEEELLIRLEAQFEGNKNINKLIAEHITTKTAKQISDKRRLLSRK | |
| 1024) | PAEEPREEPGTCHHTRRAAGGGSCFGCLESISQIRTATRDKKDTVTREK | |
| | HPKKPFQKWMKDRAIKKGNYLRFQRLFYLDRGKLAKIILDDIECLSCDI | |
| | PLSEIYSVFKTRWETTGSFKSLGDFKTYGKADNTAFRELITAKEIEKNV | |
| | QEMSKGSAPGPDGITLGDVVKMDPEFSRTMEIFNLWLTTGKIPDMVRGC | |
| | RTVLIPKSSKPDRLKDINNWRPITIGSILLRLFSRIVTARLSKACPLNP | |
| | RQRGFIRAAGCSENLKLLQTIIWSAKREHRPLGVVFVDIAKAFDTVSHQ | |
| | HIIHALQQREVDPHIVGLVSNMYENISTYITTKRNTHTDKIQIRVGVKQ | |
| | GDPMSPLLFNLAMDPLLCKLEESGKGYHRGQSSITAMAFADDLVLLSDS | |
| | WENMNTNISILETFCNLTGLKTQGQKCHGFYIKPTKDSYTINDCAAWTI | |
| | NGTPLNMIDPGESEKYLGLQFDPWIGIARSGLSTKLDFWLQRIDQAPLK | |
| | PLQKTDILKTYTIPRLIYIADHSEVKTALLETLDQKIRTAVKEWLHLPP | |
| | CTCDAILYSSTRDGGLGITKLAGLIPSVQARRLHRIAQSSDDTMKCFME | |
| | KEKMEQLHKKLWIQAGGDRENIPSIWEAPPSSEPPNNVSTNSEWEAPTQ | |
| | KDKFPKPCNWRKNEFKKWTKLASQGRGIVNFERDKISNHWIQYYRRIPH | |
| | RKLLTALQLRANVYPTREFLARGRQDQYIKACRHCDADIESCAHIIGNC | |
| | PVTQDARIKRHNYICELLLEEAKKKDWVVFKEPHIRDSNKELYKPDLIF | |
| | VKDARALVVDVTVRYEAAKSSLEEAAAEKVRKYKHLETEVRHLTNAKDV | |
| | TFVGFPLGARGKWHQDNFKLLTELGLSKSRQVKMAETFSTVALFSSVDI | |
| | VHMFASRARKSMVM | |
| R2Tg with | MASCPKPGPPVSAGAMSLESGLTTHSVLAIERGPNSLANSGSDFGGGGL | 1647 |
| natural linker | GLPLRLLRVSVGTQTSRSDWVDLVSWSHPGPTSKSQQVDLVSLFPKHRV | |
| deletion c- | DLLSKNDQVDLVAQFLPSKFPPNLAENDLALLVNLEFYRSDLHVYECVH | |
| mybA | FAAHWEGLSGLPEVYEQLAPQPCVGETLHSSLPRDSELFVPEEGSSEKE | |
| location-v2 | SEDAPKTSPPTPGKHGLEQTGEEKVMVTVPDKNPPCPCCGTRVNSVLNL | |
| replaced with | IEHLKVSHGKRGVCFRCAKCGKENSNYHSVVCHFPKCRGPETEKAPAGE | |
| 3GS linker | WICEVCNRDFTTKIGLGQHKRLAHPAVRNQERIVASQPKETSNRGAHKR | |
| (SEQ ID NO: | CWTKEEEELLIRLEAQFEGNKNINKLIAEHITTKTAKQISDKRRLLSRK | |
| 1024) | PAEEPREEPGTCHHTRRAAGGGSTATRDKKDTVTREKHPKKPFQKWMKD | |
| | RAIKKGNYLRFQRLFYLDRGKLAKIILDDIECLSCDIPLSEIYSVFKTR | |
| | WETTGSFKSLGDFKTYGKADNTAFRELITAKEIEKNVQEMSKGSAPGPD | |
| | GITLGDVVKMDPEFSRTMEIFNLWLTTGKIPDMVRGCRTVLIPKSSKPD | |
| | RLKDINNWRPITIGSILLRLFSRIVTARLSKACPLNPRQRGFIRAAGCS | |
| | ENLKLLQTIIWSAKREHRPLGVVFVDIAKAFDTVSHQHIIHALQQREVD | |
| | PHIVGLVSNMYENISTYITTKRNTHTDKIQIRVGVKQGDPMSPLLFNLA | |
| | MDPLLCKLEESGKGYHRGQSSITAMAFADDLVLLSDSWENMNTNISILE | |
| | TFCNLTGLKTQGQKCHGFYIKPTKDSYTINDCAAWTINGTPLNMIDPGE | |
| | SEKYLGLQFDPWIGIARSGLSTKLDFWLQRIDQAPLKPLQKTDILKTYT | |
| | IPRLIYIADHSEVKTALLETLDQKIRTAVKEWLHLPPCTCDAILYSSTR | |
| | DGGLGITKLAGLIPSVQARRLHRIAQSSDDTMKCFMEKEKMEQLHKKLW | |
| | IQAGGDRENIPSIWEAPPSSEPPNNVSTNSEWEAPTQKDKFPKPCNWRK | |
| | NEFKKWTKLASQGRGIVNFERDKISNHWIQYYRRIPHRKLLTALQLRAN | |
| | VYPTREFLARGRQDQYIKACRHCDADIESCAHIIGNCPVTQDARIKRHN | |
| | YICELLLEEAKKKDWVVFKEPHIRDSNKELYKPDLIFVKDARALVVDVT | |
| | VRYEAAKSSLEEAAAEKVRKYKHLETEVRHLTNAKDVTFVGFPLGARGK | |
| | WHQDNFKLLTELGLSKSRQVKMAETFSTVALFSSVDIVHMFASRARKSM | |
| | VM | |
| R2Tg with | MASCPKPGPPVSAGAMSLESGLTTHSVLAIERGPNSLANSGSDFGGGGL | 1648 |
| natural linker | GLPLRLLRVSVGTQTSRSDWVDLVSWSHPGPTSKSQQVDLVSLFPKHRV | |
| deletion c- | DLLSKNDQVDLVAQFLPSKFPPNLAENDLALLVNLEFYRSDLHVYECVH | |
| mybA | FAAHWEGLSGLPEVYEQLAPQPCVGETLHSSLPRDSELFVPEEGSSEKE | |
| location-v1 | SEDAPKTSPPTPGKHGLEQTGEEKVMVTVPDKNPPCPCCGTRVNSVLNL | |
| replaced with | IEHLKVSHGKRGVCFRCAKCGKENSNYHSVVCHFPKCRGPETEKAPAGE | |
| XTEN linker | WICEVCNRDFTTKIGLGQHKRLAHPAVRNQERIVASQPKETSNRGAHKR | |
| | CWTKEEEELLIRLEAQFEGNKNINKLIAEHITTKTAKQISDKRRLLSRK | |
| | PAEEPREEPGTCHHTRRAASGSETPGTSESATPESCFGCLESISQIRTA | |
| | TRDKKDTVTREKHPKKPFQKWMKDRAIKKGNYLRFQRLFYLDRGKLAKI | |
| | ILDDIECLSCDIPLSEIYSVFKTRWETTGSFKSLGDFKTYGKADNTAFR | |
| | ELITAKEIEKNVQEMSKGSAPGPDGITLGDVVKMDPEFSRTMEIFNLWL | |
| | TTGKIPDMVRGCRTVLIPKSSKPDRLKDINNWRPITIGSILLRLFSRIV | |
| | TARLSKACPLNPRQRGFIRAAGCSENLKLLQTIIWSAKREHRPLGVVFV | |
| | DIAKAFDTVSHQHIIHALQQREVDPHIVGLVSNMYENISTYITTKRNTH | |
| | TDKIQIRVGVKQGDPMSPLLFNLAMDPLLCKLEESGKGYHRGQSSITAM | |
| | AFADDLVLLSDSWENMNTNISILETFCNLTGLKTQGQKCHGFYIKPTKD | |
| | SYTINDCAAWTINGTPLNMIDPGESEKYLGLQFDPWIGIARSGLSTKLD | |
| | FWLQRIDQAPLKPLQKTDILKTYTIPRLIYIADHSEVKTALLETLDQKI | |
| | RTAVKEWLHLPPCTCDAILYSSTRDGGLGITKLAGLIPSVQARRLHRIA | |
| | QSSDDTMKCFMEKEKMEQLHKKLWIQAGGDRENIPSIWEAPPSSEPPNN | |
| | VSTNSEWEAPTQKDKFPKPCNWRKNEFKKWTKLASQGRGIVNFERDKIS | |
| | NHWIQYYRRIPHRKLLTALQLRANVYPTREFLARGRQDQYIKACRHCDA | |
| | DIESCAHIIGNCPVTQDARIKRHNYICELLLEEAKKKDWVVFKEPHIRD | |
| | SNKELYKPDLIFVKDARALVVDVTVRYEAAKSSLEEAAAEKVRKYKHLE | |
| | TEVRHLTNAKDVTFVGFPLGARGKWHQDNFKLLTELGLSKSRQVKMAET | |
| | FSTVALFSSVDIVHMFASRARKSMVM | |
| R2Tg with | MASCPKPGPPVSAGAMSLESGLTTHSVLAIERGPNSLANSGSDFGGGGL | 1649 |
| natural linker | GLPLRLLRVSVGTQTSRSDWVDLVSWSHPGPTSKSQQVDLVSLFPKHRV | |
| deletion c- | DLLSKNDQVDLVAQFLPSKFPPNLAENDLALLVNLEFYRSDLHVYECVH | |
| mybA | FAAHWEGLSGLPEVYEQLAPQPCVGETLHSSLPRDSELFVPEEGSSEKE | |
| location-v2 | SEDAPKTSPPTPGKHGLEQTGEEKVMVTVPDKNPPCPCCGTRVNSVLNL | |
| replaced with | IEHLKVSHGKRGVCFRCAKCGKENSNYHSVVCHFPKCRGPETEKAPAGE | |
| XTEN linker | WICEVCNRDFTTKIGLGQHKRLAHPAVRNQERIVASQPKETSNRGAHKR | |
| | CWTKEEEELLIRLEAQFEGNKNINKLIAEHITTKTAKQISDKRRLLSRK | |
| | PAEEPREEPGTCHHTRRAASGSETPGTSESATPESTATRDKKDTVTREK | |
| | HPKKPFQKWMKDRAIKKGNYLRFQRLFYLDRGKLAKIILDDIECLSCDI | |
| | PLSEIYSVFKTRWETTGSFKSLGDFKTYGKADNTAFRELITAKEIEKNV | |
| | QEMSKGSAPGPDGITLGDVVKMDPEFSRTMEIFNLWLTTGKIPDMVRGC | |
| | RTVLIPKSSKPDRLKDINNWRPITIGSILLRLFSRIVTARLSKACPLNP | |
| | RQRGFIRAAGCSENLKLLQTIIWSAKREHRPLGVVFVDIAKAFDTVSHQ | |
| | HIIHALQQREVDPHIVGLVSNMYENISTYITTKRNTHTDKIQIRVGVKQ | |
| | GDPMSPLLFNLAMDPLLCKLEESGKGYHRGQSSITAMAFADDLVLLSDS | |
| | WENMNTNISILETFCNLTGLKTQGQKCHGFYIKPTKDSYTINDCAAWTI | |
| | NGTPLNMIDPGESEKYLGLQFDPWIGIARSGLSTKLDFWLQRIDQAPLK | |
| | PLQKTDILKTYTIPRLIYIADHSEVKTALLETLDQKIRTAVKEWLHLPP | |
| | CTCDAILYSSTRDGGLGITKLAGLIPSVQARRLHRIAQSSDDTMKCFME | |
| | KEKMEQLHKKLWIQAGGDRENIPSIWEAPPSSEPPNNVSTNSEWEAPTQ | |
| | KDKFPKPCNWRKNEFKKWTKLASQGRGIVNFERDKISNHWIQYYRRIPH | |
| | RKLLTALQLRANVYPTREFLARGRQDQYIKACRHCDADIESCAHIIGNC | |
| | PVTQDARIKRHNYICELLLEEAKKKDWVVFKEPHIRDSNKELYKPDLIF | |
| | VKDARALVVDVTVRYEAAKSSLEEAAAEKVRKYKHLETEVRHLTNAKDV | |
| | TFVGFPLGARGKWHQDNFKLLTELGLSKSRQVKMAETFSTVALFSSVDI | |
| | VHMFASRARKSMVM | |
| R2Tg with | MASCPKPGPPVSAGAMSLESGLTTHSVLAIERGPNSLANSGSDFGGGGL | 1650 |
| natural linker | GLPLRLLRVSVGTQTSRSDWVDLVSWSHPGPTSKSQQVDLVSLFPKHRV | |
| deletion c- | DLLSKNDQVDLVAQFLPSKFPPNLAENDLALLVNLEFYRSDLHVYECVH | |
| mybB | FAAHWEGLSGLPEVYEQLAPQPCVGETLHSSLPRDSELFVPEEGSSEKE | |
| location-v1 | SEDAPKTSPPTPGKHGLEQTGEEKVMVTVPDKNPPCPCCGTRVNSVLNL | |
| replaced with | IEHLKVSHGKRGVCFRCAKCGKENSNYHSVVCHFPKCRGPETEKAPAGE | |
| 3GS linker | WICEVCNRDFTTKIGLGQHKRLAHPAVRNQERIVASQPKETSNRGAHKR | |
| (SEQ ID NO: | CWTKEEEELLIRLEAQFEGNKNINKLIAEHITTKTAKQISDKRRLGGGS | |
| 1024) | CFGCLESISQIRTATRDKKDTVTREKHPKKPFQKWMKDRAIKKGNYLRF | |
| | QRLFYLDRGKLAKIILDDIECLSCDIPLSEIYSVFKTRWETTGSFKSLG | |
| | DFKTYGKADNTAFRELITAKEIEKNVQEMSKGSAPGPDGITLGDVVKMD | |
| | PEFSRTMEIFNLWLTTGKIPDMVRGCRTVLIPKSSKPDRLKDINNWRPI | |
| | TIGSILLRLFSRIVTARLSKACPLNPRQRGFIRAAGCSENLKLLQTIIW | |
| | SAKREHRPLGVVFVDIAKAFDTVSHQHIIHALQQREVDPHIVGLVSNMY | |
| | ENISTYITTKRNTHTDKIQIRVGVKQGDPMSPLLFNLAMDPLLCKLEES | |
| | GKGYHRGQSSITAMAFADDLVLLSDSWENMNTNISILETFCNLTGLKTQ | |
| | GQKCHGFYIKPTKDSYTINDCAAWTINGTPLNMIDPGESEKYLGLQFDP | |
| | WIGIARSGLSTKLDFWLQRIDQAPLKPLQKTDILKTYTIPRLIYIADHS | |
| | EVKTALLETLDQKIRTAVKEWLHLPPCTCDAILYSSTRDGGLGITKLAG | |
| | LIPSVQARRLHRIAQSSDDTMKCFMEKEKMEQLHKKLWIQAGGDRENIP | |
| | SIWEAPPSSEPPNNVSTNSEWEAPTQKDKFPKPCNWRKNEFKKWTKLAS | |
| | QGRGIVNFERDKISNHWIQYYRRIPHRKLLTALQLRANVYPTREFLARG | |
| | RQDQYIKACRHCDADIESCAHIIGNCPVTQDARIKRHNYICELLLEEAK | |
| | KKDWVVFKEPHIRDSNKELYKPDLIFVKDARALVVDVTVRYEAAKSSLE | |
| | EAAAEKVRKYKHLETEVRHLTNAKDVTFVGFPLGARGKWHQDNFKLLTE | |
| | LGLSKSRQVKMAETFSTVALFSSVDIVHMFASRARKSMVM | |
| R2Tg with | MASCPKPGPPVSAGAMSLESGLTTHSVLAIERGPNSLANSGSDFGGGGL | 1651 |
| natural linker | GLPLRLLRVSVGTQTSRSDWVDLVSWSHPGPTSKSQQVDLVSLFPKHRV | |
| deletion c- | DLLSKNDQVDLVAQFLPSKFPPNLAENDLALLVNLEFYRSDLHVYECVH | |
| mybB | FAAHWEGLSGLPEVYEQLAPQPCVGETLHSSLPRDSELFVPEEGSSEKE | |
| location-v2 | SEDAPKTSPPTPGKHGLEQTGEEKVMVTVPDKNPPCPCCGTRVNSVLNL | |
| replaced with | IEHLKVSHGKRGVCFRCAKCGKENSNYHSVVCHFPKCRGPETEKAPAGE | |
| 3GS linker | WICEVCNRDFTTKIGLGQHKRLAHPAVRNQERIVASQPKETSNRGAHKR | |
| (SEQ ID NO: | CWTKEEEELLIRLEAQFEGNKNINKLIAEHITTKTAKQISDKRRLGGGS | |
| 1024) | TATRDKKDTVTREKHPKKPFQKWMKDRAIKKGNYLRFQRLFYLDRGKLA | |
| | KIILDDIECLSCDIPLSEIYSVFKTRWETTGSFKSLGDFKTYGKADNTA | |
| | FRELITAKEIEKNVQEMSKGSAPGPDGITLGDVVKMDPEFSRTMEIFNL | |
| | WLTTGKIPDMVRGCRTVLIPKSSKPDRLKDINNWRPITIGSILLRLFSR | |
| | IVTARLSKACPLNPRQRGFIRAAGCSENLKLLQTIIWSAKREHRPLGVV | |
| | FVDIAKAFDTVSHQHIIHALQQREVDPHIVGLVSNMYENISTYITTKRN | |
| | THTDKIQIRVGVKQGDPMSPLLFNLAMDPLLCKLEESGKGYHRGQSSIT | |
| | AMAFADDLVLLSDSWENMNTNISILETFCNLTGLKTQGQKCHGFYIKPT | |
| | KDSYTINDCAAWTINGTPLNMIDPGESEKYLGLQFDPWIGIARSGLSTK | |
| | LDFWLQRIDQAPLKPLQKTDILKTYTIPRLIYIADHSEVKTALLETLDQ | |
| | KIRTAVKEWLHLPPCTCDAILYSSTRDGGLGITKLAGLIPSVQARRLHR | |
| | IAQSSDDTMKCFMEKEKMEQLHKKLWIQAGGDRENIPSIWEAPPSSEPP | |
| | NNVSTNSEWEAPTQKDKFPKPCNWRKNEFKKWTKLASQGRGIVNFERDK | |
| | ISNHWIQYYRRIPHRKLLTALQLRANVYPTREFLARGRQDQYIKACRHC | |
| | DADIESCAHIIGNCPVTQDARIKRHNYICELLLEEAKKKDWVVFKEPHI | |
| | RDSNKELYKPDLIFVKDARALVVDVTVRYEAAKSSLEEAAAEKVRKYKH | |
| | LETEVRHLTNAKDVTFVGFPLGARGKWHQDNFKLLTELGLSKSRQVKMA | |
| | ETFSTVALFSSVDIVHMFASRARKSMVM | |
| R2Tg with | MASCPKPGPPVSAGAMSLESGLTTHSVLAIERGPNSLANSGSDFGGGGL | 1652 |
| natural linker | GLPLRLLRVSVGTQTSRSDWVDLVSWSHPGPTSKSQQVDLVSLFPKHRV | |
| deletion c- | DLLSKNDQVDLVAQFLPSKFPPNLAENDLALLVNLEFYRSDLHVYECVH | |
| mybB | FAAHWEGLSGLPEVYEQLAPQPCVGETLHSSLPRDSELFVPEEGSSEKE | |
| location-v1 | SEDAPKTSPPTPGKHGLEQTGEEKVMVTVPDKNPPCPCCGTRVNSVLNL | |
| replaced with | IEHLKVSHGKRGVCFRCAKCGKENSNYHSVVCHFPKCRGPETEKAPAGE | |
| XTEN linker | WICEVCNRDFTTKIGLGQHKRLAHPAVRNQERIVASQPKETSNRGAHKR | |
| | CWTKEEEELLIRLEAQFEGNKNINKLIAEHITTKTAKQISDKRRLSGSE | |
| | TPGTSESATPESCFGCLESISQIRTATRDKKDTVTREKHPKKPFQKWMK | |
| | DRAIKKGNYLRFQRLFYLDRGKLAKIILDDIECLSCDIPLSEIYSVFKT | |
| | RWETTGSFKSLGDFKTYGKADNTAFRELITAKEIEKNVQEMSKGSAPGP | |
| | DGITLGDVVKMDPEFSRTMEIFNLWLTTGKIPDMVRGCRTVLIPKSSKP | |
| | DRLKDINNWRPITIGSILLRLFSRIVTARLSKACPLNPRQRGFIRAAGC | |
| | SENLKLLQTIIWSAKREHRPLGVVFVDIAKAFDTVSHQHIIHALQQREV | |
| | DPHIVGLVSNMYENISTYITTKRNTHTDKIQIRVGVKQGDPMSPLLFNL | |
| | AMDPLLCKLEESGKGYHRGQSSITAMAFADDLVLLSDSWENMNTNISIL | |
| | ETFCNLTGLKTQGQKCHGFYIKPTKDSYTINDCAAWTINGTPLNMIDPG | |
| | ESEKYLGLQFDPWIGIARSGLSTKLDFWLQRIDQAPLKPLQKTDILKTY | |
| | TIPRLIYIADHSEVKTALLETLDQKIRTAVKEWLHLPPCTCDAILYSST | |
| | RDGGLGITKLAGLIPSVQARRLHRIAQSSDDTMKCFMEKEKMEQLHKKL | |
| | WIQAGGDRENIPSIWEAPPSSEPPNNVSTNSEWEAPTQKDKFPKPCNWR | |
| | KNEFKKWTKLASQGRGIVNFERDKISNHWIQYYRRIPHRKLLTALQLRA | |
| | NVYPTREFLARGRQDQYIKACRHCDADIESCAHIIGNCPVTQDARIKRH | |
| | NYICELLLEEAKKKDWVVFKEPHIRDSNKELYKPDLIFVKDARALVVDV | |
| | TVRYEAAKSSLEEAAAEKVRKYKHLETEVRHLTNAKDVTFVGFPLGARG | |
| | KWHQDNFKLLTELGLSKSRQVKMAETFSTVALFSSVDIVHMFASRARKS | |
| | MVM | |
| R2Tg with | MASCPKPGPPVSAGAMSLESGLTTHSVLAIERGPNSLANSGSDFGGGGL | 1653 |
| natural linker | GLPLRLLRVSVGTQTSRSDWVDLVSWSHPGPTSKSQQVDLVSLFPKHRV | |
| deletion c- | DLLSKNDQVDLVAQFLPSKFPPNLAENDLALLVNLEFYRSDLHVYECVH | |
| mybB | FAAHWEGLSGLPEVYEQLAPQPCVGETLHSSLPRDSELFVPEEGSSEKE | |
| location-v2 | SEDAPKTSPPTPGKHGLEQTGEEKVMVTVPDKNPPCPCCGTRVNSVLNL | |
| replaced with | IEHLKVSHGKRGVCFRCAKCGKENSNYHSVVCHFPKCRGPETEKAPAGE | |
| XTEN linker | WICEVCNRDFTTKIGLGQHKRLAHPAVRNQERIVASQPKETSNRGAHKR | |
| | CWTKEEEELLIRLEAQFEGNKNINKLIAEHITTKTAKQISDKRRLSGSE | |
| | TPGTSESATPESTATRDKKDTVTREKHPKKPFQKWMKDRAIKKGNYLRF | |
| | QRLFYLDRGKLAKIILDDIECLSCDIPLSEIYSVFKTRWETTGSFKSLG | |
| | DFKTYGKADNTAFRELITAKEIEKNVQEMSKGSAPGPDGITLGDVVKMD | |
| | PEFSRTMEIFNLWLTTGKIPDMVRGCRTVLIPKSSKPDRLKDINNWRPI | |
| | TIGSILLRLFSRIVTARLSKACPLNPRQRGFIRAAGCSENLKLLQTIIW | |
| | SAKREHRPLGVVFVDIAKAFDTVSHQHIIHALQQREVDPHIVGLVSNMY | |
| | ENISTYITTKRNTHTDKIQIRVGVKQGDPMSPLLFNLAMDPLLCKLEES | |
| | GKGYHRGQSSITAMAFADDLVLLSDSWENMNTNISILETFCNLTGLKTQ | |
| | GQKCHGFYIKPTKDSYTINDCAAWTINGTPLNMIDPGESEKYLGLQFDP | |
| | WIGIARSGLSTKLDFWLQRIDQAPLKPLQKTDILKTYTIPRLIYIADHS | |
| | EVKTALLETLDQKIRTAVKEWLHLPPCTCDAILYSSTRDGGLGITKLAG | |
| | LIPSVQARRLHRIAQSSDDTMKCFMEKEKMEQLHKKLWIQAGGDRENIP | |
| | SIWEAPPSSEPPNNVSTNSEWEAPTQKDKFPKPCNWRKNEFKKWTKLAS | |
| | QGRGIVNFERDKISNHWIQYYRRIPHRKLLTALQLRANVYPTREFLARG | |
| | RQDQYIKACRHCDADIESCAHIIGNCPVTQDARIKRHNYICELLLEEAK | |
| | KKDWVVFKEPHIRDSNKELYKPDLIFVKDARALVVDVTVRYEAAKSSLE | |
| | EAAAEKVRKYKHLETEVRHLTNAKDVTFVGFPLGARGKWHQDNFKLLTE | |
| | LGLSKSRQVKMAETFSTVALFSSVDIVHMFASRARKSMVM | |

[1150] HEK293T cells were plated in 96-well plates and grown overnight at 37° C., 500 CO2. The HEK293T cells were transfected with plasmids that expressed R2Tg (wild-type), R2 endonuclease mutant, and natural linker mutants. The transfection was carried out using the Fugene HD transfection reagent according to the manufacturer recommendations, where each well received 80 ng of plasmid DNA and 0.5 μL of transfection reagent. All transfections were performed in duplicate and the cells were incubated for 72 h prior to genomic DNA extraction.

[1151] Activity of the mutants was measured by a ddPCR assay that quantified the copy number of R2Tg integrations by measuring the number of 3′ junction amplicons (FIG. 8b).

[1152] Deletions that begin after the random coil following the c-myb DNA binding motif (location A, c-mybA) are well-tolerated with integration activity near that of wild-type R2Tg. The natural linker region deletion end point is nearly the same for either location v1 (N-terminal to the alpha helix preceding the −1 RNA binding motif) or v2 (C-terminal to the alpha helix preceding the −1 RNA binding motif). For the deletion beginning at location A and ending at location v1 or v2, replacement of this polypeptide stretch with the XTEN linker (SEQ ID NO: 1023) seems to retain the most amount of activity whereas replacement with the 3GS linker (SEQ ID NO: 1024) has approximately a 50% reduction in integration activity. For natural linker deletions that begin at location B (c-mybB), these configurations show a more marked reduction in integration activity when compared to wild-type or location A (c-mybA). The difference in activity may be related to the structure of the protein based on the position of the deletion that creates a non-optimal three dimensional structure of the retrotransposase through the location of the linker, length of the linker, or amino acid combination of the linker that is not optimal to connect location B to locations v1 or v2. Even though the N-terminal natural linker deletion start location mybB is a sub-optimal, the C-terminal end of the deletion was most tolerated at v2 with either the 3GS (SEQ ID NO: 1024) or XTEN linker and appears to be the preferential location for having a polypeptide preceding the RBD −1 region.

### Example 8: Determination of Target Specificity of a Gene Writer Endonuclease Domain

[1153] This example describes using a custom genomic landing pad in human cells to determine whether there is a sequence requirement for target cleavage and subsequent integration by a Gene Writer system.

[1154] In this example, cell lines were created to have “landing pads” or stable integrations that mimic a region of rDNA that contain the R2 position to which R2 retrotransposases target for retrotransposition (see FIG. 9). The integrants or landing pads were designed to either have the wild-type region sequence in and around the R2 site found in rDNA, 12-bp of sequence mutation at and around the R2 cleavage site, or 75-bp of sequence mutation at and around the R2 cleavage site (Table E2). The DNA for these different landing pads was chemically synthesized and cloned into the pLenti-N-tGFP vector. The cloned landing pads into the lentiviral expression vector were confirmed and sequence verified by Sanger sequencing of the landing pad. The sequence verified plasmids (9 μg) along with the lentiviral packaging mix (9 μg, obtained from Biosettia) were transfected using Lipofectamine2000™ according the manufacturer instructions into a packaging cell line, LentiX-293T (Takara Bio). The transfected cells were incubated at 37° C., 10% CO₂ for 48 hours (including one medium change at 24 hrs) and the viral particle containing medium was collected from the cell culture dish. The collected medium was filtered through a 0.2 μm filter to remove cell debris and prepared for transduction of U2OS cells. The viral containing medium was diluted in DMEM and mixed with polybrene to prepare a dilution series for transduction of U2OS cells where the final concentration of polybrene was 8 μg/ml. The U2OS cells were grown in viral containing medium for 48 hour and then split with fresh medium. The split cells were grown to confluence and transduction efficiency of the different dilutions of virus were measured by GFP expression via flow cytometry and ddPCR detection of the genomic integrated lentivirus that contained GFP and the different rDNA landing pads (WT, 12-bp mutation, or 75-bp mutation). The GFP positive cell line from the 1:10 viral medium dilution (>99% GFP+) was chosen for subsequent experiments and cryopreserved.

[1155] To test if mutations in and around the R2 cleavage position can impact the Gene Writer system activity, the R2Tg Gene Writer Driver along with a plasmid that expressed a Gene Writer transgene molecule were electroporated into the different landing pad cell lines. In order to test if the sequence in and around the cleavage site impacted the Gene Writer polypeptide sequence activity to integrate, the homology arms for the Gene Writer template molecule were designed to have 100% homology 100 bp to the left (Gene Writer molecule module A) and 100 bp to the right (Gene Writer molecule module F) of the cleavage position for each of the landing pads. The changes to the homology arms of the Gene Writer template molecule expression plasmid were introduced by PCR and were confirmed by Sanger Sequencing. Either 73 ng of the WT R2Tg Gene Writer Driver or the Endonuclease domain mutant R2Tg Gene Writer Driver expression plasmids were co-nucleofected) using nucleofection program DN100 into each of the different U2OS landing pad cell lines (WT, 12-bp mutant, or 75-bp mutant) with 177 ng of plasmids that expressed the Gene Writer template molecules that had 100% homology to either the WT landing pad, 12-bp mutant landing pad, or 75-bp mutant landing pad. After nucleofection, cells were grown at 37° C., 10% CO₂ for 3 days prior to cell lysis and genomic DNA extraction. The extracted gDNA was measured for Gene Writer template molecule integration at the landing pad site by ddPCR. The DNA nicking activity was measured by detection of insertions, deletions, and/or a combination of both insertions and deletions at the landing pad through next-generation sequence analysis of an amplicon that was generated from the landing pad found in the gDNA.

[1156] The integration activity of the R2Tg Gene Writer is greatly reduced when the cleavage region is mutated where there is no integration of a Gene Writer template molecule in either of the 12-bp or 75-bp landing pad cell lines (FIG. 10a). Furthermore, integration is not detected with Gene Writer template molecules that have homology arms that correspond to either the 12-bp or 75-bp mutant landing pads. To rule out that the lost integration activity is due to incompatible homology arms, DNA nicking activity was measured by NGS analysis of the landing pad. The nicking activity is independent of the Gene Writer template molecule as the WT R2Tg Gene Writer driver had comparable indels at the WT landing pad with the WT, 12-bp mutant, or 75-bp mutant Gene Writer template molecule (FIG. 10b). The 12-bp and 75-bp landing pads, regardless of Gene Writer template molecule co-nucleofected with the WT R2Tg Gene Writer did not show any reads above background that contained indels. The level of indels was similar to the Gene Writer template driver containing endonuclease mutations.

TABLE E2
Exemplary Landing Pads

| Landing | |
|---|---|
| Pad | Sequence 5′-> 3′ |
| Sequence | (rDNA, underline; cleavage region, bold; |
| Name | mutated sequence, bold-italic |
| WT | GCTCACACAGGAAACAGCTATGACCATGATTACGCCAAGCTGTTGACG |
| | CGATGTGATTTCTGCCCAGTGCTCTGAATGTCAAAGTGAAGAAATTCA |
| | ATGAAGCGCGGGTAAACGGCGGGAGTAACTATGACTCTCTTAAGGTAG |
| | CCAAATGCCTCGTCATCTAATTAGTGACGCGCATGAATGGATGAACGA |
| | GATTCCCACTGTCCCTACCTACTATCCAGCGAAACCACAGCCAAGGGA |
| | AATTCACTGGCCGTCGTTTTACAACGTCGTGACTGGGAAAACCCTGGC |
| | GTTACCCAACTTAATCGCCTTGCAGCACATCC (SEQ ID NO: |
| | 1654) |
| 12-bp | GCTCACACAGGAAACAGCTATGACCATGATTACGCCAAGCTGTTGACG |
| Mutant | CGATGTGATTTCTGCCCAGTGCTCTGAATGTCAAAGTGAAGAAATTCA |
| | ATGAAGCGCGGGTAAACGGCGGGAGTAACTATGACTCTCTT [symbol] |
| | [symbol] TGCCTCGTCATCTAATTAGTGACGCGCATGAATGGATGAACGA |
| | GATTCCCACTGTCCCTACCTACTATCCAGCGAAACCACAGCCAAGGGA |
| | AATTCACTGGCCGTCGTTTTACAACGTCGTGACTGGGAAAACCCTGGC |
| | GTTACCCAACTTAATCGCCTTGCAGCACATCC (SEQ ID NO: |
| | 1655) |
| 75-bp | gctcacacaggaaacagctatgaccatgattacgccaagctgttgacg |
| Mutant | cgatgtgatttctgcccagtgctctgaatgtcaaagtgaagaaattca |
| | atgaagcgcgggtaaacggcgggagtaactatgactctcttt [symbol] |
| | [symbol] [symbol] [symbol] |
| | [symbol] actatccagcgaaaccacagccaaggga |
| | aattcactggccgtcgttttacaacgtcgtgactgggaaaaccctggc |
| | gttacccaacttaatcgccttgcagcacatcc (SEQ ID NO: |
| | 1656) |

[1157] In some embodiments, a Gene Writer is derived from a retrotransposase with some level of target sequence specificity in the endonuclease domain. Thus, it may be desirable to retarget the Gene Writer to a location in the genome that possesses homology to the natural target sequence recognized by an endonuclease domain, referred to as the endonuclease recognition motif (ERM). In some embodiments, this sub-target sequence may be contained in the region surrounding the nick site. In specific embodiments, a 13 nt sequence (TAAGGTAGCCAAA (SEQ ID NO: 1657)) based on the nick site of an R2 element, e.g., R2Tg, is used to search the human genome for suitable locations for retargeting the Gene Writer, wherein a heterologous DNA-binding domain is designed to localize the Gene Writer to an endogenous ERM to direct endonuclease activity and subsequent retrotransposition of a template RNA. In some embodiments, the human genome site possesses 100% identity to at least 1, 2, 3, 4, 5, 6, 7, 8, 9, 10, 11, 12, or 13 nucleotides in the 13 nt motif. In further embodiments, the human genome site containing the ERM is selected from Table E3, and a DNA-binding domain fusion, e.g., ZF, TAL, or dCas9 with a custom gRNA, is designed to localize the polypeptide to the site (e.g., see Example 9). In preferred embodiments, the genome site possesses a safe harbor score of at least 5, 6, 7, 8 as defined in Pellenz et al Hum Gene Ther 30, 814-282 (2019) and shown in Table E3. In some embodiments, the template RNA (or DNA encoding the template RNA) is designed such that the homology arms match the flanking genomic sequences surrounding the expected nick site at the new target.

Table E3: Human genome sites matching a 13nt stretch around the nicking site of R2 elements.

[1158] The human genome was searched for 100% identity to the full 13 nt match or 12 consecutive nucleiotides (“Match”). Chromosomal location and start and end coordinates are provided for each match. Score (“Score”) is a metric evaluating each site for eight desirable safe harbor characteristics.

| Chromosome | Start | End | Source | Match | Score |
|---|---|---|---|---|---|
| chr06 | 123749082 | 123749094 | NC_000006.12 | 13 | 8 |
| chr02 | 5035294 | 5035305 | NC_000002.12 | 12 | 8 |
| chr02 | 145760352 | 145760341 | NC_000002.12 | 12 | 8 |
| chr02 | 147034635 | 147034624 | NC_000002.12 | 12 | 8 |
| chr02 | 181792104 | 181792115 | NC_000002.12 | 12 | 8 |
| chr03 | 34017171 | 34017182 | NC_000003.12 | 12 | 8 |
| chr03 | 74784684 | 74784695 | NC_000003.12 | 12 | 8 |
| chr03 | 110093351 | 110093362 | NC_000003.12 | 12 | 8 |
| chr06 | 14459104 | 14459093 | NC_000006.12 | 12 | 8 |
| chr06 | 119620936 | 119620947 | NC_000006.12 | 12 | 8 |
| chr06 | 145123473 | 145123462 | NC_000006.12 | 12 | 8 |
| chr07 | 12024654 | 12024665 | NC_000007.14 | 12 | 8 |
| chr07 | 52001436 | 52001447 | NC_000007.14 | 12 | 8 |
| chr07 | 115339421 | 115339410 | NC_000007.14 | 12 | 8 |
| chr08 | 126384299 | 126384310 | NC_000008.11 | 12 | 8 |
| chr12 | 84083562 | 84083573 | NC_000012.12 | 12 | 8 |
| chrX | 117646432 | 117646421 | NC_000023.11 | 12 | 8 |
| chr02 | 106547509 | 106547521 | NC_000002.12 | 13 | 7 |
| chr02 | 226038592 | 226038604 | NC_000002.12 | 13 | 7 |
| chr03 | 102522532 | 102522520 | NC_000003.12 | 13 | 7 |
| chr03 | 110933592 | 110933604 | NC_000003.12 | 13 | 7 |
| chr03 | 119752575 | 119752563 | NC_000003.12 | 13 | 7 |
| chr03 | 172868603 | 172868615 | NC_000003.12 | 13 | 7 |
| chr03 | 191985222 | 191985210 | NC_000003.12 | 13 | 7 |
| chr05 | 6213503 | 6213515 | NC_000005.10 | 13 | 7 |
| chr05 | 58295578 | 58295566 | NC_000005.10 | 13 | 7 |
| chr05 | 129844500 | 129844512 | NC_000005.10 | 13 | 7 |
| chr06 | 1454372 | 1454360 | NC_000006.12 | 13 | 7 |
| chr06 | 48973921 | 48973909 | NC_000006.12 | 13 | 7 |
| chr08 | 18663054 | 18663066 | NC_000008.11 | 13 | 7 |
| chr08 | 93499020 | 93499032 | NC_000008.11 | 13 | 7 |
| chr08 | 119753973 | 119753985 | NC_000008.11 | 13 | 7 |
| chr09 | 86856907 | 86856919 | NC_000009.12 | 13 | 7 |
| chr12 | 29955571 | 29955583 | NC_000012.12 | 13 | 7 |
| chr12 | 118529104 | 118529092 | NC_000012.12 | 13 | 7 |
| chr13 | 65656029 | 65656041 | NC_000013.11 | 13 | 7 |
| chr22 | 34266611 | 34266623 | NC_000022.11 | 13 | 7 |
| chrX | 26651640 | 26651628 | NC_000023.11 | 13 | 7 |
| chrX | 119194351 | 119194363 | NC_000023.11 | 13 | 7 |
| chrX | 139180620 | 139180608 | NC_000023.11 | 13 | 7 |
| chr01 | 106465846 | 106465857 | NC_000001.11 | 12 | 7 |
| chr02 | 964160 | 964171 | NC_000002.12 | 12 | 7 |
| chr02 | 40018947 | 40018936 | NC_000002.12 | 12 | 7 |
| chr02 | 62845403 | 62845392 | NC_000002.12 | 12 | 7 |
| chr02 | 64834920 | 64834909 | NC_000002.12 | 12 | 7 |
| chr02 | 67969608 | 67969619 | NC_000002.12 | 12 | 7 |
| chr02 | 76183118 | 76183129 | NC_000002.12 | 12 | 7 |
| chr02 | 81819286 | 81819297 | NC_000002.12 | 12 | 7 |
| chr02 | 119597238 | 119597249 | NC_000002.12 | 12 | 7 |
| chr02 | 122897376 | 122897365 | NC_000002.12 | 12 | 7 |
| chr02 | 123603423 | 123603412 | NC_000002.12 | 12 | 7 |
| chr02 | 144644206 | 144644217 | NC_000002.12 | 12 | 7 |
| chr02 | 145221757 | 145221746 | NC_000002.12 | 12 | 7 |
| chr02 | 158367531 | 158367520 | NC_000002.12 | 12 | 7 |
| chr02 | 160092083 | 160092072 | NC_000002.12 | 12 | 7 |
| chr02 | 192245037 | 192245048 | NC_000002.12 | 12 | 7 |
| chr02 | 195223552 | 195223563 | NC_000002.12 | 12 | 7 |
| chr02 | 200351999 | 200351988 | NC_000002.12 | 12 | 7 |
| chr02 | 237068525 | 237068514 | NC_000002.12 | 12 | 7 |
| chr03 | 18724351 | 18724340 | NC_000003.12 | 12 | 7 |
| chr03 | 23969399 | 23969388 | NC_000003.12 | 12 | 7 |
| chr03 | 25177339 | 25177350 | NC_000003.12 | 12 | 7 |
| chr03 | 34880863 | 34880852 | NC_000003.12 | 12 | 7 |
| chr03 | 66233879 | 66233890 | NC_000003.12 | 12 | 7 |
| chr03 | 74527939 | 74527950 | NC_000003.12 | 12 | 7 |
| chr03 | 98583025 | 98583014 | NC_000003.12 | 12 | 7 |
| chr03 | 99278452 | 99278463 | NC_000003.12 | 12 | 7 |
| chr03 | 116060228 | 116060239 | NC_000003.12 | 12 | 7 |
| chr03 | 139468578 | 139468589 | NC_000003.12 | 12 | 7 |
| chr03 | 140064054 | 140064043 | NC_000003.12 | 12 | 7 |
| chr03 | 140438138 | 140438127 | NC_000003.12 | 12 | 7 |
| chr03 | 152457330 | 152457341 | NC_000003.12 | 12 | 7 |
| chr03 | 160950736 | 160950725 | NC_000003.12 | 12 | 7 |
| chr03 | 167207758 | 167207769 | NC_000003.12 | 12 | 7 |
| chr03 | 167722472 | 167722483 | NC_000003.12 | 12 | 7 |
| chr03 | 180475661 | 180475672 | NC_000003.12 | 12 | 7 |
| chr04 | 121590786 | 121590775 | NC_000004.12 | 12 | 7 |
| chr04 | 133719599 | 133719588 | NC_000004.12 | 12 | 7 |
| chr05 | 11564132 | 11564121 | NC_000005.10 | 12 | 7 |
| chr05 | 11970221 | 11970210 | NC_000005.10 | 12 | 7 |
| chr05 | 32814431 | 32814420 | NC_000005.10 | 12 | 7 |
| chr05 | 38003029 | 38003018 | NC_000005.10 | 12 | 7 |
| chr05 | 39758118 | 39758129 | NC_000005.10 | 12 | 7 |
| chr05 | 41221615 | 41221604 | NC_000005.10 | 12 | 7 |
| chr05 | 74838717 | 74838728 | NC_000005.10 | 12 | 7 |
| chr05 | 86444529 | 86444518 | NC_000005.10 | 12 | 7 |
| chr05 | 86617117 | 86617106 | NC_000005.10 | 12 | 7 |
| chr05 | 89438360 | 89438349 | NC_000005.10 | 12 | 7 |
| chr05 | 108102395 | 108102406 | NC_000005.10 | 12 | 7 |
| chr05 | 110231750 | 110231761 | NC_000005.10 | 12 | 7 |
| chr05 | 113996496 | 113996485 | NC_000005.10 | 12 | 7 |
| chr05 | 117233050 | 117233039 | NC_000005.10 | 12 | 7 |
| chr05 | 121622921 | 121622932 | NC_000005.10 | 12 | 7 |
| chr05 | 122520704 | 122520693 | NC_000005.10 | 12 | 7 |
| chr05 | 142330490 | 142330479 | NC_000005.10 | 12 | 7 |
| chr05 | 156359105 | 156359094 | NC_000005.10 | 12 | 7 |
| chr06 | 19187842 | 19187831 | NC_000006.12 | 12 | 7 |
| chr06 | 41103469 | 41103458 | NC_000006.12 | 12 | 7 |
| chr06 | 49856872 | 49856883 | NC_000006.12 | 12 | 7 |
| chr06 | 54896309 | 54896298 | NC_000006.12 | 12 | 7 |
| chr06 | 64416107 | 64416096 | NC_000006.12 | 12 | 7 |
| chr06 | 104438997 | 104439008 | NC_000006.12 | 12 | 7 |
| chr06 | 109349688 | 109349677 | NC_000006.12 | 12 | 7 |
| chr06 | 110631149 | 110631160 | NC_000006.12 | 12 | 7 |
| chr06 | 114751383 | 114751372 | NC_000006.12 | 12 | 7 |
| chr06 | 116514339 | 116514350 | NC_000006.12 | 12 | 7 |
| chr06 | 121606126 | 121606137 | NC_000006.12 | 12 | 7 |
| chr06 | 126139788 | 126139777 | NC_000006.12 | 12 | 7 |
| chr06 | 130852449 | 130852460 | NC_000006.12 | 12 | 7 |
| chr06 | 136843057 | 136843068 | NC_000006.12 | 12 | 7 |
| chr06 | 155559692 | 155559681 | NC_000006.12 | 12 | 7 |
| chr06 | 158099232 | 158099221 | NC_000006.12 | 12 | 7 |
| chr07 | 24339208 | 24339219 | NC_000007.14 | 12 | 7 |
| chr07 | 39519736 | 39519725 | NC_000007.14 | 12 | 7 |
| chr07 | 72228733 | 72228722 | NC_000007.14 | 12 | 7 |
| chr07 | 82955239 | 82955228 | NC_000007.14 | 12 | 7 |
| chr07 | 104990180 | 104990191 | NC_000007.14 | 12 | 7 |
| chr07 | 107698186 | 107698197 | NC_000007.14 | 12 | 7 |
| chr07 | 111002449 | 111002438 | NC_000007.14 | 12 | 7 |
| chr07 | 115191852 | 115191841 | NC_000007.14 | 12 | 7 |
| chr07 | 115572755 | 115572766 | NC_000007.14 | 12 | 7 |
| chr08 | 21126162 | 21126151 | NC_000008.11 | 12 | 7 |
| chr08 | 25928055 | 25928066 | NC_000008.11 | 12 | 7 |
| chr08 | 45036535 | 45036524 | NC_000008.11 | 12 | 7 |
| chr08 | 45248484 | 45248473 | NC_000008.11 | 12 | 7 |
| chr08 | 45502096 | 45502085 | NC_000008.11 | 12 | 7 |
| chr08 | 45763984 | 45763973 | NC_000008.11 | 12 | 7 |
| chr08 | 53335054 | 53335043 | NC_000008.11 | 12 | 7 |
| chr08 | 55581238 | 55581227 | NC_000008.11 | 12 | 7 |
| chr08 | 63169546 | 63169557 | NC_000008.11 | 12 | 7 |
| chr08 | 66553887 | 66553898 | NC_000008.11 | 12 | 7 |
| chr08 | 86283378 | 86283367 | NC_000008.11 | 12 | 7 |
| chr08 | 113060704 | 113060715 | NC_000008.11 | 12 | 7 |
| chr08 | 114537195 | 114537206 | NC_000008.11 | 12 | 7 |
| chr08 | 114886082 | 114886071 | NC_000008.11 | 12 | 7 |
| chr08 | 127206415 | 127206426 | NC_000008.11 | 12 | 7 |
| chr08 | 133590421 | 133590410 | NC_000008.11 | 12 | 7 |
| chr08 | 135425161 | 135425150 | NC_000008.11 | 12 | 7 |
| chr10 | 7034863 | 7034852 | NC_000010.11 | 12 | 7 |
| chr10 | 124304797 | 124304786 | NC_000010.11 | 12 | 7 |
| chr10 | 131502495 | 131502506 | NC_000010.11 | 12 | 7 |
| chr11 | 5557203 | 5557192 | NC_000011.10 | 12 | 7 |
| chr11 | 31242576 | 31242565 | NC_000011.10 | 12 | 7 |
| chr11 | 31419537 | 31419526 | NC_000011.10 | 12 | 7 |
| chr11 | 33169689 | 33169678 | NC_000011.10 | 12 | 7 |
| chr11 | 55948947 | 55948958 | NC_000011.10 | 12 | 7 |
| chr11 | 85654901 | 85654890 | NC_000011.10 | 12 | 7 |
| chr11 | 92588724 | 92588735 | NC_000011.10 | 12 | 7 |
| chr11 | 105227927 | 105227938 | NC_000011.10 | 12 | 7 |
| chr11 | 106302916 | 106302927 | NC_000011.10 | 12 | 7 |
| chr11 | 110594096 | 110594085 | NC_000011.10 | 12 | 7 |
| chr11 | 125228337 | 125228326 | NC_000011.10 | 12 | 7 |
| chr12 | 8769205 | 8769194 | NC_000012.12 | 12 | 7 |
| chr12 | 30438984 | 30438973 | NC_000012.12 | 12 | 7 |
| chr12 | 33556205 | 33556216 | NC_000012.12 | 12 | 7 |
| chr12 | 39419629 | 39419640 | NC_000012.12 | 12 | 7 |
| chr12 | 88509246 | 88509257 | NC_000012.12 | 12 | 7 |
| chr12 | 92878719 | 92878708 | NC_000012.12 | 12 | 7 |
| chr12 | 107034133 | 107034144 | NC_000012.12 | 12 | 7 |
| chr12 | 109455187 | 109455176 | NC_000012.12 | 12 | 7 |
| chr13 | 88827671 | 88827660 | NC_000013.11 | 12 | 7 |
| chr14 | 48126959 | 48126948 | NC_000014.9 | 12 | 7 |
| chr20 | 851155 | 851166 | NC_000020.11 | 12 | 7 |
| chr22 | 17367227 | 17367238 | NC_000022.11 | 12 | 7 |
| chrX | 20420571 | 20420582 | NC_000023.11 | 12 | 7 |
| chrX | 22545830 | 22545819 | NC_000023.11 | 12 | 7 |
| chrX | 28899719 | 28899708 | NC_000023.11 | 12 | 7 |
| chrX | 33013952 | 33013963 | NC_000023.11 | 12 | 7 |
| chrX | 103880419 | 103880408 | NC_000023.11 | 12 | 7 |
| chrX | 105612448 | 105612459 | NC_000023.11 | 12 | 7 |
| chrX | 107929443 | 107929454 | NC_000023.11 | 12 | 7 |
| chrX | 112571297 | 112571286 | NC_000023.11 | 12 | 7 |
| chrX | 127584278 | 127584267 | NC_000023.11 | 12 | 7 |
| chrX | 130836800 | 130836811 | NC_000023.11 | 12 | 7 |
| chrX | 140554200 | 140554211 | NC_000023.11 | 12 | 7 |
| chrX | 146697583 | 146697572 | NC_000023.11 | 12 | 7 |
| chr01 | 97461481 | 97461469 | NC_000001.11 | 13 | 6 |
| chr01 | 104600535 | 104600547 | NC_000001.11 | 13 | 6 |
| chr02 | 12589473 | 12589461 | NC_000002.12 | 13 | 6 |
| chr02 | 187173643 | 187173631 | NC_000002.12 | 13 | 6 |
| chr03 | 29181713 | 29181701 | NC_000003.12 | 13 | 6 |
| chr04 | 32171549 | 32171537 | NC_000004.12 | 13 | 6 |
| chr04 | 116646904 | 116646916 | NC_000004.12 | 13 | 6 |
| chr04 | 164205821 | 164205833 | NC_000004.12 | 13 | 6 |
| chr04 | 170244792 | 170244780 | NC_000004.12 | 13 | 6 |
| chr05 | 15818439 | 15818451 | NC_000005.10 | 13 | 6 |
| chr05 | 174059501 | 174059489 | NC_000005.10 | 13 | 6 |
| chr06 | 94936128 | 94936140 | NC_000006.12 | 13 | 6 |
| chr06 | 98142018 | 98142006 | NC_000006.12 | 13 | 6 |
| chr06 | 151814731 | 151814719 | NC_000006.12 | 13 | 6 |
| chr07 | 14490189 | 14490201 | NC_000007.14 | 13 | 6 |
| chr07 | 53075165 | 53075153 | NC_000007.14 | 13 | 6 |
| chr07 | 87815318 | 87815306 | NC_000007.14 | 13 | 6 |
| chr07 | 103485572 | 103485584 | NC_000007.14 | 13 | 6 |
| chr08 | 35951572 | 35951560 | NC_000008.11 | 13 | 6 |
| chr08 | 39327231 | 39327219 | NC_000008.11 | 13 | 6 |
| chr08 | 69690270 | 69690258 | NC_000008.11 | 13 | 6 |
| chr08 | 117816166 | 117816154 | NC_000008.11 | 13 | 6 |
| chr08 | 123134654 | 123134666 | NC_000008.11 | 13 | 6 |
| chr09 | 68817454 | 68817466 | NC_000009.12 | 13 | 6 |
| chr09 | 68894040 | 68894028 | NC_000009.12 | 13 | 6 |
| chr09 | 80470190 | 80470178 | NC_000009.12 | 13 | 6 |
| chr10 | 1642234 | 1642222 | NC_000010.11 | 13 | 6 |
| chr10 | 73077072 | 73077060 | NC_000010.11 | 13 | 6 |
| chr10 | 110134589 | 110134601 | NC_000010.11 | 13 | 6 |
| chr11 | 9150979 | 9150991 | NC_000011.10 | 13 | 6 |
| chr11 | 9153635 | 9153623 | NC_000011.10 | 13 | 6 |
| chr11 | 13413693 | 13413705 | NC_000011.10 | 13 | 6 |
| chr11 | 41773900 | 41773912 | NC_000011.10 | 13 | 6 |
| chr11 | 77886545 | 77886557 | NC_000011.10 | 13 | 6 |
| chr11 | 79988166 | 79988154 | NC_000011.10 | 13 | 6 |
| chr11 | 108008162 | 108008150 | NC_000011.10 | 13 | 6 |
| chr12 | 30847723 | 30847735 | NC_000012.12 | 13 | 6 |
| chr12 | 86693014 | 86693026 | NC_000012.12 | 13 | 6 |
| chr12 | 122128926 | 122128914 | NC_000012.12 | 13 | 6 |
| chr13 | 29622714 | 29622726 | NC_000013.11 | 13 | 6 |
| chr14 | 39336522 | 39336510 | NC_000014.9 | 13 | 6 |
| chr15 | 94819443 | 94819431 | NC_000015.10 | 13 | 6 |
| chr17 | 10951262 | 10951250 | NC_000017.11 | 13 | 6 |
| chr19 | 30854506 | 30854518 | NC_000019.10 | 13 | 6 |
| chr20 | 42688485 | 42688473 | NC_000020.11 | 13 | 6 |
| chrX | 38138789 | 38138801 | NC_000023.11 | 13 | 6 |
| chrX | 86361231 | 86361243 | NC_000023.11 | 13 | 6 |
| chrX | 107051786 | 107051798 | NC_000023.11 | 13 | 6 |
| chrX | 109054235 | 109054247 | NC_000023.11 | 13 | 6 |
| chr01 | 32830533 | 32830522 | NC_000001.11 | 12 | 6 |
| chr01 | 56714138 | 56714127 | NC_000001.11 | 12 | 6 |
| chr01 | 79950536 | 79950547 | NC_000001.11 | 12 | 6 |
| chr01 | 81600862 | 81600851 | NC_000001.11 | 12 | 6 |
| chr01 | 88351333 | 88351344 | NC_000001.11 | 12 | 6 |
| chr01 | 100720346 | 100720335 | NC_000001.11 | 12 | 6 |
| chr01 | 103153587 | 103153598 | NC_000001.11 | 12 | 6 |
| chr01 | 163679268 | 163679279 | NC_000001.11 | 12 | 6 |
| chr01 | 178138239 | 178138228 | NC_000001.11 | 12 | 6 |
| chr01 | 202443386 | 202443375 | NC_000001.11 | 12 | 6 |
| chr01 | 214381798 | 214381787 | NC_000001.11 | 12 | 6 |
| chr01 | 239483920 | 239483909 | NC_000001.11 | 12 | 6 |
| chr02 | 5995932 | 5995921 | NC_000002.12 | 12 | 6 |
| chr02 | 14869774 | 14869785 | NC_000002.12 | 12 | 6 |
| chr02 | 37466261 | 37466250 | NC_000002.12 | 12 | 6 |
| chr02 | 38845623 | 38845634 | NC_000002.12 | 12 | 6 |
| chr02 | 38849877 | 38849866 | NC_000002.12 | 12 | 6 |
| chr02 | 52660534 | 52660523 | NC_000002.12 | 12 | 6 |
| chr02 | 55372861 | 55372872 | NC_000002.12 | 12 | 6 |
| chr02 | 62005199 | 62005210 | NC_000002.12 | 12 | 6 |
| chr02 | 70287567 | 70287556 | NC_000002.12 | 12 | 6 |
| chr02 | 79359701 | 79359712 | NC_000002.12 | 12 | 6 |
| chr02 | 84655638 | 84655627 | NC_000002.12 | 12 | 6 |
| chr02 | 126324776 | 126324787 | NC_000002.12 | 12 | 6 |
| chr02 | 149537132 | 149537143 | NC_000002.12 | 12 | 6 |
| chr02 | 169529510 | 169529521 | NC_000002.12 | 12 | 6 |
| chr02 | 175817135 | 175817124 | NC_000002.12 | 12 | 6 |
| chr02 | 180079693 | 180079682 | NC_000002.12 | 12 | 6 |
| chr02 | 206324011 | 206324000 | NC_000002.12 | 12 | 6 |
| chr02 | 206814054 | 206814043 | NC_000002.12 | 12 | 6 |
| chr02 | 224807794 | 224807805 | NC_000002.12 | 12 | 6 |
| chr02 | 229238864 | 229238853 | NC_000002.12 | 12 | 6 |
| chr02 | 236280053 | 236280064 | NC_000002.12 | 12 | 6 |
| chr03 | 154343 | 154354 | NC_000003.12 | 12 | 6 |
| chr03 | 8511973 | 8511984 | NC_000003.12 | 12 | 6 |
| chr03 | 16880365 | 16880376 | NC_000003.12 | 12 | 6 |
| chr03 | 18087857 | 18087846 | NC_000003.12 | 12 | 6 |
| chr03 | 47168148 | 47168137 | NC_000003.12 | 12 | 6 |
| chr03 | 47937628 | 47937617 | NC_000003.12 | 12 | 6 |
| chr03 | 48992978 | 48992989 | NC_000003.12 | 12 | 6 |
| chr03 | 82163078 | 82163067 | NC_000003.12 | 12 | 6 |
| chr03 | 103449909 | 103449898 | NC_000003.12 | 12 | 6 |
| chr03 | 120049593 | 120049604 | NC_000003.12 | 12 | 6 |
| chr03 | 143783076 | 143783065 | NC_000003.12 | 12 | 6 |
| chr03 | 149601763 | 149601752 | NC_000003.12 | 12 | 6 |
| chr03 | 167891194 | 167891183 | NC_000003.12 | 12 | 6 |
| chr03 | 181054638 | 181054627 | NC_000003.12 | 12 | 6 |
| chr03 | 191545181 | 191545170 | NC_000003.12 | 12 | 6 |
| chr03 | 197899144 | 197899155 | NC_000003.12 | 12 | 6 |
| chr04 | 668375 | 668364 | NC_000004.12 | 12 | 6 |
| chr04 | 19382020 | 19382031 | NC_000004.12 | 12 | 6 |
| chr04 | 19484541 | 19484552 | NC_000004.12 | 12 | 6 |
| chr04 | 26997338 | 26997349 | NC_000004.12 | 12 | 6 |
| chr04 | 55658608 | 55658619 | NC_000004.12 | 12 | 6 |
| chr04 | 70437852 | 70437841 | NC_000004.12 | 12 | 6 |
| chr04 | 79981798 | 79981809 | NC_000004.12 | 12 | 6 |
| chr04 | 94968197 | 94968208 | NC_000004.12 | 12 | 6 |
| chr04 | 102674459 | 102674470 | NC_000004.12 | 12 | 6 |
| chr04 | 124485434 | 124485445 | NC_000004.12 | 12 | 6 |
| chr04 | 126123159 | 126123148 | NC_000004.12 | 12 | 6 |
| chr04 | 137124764 | 137124753 | NC_000004.12 | 12 | 6 |
| chr04 | 160702860 | 160702849 | NC_000004.12 | 12 | 6 |
| chr04 | 167052375 | 167052386 | NC_000004.12 | 12 | 6 |
| chr04 | 179139043 | 179139032 | NC_000004.12 | 12 | 6 |
| chr04 | 179161408 | 179161397 | NC_000004.12 | 12 | 6 |
| chr04 | 187143772 | 187143761 | NC_000004.12 | 12 | 6 |
| chr05 | 10200709 | 10200720 | NC_000005.10 | 12 | 6 |
| chr05 | 33225853 | 33225842 | NC_000005.10 | 12 | 6 |
| chr05 | 76255175 | 76255186 | NC_000005.10 | 12 | 6 |
| chr05 | 82855245 | 82855256 | NC_000005.10 | 12 | 6 |
| chr05 | 84139572 | 84139561 | NC_000005.10 | 12 | 6 |
| chr05 | 88198462 | 88198473 | NC_000005.10 | 12 | 6 |
| chr05 | 102501084 | 102501073 | NC_000005.10 | 12 | 6 |
| chr05 | 109583817 | 109583806 | NC_000005.10 | 12 | 6 |
| chr05 | 128180682 | 128180671 | NC_000005.10 | 12 | 6 |
| chr05 | 136190403 | 136190392 | NC_000005.10 | 12 | 6 |
| chr05 | 154189555 | 154189566 | NC_000005.10 | 12 | 6 |
| chr05 | 171957271 | 171957282 | NC_000005.10 | 12 | 6 |
| chr05 | 175317578 | 175317567 | NC_000005.10 | 12 | 6 |
| chr06 | 4853151 | 4853162 | NC_000006.12 | 12 | 6 |
| chr06 | 16133021 | 16133032 | NC_000006.12 | 12 | 6 |
| chr06 | 26103447 | 26103436 | NC_000006.12 | 12 | 6 |
| chr06 | 35947570 | 35947581 | NC_000006.12 | 12 | 6 |
| chr06 | 68279419 | 68279430 | NC_000006.12 | 12 | 6 |
| chr06 | 79806546 | 79806557 | NC_000006.12 | 12 | 6 |
| chr06 | 85260407 | 85260418 | NC_000006.12 | 12 | 6 |
| chr06 | 136633874 | 136633885 | NC_000006.12 | 12 | 6 |
| chr06 | 137931054 | 137931043 | NC_000006.12 | 12 | 6 |
| chr06 | 139739984 | 139739973 | NC_000006.12 | 12 | 6 |
| chr06 | 140341418 | 140341429 | NC_000006.12 | 12 | 6 |
| chr06 | 145869806 | 145869795 | NC_000006.12 | 12 | 6 |
| chr06 | 146731539 | 146731528 | NC_000006.12 | 12 | 6 |
| chr06 | 168728425 | 168728436 | NC_000006.12 | 12 | 6 |
| chr07 | 51771646 | 51771635 | NC_000007.14 | 12 | 6 |
| chr07 | 137082304 | 137082315 | NC_000007.14 | 12 | 6 |
| chr07 | 141052267 | 141052278 | NC_000007.14 | 12 | 6 |
| chr08 | 17556548 | 17556537 | NC_000008.11 | 12 | 6 |
| chr08 | 30097319 | 30097308 | NC_000008.11 | 12 | 6 |
| chr08 | 68502659 | 68502670 | NC_000008.11 | 12 | 6 |
| chr08 | 86697209 | 86697198 | NC_000008.11 | 12 | 6 |
| chr08 | 91622182 | 91622171 | NC_000008.11 | 12 | 6 |
| chr08 | 92498179 | 92498168 | NC_000008.11 | 12 | 6 |
| chr08 | 124481608 | 124481597 | NC_000008.11 | 12 | 6 |
| chr08 | 129563081 | 129563092 | NC_000008.11 | 12 | 6 |
| chr08 | 131305462 | 131305451 | NC_000008.11 | 12 | 6 |
| chr09 | 14627274 | 14627285 | NC_000009.12 | 12 | 6 |
| chr09 | 15151836 | 15151847 | NC_000009.12 | 12 | 6 |
| chr09 | 22322306 | 22322295 | NC_000009.12 | 12 | 6 |
| chr09 | 23783142 | 23783153 | NC_000009.12 | 12 | 6 |
| chr09 | 26318093 | 26318104 | NC_000009.12 | 12 | 6 |
| chr09 | 31054959 | 31054970 | NC_000009.12 | 12 | 6 |
| chr09 | 79007585 | 79007596 | NC_000009.12 | 12 | 6 |
| chr09 | 88239264 | 88239253 | NC_000009.12 | 12 | 6 |
| chr09 | 96543680 | 96543669 | NC_000009.12 | 12 | 6 |
| chr09 | 99112802 | 99112813 | NC_000009.12 | 12 | 6 |
| chr09 | 123836553 | 123836564 | NC_000009.12 | 12 | 6 |
| chr10 | 33633573 | 33633562 | NC_000010.11 | 12 | 6 |
| chr10 | 65551995 | 65551984 | NC_000010.11 | 12 | 6 |
| chr10 | 66717930 | 66717941 | NC_000010.11 | 12 | 6 |
| chr10 | 74291798 | 74291787 | NC_000010.11 | 12 | 6 |
| chr10 | 82621770 | 82621781 | NC_000010.11 | 12 | 6 |
| chr10 | 91090519 | 91090530 | NC_000010.11 | 12 | 6 |
| chr10 | 99682921 | 99682910 | NC_000010.11 | 12 | 6 |
| chr10 | 107653284 | 107653273 | NC_000010.11 | 12 | 6 |
| chr10 | 127387876 | 127387887 | NC_000010.11 | 12 | 6 |
| chr11 | 10330421 | 10330410 | NC_000011.10 | 12 | 6 |
| chr11 | 21052051 | 21052062 | NC_000011.10 | 12 | 6 |
| chr11 | 56948810 | 56948799 | NC_000011.10 | 12 | 6 |
| chr11 | 91992913 | 91992902 | NC_000011.10 | 12 | 6 |
| chr11 | 96712150 | 96712139 | NC_000011.10 | 12 | 6 |
| chr11 | 99478699 | 99478710 | NC_000011.10 | 12 | 6 |
| chr11 | 103284503 | 103284514 | NC_000011.10 | 12 | 6 |
| chr11 | 110624774 | 110624763 | NC_000011.10 | 12 | 6 |
| chr11 | 118226686 | 118226697 | NC_000011.10 | 12 | 6 |
| chr11 | 121927186 | 121927175 | NC_000011.10 | 12 | 6 |
| chr11 | 127371998 | 127372009 | NC_000011.10 | 12 | 6 |
| chr12 | 21742376 | 21742387 | NC_000012.12 | 12 | 6 |
| chr12 | 33375091 | 33375102 | NC_000012.12 | 12 | 6 |
| chr12 | 79305333 | 79305322 | NC_000012.12 | 12 | 6 |
| chr12 | 87018030 | 87018041 | NC_000012.12 | 12 | 6 |
| chr12 | 97027085 | 97027074 | NC_000012.12 | 12 | 6 |
| chr12 | 97030674 | 97030685 | NC_000012.12 | 12 | 6 |
| chr12 | 97794786 | 97794775 | NC_000012.12 | 12 | 6 |
| chr12 | 99326334 | 99326345 | NC_000012.12 | 12 | 6 |
| chr12 | 100617295 | 100617284 | NC_000012.12 | 12 | 6 |
| chr12 | 106997614 | 106997603 | NC_000012.12 | 12 | 6 |
| chr12 | 114419769 | 114419758 | NC_000012.12 | 12 | 6 |
| chr13 | 29428703 | 29428714 | NC_000013.11 | 12 | 6 |
| chr13 | 34838980 | 34838991 | NC_000013.11 | 12 | 6 |
| chr13 | 68672648 | 68672637 | NC_000013.11 | 12 | 6 |
| chr13 | 68677576 | 68677565 | NC_000013.11 | 12 | 6 |
| chr13 | 79534292 | 79534303 | NC_000013.11 | 12 | 6 |
| chr13 | 83374368 | 83374357 | NC_000013.11 | 12 | 6 |
| chr13 | 91208120 | 91208131 | NC_000013.11 | 12 | 6 |
| chr13 | 92057240 | 92057251 | NC_000013.11 | 12 | 6 |
| chr13 | 105912154 | 105912165 | NC_000013.11 | 12 | 6 |
| chr14 | 37970959 | 37970948 | NC_000014.9 | 12 | 6 |
| chr14 | 40492006 | 40491995 | NC_000014.9 | 12 | 6 |
| chr14 | 44782915 | 44782926 | NC_000014.9 | 12 | 6 |
| chr14 | 48758306 | 48758317 | NC_000014.9 | 12 | 6 |
| chr14 | 88004548 | 88004537 | NC_000014.9 | 12 | 6 |
| chr15 | 56610753 | 56610764 | NC_000015.10 | 12 | 6 |
| chr15 | 70757589 | 70757578 | NC_000015.10 | 12 | 6 |
| chr15 | 96964230 | 96964219 | NC_000015.10 | 12 | 6 |
| chr16 | 66442829 | 66442818 | NC_000016.10 | 12 | 6 |
| chr16 | 74623964 | 74623975 | NC_000016.10 | 12 | 6 |
| chr16 | 75189302 | 75189291 | NC_000016.10 | 12 | 6 |
| chr17 | 9332911 | 9332900 | NC_000017.11 | 12 | 6 |
| chr18 | 32474384 | 32474373 | NC_000018.10 | 12 | 6 |
| chr18 | 34128952 | 34128963 | NC_000018.10 | 12 | 6 |
| chr18 | 55039826 | 55039815 | NC_000018.10 | 12 | 6 |
| chr18 | 78931519 | 78931508 | NC_000018.10 | 12 | 6 |
| chr19 | 31065225 | 31065236 | NC_000019.10 | 12 | 6 |
| chr19 | 32434028 | 32434017 | NC_000019.10 | 12 | 6 |
| chr19 | 51221292 | 51221303 | NC_000019.10 | 12 | 6 |
| chr20 | 1361969 | 1361958 | NC_000020.11 | 12 | 6 |
| chr20 | 4448895 | 4448906 | NC_000020.11 | 12 | 6 |
| chr20 | 13696489 | 13696478 | NC_000020.11 | 12 | 6 |
| chr20 | 20275384 | 20275395 | NC_000020.11 | 12 | 6 |
| chr20 | 26367536 | 26367525 | NC_000020.11 | 12 | 6 |
| chr21 | 37223237 | 37223248 | NC_000021.9 | 12 | 6 |
| chr21 | 46496495 | 46496484 | NC_000021.9 | 12 | 6 |
| chr22 | 39560335 | 39560346 | NC_000022.11 | 12 | 6 |
| chrX | 986645 | 986656 | NC_000023.11 | 12 | 6 |
| chrX | 5921242 | 5921253 | NC_000023.11 | 12 | 6 |
| chrX | 6765829 | 6765840 | NC_000023.11 | 12 | 6 |
| chrX | 15504137 | 15504126 | NC_000023.11 | 12 | 6 |
| chrX | 22546280 | 22546269 | NC_000023.11 | 12 | 6 |
| chrX | 41199361 | 41199372 | NC_000023.11 | 12 | 6 |
| chrX | 43885293 | 43885282 | NC_000023.11 | 12 | 6 |
| chrX | 67874307 | 67874296 | NC_000023.11 | 12 | 6 |
| chrX | 110216026 | 110216037 | NC_000023.11 | 12 | 6 |
| chrX | 110566890 | 110566879 | NC_000023.11 | 12 | 6 |
| chrX | 111357390 | 111357379 | NC_000023.11 | 12 | 6 |
| chrX | 150589443 | 150589454 | NC_000023.11 | 12 | 6 |
| chr01 | 23207589 | 23207577 | NC_000001.11 | 13 | 5 |
| chr01 | 25897408 | 25897420 | NC_000001.11 | 13 | 5 |
| chr01 | 65491478 | 65491490 | NC_000001.11 | 13 | 5 |
| chr01 | 154831168 | 154831180 | NC_000001.11 | 13 | 5 |
| chr02 | 35254361 | 35254349 | NC_000002.12 | 13 | 5 |
| chr02 | 207969171 | 207969159 | NC_000002.12 | 13 | 5 |
| chr03 | 185371630 | 185371642 | NC_000003.12 | 13 | 5 |
| chr04 | 46469891 | 46469879 | NC_000004.12 | 13 | 5 |
| chr04 | 105058847 | 105058835 | NC_000004.12 | 13 | 5 |
| chr04 | 124730032 | 124730044 | NC_000004.12 | 13 | 5 |
| chr04 | 158619352 | 158619364 | NC_000004.12 | 13 | 5 |
| chr06 | 85949972 | 85949960 | NC_000006.12 | 13 | 5 |
| chr06 | 109604972 | 109604960 | NC_000006.12 | 13 | 5 |
| chr10 | 59089285 | 59089273 | NC_000010.11 | 13 | 5 |
| chr10 | 99263586 | 99263598 | NC_000010.11 | 13 | 5 |
| chr11 | 96315922 | 96315934 | NC_000011.10 | 13 | 5 |
| chr15 | 33186727 | 33186715 | NC_000015.10 | 13 | 5 |
| chr15 | 87091718 | 87091706 | NC_000015.10 | 13 | 5 |
| chr16 | 16972153 | 16972165 | NC_000016.10 | 13 | 5 |
| chr16 | 59986446 | 59986458 | NC_000016.10 | 13 | 5 |
| chr18 | 12587445 | 12587457 | NC_000018.10 | 13 | 5 |
| chr18 | 78691060 | 78691048 | NC_000018.10 | 13 | 5 |
| chr19 | 39627504 | 39627492 | NC_000019.10 | 13 | 5 |
| chr19 | 54674561 | 54674573 | NC_000019.10 | 13 | 5 |
| chr20 | 30512867 | 30512855 | NC_000020.11 | 13 | 5 |
| chr20 | 45173430 | 45173442 | NC_000020.11 | 13 | 5 |
| chr21 | 35062647 | 35062659 | NC_000021.9 | 13 | 5 |
| chrX | 77412877 | 77412889 | NC_000023.11 | 13 | 5 |
| chrX | 130349739 | 130349727 | NC_000023.11 | 13 | 5 |
| chr01 | 8663054 | 8663065 | NC_000001.11 | 12 | 5 |
| chr01 | 26335998 | 26336009 | NC_000001.11 | 12 | 5 |
| chr01 | 42582606 | 42582595 | NC_000001.11 | 12 | 5 |
| chr01 | 47032830 | 47032819 | NC_000001.11 | 12 | 5 |
| chr01 | 69196253 | 69196264 | NC_000001.11 | 12 | 5 |
| chr01 | 70300023 | 70300034 | NC_000001.11 | 12 | 5 |
| chr01 | 82771042 | 82771053 | NC_000001.11 | 12 | 5 |
| chr01 | 100102957 | 100102946 | NC_000001.11 | 12 | 5 |
| chr01 | 107996202 | 107996213 | NC_000001.11 | 12 | 5 |
| chr01 | 162211653 | 162211642 | NC_000001.11 | 12 | 5 |
| chr01 | 208646365 | 208646354 | NC_000001.11 | 12 | 5 |
| chr01 | 215734460 | 215734449 | NC_000001.11 | 12 | 5 |
| chr01 | 234143991 | 234144002 | NC_000001.11 | 12 | 5 |
| chr01 | 241045297 | 241045286 | NC_000001.11 | 12 | 5 |
| chr02 | 140780861 | 140780872 | NC_000002.12 | 12 | 5 |
| chr02 | 149162575 | 149162586 | NC_000002.12 | 12 | 5 |
| chr02 | 162692841 | 162692852 | NC_000002.12 | 12 | 5 |
| chr02 | 222738270 | 222738259 | NC_000002.12 | 12 | 5 |
| chr03 | 67248099 | 67248110 | NC_000003.12 | 12 | 5 |
| chr03 | 174292637 | 174292648 | NC_000003.12 | 12 | 5 |
| chr04 | 12331297 | 12331308 | NC_000004.12 | 12 | 5 |
| chr04 | 21504937 | 21504948 | NC_000004.12 | 12 | 5 |
| chr04 | 43962965 | 43962976 | NC_000004.12 | 12 | 5 |
| chr04 | 57433948 | 57433937 | NC_000004.12 | 12 | 5 |
| chr04 | 85682861 | 85682872 | NC_000004.12 | 12 | 5 |
| chr04 | 106114290 | 106114301 | NC_000004.12 | 12 | 5 |
| chr04 | 113028283 | 113028294 | NC_000004.12 | 12 | 5 |
| chr04 | 151151805 | 151151794 | NC_000004.12 | 12 | 5 |
| chr04 | 152051162 | 152051173 | NC_000004.12 | 12 | 5 |
| chr04 | 179052931 | 179052920 | NC_000004.12 | 12 | 5 |
| chr05 | 6661409 | 6661420 | NC_000005.10 | 12 | 5 |
| chr05 | 93549147 | 93549158 | NC_000005.10 | 12 | 5 |
| chr05 | 148916732 | 148916721 | NC_000005.10 | 12 | 5 |
| chr05 | 153193520 | 153193531 | NC_000005.10 | 12 | 5 |
| chr05 | 169165696 | 169165685 | NC_000005.10 | 12 | 5 |
| chr06 | 99056822 | 99056833 | NC_000006.12 | 12 | 5 |
| chr07 | 21203640 | 21203651 | NC_000007.14 | 12 | 5 |
| chr07 | 27364344 | 27364355 | NC_000007.14 | 12 | 5 |
| chr07 | 45331667 | 45331656 | NC_000007.14 | 12 | 5 |
| chr08 | 28102047 | 28102036 | NC_000008.11 | 12 | 5 |
| chr08 | 64148089 | 64148078 | NC_000008.11 | 12 | 5 |
| chr08 | 121058238 | 121058249 | NC_000008.11 | 12 | 5 |
| chr08 | 134902692 | 134902681 | NC_000008.11 | 12 | 5 |
| chr09 | 26814924 | 26814935 | NC_000009.12 | 12 | 5 |
| chr09 | 35739632 | 35739643 | NC_000009.12 | 12 | 5 |
| chr09 | 77017601 | 77017612 | NC_000009.12 | 12 | 5 |
| chr09 | 83041777 | 83041788 | NC_000009.12 | 12 | 5 |
| chr09 | 87072669 | 87072658 | NC_000009.12 | 12 | 5 |
| chr09 | 134613617 | 134613628 | NC_000009.12 | 12 | 5 |
| chr10 | 7938397 | 7938408 | NC_000010.11 | 12 | 5 |
| chr10 | 59688277 | 59688266 | NC_000010.11 | 12 | 5 |
| chr10 | 91834373 | 91834384 | NC_000010.11 | 12 | 5 |
| chr10 | 106036664 | 106036653 | NC_000010.11 | 12 | 5 |
| chr11 | 1648239 | 1648228 | NC_000011.10 | 12 | 5 |
| chr11 | 28286474 | 28286485 | NC_000011.10 | 12 | 5 |
| chr11 | 59609982 | 59609993 | NC_000011.10 | 12 | 5 |
| chr11 | 82154773 | 82154784 | NC_000011.10 | 12 | 5 |
| chr12 | 56884436 | 56884425 | NC_000012.12 | 12 | 5 |
| chr12 | 65309897 | 65309908 | NC_000012.12 | 12 | 5 |
| chr12 | 70312802 | 70312791 | NC_000012.12 | 12 | 5 |
| chr12 | 108169798 | 108169809 | NC_000012.12 | 12 | 5 |
| chr13 | 41643771 | 41643782 | NC_000013.11 | 12 | 5 |
| chr13 | 43730188 | 43730177 | NC_000013.11 | 12 | 5 |
| chr13 | 66772070 | 66772081 | NC_000013.11 | 12 | 5 |
| chr13 | 67266239 | 67266250 | NC_000013.11 | 12 | 5 |
| chr13 | 70438394 | 70438405 | NC_000013.11 | 12 | 5 |
| chr13 | 72462904 | 72462915 | NC_000013.11 | 12 | 5 |
| chr13 | 73589220 | 73589209 | NC_000013.11 | 12 | 5 |
| chr13 | 114256981 | 114256970 | NC_000013.11 | 12 | 5 |
| chr14 | 53548116 | 53548105 | NC_000014.9 | 12 | 5 |
| chr14 | 91128016 | 91128005 | NC_000014.9 | 12 | 5 |
| chr15 | 55623598 | 55623609 | NC_000015.10 | 12 | 5 |
| chr15 | 59650410 | 59650421 | NC_000015.10 | 12 | 5 |
| chr15 | 67895787 | 67895798 | NC_000015.10 | 12 | 5 |
| chr15 | 75030887 | 75030898 | NC_000015.10 | 12 | 5 |
| chr15 | 80376611 | 80376600 | NC_000015.10 | 12 | 5 |
| chr17 | 2259971 | 2259960 | NC_000017.11 | 12 | 5 |
| chr17 | 13599804 | 13599793 | NC_000017.11 | 12 | 5 |
| chr17 | 49970374 | 49970385 | NC_000017.11 | 12 | 5 |
| chr17 | 74411987 | 74411998 | NC_000017.11 | 12 | 5 |
| chr18 | 6692184 | 6692173 | NC_000018.10 | 12 | 5 |
| chr18 | 26936361 | 26936372 | NC_000018.10 | 12 | 5 |
| chr18 | 32164785 | 32164796 | NC_000018.10 | 12 | 5 |
| chr18 | 57372141 | 57372152 | NC_000018.10 | 12 | 5 |
| chr18 | 76028676 | 76028665 | NC_000018.10 | 12 | 5 |
| chr18 | 79860251 | 79860240 | NC_000018.10 | 12 | 5 |
| chr20 | 2767508 | 2767497 | NC_000020.11 | 12 | 5 |
| chr20 | 32334864 | 32334853 | NC_000020.11 | 12 | 5 |
| chr20 | 42969400 | 42969411 | NC_000020.11 | 12 | 5 |
| chr21 | 15405882 | 15405871 | NC_000021.9 | 12 | 5 |
| chr21 | 27128817 | 27128828 | NC_000021.9 | 12 | 5 |
| chr21 | 27724878 | 27724889 | NC_000021.9 | 12 | 5 |
| chr21 | 33775512 | 33775523 | NC_000021.9 | 12 | 5 |
| chr22 | 40201219 | 40201208 | NC_000022.11 | 12 | 5 |
| chrX | 24583713 | 24583724 | NC_000023.11 | 12 | 5 |
| chrX | 53003928 | 53003939 | NC_000023.11 | 12 | 5 |
| chrX | 75537169 | 75537180 | NC_000023.11 | 12 | 5 |
| chrX | 91187582 | 91187593 | NC_000023.11 | 12 | 5 |
| chr01 | 237603124 | 237603136 | NC_000001.11 | 13 | 4 |
| chr02 | 132279864 | 132279852 | NC_000002.12 | 13 | 4 |
| chr02 | 176672291 | 176672279 | NC_000002.12 | 13 | 4 |
| chr04 | 47096940 | 47096952 | NC_000004.12 | 13 | 4 |
| chr05 | 170123837 | 170123825 | NC_000005.10 | 13 | 4 |
| chr10 | 97944808 | 97944796 | NC_000010.11 | 13 | 4 |
| chr10 | 114226626 | 114226614 | NC_000010.11 | 13 | 4 |
| chr13 | 67884795 | 67884783 | NC_000013.11 | 13 | 4 |
| chr14 | 59591410 | 59591398 | NC_000014.9 | 13 | 4 |
| chr16 | 3659076 | 3659088 | NC_000016.10 | 13 | 4 |
| chr18 | 25418784 | 25418772 | NC_000018.10 | 13 | 4 |
| chrX | 45634061 | 45634049 | NC_000023.11 | 13 | 4 |
| chr01 | 3217976 | 3217987 | NC_000001.11 | 12 | 4 |
| chr01 | 92837827 | 92837816 | NC_000001.11 | 12 | 4 |
| chr01 | 112701651 | 112701662 | NC_000001.11 | 12 | 4 |
| chr01 | 166000671 | 166000660 | NC_000001.11 | 12 | 4 |
| chr01 | 178801277 | 178801288 | NC_000001.11 | 12 | 4 |
| chr02 | 177290177 | 177290166 | NC_000002.12 | 12 | 4 |
| chr02 | 218084695 | 218084706 | NC_000002.12 | 12 | 4 |
| chr02 | 236494650 | 236494639 | NC_000002.12 | 12 | 4 |
| chr04 | 42894460 | 42894471 | NC_000004.12 | 12 | 4 |
| chr04 | 66200304 | 66200315 | NC_000004.12 | 12 | 4 |
| chr06 | 35644009 | 35643998 | NC_000006.12 | 12 | 4 |
| chr06 | 35671520 | 35671531 | NC_000006.12 | 12 | 4 |
| chr09 | 95179956 | 95179945 | NC_000009.12 | 12 | 4 |
| chr09 | 122078420 | 122078431 | NC_000009.12 | 12 | 4 |
| chr09 | 132891241 | 132891252 | NC_000009.12 | 12 | 4 |
| chr09 | 134244101 | 134244112 | NC_000009.12 | 12 | 4 |
| chr10 | 46934395 | 46934384 | NC_000010.11 | 12 | 4 |
| chr10 | 48117437 | 48117448 | NC_000010.11 | 12 | 4 |
| chr10 | 102716315 | 102716304 | NC_000010.11 | 12 | 4 |
| chr12 | 31614069 | 31614080 | NC_000012.12 | 12 | 4 |
| chr13 | 18693215 | 18693204 | NC_000013.11 | 12 | 4 |
| chr14 | 30845671 | 30845660 | NC_000014.9 | 12 | 4 |
| chr14 | 94062711 | 94062722 | NC_000014.9 | 12 | 4 |
| chr17 | 10363532 | 10363543 | NC_000017.11 | 12 | 4 |
| chr17 | 59667014 | 59667025 | NC_000017.11 | 12 | 4 |
| chr17 | 68278027 | 68278038 | NC_000017.11 | 12 | 4 |
| chr18 | 44686796 | 44686785 | NC_000018.10 | 12 | 4 |
| chr18 | 55570049 | 55570060 | NC_000018.10 | 12 | 4 |
| chr20 | 37099530 | 37099519 | NC_000020.11 | 12 | 4 |
| chr21 | 14473970 | 14473981 | NC_000021.9 | 12 | 4 |
| chr21 | 28191101 | 28191112 | NC_000021.9 | 12 | 4 |
| chr01 | 85362838 | 85362827 | NC_000001.11 | 12 | 3 |
| chr14 | 106817445 | 106817434 | NC_000014.9 | 12 | 3 |
| chr17 | 12074729 | 12074718 | NC_000017.11 | 12 | 3 |
| chr21 | 8217645 | 8217657 | NC_000021.9 | 13 | 2 |
| chr21 | 8400683 | 8400695 | NC_000021.9 | 13 | 2 |
| chr21 | 8444915 | 8444927 | NC_000021.9 | 13 | 2 |
| chr01 | 65227883 | 65227872 | NC_000001.11 | 12 | 2 |
| chr17 | 31347890 | 31347879 | NC_000017.11 | 12 | 1 |

### Example 9: Retargeting of a Gene Writer to a Genomic Safe Harbor Site

[1159] This example describes a Gene Writer comprising a heterologous DNA binding domain that redirects its activity to a genomic safe harbor site.

[1160] In this example, the Gene Writer polypeptide sequence is altered to where its natural DNA binding domain is replaced, mutated/inactivated, and/or joined with another polypeptide sequence that can redirect the Gene Writer system to another genomic location that is not its endogenous or natural binding site. In some instances, the polypeptide sequence that redirects the Gene Writer system to a non-natural genomic location may also be attached and/or inserted to any module of the Gene Writer polypeptide sequence.

[1161] In some embodiments, the polypeptide sequence used to redirect the Gene Writer system to a non-natural genomic target encodes for: a zinc finger, a series of adjacent, regularly, or irregularly spaced zinc fingers, a transcription activator-like effector (TALE), a series of adjacent, regularly, or irregularly spaced a transcription activator-like effectors (TALEs), Cas9, Cas9 with mutations to its catalytic residues inactivating the double-stranded DNA endonuclease activity (referred to as catalytically-dead Cas9 (dCas9)), Cas9 with a point mutation or multiple point mutations in a single catalytic domain in order to render Cas9 endonuclease only able to cleave one strand of double-stranded DNA (referred to as Cas9 nickase) (see FIG. 12).

[1162] In some embodiments, the polypeptide sequence used to re-direct the Gene Writer system targets a genomic safe-harbor location (e.g., AAVS1 site on human chromosome 19) (Pellenz, S., et. al., Human Gene Therapy, 30(7), 814-828, 2019), see FIGS. 11 and 13. In further embodiments, the polypeptide sequence used to re-direct the Gene Writer polypeptide sequence is used in conjunction with a nucleic acid that targets the genomic safe harbor location (e.g., the polypeptide sequence for catalytic dead Cas9 along with a single-guide RNA targeting the AAVS1 site on chromosome 19).

TABLE E4
Re-targeted Gene Writer constructs. Examples shown are to re-target R2Tg
Gene Writer polypeptide sequence to the AAVS1 site using ZF or Cas9 domains.

| Gene Writer | Polypeptide Sequence (Re-targeting polypeptide sequence, |
|---|---|
| Polypeptide Name | italic; Linker, bold underline) |
| AAVS1 Left ZFP | MGIHGVPAAMAERPFQCRICMRNFSYNWHLQRHIRTHTGEKPFACDICGRKFA |
| attached at v2 | RSDHLTTHTKIHTGSQKPFQCRICMRNFSHNYARDCHIRTHTGEKPFACDICG |
| location of DBD of | RKFAQNSTRIGHTKIHLRGSGGGSTATRDKKDTVTREKHPKKPFQKWMKDRAI |
| R2Tg with 3GS | KKGNYLRFQRLFYLDRGKLAKIILDDIECLSCDIPLSEIYSVFKTRWETTGSF |
| linker (SEQ ID NO: | KSLGDFKTYGKADNTAFRELITAKEIEKNVQEMSKGSAPGPDGITLGDVVKMD |
| 1024) | PEFSRTMEIFNLWLTTGKIPDMVRGCRTVLIPKSSKPDRLKDINNWRPITIGS |
| | ILLRLFSRIVTARLSKACPLNPRQRGFIRAAGCSENLKLLQTIIWSAKREHRP |
| | LGVVFVDIAKAFDTVSHQHIIHALQQREVDPHIVGLVSNMYENISTYITTKRN |
| | THTDKIQIRVGVKQGDPMSPLLFNLAMDPLLCKLEESGKGYHRGQSSITAMAF |
| | ADDLVLLSDSWENMNTNISILETFCNLTGLKTQGQKCHGFYIKPTKDSYTIND |
| | CAAWTINGTPLNMIDPGESEKYLGLQFDPWIGIARSGLSTKLDFWLQRIDQAP |
| | LKPLQKTDILKTYTIPRLIYIADHSEVKTALLETLDQKIRTAVKEWLHLPPCT |
| | CDAILYSSTRDGGLGITKLAGLIPSVQARRLHRIAQSSDDTMKCFMEKEKMEQ |
| | LHKKLWIQAGGDRENIPSIWEAPPSSEPPNNVSTNSEWEAPTQKDKFPKPCNW |
| | RKNEFKKWTKLASQGRGIVNFERDKISNHWIQYYRRIPHRKLLTALQLRANVY |
| | PTREFLARGRQDQYIKACRHCDADIESCAHIIGNCPVTQDARIKRHNYICELL |
| | EEAAAEKVRKYKHLETEVRHLTNAKDVTFVGFPLGARGKWHQDNFKLLTELGL |
| | SKSRQVKMAETFSTVALFSSVDIVHMFASRARKSMVM (SEQ ID NO: |
| | 1658) |
| AAVS1 Left ZFP | MGIHGVPAAMAERPFQCRICMRNFSYNWHLQRHIRTHTGEKPFACDICGRKFA |
| attached at v2 | RSDHLTTHTKIHTGSQKPFQCRICMRNFSHNYARDCHIRTHTGEKPFACDICG |
| location of DBD of | RKFAQNSTRIGHTKIHLRGSSGSETPGTSESATPESTATRDKKDTVTREKHPK |
| R2Tg with XTEN | KPFQKWMKDRAIKKGNYLRFQRLFYLDRGKLAKIILDDIECLSCDIPLSEIYS |
| linker | VFKTRWETTGSFKSLGDFKTYGKADNTAFRELITAKEIEKNVQEMSKGSAPGP |
| | DGITLGDVVKMDPEFSRTMEIFNLWLTTGKIPDMVRGCRTVLIPKSSKPDRLK |
| | DINNWRPITIGSILLRLFSRIVTARLSKACPLNPRQRGFIRAAGCSENLKLLQ |
| | TIIWSAKREHRPLGVVFVDIAKAFDTVSHQHIIHALQQREVDPHIVGLVSNMY |
| | ENISTYITTKRNTHTDKIQIRVGVKQGDPMSPLLFNLAMDPLLCKLEESGKGY |
| | HRGQSSITAMAFADDLVLLSDSWENMNTNISILETFCNLTGLKTQGQKCHGFY |
| | IKPTKDSYTINDCAAWTINGTPLNMIDPGESEKYLGLQFDPWIGIARSGLSTK |
| | LDFWLQRIDQAPLKPLQKTDILKTYTIPRLIYIADHSEVKTALLETLDQKIRT |
| | AVKEWLHLPPCTCDAILYSSTRDGGLGITKLAGLIPSVQARRLHRIAQSSDDT |
| | MKCFMEKEKMEQLHKKLWIQAGGDRENIPSIWEAPPSSEPPNNVSTNSEWEAP |
| | TQKDKFPKPCNWRKNEFKKWTKLASQGRGIVNFERDKISNHWIQYYRRIPHRK |
| | LLTALQLRANVYPTREFLARGRQDQYIKACRHCDADIESCAHIIGNCPVTQDA |
| | RIKRHNYICELLLEEAKKKDWVVFKEPHIRDSNKELYKPDLIFVKDARALVVD |
| | VTVRYEAAKSSLEEAAAEKVRKYKHLETEVRHLTNAKDVTFVGFPLGARGKWH |
| | QDNFKLLTELGLSKSRQVKMAETFSTVALFSSVDIVHMFASRARKSMVM |
| | (SEQ ID NO: 1659) |
| AAVS1 Left ZFP | MGIHGVPAAMAERPFQCRICMRNFSYNWHLQRHIRTHTGEKPFACDICGRKFA |
| attached at v1 | RSDHLTTHTKIHTGSQKPFQCRICMRNFSHNYARDCHIRTHTGEKPFACDICG |
| location of DBD of | RKFAQNSTRIGHTKIHLRGSGGGSCFGCLESISQIRTATRDKKDTVTREKHPK |
| R2Tg with 3GS | KPFQKWMKDRAIKKGNYLRFQRLFYLDRGKLAKIILDDIECLSCDIPLSEIYS |
| linker (SEQ ID NO: | VFKTRWETTGSFKSLGDFKTYGKADNTAFRELITAKEIEKNVQEMSKGSAPGP |
| 1024) | DGITLGDVVKMDPEFSRTMEIFNLWLTTGKIPDMVRGCRTVLIPKSSKPDRLK |
| | DINNWRPITIGSILLRLFSRIVTARLSKACPLNPRQRGFIRAAGCSENLKLLQ |
| | TIIWSAKREHRPLGVVFVDIAKAFDTVSHQHIIHALQQREVDPHIVGLVSNMY |
| | ENISTYITTKRNTHTDKIQIRVGVKQGDPMSPLLFNLAMDPLLCKLEESGKGY |
| | HRGQSSITAMAFADDLVLLSDSWENMNTNISILETFCNLTGLKTQGQKCHGFY |
| | IKPTKDSYTINDCAAWTINGTPLNMIDPGESEKYLGLQFDPWIGIARSGLSTK |
| | LDFWLQRIDQAPLKPLQKTDILKTYTIPRLIYIADHSEVKTALLETLDQKIRT |
| | AVKEWLHLPPCTCDAILYSSTRDGGLGITKLAGLIPSVQARRLHRIAQSSDDT |
| | MKCFMEKEKMEQLHKKLWIQAGGDRENIPSIWEAPPSSEPPNNVSTNSEWEAP |
| | TQKDKFPKPCNWRKNEFKKWTKLASQGRGIVNFERDKISNHWIQYYRRIPHRK |
| | LLTALQLRANVYPTREFLARGRQDQYIKACRHCDADIESCAHIIGNCPVTQDA |
| | RIKRHNYICELLLEEAKKKDWVVFKEPHIRDSNKELYKPDLIFVKDARALVVD |
| | VTVRYEAAKSSLEEAAAEKVRKYKHLETEVRHLTNAKDVTFVGFPLGARGKWH |
| | QDNFKLLTELGLSKSRQVKMAETFSTVALFSSVDIVHMFASRARKSMVM |
| | (SEQ ID NO: 1660) |
| AAVS1 Left ZFP | MGIHGVPAAMAERPFQCRICMRNFSYNWHLQRHIRTHTGEKPFACDICGRKFA |
| attached at v1 | RSDHLTTHTKIHTGSQKPFQCRICMRNFSHNYARDCHIRTHTGEKPFACDICG |
| location of DBD of | RKFAQNSTRIGHTKIHLRGSSGSETPGTSESATPESCFGCLESISQIRTATRD |
| R2Tg with XTEN | KKDTVTREKHPKKPFQKWMKDRAIKKGNYLRFQRLFYLDRGKLAKIILDDIEC |
| linker | LSCDIPLSEIYSVFKTRWETTGSFKSLGDFKTYGKADNTAFRELITAKEIEKN |
| | VQEMSKGSAPGPDGITLGDVVKMDPEFSRTMEIFNLWLTTGKIPDMVRGCRTV |
| | LIPKSSKPDRLKDINNWRPITIGSILLRLFSRIVTARLSKACPLNPRQRGFIR |
| | AAGCSENLKLLQTIIWSAKREHRPLGVVFVDIAKAFDTVSHQHIIHALQQREV |
| | DPHIVGLVSNMYENISTYITTKRNTHTDKIQIRVGVKQGDPMSPLLFNLAMDP |
| | LLCKLEESGKGYHRGQSSITAMAFADDLVLLSDSWENMNTNISILETFCNLTG |
| | LKTQGQKCHGFYIKPTKDSYTINDCAAWTINGTPLNMIDPGESEKYLGLQFDP |
| | WIGIARSGLSTKLDFWLQRIDQAPLKPLQKTDILKTYTIPRLIYIADHSEVKT |
| | ALLETLDQKIRTAVKEWLHLPPCTCDAILYSSTRDGGLGITKLAGLIPSVQAR |
| | RLHRIAQSSDDTMKCFMEKEKMEQLHKKLWIQAGGDRENIPSIWEAPPSSEPP |
| | NNVSTNSEWEAPTQKDKFPKPCNWRKNEFKKWTKLASQGRGIVNFERDKISNH |
| | WIQYYRRIPHRKLLTALQLRANVYPTREFLARGRQDQYIKACRHCDADIESCA |
| | HIIGNCPVTQDARIKRHNYICELLLEEAKKKDWVVFKEPHIRDSNKELYKPDL |
| | IFVKDARALVVDVTVRYEAAKSSLEEAAAEKVRKYKHLETEVRHLTNAKDVTF |
| | VGFPLGARGKWHQDNFKLLTELGLSKSRQVKMAETFSTVALFSSVDIVHMFAS |
| | RARKSMVM (SEQ ID NO: 1661) |
| AAVS1 Right ZFP | MGIHGVPAAMAERPFQCRICMRNFSQSSNLARHIRTHTGEKPFACDICGRKFA |
| attached at v2 | RTDYLVDHTKIHTGSQKPFQCRICMRNFSYNTHLTRHIRTHTGEKPFACDICG |
| location of DBD of | RKFAQGYNLAGHTKIHLRGSGGGSTATRDKKDTVTREKHPKKPFQKWMKDRAI |
| R2Tg with 3GS | KKGNYLRFQRLFYLDRGKLAKIILDDIECLSCDIPLSEIYSVFKTRWETTGSF |
| linker (SEQ ID NO: | KSLGDFKTYGKADNTAFRELITAKEIEKNVQEMSKGSAPGPDGITLGDVVKMD |
| 1024) | PEFSRTMEIFNLWLTTGKIPDMVRGCRTVLIPKSSKPDRLKDINNWRPITIGS |
| | ILLRLFSRIVTARLSKACPLNPRQRGFIRAAGCSENLKLLQTIIWSAKREHRP |
| | LGVVFVDIAKAFDTVSHQHIIHALQQREVDPHIVGLVSNMYENISTYITTKRN |
| | THTDKIQIRVGVKQGDPMSPLLFNLAMDPLLCKLEESGKGYHRGQSSITAMAF |
| | ADDLVLLSDSWENMNTNISILETFCNLTGLKTQGQKCHGFYIKPTKDSYTIND |
| | CAAWTINGTPLNMIDPGESEKYLGLQFDPWIGIARSGLSTKLDFWLQRIDQAP |
| | LKPLQKTDILKTYTIPRLIYIADHSEVKTALLETLDQKIRTAVKEWLHLPPCT |
| | CDAILYSSTRDGGLGITKLAGLIPSVQARRLHRIAQSSDDTMKCFMEKEKMEQ |
| | LHKKLWIQAGGDRENIPSIWEAPPSSEPPNNVSTNSEWEAPTQKDKFPKPCNW |
| | RKNEFKKWTKLASQGRGIVNFERDKISNHWIQYYRRIPHRKLLTALQLRANVY |
| | PTREFLARGRQDQYIKACRHCDADIESCAHIIGNCPVTQDARIKRHNYICELL |
| | LEEAKKKDWVVFKEPHIRDSNKELYKPDLIFVKDARALVVDVTVRYEAAKSSL |
| | EEAAAEKVRKYKHLETEVRHLTNAKDVTFVGFPLGARGKWHQDNFKLLTELGL |
| | SKSRQVKMAETFSTVALFSSVDIVHMFASRARKSMVM (SEQ ID NO: |
| | 1662) |
| AAVS1 Right ZFP | MGIHGVPAAMAERPFQCRICMRNFSQSSNLARHIRTHTGEKPFACDICGRKFA |
| attached at v2 | RTDYLVDHTKIHTGSQKPFQCRICMRNFSYNTHLTRHIRTHTGEKPFACDICG |
| location of DBD of | RKFAQGYNLAGHTKIHLRGSSGSETPGTSESATPESTATRDKKDTVTREKHPK |
| R2Tg with XTEN | KPFQKWMKDRAIKKGNYLRFQRLFYLDRGKLAKIILDDIECLSCDIPLSEIYS |
| linker | VFKTRWETTGSFKSLGDFKTYGKADNTAFRELITAKEIEKNVQEMSKGSAPGP |
| | DGITLGDVVKMDPEFSRTMEIFNLWLTTGKIPDMVRGCRTVLIPKSSKPDRLK |
| | DINNWRPITIGSILLRLFSRIVTARLSKACPLNPRQRGFIRAAGCSENLKLLQ |
| | TIIWSAKREHRPLGVVFVDIAKAFDTVSHQHIIHALQQREVDPHIVGLVSNMY |
| | ENISTYITTKRNTHTDKIQIRVGVKQGDPMSPLLFNLAMDPLLCKLEESGKGY |
| | HRGQSSITAMAFADDLVLLSDSWENMNTNISILETFCNLTGLKTQGQKCHGFY |
| | IKPTKDSYTINDCAAWTINGTPLNMIDPGESEKYLGLQFDPWIGIARSGLSTK |
| | LDFWLQRIDQAPLKPLQKTDILKTYTIPRLIYIADHSEVKTALLETLDQKIRT |
| | AVKEWLHLPPCTCDAILYSSTRDGGLGITKLAGLIPSVQARRLHRIAQSSDDT |
| | MKCFMEKEKMEQLHKKLWIQAGGDRENIPSIWEAPPSSEPPNNVSTNSEWEAP |
| | TQKDKFPKPCNWRKNEFKKWTKLASQGRGIVNFERDKISNHWIQYYRRIPHRK |
| | LLTALQLRANVYPTREFLARGRQDQYIKACRHCDADIESCAHIIGNCPVTQDA |
| | RIKRHNYICELLLEEAKKKDWVVFKEPHIRDSNKELYKPDLIFVKDARALVVD |
| | VTVRYEAAKSSLEEAAAEKVRKYKHLETEVRHLTNAKDVTFVGFPLGARGKWH |
| | QDNFKLLTELGLSKSRQVKMAETFSTVALFSSVDIVHMFASRARKSMVM |
| | (SEQ ID NO: 1663) |
| AAVS1 Right ZFP | MGIHGVPAAMAERPFQCRICMRNFSQSSNLARHIRTHTGEKPFACDICGRKFA |
| attached at v1 | RTDYLVDHTKIHTGSQKPFQCRICMRNFSYNTHLTRHIRTHTGEKPFACDICG |
| location of DBD of | RKFAQGYNLAGHTKIHLRGSGGGSCFGCLESISQIRTATRDKKDTVTREKHPK |
| R2Tg with 3GS | KPFQKWMKDRAIKKGNYLRFQRLFYLDRGKLAKIILDDIECLSCDIPLSEIYS |
| linker (SEQ ID NO: | VFKTRWETTGSFKSLGDFKTYGKADNTAFRELITAKEIEKNVQEMSKGSAPGP |
| 1024) | DGITLGDVVKMDPEFSRTMEIFNLWLTTGKIPDMVRGCRTVLIPKSSKPDRLK |
| | DINNWRPITIGSILLRLFSRIVTARLSKACPLNPRQRGFIRAAGCSENLKLLQ |
| | TIIWSAKREHRPLGVVFVDIAKAFDTVSHQHIIHALQQREVDPHIVGLVSNMY |
| | ENISTYITTKRNTHTDKIQIRVGVKQGDPMSPLLFNLAMDPLLCKLEESGKGY |
| | HRGQSSITAMAFADDLVLLSDSWENMNTNISILETFCNLTGLKTQGQKCHGFY |
| | IKPTKDSYTINDCAAWTINGTPLNMIDPGESEKYLGLQFDPWIGIARSGLSTK |
| | LDFWLQRIDQAPLKPLQKTDILKTYTIPRLIYIADHSEVKTALLETLDQKIRT |
| | AVKEWLHLPPCTCDAILYSSTRDGGLGITKLAGLIPSVQARRLHRIAQSSDDT |
| | MKCFMEKEKMEQLHKKLWIQAGGDRENIPSIWEAPPSSEPPNNVSTNSEWEAP |
| | TQKDKFPKPCNWRKNEFKKWTKLASQGRGIVNFERDKISNHWIQYYRRIPHRK |
| | LLTALQLRANVYPTREFLARGRQDQYIKACRHCDADIESCAHIIGNCPVTQDA |
| | RIKRHNYICELLLEEAKKKDWVVFKEPHIRDSNKELYKPDLIFVKDARALVVD |
| | VTVRYEAAKSSLEEAAAEKVRKYKHLETEVRHLTNAKDVTFVGFPLGARGKWH |
| | QDNFKLLTELGLSKSRQVKMAETFSTVALFSSVDIVHMFASRARKSMVM |
| | (SEQ ID NO: 1664) |
| AAVS1 Right ZFP | MGIHGVPAAMAERPFQCRICMRNFSQSSNLARHIRTHTGEKPFACDICGRKFA |
| attached at v1 | RTDYLVDHTKIHTGSQKPFQCRICMRNFSYNTHLTRHIRTHTGEKPFACDICG |
| location of DBD of | RKFAQGYNLAGHTKIHLRGSSGSETPGTSESATPESCFGCLESISQIRTATRD |
| R2Tg with XTEN | KKDTVTREKHPKKPFQKWMKDRAIKKGNYLRFQRLFYLDRGKLAKIILDDIEC |
| linker | LSCDIPLSEIYSVFKTRWETTGSFKSLGDFKTYGKADNTAFRELITAKEIEKN |
| | VQEMSKGSAPGPDGITLGDVVKMDPEFSRTMEIFNLWLTTGKIPDMVRGCRTV |
| | LIPKSSKPDRLKDINNWRPITIGSILLRLFSRIVTARLSKACPLNPRQRGFIR |
| | AAGCSENLKLLQTIIWSAKREHRPLGVVFVDIAKAFDTVSHQHITHALQQREV |
| | DPHIVGLVSNMYENISTYITTKRNTHTDKIQIRVGVKQGDPMSPLLFNLAMDP |
| | LLCKLEESGKGYHRGQSSITAMAFADDLVLLSDSWENMNTNISILETFCNLTG |
| | LKTQGQKCHGFYIKPTKDSYTINDCAAWTINGTPLNMIDPGESEKYLGLQFDP |
| | WIGIARSGLSTKLDFWLQRIDQAPLKPLQKTDILKTYTIPRLIYIADHSEVKT |
| | ALLETLDQKIRTAVKEWLHLPPCTCDAILYSSTRDGGLGITKLAGLIPSVQAR |
| | RLHRIAQSSDDTMKCFMEKEKMEQLHKKLWIQAGGDRENIPSIWEAPPSSEPP |
| | NNVSTNSEWEAPTQKDKFPKPCNWRKNEFKKWTKLASQGRGIVNFERDKISNH |
| | WIQYYRRIPHRKLLTALQLRANVYPTREFLARGRQDQYIKACRHCDADIESCA |
| | HIIGNCPVTQDARIKRHNYICELLLEEAKKKDWVVFKEPHIRDSNKELYKPDL |
| | IFVKDARALVVDVTVRYEAAKSSLEEAAAEKVRKYKHLETEVRHLTNAKDVTF |
| | VGFPLGARGKWHQDNFKLLTELGLSKSRQVKMAETFSTVALFSSVDIVHMFAS |
| | RARKSMVM (SEQ ID NO: 1665) |
| AAVS1 Left and | MGIHGVPAAMAERPFQCRICMRNFSYNWHLQRHIRTHTGEKPFACDICGRKFA |
| Right ZFP | RSDHLTTHTKIHTGSQKPFQCRICMRNFSHNYARDCHIRTHTGEKPFACDICG |
| (separated by XTEN | RKFAQNSTRIGHTKIHLRGSSGSETPGTSESATPESGIHGVPAAMAERPFQCR |
| linker) attached at | ICMRNFSQSSNLARHIRTHTGEKPFACDICGRKFARTDYLVDHTKIHTGSQKP |
| v2 location of DBD | FQCRICMRNFSYNTHLTRHIRTHTGEKPFACDICGRKFAQGYNLAGHTKIHLR |
| of R2Tg with 3GS | GSGGGSTATRDKKDTVTREKHPKKPFQKWMKDRAIKKGNYLRFQRLFYLDRGK |
| linker (SEQ ID NO: | LAKIILDDIECLSCDIPLSEIYSVFKTRWETTGSFKSLGDFKTYGKADNTAFR |
| 1024) | ELITAKEIEKNVQEMSKGSAPGPDGITLGDVVKMDPEFSRTMEIFNLWLTTGK |
| | IPDMVRGCRTVLIPKSSKPDRLKDINNWRPITIGSILLRLFSRIVTARLSKAC |
| | PLNPRQRGFIRAAGCSENLKLLQTIIWSAKREHRPLGVVFVDIAKAFDTVSHQ |
| | HIIHALQQREVDPHIVGLVSNMYENISTYITTKRNTHTDKIQIRVGVKQGDPM |
| | SPLLFNLAMDPLLCKLEESGKGYHRGQSSITAMAFADDLVLLSDSWENMNTNI |
| | SILETFCNLTGLKTQGQKCHGFYIKPTKDSYTINDCAAWTINGTPLNMIDPGE |
| | SEKYLGLQFDPWIGIARSGLSTKLDFWLQRIDQAPLKPLQKTDILKTYTIPRL |
| | IYIADHSEVKTALLETLDQKIRTAVKEWLHLPPCTCDAILYSSTRDGGLGITK |
| | LAGLIPSVQARRLHRIAQSSDDTMKCFMEKEKMEQLHKKLWIQAGGDRENIPS |
| | IWEAPPSSEPPNNVSTNSEWEAPTQKDKFPKPCNWRKNEFKKWTKLASQGRGI |
| | VNFERDKISNHWIQYYRRIPHRKLLTALQLRANVYPTREFLARGRQDQYIKAC |
| | RHCDADIESCAHIIGNCPVTQDARIKRHNYICELLLEEAKKKDWVVFKEPHIR |
| | DSNKELYKPDLIFVKDARALVVDVTVRYEAAKSSLEEAAAEKVRKYKHLETEV |
| | RHLTNAKDVTFVGFPLGARGKWHQDNFKLLTELGLSKSRQVKMAETFSTVALF |
| | SSVDIVHMFASRARKSMVM (SEQ ID NO: 1666) |
| AAVS1 Left and | MGIHGVPAAMAERPFQCRICMRNFSYNWHLQRHIRTHTGEKPFACDICGRKFA |
| Right ZFP | RSDHLTTHTKIHTGSQKPFQCRICMRNFSHNYARDCHIRTHTGEKPFACDICG |
| (separated by XTEN | RKFAQNSTRIGHTKIHLRGSSGSETPGTSESATPESGIHGVPAAMAERPFQCR |
| linker) attached at | ICMRNFSQSSNLARHIRTHTGEKPFACDICGRKFARTDYLVDHTKIHTGSQKP |
| v2 location of DBD | FQCRICMRNFSYNTHLTRHIRTHTGEKPFACDICGRKFAQGYNLAGHTKIHLR |
| of R2Tg with XTEN | GSSGSETPGTSESATPESTATRDKKDTVTREKHPKKPFQKWMKDRAIKKGNYL |
| linker | RFQRLFYLDRGKLAKIILDDIECLSCDIPLSEIYSVFKTRWETTGSFKSLGDF |
| | KTYGKADNTAFRELITAKEIEKNVQEMSKGSAPGPDGITLGDVVKMDPEFSRT |
| | MEIFNLWLTTGKIPDMVRGCRTVLIPKSSKPDRLKDINNWRPITIGSILLRLF |
| | SRIVTARLSKACPLNPRQRGFIRAAGCSENLKLLQTIIWSAKREHRPLGVVFV |
| | DIAKAFDTVSHQHIIHALQQREVDPHIVGLVSNMYENISTYITTKRNTHTDKI |
| | QIRVGVKQGDPMSPLLFNLAMDPLLCKLEESGKGYHRGQSSITAMAFADDLVL |
| | LSDSWENMNTNISILETFCNLTGLKTQGQKCHGFYIKPTKDSYTINDCAAWTI |
| | NGTPLNMIDPGESEKYLGLQFDPWIGIARSGLSTKLDFWLQRIDQAPLKPLQK |
| | TDILKTYTIPRLIYIADHSEVKTALLETLDQKIRTAVKEWLHLPPCTCDAILY |
| | SSTRDGGLGITKLAGLIPSVQARRLHRIAQSSDDTMKCFMEKEKMEQLHKKLW |
| | IQAGGDRENIPSIWEAPPSSEPPNNVSTNSEWEAPTQKDKFPKPCNWRKNEFK |
| | KWTKLASQGRGIVNFERDKISNHWIQYYRRIPHRKLLTALQLRANVYPTREFL |
| | ARGRQDQYIKACRHCDADIESCAHIIGNCPVTQDARIKRHNYICELLLEEAKK |
| | KDWVVFKEPHIRDSNKELYKPDLIFVKDARALVVDVTVRYEAAKSSLEEAAAE |
| | KVRKYKHLETEVRHLTNAKDVTFVGFPLGARGKWHQDNFKLLTELGLSKSRQV |
| | KMAETFSTVALFSSVDIVHMFASRARKSMVM (SEQ ID NO: 1667) |
| AAVS1 Left ZFP | MGIHGVPAAMAERPFQCRICMRNFSYNWHLQRHIRTHTGEKPFACDICGRKFA |
| attached to N- | RSDHLTTHTKIHTGSQKPFQCRICMRNFSHNYARDCHIRTHTGEKPFACDICG |
| terminus of R2Tg | RKFAQNSTRIGHTKIHLRGSSGSETPGTSESATPESASCPKPGPPVSAGAMSL |
| with XTEN linker | ESGLTTHSVLAIERGPNSLANSGSDFGGGGLGLPLRLLRVSVGTQTSRSDWVD |
| | LVSWSHPGPTSKSQQVDLVSLFPKHRVDLLSKNDQVDLVAQFLPSKFPPNLAE |
| | NDLALLVNLEFYRSDLHVYECVHFAAHWEGLSGLPEVYEQLAPQPCVGETLHS |
| | SLPRDSELFVPEEGSSEKESEDAPKTSPPTPGKHGLEQTGEEKVMVTVPDKNP |
| | PCPCCGTRVNSVLNLIEHLKVSHGKRGVCFRCAKCGKENSNYHSVVCHFPKCR |
| | GPETEKAPAGEWICEVCNRDFTTKIGLGQHKRLAHPAVRNQERIVASQPKETS |
| | NRGAHKRCWTKEEEELLIRLEAQFEGNKNINKLIAEHITTKTAKQISDKRRLL |
| | SRKPAEEPREEPGTCHHTRRAAASLRTEPEMSHHAQAEDRDNGPGRRPLPGRA |
| | AAGGRTMDEIRRHPDKGNGQQRPTKQKSEEQLQAYYKKTLEERLSAGALNTFP |
| | RAFKQVMEGRDIKLVINQTAQDCFGCLESISQIRTATRDKKDTVTREKHPKKP |
| | FQKWMKDRAIKKGNYLRFQRLFYLDRGKLAKIILDDIECLSCDIPLSEIYSVF |
| | KTRWETTGSFKSLGDFKTYGKADNTAFRELITAKEIEKNVQEMSKGSAPGPDG |
| | ITLGDVVKMDPEFSRTMEIFNLWLTTGKIPDMVRGCRTVLIPKSSKPDRLKDI |
| | NNWRPITIGSILLRLFSRIVTARLSKACPLNPRQRGFIRAAGCSENLKLLQTI |
| | IWSAKREHRPLGVVFVDIAKAFDTVSHQHITHALQQREVDPHIVGLVSNMYEN |
| | ISTYITTKRNTHTDKIQIRVGVKQGDPMSPLLFNLAMDPLLCKLEESGKGYHR |
| | GQSSITAMAFADDLVLLSDSWENMNTNISILETFCNLTGLKTQGQKCHGFYIK |
| | PTKDSYTINDCAAWTINGTPLNMIDPGESEKYLGLQFDPWIGIARSGLSTKLD |
| | FWLQRIDQAPLKPLQKTDILKTYTIPRLIYIADHSEVKTALLETLDQKIRTAV |
| | KEWLHLPPCTCDAILYSSTRDGGLGITKLAGLIPSVQARRLHRIAQSSDDTMK |
| | CFMEKEKMEQLHKKLWIQAGGDRENIPSIWEAPPSSEPPNNVSTNSEWEAPTQ |
| | KDKFPKPCNWRKNEFKKWTKLASQGRGIVNFERDKISNHWIQYYRRIPHRKLL |
| | TALQLRANVYPTREFLARGRQDQYIKACRHCDADIESCAHIIGNCPVTQDARI |
| | VRYEAAKSSLEEAAAEKVRKYKHLETEVRHLTNAKDVTFVGFPLGARGKWHQD |
| | NFKLLTELGLSKSRQVKMAETFSTVALFSSVDIVHMFASRARKSMVM (SEQ |
| | ID NO: 1668) |
| AAVS1 Right ZFP | MGIHGVPAAMAERPFQCRICMRNFSQSSNLARHIRTHTGEKPFACDICGRKFA |
| attached to N- | RTDYLVDHTKIHTGSQKPFQCRICMRNFSYNTHLTRHIRTHTGEKPFACDICG |
| terminus of R2Tg | RKFAQGYNLAGHTKIHLRGSSGSETPGTSESATPESASCPKPGPPVSAGAMSL |
| with XTEN linker | ESGLTTHSVLAIERGPNSLANSGSDFGGGGLGLPLRLLRVSVGTQTSRSDWVD |
| | LVSWSHPGPTSKSQQVDLVSLFPKHRVDLLSKNDQVDLVAQFLPSKFPPNLAE |
| | NDLALLVNLEFYRSDLHVYECVHFAAHWEGLSGLPEVYEQLAPQPCVGETLHS |
| | SLPRDSELFVPEEGSSEKESEDAPKTSPPTPGKHGLEQTGEEKVMVTVPDKNP |
| | PCPCCGTRVNSVLNLIEHLKVSHGKRGVCFRCAKCGKENSNYHSVVCHFPKCR |
| | GPETEKAPAGEWICEVCNRDFTTKIGLGQHKRLAHPAVRNQERIVASQPKETS |
| | NRGAHKRCWTKEEEELLIRLEAQFEGNKNINKLIAEHITTKTAKQISDKRRLL |
| | SRKPAEEPREEPGTCHHTRRAAASLRTEPEMSHHAQAEDRDNGPGRRPLPGRA |
| | AAGGRTMDEIRRHPDKGNGQQRPTKQKSEEQLQAYYKKTLEERLSAGALNTFP |
| | RAFKQVMEGRDIKLVINQTAQDCFGCLESISQIRTATRDKKDTVTREKHPKKP |
| | FQKWMKDRAIKKGNYLRFQRLFYLDRGKLAKIILDDIECLSCDIPLSEIYSVF |
| | KTRWETTGSFKSLGDFKTYGKADNTAFRELITAKEIEKNVQEMSKGSAPGPDG |
| | ITLGDVVKMDPEFSRTMEIFNLWLTTGKIPDMVRGCRTVLIPKSSKPDRLKDI |
| | NNWRPITIGSILLRLFSRIVTARLSKACPLNPRQRGFIRAAGCSENLKLLQTI |
| | IWSAKREHRPLGVVFVDIAKAFDTVSHQHIIHALQQREVDPHIVGLVSNMYEN |
| | ISTYITTKRNTHTDKIQIRVGVKQGDPMSPLLFNLAMDPLLCKLEESGKGYHR |
| | GQSSITAMAFADDLVLLSDSWENMNTNISILETFCNLTGLKTQGQKCHGFYIK |
| | PTKDSYTINDCAAWTINGTPLNMIDPGESEKYLGLQFDPWIGIARSGLSTKLD |
| | FWLQRIDQAPLKPLQKTDILKTYTIPRLIYIADHSEVKTALLETLDQKIRTAV |
| | KEWLHLPPCTCDAILYSSTRDGGLGITKLAGLIPSVQARRLHRIAQSSDDTMK |
| | CFMEKEKMEQLHKKLWIQAGGDRENIPSIWEAPPSSEPPNNVSTNSEWEAPTQ |
| | KDKFPKPCNWRKNEFKKWTKLASQGRGIVNFERDKISNHWIQYYRRIPHRKLL |
| | TALQLRANVYPTREFLARGRQDQYIKACRHCDADIESCAHIIGNCPVTQDARI |
| | VRYEAAKSSLEEAAAEKVRKYKHLETEVRHLTNAKDVTFVGFPLGARGKWHQD |
| | NFKLLTELGLSKSRQVKMAETFSTVALFSSVDIVHMFASRARKSMVM (SEQ |
| | ID NO: 1669) |
| AAVS1 Left and | MGIHGVPAAMAERPFQCRICMRNFSYNWHLQRHIRTHTGEKPFACDICGRKFA |
| Right ZFP attached | RSDHLTTHTKIHTGSQKPFQCRICMRNFSHNYARDCHIRTHTGEKPFACDICG |
| to N-terminus of | RKFAQNSTRIGHTKIHLRGSSGSETPGTSESATPESGIHGVPAAMAERPFQCR |
| R2Tg with XTEN | ICMRNFSQSSNLARHIRTHTGEKPFACDICGRKFARTDYLVDHTKIHTGSQKP |
| linker | FQCRICMRNFSYNTHLTRHIRTHTGEKPFACDICGRKFAQGYNLAGHTKIHLR |
| | GSSGSETPGTSESATPESASCPKPGPPVSAGAMSLESGLTTHSVLAIERGPNS |
| | LANSGSDFGGGGLGLPLRLLRVSVGTQTSRSDWVDLVSWSHPGPTSKSQQVDL |
| | VSLFPKHRVDLLSKNDQVDLVAQFLPSKFPPNLAENDLALLVNLEFYRSDLHV |
| | YECVHFAAHWEGLSGLPEVYEQLAPQPCVGETLHSSLPRDSELFVPEEGSSEK |
| | ESEDAPKTSPPTPGKHGLEQTGEEKVMVTVPDKNPPCPCCGTRVNSVLNLIEH |
| | LKVSHGKRGVCFRCAKCGKENSNYHSVVCHFPKCRGPETEKAPAGEWICEVCN |
| | RDFTTKIGLGQHKRLAHPAVRNQERIVASQPKETSNRGAHKRCWTKEEEELLI |
| | RLEAQFEGNKNINKLIAEHITTKTAKQISDKRRLLSRKPAEEPREEPGTCHHT |
| | RRAAASLRTEPEMSHHAQAEDRDNGPGRRPLPGRAAAGGRTMDEIRRHPDKGN |
| | GQQRPTKQKSEEQLQAYYKKTLEERLSAGALNTFPRAFKQVMEGRDIKLVINQ |
| | TAQDCFGCLESISQIRTATRDKKDTVTREKHPKKPFQKWMKDRAIKKGNYLRF |
| | QRLFYLDRGKLAKIILDDIECLSCDIPLSEIYSVFKTRWETTGSFKSLGDFKT |
| | YGKADNTAFRELITAKEIEKNVQEMSKGSAPGPDGITLGDVVKMDPEFSRTME |
| | IFNLWLTTGKIPDMVRGCRTVLIPKSSKPDRLKDINNWRPITIGSILLRLFSR |
| | IVTARLSKACPLNPRQRGFIRAAGCSENLKLLQTIIWSAKREHRPLGVVFVDI |
| | AKAFDTVSHQHIIHALQQREVDPHIVGLVSNMYENISTYITTKRNTHTDKIQI |
| | RVGVKQGDPMSPLLFNLAMDPLLCKLEESGKGYHRGQSSITAMAFADDLVLLS |
| | DSWENMNTNISILETFCNLTGLKTQGQKCHGFYIKPTKDSYTINDCAAWTING |
| | TPLNMIDPGESEKYLGLQFDPWIGIARSGLSTKLDFWLQRIDQAPLKPLQKTD |
| | ILKTYTIPRLIYIADHSEVKTALLETLDQKIRTAVKEWLHLPPCTCDAILYSS |
| | TRDGGLGITKLAGLIPSVQARRLHRIAQSSDDTMKCFMEKEKMEQLHKKLWIQ |
| | AGGDRENIPSIWEAPPSSEPPNNVSTNSEWEAPTQKDKFPKPCNWRKNEFKKW |
| | TKLASQGRGIVNFERDKISNHWIQYYRRIPHRKLLTALQLRANVYPTREFLAR |
| | GRQDQYIKACRHCDADIESCAHIIGNCPVTQDARIKRHNYICELLLEEAKKKD |
| | RKYKHLETEVRHLTNAKDVTFVGFPLGARGKWHQDNFKLLTELGLSKSRQVKM |
| | AETFSTVALFSSVDIVHMFASRARKSMVM (SEQ ID NO: 1670) |
| AAVS1 Left ZFP | MGIHGVPAAMAERPFQCRICMRNFSYNWHLQRHIRTHTGEKPFACDICGRKFA |
| attached to N- | RSDHLTTHTKIHTGSQKPFQCRICMRNFSHNYARDCHIRTHTGEKPFACDICG |
| terminus of R2Tg | RKFAQNSTRIGHTKIHLRGSSGSETPGTSESATPESASCPKPGPPVSAGAMSL |
| containing DBD | ESGLTTHSVLAIERGPNSLANSGSDFGGGGLGLPLRLLRVSVGTQTSRSDWVD |
| inactivation | LVSWSHPGPTSKSQQVDLVSLFPKHRVDLLSKNDQVDLVAQFLPSKFPPNLAE |
| mutations with | NDLALLVNLEFYRSDLHVYECVHFAAHWEGLSGLPEVYEQLAPQPCVGETLHS |
| XTEN linker | SLPRDSELFVPEEGSSEKESEDAPKTSPPTPGKHGLEQTGEEKVMVTVPDKNP |
| | PSPSSGTRVNSVLNLIEHLKVSHGKRGVCFRCAKCGKENSNYHSVVCHFPKCR |
| | GPETEKAPAGEWISEVSNRDFTTKIGLGQHKRLAHPAVRNQERIVASQPKETS |
| | NRGAHKACATKEEEELLIRLEAQFEGNKNINKLIAEHITTKTAKQISDKRRLL |
| | SRKPAEEPREEPGTCHHTRRAAASLRTEPEMSHHAQAEDRDNGPGRRPLPGRA |
| | AAGGRTMDEIRRHPDKGNGQQRPTKQKSEEQLQAYYKKTLEERLSAGALNTFP |
| | RAFKQVMEGRDIKLVINQTAQDCFGCLESISQIRTATRDKKDTVTREKHPKKP |
| | FQKWMKDRAIKKGNYLRFQRLFYLDRGKLAKIILDDIECLSCDIPLSEIYSVF |
| | KTRWETTGSFKSLGDFKTYGKADNTAFRELITAKEIEKNVQEMSKGSAPGPDG |
| | ITLGDVVKMDPEFSRTMEIFNLWLTTGKIPDMVRGCRTVLIPKSSKPDRLKDI |
| | NNWRPITIGSILLRLFSRIVTARLSKACPLNPRQRGFIRAAGCSENLKLLQTI |
| | IWSAKREHRPLGVVFVDIAKAFDTVSHQHIIHALQQREVDPHIVGLVSNMYEN |
| | ISTYITTKRNTHTDKIQIRVGVKQGDPMSPLLFNLAMDPLLCKLEESGKGYHR |
| | GQSSITAMAFADDLVLLSDSWENMNTNISILETFCNLTGLKTQGQKCHGFYIK |
| | PTKDSYTINDCAAWTINGTPLNMIDPGESEKYLGLQFDPWIGIARSGLSTKLD |
| | FWLQRIDQAPLKPLQKTDILKTYTIPRLIYIADHSEVKTALLETLDQKIRTAV |
| | KEWLHLPPCTCDAILYSSTRDGGLGITKLAGLIPSVQARRLHRIAQSSDDTMK |
| | CFMEKEKMEQLHKKLWIQAGGDRENIPSIWEAPPSSEPPNNVSTNSEWEAPTQ |
| | KDKFPKPCNWRKNEFKKWTKLASQGRGIVNFERDKISNHWIQYYRRIPHRKLL |
| | TALQLRANVYPTREFLARGRQDQYIKACRHCDADIESCAHIIGNCPVTQDARI |
| | VRYEAAKSSLEEAAAEKVRKYKHLETEVRHLTNAKDVTFVGFPLGARGKWHQD |
| | NFKLLTELGLSKSRQVKMAETFSTVALFSSVDIVHMFASRARKSMVM (SEQ |
| | ID NO: 1671) |
| AAVS1 Right ZFP | MGIHGVPAAMAERPFQCRICMRNFSQSSNLARHIRTHTGEKPFACDICGRKFA |
| attached to N- | RTDYLVDHTKIHTGSQKPFQCRICMRNFSYNTHLTRHIRTHTGEKPFACDICG |
| terminus of R2Tg | RKFAQGYNLAGHTKIHLRGSSGSETPGTSESATPESASCPKPGPPVSAGAMSL |
| containing DBD | ESGLTTHSVLAIERGPNSLANSGSDFGGGGLGLPLRLLRVSVGTQTSRSDWVD |
| inactivation | LVSWSHPGPTSKSQQVDLVSLFPKHRVDLLSKNDQVDLVAQFLPSKFPPNLAE |
| mutations with | NDLALLVNLEFYRSDLHVYECVHFAAHWEGLSGLPEVYEQLAPQPCVGETLHS |
| XTEN linker | SLPRDSELFVPEEGSSEKESEDAPKTSPPTPGKHGLEQTGEEKVMVTVPDKNP |
| | PSPSSGTRVNSVLNLIEHLKVSHGKRGVCFRCAKCGKENSNYHSVVCHFPKCR |
| | GPETEKAPAGEWISEVSNRDFTTKIGLGQHKRLAHPAVRNQERIVASQPKETS |
| | NRGAHKACATKEEEELLIRLEAQFEGNKNINKLIAEHITTKTAKQISDKRRLL |
| | SRKPAEEPREEPGTCHHTRRAAASLRTEPEMSHHAQAEDRDNGPGRRPLPGRA |
| | AAGGRTMDEIRRHPDKGNGQQRPTKQKSEEQLQAYYKKTLEERLSAGALNTFP |
| | RAFKQVMEGRDIKLVINQTAQDCFGCLESISQIRTATRDKKDTVTREKHPKKP |
| | FQKWMKDRAIKKGNYLRFQRLFYLDRGKLAKIILDDIECLSCDIPLSEIYSVF |
| | KTRWETTGSFKSLGDFKTYGKADNTAFRELITAKEIEKNVQEMSKGSAPGPDG |
| | ITLGDVVKMDPEFSRTMEIFNLWLTTGKIPDMVRGCRTVLIPKSSKPDRLKDI |
| | NNWRPITIGSILLRLFSRIVTARLSKACPLNPRQRGFIRAAGCSENLKLLQTI |
| | IWSAKREHRPLGVVFVDIAKAFDTVSHQHIIHALQQREVDPHIVGLVSNMYEN |
| | ISTYITTKRNTHTDKIQIRVGVKQGDPMSPLLFNLAMDPLLCKLEESGKGYHR |
| | GQSSITAMAFADDLVLLSDSWENMNTNISILETFCNLTGLKTQGQKCHGFYIK |
| | PTKDSYTINDCAAWTINGTPLNMIDPGESEKYLGLQFDPWIGIARSGLSTKLD |
| | FWLQRIDQAPLKPLQKTDILKTYTIPRLIYIADHSEVKTALLETLDQKIRTAV |
| | KEWLHLPPCTCDAILYSSTRDGGLGITKLAGLIPSVQARRLHRIAQSSDDTMK |
| | CFMEKEKMEQLHKKLWIQAGGDRENIPSIWEAPPSSEPPNNVSTNSEWEAPTQ |
| | KDKFPKPCNWRKNEFKKWTKLASQGRGIVNFERDKISNHWIQYYRRIPHRKLL |
| | TALQLRANVYPTREFLARGRQDQYIKACRHCDADIESCAHIIGNCPVTQDARI |
| | KRHNYICELLLEEAKKKDWVVFKEPHIRDSNKELYKPDLIFVKDARALVVDVT |
| | VRYEAAKSSLEEAAAEKVRKYKHLETEVRHLTNAKDVTFVGFPLGARGKWHQD |
| | NFKLLTELGLSKSRQVKMAETFSTVALFSSVDIVHMFASRARKSMVM (SEQ |
| | ID NO: 1672) |
| AAVS1 Left and | MGIHGVPAAMAERPFQCRICMRNFSYNWHLQRHIRTHTGEKPFACDICGRKFA |
| Right ZFP attached | RSDHLTTHTKIHTGSQKPFQCRICMRNFSHNYARDCHIRTHTGEKPFACDICG |
| to N-terminus of | RKFAQNSTRIGHTKIHLRGSSGSETPGTSESATPESGIHGVPAAMAERPFQCR |
| R2Tg containing | ICMRNFSQSSNLARHIRTHTGEKPFACDICGRKFARTDYLVDHTKIHTGSQKP |
| DBD inactivation | FQCRICMRNFSYNTHLTRHIRTHTGEKPFACDICGRKFAQGYNLAGHTKIHLR |
| mutations with | GSSGSETPGTSESATPESASCPKPGPPVSAGAMSLESGLTTHSVLAIERGPNS |
| XTEN linker | LANSGSDFGGGGLGLPLRLLRVSVGTQTSRSDWVDLVSWSHPGPTSKSQQVDL |
| | VSLFPKHRVDLLSKNDQVDLVAQFLPSKFPPNLAENDLALLVNLEFYRSDLHV |
| | YECVHFAAHWEGLSGLPEVYEQLAPQPCVGETLHSSLPRDSELFVPEEGSSEK |
| | ESEDAPKTSPPTPGKHGLEQTGEEKVMVTVPDKNPPSPSSGTRVNSVLNLIEH |
| | LKVSHGKRGVCFRCAKCGKENSNYHSVVCHFPKCRGPETEKAPAGEWISEVSN |
| | RDFTTKIGLGQHKRLAHPAVRNQERIVASQPKETSNRGAHKACATKEEEELLI |
| | RLEAQFEGNKNINKLIAEHITTKTAKQISDKRRLLSRKPAEEPREEPGTCHHT |
| | RRAAASLRTEPEMSHHAQAEDRDNGPGRRPLPGRAAAGGRTMDEIRRHPDKGN |
| | GQQRPTKQKSEEQLQAYYKKTLEERLSAGALNTFPRAFKQVMEGRDIKLVINQ |
| | TAQDCFGCLESISQIRTATRDKKDTVTREKHPKKPFQKWMKDRAIKKGNYLRF |
| | QRLFYLDRGKLAKIILDDIECLSCDIPLSEIYSVFKTRWETTGSFKSLGDFKT |
| | YGKADNTAFRELITAKEIEKNVQEMSKGSAPGPDGITLGDVVKMDPEFSRTME |
| | IFNLWLTTGKIPDMVRGCRTVLIPKSSKPDRLKDINNWRPITIGSILLRLFSR |
| | IVTARLSKACPLNPRQRGFIRAAGCSENLKLLQTIIWSAKREHRPLGVVFVDI |
| | AKAFDTVSHQHIIHALQQREVDPHIVGLVSNMYENISTYITTKRNTHTDKIQI |
| | RVGVKQGDPMSPLLFNLAMDPLLCKLEESGKGYHRGQSSITAMAFADDLVLLS |
| | DSWENMNTNISILETFCNLTGLKTQGQKCHGFYIKPTKDSYTINDCAAWTING |
| | TPLNMIDPGESEKYLGLQFDPWIGIARSGLSTKLDFWLQRIDQAPLKPLQKTD |
| | ILKTYTIPRLIYIADHSEVKTALLETLDQKIRTAVKEWLHLPPCTCDAILYSS |
| | TRDGGLGITKLAGLIPSVQARRLHRIAQSSDDTMKCFMEKEKMEQLHKKLWIQ |
| | AGGDRENIPSIWEAPPSSEPPNNVSTNSEWEAPTQKDKFPKPCNWRKNEFKKW |
| | TKLASQGRGIVNFERDKISNHWIQYYRRIPHRKLLTALQLRANVYPTREFLAR |
| | GRQDQYIKACRHCDADIESCAHIIGNCPVTQDARIKRHNYICELLLEEAKKKD |
| | WVVFKEPHIRDSNKELYKPDLIFVKDARALVVDVTVRYEAAKSSLEEAAAEKV |
| | RKYKHLETEVRHLTNAKDVTFVGFPLGARGKWHQDNFKLLTELGLSKSRQVKM |
| | AETFSTVALFSSVDIVHMFASRARKSMVM (SEQ ID NO: 1673) |
| S. pyogenes Cas9 | MAPKKKRKVGIHGVPAADKKYSIGLDIGTNSVGWAVITDEYKVPSKKFKVLGN |
| attached at v2 | TDRHSIKKNLIGALLFDSGETAEATRLKRTARRRYTRRKNRICYLQEIFSNEM |
| location of DBD of | AKVDDSFFHRLEESFLVEEDKKHERHPIFGNIVDEVAYHEKYPTIYHLRKKLV |
| R2Tg with | DSTDKADLRLIYLALAHMIKFRGHFLIEGDLNPDNSDVDKLFIQLVQTYNQLF |
| XTEN33aa linker | EENPINASGVDAKAILSARLSKSRRLENLIAQLPGEKKNGLFGNLIALSLGLT |
| | PNFKSNFDLAEDAKLQLSKDTYDDDLDNLLAQIGDQYADLFLAAKNLSDAILL |
| | SDILRVNTEITKAPLSASMIKRYDEHHQDLTLLKALVRQQLPEKYKEIFFDQS |
| | KNGYAGYIDGGASQEEFYKFIKPILEKMDGTEELLVKLNREDLLRKQRTFDNG |
| | SIPHQIHLGELHAILRRQEDFYPFLKDNREKIEKILTFRIPYYVGPLARGNSR |
| | FAWMTRKSEETITPWNFEEVVDKGASAQSFIERMTNFDKNLPNEKVLPKHSLL |
| | YEYFTVYNELTKVKYVTEGMRKPAFLSGEQKKAIVDLLFKTNRKVTVKQLKED |
| | YFKKIECFDSVEISGVEDRFNASLGTYHDLLKIIKDKDFLDNEENEDILEDIV |
| | LTLTLFEDREMIEERLKTYAHLFDDKVMKQLKRRRYTGWGRLSRKLINGIRDK |
| | QSGKTILDFLKSDGFANRNFMQLIHDDSLTFKEDIQKAQVSGQGDSLHEHIAN |
| | LAGSPAIKKGILQTVKVVDELVKVMGRHKPENIVIEMARENQTTQKGQKNSRE |
| | RMKRIEEGIKELGSQILKEHPVENTQLQNEKLYLYYLQNGRDMYVDQELDINR |
| | LSDYDVDAIVPQSFLKDDSIDNKVLTRSDKNRGKSDNVPSEEVVKKMKNYWRQ |
| | LLNAKLITQRKFDNLTKAERGGLSELDKAGFIKRQLVETRQITKHVAQILDSR |
| | MNTKYDENDKLIREVKVITLKSKLVSDFRKDFQFYKVREINNYHHAHDAYLNA |
| | VVGTALIKKYPKLESEFVYGDYKVYDVRKMIAKSEQEIGKATAKYFFYSNIMN |
| | FFKTEITLANGEIRKRPLIETNGETGEIVWDKGRDFATVRKVLSMPQVNIVKK |
| | TEVQTGGFSKESILPKRNSDKLIARKKDWDPKKYGGFDSPTVAYSVLVVAKVE |
| | KGKSKKLKSVKELLGITIMERSSFEKNPIDFLEAKGYKEVKKDLIIKLPKYSL |
| | FELENGRKRMLASAGELQKGNELALPSKYVNFLYLASHYEKLKGSPEDNEQKQ |
| | LFVEQHKHYLDEIIEQISEFSKRVILADANLDKVLSAYNKHRDKPIREQAENI |
| | IHLFTLTNLGAPAAFKYFDTTIDRKRYTSTKEVLDATLIHQSITGLYETRIDL |
| | SQLGGDSGGSSGGSSGSETPGTSESATPESSGGSSGGSSTATRDKKDTVTREK |
| | HPKKPFQKWMKDRAIKKGNYLRFQRLFYLDRGKLAKIILDDIECLSCDIPLSE |
| | IYSVFKTRWETTGSFKSLGDFKTYGKADNTAFRELITAKEIEKNVQEMSKGSA |
| | PGPDGITLGDVVKMDPEFSRTMEIFNLWLTTGKIPDMVRGCRTVLIPKSSKPD |
| | RLKDINNWRPITIGSILLRLFSRIVTARLSKACPLNPRQRGFIRAAGCSENLK |
| | LLQTIIWSAKREHRPLGVVFVDIAKAFDTVSHQHIIHALQQREVDPHIVGLVS |
| | NMYENISTYITTKRNTHTDKIQIRVGVKQGDPMSPLLFNLAMDPLLCKLEESG |
| | KGYHRGQSSITAMAFADDLVLLSDSWENMNTNISILETFCNLTGLKTQGQKCH |
| | GFYIKPTKDSYTINDCAAWTINGTPLNMIDPGESEKYLGLQFDPWIGIARSGL |
| | STKLDFWLQRIDQAPLKPLQKTDILKTYTIPRLIYIADHSEVKTALLETLDQK |
| | IRTAVKEWLHLPPCTCDAILYSSTRDGGLGITKLAGLIPSVQARRLHRIAQSS |
| | DDTMKCFMEKEKMEQLHKKLWIQAGGDRENIPSIWEAPPSSEPPNNVSTNSEW |
| | EAPTQKDKFPKPCNWRKNEFKKWTKLASQGRGIVNFERDKISNHWIQYYRRIP |
| | HRKLLTALQLRANVYPTREFLARGRQDQYIKACRHCDADIESCAHIIGNCPVT |
| | QDARIKRHNYICELLLEEAKKKDWVVFKEPHIRDSNKELYKPDLIFVKDARAL |
| | VVDVTVRYEAAKSSLEEAAAEKVRKYKHLETEVRHLTNAKDVTFVGFPLGARG |
| | KWHQDNFKLLTELGLSKSRQVKMAETFSTVALFSSVDIVHMFASRARKSMVM |
| | (SEQ ID NO: 1674) |
| S. pyogenes Cas9 | MAPKKKRKVGIHGVPAADKKYSIGLAIGTNSVGWAVITDEYKVPSKKFKVLGN |
| containing catalytic | TDRHSIKKNLIGALLFDSGETAEATRLKRTARRRYTRRKNRICYLQEIFSNEM |
| mutations (dCas9) | AKVDDSFFHRLEESFLVEEDKKHERHPIFGNIVDEVAYHEKYPTIYHLRKKLV |
| attached at v2 | DSTDKADLRLIYLALAHMIKFRGHFLIEGDLNPDNSDVDKLFIQLVQTYNQLF |
| location of DBD of | EENPINASGVDAKAILSARLSKSRRLENLIAQLPGEKKNGLFGNLIALSLGLT |
| R2Tg with | PNFKSNFDLAEDAKLQLSKDTYDDDLDNLLAQIGDQYADLFLAAKNLSDAILL |
| XTEN33aa linker | SDILRVNTEITKAPLSASMIKRYDEHHQDLTLLKALVRQQLPEKYKEIFFDQS |
| | KNGYAGYIDGGASQEEFYKFIKPILEKMDGTEELLVKLNREDLLRKQRTFDNG |
| | SIPHQIHLGELHAILRRQEDFYPFLKDNREKIEKILTFRIPYYVGPLARGNSR |
| | FAWMTRKSEETITPWNFEEVVDKGASAQSFIERMTNFDKNLPNEKVLPKHSLL |
| | YEYFTVYNELTKVKYVTEGMRKPAFLSGEQKKAIVDLLFKTNRKVTVKQLKED |
| | YFKKIECFDSVEISGVEDRFNASLGTYHDLLKIIKDKDFLDNEENEDILEDIV |
| | LTLTLFEDREMIEERLKTYAHLFDDKVMKQLKRRRYTGWGRLSRKLINGIRDK |
| | QSGKTILDFLKSDGFANRNFMQLIHDDSLTFKEDIQKAQVSGQGDSLHEHIAN |
| | LAGSPAIKKGILQTVKVVDELVKVMGRHKPENIVIEMARENQTTQKGQKNSRE |
| | RMKRIEEGIKELGSQILKEHPVENTQLQNEKLYLYYLQNGRDMYVDQELDINR |
| | LSDYDVDAIVPQSFLKDDSIDNKVLTRSDKNRGKSDNVPSEEVVKKMKNYWRQ |
| | LLNAKLITQRKFDNLTKAERGGLSELDKAGFIKRQLVETRQITKHVAQILDSR |
| | MNTKYDENDKLIREVKVITLKSKLVSDFRKDFQFYKVREINNYHHAHDAYLNA |
| | VVGTALIKKYPKLESEFVYGDYKVYDVRKMIAKSEQEIGKATAKYFFYSNIMN |
| | FFKTEITLANGEIRKRPLIETNGETGEIVWDKGRDFATVRKVLSMPQVNIVKK |
| | TEVQTGGFSKESILPKRNSDKLIARKKDWDPKKYGGFDSPTVAYSVLVVAKVE |
| | KGKSKKLKSVKELLGITIMERSSFEKNPIDFLEAKGYKEVKKDLIIKLPKYSL |
| | FELENGRKRMLASAGELQKGNELALPSKYVNFLYLASHYEKLKGSPEDNEQKQ |
| | LFVEQHKHYLDEIIEQISEFSKRVILADANLDKVLSAYNKHRDKPIREQAENI |
| | IHLFTLTNLGAPAAFKYFDTTIDRKRYTSTKEVLDATLIHQSITGLYETRIDL |
| | SQLGGDSGGSSGGSSGSETPGTSESATPESSGGSSGGSSTATRDKKDTVTREK |
| | HPKKPFQKWMKDRAIKKGNYLRFQRLFYLDRGKLAKIILDDIECLSCDIPLSE |
| | IYSVFKTRWETTGSFKSLGDFKTYGKADNTAFRELITAKEIEKNVQEMSKGSA |
| | PGPDGITLGDVVKMDPEFSRTMEIFNLWLTTGKIPDMVRGCRTVLIPKSSKPD |
| | LLQTIIWSAKREHRPLGVVFVDIAKAFDTVSHQHIIHALQQREVDPHIVGLVS |
| | NMYENISTYITTKRNTHTDKIQIRVGVKQGDPMSPLLFNLAMDPLLCKLEESG |
| | KGYHRGQSSITAMAFADDLVLLSDSWENMNTNISILETFCNLTGLKTQGQKCH |
| | GFYIKPTKDSYTINDCAAWTINGTPLNMIDPGESEKYLGLQFDPWIGIARSGL |
| | STKLDFWLQRIDQAPLKPLQKTDILKTYTIPRLIYIADHSEVKTALLETLDQK |
| | IRTAVKEWLHLPPCTCDAILYSSTRDGGLGITKLAGLIPSVQARRLHRIAQSS |
| | DDTMKCFMEKEKMEQLHKKLWIQAGGDRENIPSIWEAPPSSEPPNNVSTNSEW |
| | EAPTQKDKFPKPCNWRKNEFKKWTKLASQGRGIVNFERDKISNHWIQYYRRIP |
| | HRKLLTALQLRANVYPTREFLARGRQDQYIKACRHCDADIESCAHIIGNCPVT |
| | VVDVTVRYEAAKSSLEEAAAEKVRKYKHLETEVRHLTNAKDVTFVGFPLGARG |
| | KWHQDNFKLLTELGLSKSRQVKMAETFSTVALFSSVDIVHMFASRARKSMVM |
| | (SEQ ID NO: 1675) |
| S. pyogenes Cas9 | MAPKKKRKVGIHGVPAADKKYSIGLAIGTNSVGWAVITDEYKVPSKKFKVLGN |
| D10A nickase | TDRHSIKKNLIGALLFDSGETAEATRLKRTARRRYTRRKNRICYLQEIFSNEM |
| mutant attached at | AKVDDSFFHRLEESFLVEEDKKHERHPIFGNIVDEVAYHEKYPTIYHLRKKLV |
| v2 location of DBD | DSTDKADLRLIYLALAHMIKFRGHFLIEGDLNPDNSDVDKLFIQLVQTYNQLF |
| of R2Tg with | EENPINASGVDAKAILSARLSKSRRLENLIAQLPGEKKNGLFGNLIALSLGLT |
| XTEN33aa linker | PNFKSNFDLAEDAKLQLSKDTYDDDLDNLLAQIGDQYADLFLAAKNLSDAILL |
| | SDILRVNTEITKAPLSASMIKRYDEHHQDLTLLKALVRQQLPEKYKEIFFDQS |
| | KNGYAGYIDGGASQEEFYKFIKPILEKMDGTEELLVKLNREDLLRKQRTFDNG |
| | SIPHQIHLGELHAILRRQEDFYPFLKDNREKIEKILTFRIPYYVGPLARGNSR |
| | FAWMTRKSEETITPWNFEEVVDKGASAQSFIERMTNFDKNLPNEKVLPKHSLL |
| | YEYFTVYNELTKVKYVTEGMRKPAFLSGEQKKAIVDLLFKTNRKVTVKQLKED |
| | YFKKIECFDSVEISGVEDRFNASLGTYHDLLKIIKDKDFLDNEENEDILEDIV |
| | LTLTLFEDREMIEERLKTYAHLFDDKVMKQLKRRRYTGWGRLSRKLINGIRDK |
| | QSGKTILDFLKSDGFANRNFMQLIHDDSLTFKEDIQKAQVSGQGDSLHEHIAN |
| | LAGSPAIKKGILQTVKVVDELVKVMGRHKPENIVIEMARENQTTQKGQKNSRE |
| | RMKRIEEGIKELGSQILKEHPVENTQLQNEKLYLYYLQNGRDMYVDQELDINR |
| | LSDYDVDHIVPQSFLKDDSIDNKVLTRSDKNRGKSDNVPSEEVVKKMKNYWRQ |
| | LLNAKLITQRKFDNLTKAERGGLSELDKAGFIKRQLVETRQITKHVAQILDSR |
| | MNTKYDENDKLIREVKVITLKSKLVSDFRKDFQFYKVREINNYHHAHDAYLNA |
| | VVGTALIKKYPKLESEFVYGDYKVYDVRKMIAKSEQEIGKATAKYFFYSNIMN |
| | FFKTEITLANGEIRKRPLIETNGETGEIVWDKGRDFATVRKVLSMPQVNIVKK |
| | TEVQTGGFSKESILPKRNSDKLIARKKDWDPKKYGGFDSPTVAYSVLVVAKVE |
| | KGKSKKLKSVKELLGITIMERSSFEKNPIDFLEAKGYKEVKKDLIIKLPKYSL |
| | FELENGRKRMLASAGELQKGNELALPSKYVNFLYLASHYEKLKGSPEDNEQKQ |
| | LFVEQHKHYLDEIIEQISEFSKRVILADANLDKVLSAYNKHRDKPIREQAENI |
| | IHLFTLTNLGAPAAFKYFDTTIDRKRYTSTKEVLDATLIHQSITGLYETRIDL |
| | SQLGGDSGGSSGGSSGSETPGTSESATPESSGGSSGGSSTATRDKKDTVTREK |
| | HPKKPFQKWMKDRAIKKGNYLRFQRLFYLDRGKLAKIILDDIECLSCDIPLSE |
| | IYSVFKTRWETTGSFKSLGDFKTYGKADNTAFRELITAKEIEKNVQEMSKGSA |
| | PGPDGITLGDVVKMDPEFSRTMEIFNLWLTTGKIPDMVRGCRTVLIPKSSKPD |
| | RLKDINNWRPITIGSILLRLFSRIVTARLSKACPLNPRQRGFIRAAGCSENLK |
| | LLQTIIWSAKREHRPLGVVFVDIAKAFDTVSHQHIIHALQQREVDPHIVGLVS |
| | NMYENISTYITTKRNTHTDKIQIRVGVKQGDPMSPLLFNLAMDPLLCKLEESG |
| | KGYHRGQSSITAMAFADDLVLLSDSWENMNTNISILETFCNLTGLKTQGQKCH |
| | GFYIKPTKDSYTINDCAAWTINGTPLNMIDPGESEKYLGLQFDPWIGIARSGL |
| | STKLDFWLQRIDQAPLKPLQKTDILKTYTIPRLIYIADHSEVKTALLETLDQK |
| | IRTAVKEWLHLPPCTCDAILYSSTRDGGLGITKLAGLIPSVQARRLHRIAQSS |
| | DDTMKCFMEKEKMEQLHKKLWIQAGGDRENIPSIWEAPPSSEPPNNVSTNSEW |
| | EAPTQKDKFPKPCNWRKNEFKKWTKLASQGRGIVNFERDKISNHWIQYYRRIP |
| | HRKLLTALQLRANVYPTREFLARGRQDQYIKACRHCDADIESCAHIIGNCPVT |
| | QDARIKRHNYICELLLEEAKKKDWVVFKEPHIRDSNKELYKPDLIFVKDARAL |
| | VVDVTVRYEAAKSSLEEAAAEKVRKYKHLETEVRHLTNAKDVTFVGFPLGARG |
| | KWHQDNFKLLTELGLSKSRQVKMAETFSTVALFSSVDIVHMFASRARKSMVM |
| | (SEQ ID NO: 1676) |
| S. pyogenes Cas9 | MAPKKKRKVGIHGVPAADKKYSIGLDIGTNSVGWAVITDEYKVPSKKFKVLGN |
| N863A nickase | TDRHSIKKNLIGALLFDSGETAEATRLKRTARRRYTRRKNRICYLQEIFSNEM |
| mutant attached at | AKVDDSFFHRLEESFLVEEDKKHERHPIFGNIVDEVAYHEKYPTIYHLRKKLV |
| v2 location of DBD | DSTDKADLRLIYLALAHMIKFRGHFLIEGDLNPDNSDVDKLFIQLVQTYNQLF |
| of R2Tg with | EENPINASGVDAKAILSARLSKSRRLENLIAQLPGEKKNGLFGNLIALSLGLT |
| XTEN33aa linker | PNFKSNFDLAEDAKLQLSKDTYDDDLDNLLAQIGDQYADLFLAAKNLSDAILL |
| | SDILRVNTEITKAPLSASMIKRYDEHHQDLTLLKALVRQQLPEKYKEIFFDQS |
| | KNGYAGYIDGGASQEEFYKFIKPILEKMDGTEELLVKLNREDLLRKQRTFDNG |
| | SIPHQIHLGELHAILRRQEDFYPFLKDNREKIEKILTFRIPYYVGPLARGNSR |
| | FAWMTRKSEETITPWNFEEVVDKGASAQSFIERMTNFDKNLPNEKVLPKHSLL |
| | YEYFTVYNELTKVKYVTEGMRKPAFLSGEQKKAIVDLLFKTNRKVTVKQLKED |
| | YFKKIECFDSVEISGVEDRFNASLGTYHDLLKIIKDKDFLDNEENEDILEDIV |
| | LTLTLFEDREMIEERLKTYAHLFDDKVMKQLKRRRYTGWGRLSRKLINGIRDK |
| | QSGKTILDFLKSDGFANRNFMQLIHDDSLTFKEDIQKAQVSGQGDSLHEHIAN |
| | LAGSPAIKKGILQTVKVVDELVKVMGRHKPENIVIEMARENQTTQKGQKNSRE |
| | RMKRIEEGIKELGSQILKEHPVENTQLQNEKLYLYYLQNGRDMYVDQELDINR |
| | LSDYDVDHIVPQSFLKDDSIDNKVLTRSDKARGKSDNVPSEEVVKKMKNYWRQ |
| | LLNAKLITQRKFDNLTKAERGGLSELDKAGFIKRQLVETRQITKHVAQILDSR |
| | MNTKYDENDKLIREVKVITLKSKLVSDFRKDFQFYKVREINNYHHAHDAYLNA |
| | VVGTALIKKYPKLESEFVYGDYKVYDVRKMIAKSEQEIGKATAKYFFYSNIMN |
| | FFKTEITLANGEIRKRPLIETNGETGEIVWDKGRDFATVRKVLSMPQVNIVKK |
| | TEVQTGGFSKESILPKRNSDKLIARKKDWDPKKYGGFDSPTVAYSVLVVAKVE |
| | KGKSKKLKSVKELLGITIMERSSFEKNPIDFLEAKGYKEVKKDLIIKLPKYSL |
| | FELENGRKRMLASAGELQKGNELALPSKYVNFLYLASHYEKLKGSPEDNEQKQ |
| | LFVEQHKHYLDEIIEQISEFSKRVILADANLDKVLSAYNKHRDKPIREQAENI |
| | IHLFTLTNLGAPAAFKYFDTTIDRKRYTSTKEVLDATLIHQSITGLYETRIDL |
| | SQLGGDSGGSSGGSSGSETPGTSESATPESSGGSSGGSSTATRDKKDTVTREK |
| | HPKKPFQKWMKDRAIKKGNYLRFQRLFYLDRGKLAKIILDDIECLSCDIPLSE |
| | IYSVFKTRWETTGSFKSLGDFKTYGKADNTAFRELITAKEIEKNVQEMSKGSA |
| | PGPDGITLGDVVKMDPEFSRTMEIFNLWLTTGKIPDMVRGCRTVLIPKSSKPD |
| | LLQTIIWSAKREHRPLGVVFVDIAKAFDTVSHQHIIHALQQREVDPHIVGLVS |
| | NMYENISTYITTKRNTHTDKIQIRVGVKQGDPMSPLLFNLAMDPLLCKLEESG |
| | KGYHRGQSSITAMAFADDLVLLSDSWENMNTNISILETFCNLTGLKTQGQKCH |
| | GFYIKPTKDSYTINDCAAWTINGTPLNMIDPGESEKYLGLQFDPWIGIARSGL |
| | STKLDFWLQRIDQAPLKPLQKTDILKTYTIPRLIYIADHSEVKTALLETLDQK |
| | IRTAVKEWLHLPPCTCDAILYSSTRDGGLGITKLAGLIPSVQARRLHRIAQSS |
| | DDTMKCFMEKEKMEQLHKKLWIQAGGDRENIPSIWEAPPSSEPPNNVSTNSEW |
| | EAPTQKDKFPKPCNWRKNEFKKWTKLASQGRGIVNFERDKISNHWIQYYRRIP |
| | HRKLLTALQLRANVYPTREFLARGRQDQYIKACRHCDADIESCAHIIGNCPVT |
| | QDARIKRHNYICELLLEEAKKKDWVVFKEPHIRDSNKELYKPDLIFVKDARAL |
| | VVDVTVRYEAAKSSLEEAAAEKVRKYKHLETEVRHLTNAKDVTFVGFPLGARG |
| | KWHQDNFKLLTELGLSKSRQVKMAETFSTVALFSSVDIVHMFASRARKSMVM |
| | (SEQ ID NO: 1677) |
| S. pyogenes Cas9 | MAPKKKRKVGIHGVPAADKKYSIGLAIGTNSVGWAVITDEYKVPSKKFKVLGN |
| D10A nickase | TDRHSIKKNLIGALLFDSGETAEATRLKRTARRRYTRRKNRICYLQEIFSNEM |
| mutant attached at | AKVDDSFFHRLEESFLVEEDKKHERHPIFGNIVDEVAYHEKYPTIYHLRKKLV |
| v2 location of DBD | DSTDKADLRLIYLALAHMIKFRGHFLIEGDLNPDNSDVDKLFIQLVQTYNQLF |
| of R2Tg containing | EENPINASGVDAKAILSARLSKSRRLENLIAQLPGEKKNGLFGNLIALSLGLT |
| EN mutation with | PNFKSNFDLAEDAKLQLSKDTYDDDLDNLLAQIGDQYADLFLAAKNLSDAILL |
| XTEN33aa linker | SDILRVNTEITKAPLSASMIKRYDEHHQDLTLLKALVRQQLPEKYKEIFFDQS |
| | KNGYAGYIDGGASQEEFYKFIKPILEKMDGTEELLVKLNREDLLRKQRTFDNG |
| | SIPHQIHLGELHAILRRQEDFYPFLKDNREKIEKILTFRIPYYVGPLARGNSR |
| | FAWMTRKSEETITPWNFEEVVDKGASAQSFIERMTNFDKNLPNEKVLPKHSLL |
| | YEYFTVYNELTKVKYVTEGMRKPAFLSGEQKKAIVDLLFKTNRKVTVKQLKED |
| | YFKKIECFDSVEISGVEDRFNASLGTYHDLLKIIKDKDFLDNEENEDILEDIV |
| | LTLTLFEDREMIEERLKTYAHLFDDKVMKQLKRRRYTGWGRLSRKLINGIRDK |
| | QSGKTILDFLKSDGFANRNFMQLIHDDSLTFKEDIQKAQVSGQGDSLHEHIAN |
| | LAGSPAIKKGILQTVKVVDELVKVMGRHKPENIVIEMARENQTTQKGQKNSRE |
| | LSDYDVDHIVPQSFLKDDSIDNKVLTRSDKNRGKSDNVPSEEVVKKMKNYWRQ |
| | LLNAKLITQRKFDNLTKAERGGLSELDKAGFIKRQLVETRQITKHVAQILDSR |
| | MNTKYDENDKLIREVKVITLKSKLVSDFRKDFQFYKVREINNYHHAHDAYLNA |
| | VVGTALIKKYPKLESEFVYGDYKVYDVRKMIAKSEQEIGKATAKYFFYSNIMN |
| | FFKTEITLANGEIRKRPLIETNGETGEIVWDKGRDFATVRKVLSMPQVNIVKK |
| | TEVQTGGFSKESILPKRNSDKLIARKKDWDPKKYGGFDSPTVAYSVLVVAKVE |
| | KGKSKKLKSVKELLGITIMERSSFEKNPIDFLEAKGYKEVKKDLIIKLPKYSL |
| | FELENGRKRMLASAGELQKGNELALPSKYVNFLYLASHYEKLKGSPEDNEQKQ |
| | LFVEQHKHYLDEIIEQISEFSKRVILADANLDKVLSAYNKHRDKPIREQAENI |
| | IHLFTLTNLGAPAAFKYFDTTIDRKRYTSTKEVLDATLIHQSITGLYETRIDL |
| | SQLGGDSGGSSGGSSGSETPGTSESATPESSGGSSGGSSTATRDKKDTVTREK |
| | HPKKPFQKWMKDRAIKKGNYLRFQRLFYLDRGKLAKIILDDIECLSCDIPLSE |
| | IYSVFKTRWETTGSFKSLGDFKTYGKADNTAFRELITAKEIEKNVQEMSKGSA |
| | PGPDGITLGDVVKMDPEFSRTMEIFNLWLTTGKIPDMVRGCRTVLIPKSSKPD |
| | RLKDINNWRPITIGSILLRLFSRIVTARLSKACPLNPRQRGFIRAAGCSENLK |
| | LLQTIIWSAKREHRPLGVVFVDIAKAFDTVSHQHIIHALQQREVDPHIVGLVS |
| | NMYENISTYITTKRNTHTDKIQIRVGVKQGDPMSPLLFNLAMDPLLCKLEESG |
| | KGYHRGQSSITAMAFADDLVLLSDSWENMNTNISILETFCNLTGLKTQGQKCH |
| | GFYIKPTKDSYTINDCAAWTINGTPLNMIDPGESEKYLGLQFDPWIGIARSGL |
| | STKLDFWLQRIDQAPLKPLQKTDILKTYTIPRLIYIADHSEVKTALLETLDQK |
| | IRTAVKEWLHLPPCTCDAILYSSTRDGGLGITKLAGLIPSVQARRLHRIAQSS |
| | DDTMKCFMEKEKMEQLHKKLWIQAGGDRENIPSIWEAPPSSEPPNNVSTNSEW |
| | EAPTQKDKFPKPCNWRKNEFKKWTKLASQGRGIVNFERDKISNHWIQYYRRIP |
| | HRKLLTALQLRANVYPTREFLARGRQDQYIKACRHCDADIESCAHIIGNCPVT |
| | QDARIKRHNYICELLLEEAKKKDWVVFKEPHIRDSNKELYKPALIFVKDARAL |
| | VVDVTVRYEAAKSSLEEAAAEKVRKYKHLETEVRHLTNAKDVTFVGFPLGARG |
| | KWHQDNFKLLTELGLSKSRQVKMAETFSTVALFSSVDIVHMFASRARKSMVM |
| | (SEQ ID NO: 1678) |
| S. pyogenes Cas9 | MAPKKKRKVGIHGVPAADKKYSIGLDIGTNSVGWAVITDEYKVPSKKFKVLGN |
| N863A nickase | TDRHSIKKNLIGALLFDSGETAEATRLKRTARRRYTRRKNRICYLQEIFSNEM |
| mutant attached at | AKVDDSFFHRLEESFLVEEDKKHERHPIFGNIVDEVAYHEKYPTIYHLRKKLV |
| v2 location of DBD | DSTDKADLRLIYLALAHMIKFRGHFLIEGDLNPDNSDVDKLFIQLVQTYNQLF |
| of R2Tg containing | EENPINASGVDAKAILSARLSKSRRLENLIAQLPGEKKNGLFGNLIALSLGLT |
| EN mutation with | PNFKSNFDLAEDAKLQLSKDTYDDDLDNLLAQIGDQYADLFLAAKNLSDAILL |
| XTEN33aa linker | SDILRVNTEITKAPLSASMIKRYDEHHQDLTLLKALVRQQLPEKYKEIFFDQS |
| | KNGYAGYIDGGASQEEFYKFIKPILEKMDGTEELLVKLNREDLLRKQRTFDNG |
| | SIPHQIHLGELHAILRRQEDFYPFLKDNREKIEKILTFRIPYYVGPLARGNSR |
| | FAWMTRKSEETITPWNFEEVVDKGASAQSFIERMTNFDKNLPNEKVLPKHSLL |
| | YEYFTVYNELTKVKYVTEGMRKPAFLSGEQKKAIVDLLFKTNRKVTVKQLKED |
| | YFKKIECFDSVEISGVEDRFNASLGTYHDLLKIIKDKDFLDNEENEDILEDIV |
| | LTLTLFEDREMIEERLKTYAHLFDDKVMKQLKRRRYTGWGRLSRKLINGIRDK |
| | QSGKTILDFLKSDGFANRNFMQLIHDDSLTFKEDIQKAQVSGQGDSLHEHIAN |
| | LAGSPAIKKGILQTVKVVDELVKVMGRHKPENIVIEMARENQTTQKGQKNSRE |
| | RMKRIEEGIKELGSQILKEHPVENTQLQNEKLYLYYLQNGRDMYVDQELDINR |
| | LSDYDVDHIVPQSFLKDDSIDNKVLTRSDKARGKSDNVPSEEVVKKMKNYWRQ |
| | LLNAKLITQRKFDNLTKAERGGLSELDKAGFIKRQLVETRQITKHVAQILDSR |
| | MNTKYDENDKLIREVKVITLKSKLVSDFRKDFQFYKVREINNYHHAHDAYLNA |
| | VVGTALIKKYPKLESEFVYGDYKVYDVRKMIAKSEQEIGKATAKYFFYSNIMN |
| | FFKTEITLANGEIRKRPLIETNGETGEIVWDKGRDFATVRKVLSMPQVNIVKK |
| | TEVQTGGFSKESILPKRNSDKLIARKKDWDPKKYGGFDSPTVAYSVLVVAKVE |
| | KGKSKKLKSVKELLGITIMERSSFEKNPIDFLEAKGYKEVKKDLIIKLPKYSL |
| | FELENGRKRMLASAGELQKGNELALPSKYVNFLYLASHYEKLKGSPEDNEQKQ |
| | LFVEQHKHYLDEIIEQISEFSKRVILADANLDKVLSAYNKHRDKPIREQAENI |
| | IHLFTLTNLGAPAAFKYFDTTIDRKRYTSTKEVLDATLIHQSITGLYETRIDL |
| | SQLGGDSGGSSGGSSGSETPGTSESATPESSGGSSGGSSTATRDKKDTVTREK |
| | HPKKPFQKWMKDRAIKKGNYLRFQRLFYLDRGKLAKIILDDIECLSCDIPLSE |
| | IYSVFKTRWETTGSFKSLGDFKTYGKADNTAFRELITAKEIEKNVQEMSKGSA |
| | PGPDGITLGDVVKMDPEFSRTMEIFNLWLTTGKIPDMVRGCRTVLIPKSSKPD |
| | RLKDINNWRPITIGSILLRLFSRIVTARLSKACPLNPRQRGFIRAAGCSENLK |
| | LLQTIIWSAKREHRPLGVVFVDIAKAFDTVSHQHIIHALQQREVDPHIVGLVS |
| | NMYENISTYITTKRNTHTDKIQIRVGVKQGDPMSPLLFNLAMDPLLCKLEESG |
| | KGYHRGQSSITAMAFADDLVLLSDSWENMNTNISILETFCNLTGLKTQGQKCH |
| | GFYIKPTKDSYTINDCAAWTINGTPLNMIDPGESEKYLGLQFDPWIGIARSGL |
| | STKLDFWLQRIDQAPLKPLQKTDILKTYTIPRLIYIADHSEVKTALLETLDQK |
| | IRTAVKEWLHLPPCTCDAILYSSTRDGGLGITKLAGLIPSVQARRLHRIAQSS |
| | DDTMKCFMEKEKMEQLHKKLWIQAGGDRENIPSIWEAPPSSEPPNNVSTNSEW |
| | EAPTQKDKFPKPCNWRKNEFKKWTKLASQGRGIVNFERDKISNHWIQYYRRIP |
| | HRKLLTALQLRANVYPTREFLARGRQDQYIKACRHCDADIESCAHIIGNCPVT |
| | QDARIKRHNYICELLLEEAKKKDWVVFKEPHIRDSNKELYKPALIFVKDARAL |
| | VVDVTVRYEAAKSSLEEAAAEKVRKYKHLETEVRHLTNAKDVTFVGFPLGARG |
| | KWHQDNFKLLTELGLSKSRQVKMAETFSTVALFSSVDIVHMFASRARKSMVM |
| | (SEQ ID NO: 1679) |
| S. pyogenes Cas9 | MAPKKKRKVGIHGVPAADKKYSIGLDIGTNSVGWAVITDEYKVPSKKFKVLGN |
| attached at v2 | TDRHSIKKNLIGALLFDSGETAEATRLKRTARRRYTRRKNRICYLQEIFSNEM |
| location of DBD of | AKVDDSFFHRLEESFLVEEDKKHERHPIFGNIVDEVAYHEKYPTIYHLRKKLV |
| R2Tg containing EN | DSTDKADLRLIYLALAHMIKFRGHFLIEGDLNPDNSDVDKLFIQLVQTYNQLF |
| mutation with | EENPINASGVDAKAILSARLSKSRRLENLIAQLPGEKKNGLFGNLIALSLGLT |
| XTEN33aa linker | PNFKSNFDLAEDAKLQLSKDTYDDDLDNLLAQIGDQYADLFLAAKNLSDAILL |
| | SDILRVNTEITKAPLSASMIKRYDEHHQDLTLLKALVRQQLPEKYKEIFFDQS |
| | KNGYAGYIDGGASQEEFYKFIKPILEKMDGTEELLVKLNREDLLRKQRTFDNG |
| | SIPHQIHLGELHAILRRQEDFYPFLKDNREKIEKILTFRIPYYVGPLARGNSR |
| | FAWMTRKSEETITPWNFEEVVDKGASAQSFIERMTNFDKNLPNEKVLPKHSLL |
| | YEYFTVYNELTKVKYVTEGMRKPAFLSGEQKKAIVDLLFKTNRKVTVKQLKED |
| | YFKKIECFDSVEISGVEDRFNASLGTYHDLLKIIKDKDFLDNEENEDILEDIV |
| | LTLTLFEDREMIEERLKTYAHLFDDKVMKQLKRRRYTGWGRLSRKLINGIRDK |
| | QSGKTILDFLKSDGFANRNFMQLIHDDSLTFKEDIQKAQVSGQGDSLHEHIAN |
| | LAGSPAIKKGILQTVKVVDELVKVMGRHKPENIVIEMARENQTTQKGQKNSRE |
| | RMKRIEEGIKELGSQILKEHPVENTQLQNEKLYLYYLQNGRDMYVDQELDINR |
| | LSDYDVDHIVPQSFLKDDSIDNKVLTRSDKNRGKSDNVPSEEVVKKMKNYWRQ |
| | LLNAKLITQRKFDNLTKAERGGLSELDKAGFIKRQLVETRQITKHVAQILDSR |
| | MNTKYDENDKLIREVKVITLKSKLVSDFRKDFQFYKVREINNYHHAHDAYLNA |
| | VVGTALIKKYPKLESEFVYGDYKVYDVRKMIAKSEQEIGKATAKYFFYSNIMN |
| | FFKTEITLANGEIRKRPLIETNGETGEIVWDKGRDFATVRKVLSMPQVNIVKK |
| | TEVQTGGFSKESILPKRNSDKLIARKKDWDPKKYGGFDSPTVAYSVLVVAKVE |
| | KGKSKKLKSVKELLGITIMERSSFEKNPIDFLEAKGYKEVKKDLIIKLPKYSL |
| | FELENGRKRMLASAGELQKGNELALPSKYVNFLYLASHYEKLKGSPEDNEQKQ |
| | LFVEQHKHYLDEIIEQISEFSKRVILADANLDKVLSAYNKHRDKPIREQAENI |
| | IHLFTLTNLGAPAAFKYFDTTIDRKRYTSTKEVLDATLIHQSITGLYETRIDL |
| | SQLGGDSGGSSGGSSGSETPGTSESATPESSGGSSGGSSTATRDKKDTVTREK |
| | HPKKPFQKWMKDRAIKKGNYLRFQRLFYLDRGKLAKIILDDIECLSCDIPLSE |
| | IYSVFKTRWETTGSFKSLGDFKTYGKADNTAFRELITAKEIEKNVQEMSKGSA |
| | PGPDGITLGDVVKMDPEFSRTMEIFNLWLTTGKIPDMVRGCRTVLIPKSSKPD |
| | RLKDINNWRPITIGSILLRLFSRIVTARLSKACPLNPRQRGFIRAAGCSENLK |
| | LLQTIIWSAKREHRPLGVVFVDIAKAFDTVSHQHIIHALQQREVDPHIVGLVS |
| | NMYENISTYITTKRNTHTDKIQIRVGVKQGDPMSPLLFNLAMDPLLCKLEESG |
| | KGYHRGQSSITAMAFADDLVLLSDSWENMNTNISILETFCNLTGLKTQGQKCH |
| | GFYIKPTKDSYTINDCAAWTINGTPLNMIDPGESEKYLGLQFDPWIGIARSGL |
| | STKLDFWLQRIDQAPLKPLQKTDILKTYTIPRLIYIADHSEVKTALLETLDQK |
| | IRTAVKEWLHLPPCTCDAILYSSTRDGGLGITKLAGLIPSVQARRLHRIAQSS |
| | DDTMKCFMEKEKMEQLHKKLWIQAGGDRENIPSIWEAPPSSEPPNNVSTNSEW |
| | EAPTQKDKFPKPCNWRKNEFKKWTKLASQGRGIVNFERDKISNHWIQYYRRIP |
| | HRKLLTALQLRANVYPTREFLARGRQDQYIKACRHCDADIESCAHIIGNCPVT |
| | QDARIKRHNYICELLLEEAKKKDWVVFKEPHIRDSNKELYKPALIFVKDARAL |
| | VVDVTVRYEAAKSSLEEAAAEKVRKYKHLETEVRHLTNAKDVTFVGFPLGARG |
| | KWHQDNFKLLTELGLSKSRQVKMAETFSTVALFSSVDIVHMFASRARKSMVM |
| | (SEQ ID NO: 1680) |

### Example 10: Inactivation of an Endogenous Nucleolar Localization Signal in a Gene Writer

[1163] This example describes a Gene Writer in which an endogenous nucleolar localization signal has been inactivated to reduce intracellular targeting of the protein to the nucleolus.

[1164] In this example, the nucleolar localization signal (NoLS) of a retrotransposase is computationally predicted using a published algorithm that was trained on validated proteins that localize to the nucleolus (Scott, M. S., et al, Nucleic Acids Research, 38(21), 7388-7399 (2010)). The predicted NoLS sequence is based on both amino acid sequence, amino acid sequence context, and predicted secondary structure of the retrotransposase. The identified sequence is typically rich with basic amino acids (Scott, M. S., et al, Nucleic Acids Research, 38(21), 7388-7399 (2010)) and when these residues are mutated to a simple side-chain, non-basic, amino acids or removed from the retrotransposase polypeptide chain then it can prevent localization to the nucleolus (Yang, C. P., et. al., Journal of Biomedical Science, 22(1), 1-15. (2015), Martin, R. M., et. al., Nucleus, 6(4), 314-325 (2015)). In some embodiments, the NoLS sequence is located in the amino acid region of a retrotransposase that is between the reverse transcriptase polymerase motif and the restriction-like endonuclease motifs. The predicted NoLS region contains lysine, arginine, histidine, and/or glutamine amino acids where nucleolar localization is inactivated by mutation of one or more of these residues to an alanine amino acid residue and/or one or more of these amino acids are removed from the polypeptide chain of the retrotransposase. In some embodiments, the amino acid sequence of the Gene Writer driver of R2Tg found upstream of the RLE is mutated such that lysines (K) are substituted for alanines (A), e.g., the predicted NoLS of R2Tg (amino acids 1,128-1,154 of polypeptide sequence), (APTQKDKFPKPCNWRKNEFKKWTKLAS (SEQ ID NO: 1681)) is mutated at 1, 2, 3, 4, 5, 6, or 7 residues to produce an inactivated NoLS (APTQADAFPAPCNWRANEFAAWTALAS (SEQ ID NO: 1682)).

### Example 11: Application of Second-Strand Nicking in a Gene Writer System

[1165] This example describes a Gene Writer system in which retrotransposition is paired with targeted second-strand nicking activity in order to increase the efficiency of integration events. The second strand nick can be achieved by (1) a Cas9 nickase fused to a gene writer system, in which the Gene Writer introduces one nick through its endonuclease domain (EN), and the fused nickase Cas9 places another nick on either the top and bottom DNA strands (FIG. 7A), or (2) a GeneWriter system in which the active EN domain introduces a nick, and a Cas9 nickase introduces a second nick on either top or bottom strand of the DNA, upstream or downstream of the Gene Writer induced nick (FIG. 7B).

[1166] In the first part of this example, a Cas9 nickase is fused to a Gene Writer protein (FIG. 7A). The Cas9 is targeted to a DNA sequence through a gRNA. The Gene Writer protein introduces a DNA nick through its EN domain, and an additional nick is generated through the nickase Cas9 activity. This additional nick can be targeted to the top or bottom strands of the DNA surrounding the Gene Writer introduced nick (FIG. 8A). Constructs designed and tested include (see schematic FIG. 14A):
[1167] Cas9-N863A-R2tg (RBD*, RT, EN)
[1168] Cas9-H840A-R2tg (RBD*, RT, EN)
[1169] Cas9-D10A-R2tg (RBD*, RT, EN)
[1170] dCas9-R2tg (RBD*, RT, EN)
   The DNA binding domain is the nickase Cas9 that directs the Gene Writer molecule to a DNA target through a gRNA. The RNA binding domain (RBD) in this set of Gene Writer constructs is inactivated with a point mutation (RBD*). As a donor for insertion, constructs in which the R2Tg RNA binding domain is inactive use a gRNA that is extended at its 3′ end to include donor sequence for genome modification (FIG. 14B). These modifications include nucleotide substitutions, nucleotide deletions and nucleotide insertions. In this first set of experiments, the above constructs-R2Tg(RBD*, RT, EN) and dCas9-R2Tg(RBD*, RT, EN) fusions with a 3′ extended gRNA template targeting the AAVS1 locus are delivered to U2OS cells through nucleofection in SE buffer using program DN100. gRNAs used include gRNAs for each construct that target either the bottom or top strand of DNA. After nucleofection, cells are grown in complete medium for 3 days. gDNA is harvested on day 3, and amplicon sequencing followed by computational analysis using CRISPResso (indel analysis tool) are performed. 3′ extended gRNA mediated insertions, deletions or nucleotide substitutions are observed upon delivery of dCas9-R2Tg(RBD*, RT, EN), and increased in frequency when delivering Nickase-Cas9-R2Tg(RBD*, RT, EN) constructs.

[1171] In the second part of this example, a Cas9 nickase is fused to a Gene Writer protein (FIG. 7A). The Cas9 is targeted to a DNA sequence through a gRNA. The Gene Writer protein introduces a DNA nick through its EN domain, and an additional nick is generated through the nickase Cas9 activity. This additional nick can be targeted to the top or bottom strands of the DNA surrounding the Gene Writer introduced nick (FIG. 7A). In contrast to the constructs listed above, the RNA binding domain of R2Tg is active (FIG. 15A), and the template used for genome modification is a transgene flanked by UTRs (FIG. 15B). Constructs include (see schematic FIG. 15A):
[1172] Cas9-N863A-R2tg (RBD, RT, EN)
[1173] Cas9-H840A-R2tg (RBD, RT, EN)
[1174] Cas9-D10A-R2tg (RBD, RT, EN)
[1175] dCas9-R2tg (RBD, RT, EN)
   The transgene flanked by UTRs requires homology arms at the site of nicking. To determine the site of nicking for the accurate design of homology arms for the donor transgene DNA, the above listed constructs are nucleofected into 200 k U2OS cells with a gRNA targeting the AAVS1 locus using pulse code DN100. After nucleofection, cells are grown in complete medium for 3 days. gDNA is harvested on day 3, and amplicon sequencing followed by computational analysis using CRISPResso as an indel analysis tool are performed. The nicking site of the EN domain is identified from the indels the EN domain produces at the AAVS1 site. Homology arms of 100 bp flanking the EN nicking site are designed and included in the transgene. To achieve genome modification, Cas9-R2Tg fusion constructs listed above are nucleofected into U2OS cells, along with a gRNA targeting either the top or bottom strand of the AAVS1 locus, and the appropriate transgenes harboring homology to the previously determined nicking site. After nucleofection, cells are grown in complete medium for 3 days. gDNA is harvested on day 3, and ddPCR is performed to detect transgene integration at the AAVS1 site. Integrations are observed upon delivery of dCas9-R2Tg(RBD, RT, EN), and increased in frequency when delivering Nickase-Cas9-R2Tg(RBD, RT, EN) constructs.

[1176] In another example, a Gene Writer protein is targeted to DNA through its DNA binding domain (FIG. 7B). The Gene Writer protein will introduce a DNA nick at a DNA strand. In addition, a Cas9 nickase is used to generate a second nick either on the top or bottom strands of the DNA, upstream or downstream of the first nick. In this example, a Gene Writer plasmid targeting the AAVS1 site (FIG. 16A) and with a UTR flanked transgene with homology to the AAVS1 site (FIG. 16B) is nucleofected into 200 k U2OS cells using pulse code DN100. The following Cas9 constructs are transfected alongside the Gene Writer plasmids (FIG. 16C):
[1177] Cas9-N863A
[1178] Cas9-H840A
[1179] Cas9-D10A
[1180] dCas9
   All Cas9 constructs are co-nucleofected with gRNAs targeting the AAVS1 locus on either the top or bottom strands, upstream or downstream of the Gene Writer introduced nick. After nucleofection, cells are grown in complete medium for 3 days. gDNA is harvested on day 3, and ddPCR is performed to detect transgene integration at the AAVS1 site. Integrations are observed upon delivery of dCas9 and increased in frequency when delivering Nickase-Cas9 constructs.

### Example 12: Improved Expression of Gene Writer Polypeptide by Heterologous UTRs

[1181] This example describes the use of heterologous UTRs to enhance the intracellular expression of the Gene Writer polypeptide.

[1182] In this example, the Gene Writer polypeptide was expressed from mRNA (FIG. 17). In the plasmid template for the mRNA production, the native retrotransposon UTRs were replaced with UTRs optimized for the protein expression (C3 5′UTR and ORM 3′ UTR from Asrani et al., RNA biology 15, 756-762 (2018) or 5′ and 3′ UTRs from Richter et al., Cell 168, 1114-1125 (2017)). The plasmid included the T7 promoter followed by the 5′UTR, the retrotransposon coding sequence, the 3′ UTR, 3GS linker (SEQ ID NO: 1024), SV40 nuclear localization signal (NLS), XTEN linker, HiBit sequence and 96-100 nucleotide long poly(A) tail (SEQ ID NO: 1683). The plasmid was linearized by enzymatic restriction resulting in blunt end or 5′ overhang downstream of poly(A) tail and used for in vitro transcription (IVT) using T7 polymerase (NEB). Following the IVT step the RNA was treated with DNase I (NEB). After the buffer exchange step the enzymatic capping reaction was performed using Vaccinia capping enzyme (NEB) and 2′-O-methyltransferase (NEB) in the presence of GTP and SAM (NEB). The capped RNA was concentrated and buffer exchanged. 50,000 HEK293T cells were transfected with 0.5 μg with the Gene Writer mRNA in the presence or in the absence of the RNA template in 1:1 molar ratio using Neon transfection system (1150 V per pulse, 20 msec per pulse, 2 pulses in 10 μL tips in 96 well format). The RNA template was in vitro transcribed from plasmid as described in Example 14 (Improved Gene Writer components for RNA-based delivery).

[1183] After transfection HEK293T cells were grown for 5 hours before assaying the Gene Writer expression by probing its HiBit tag expression using standard protocol promega.com/-/media/files/resources/protocols/technical-manuals/500/nano-glo-hibit-lytic-detection-system-technical-manual.pdf?la=en. Protein expression was found to be greatly improved by the use of 5′ and 3′ UTRₑₓₚ from C3-ORM as compared to using the native UTRs from R2Tg (FIG. 17). The genome integration was assayed 3 days post-transfection using 3′ ddPCR (FIG. 18).

### Example 13: Improved Gene Writer Components for Mixed RNA and DNA Delivery

[1184] This example describes improvements to the RNA molecule encoding a Gene Writer polypeptide that enhance expression and allow for increased efficiency of retrotransposition when used with a Gene Writer template encoded on plasmid DNA.

[1185] In this example, the polypeptide component of the Gene Writer™ system is expressed from mRNA described in Example 12 (Improved expression of Gene Writer polypeptide by heterologous UTRs). The plasmid template was synthesized such that the reporter gene (eGFP) was flanked by R2Tg untranslated regions (UTRs) and 100 bp of homology to its rDNA target. The template expression was driven by the mammalian CMV promoter. We introduced the plasmid into HEK393T cells using the FuGENE® HD transfection reagent. HEK293T cells were seeded in 96-well plates at 10,000 cells/well 24 hours before transfection. On the transfection day, 0.5 μl transfection reagent and 80 ng DNA was mixed in 10 μl Opti-MEM and incubated for 15 minutes at room temperature. The transfection mixture was then added to the medium of the seeded cells. Cells were detached and used for the electroporation of 0.5 μg of mRNA per well using Neon transfection system (1150 V per pulse, 20 msec per pulse, 2 pulses in 10 μL tips in 96 well format).

HEK293T cells were transfected with the following test agents:
[1186] 1. mRNA coding for the polypeptide described above
[1187] 2. Plasmid encoding template RNA described above
[1188] 3. Combination of 1 and 2. The plasmid was pre-lipofected 24 hrs before mRNA transfection as described above.
   After transfection, HEK293T cells were cultured for 1-3 days and then assayed for site-specific genome editing. Genomic DNA was isolated from each group of HEK293 cells.
   ddPCR was performed to confirm integration and assess integration efficiency. Taqman probes and primers were designed as described in PCT/US2019/048607 to amplify the expected product across 5′ and 3′ ends of integration junctions. The results of the ddPCR copy number analysis (in comparison to reference gene RPP30) are shown in FIG. 19. The genome integration in the presence of the mRNA and the template plasmid achieved a mean copy number of 0.683 integrants/genome when targeting 3′ junction and of 0.249 integrants/genome when targeting 5′ junction. The mRNA only transfection resulted in a mean copy number of 0.002 integrants/genome, in comparison to 0.0004 integrants/genome for the plasmid only transfection.

### Example 14: Improved Gene Writer Components for RNA-Based Delivery

[1189] This example describes improvements to the RNA molecule encoding a Gene Writer polypeptide that enhance expression and allow for increased efficiency of retrotransposition when co-delivered with a Gene Writer RNA template.

[1190] In this example, the polypeptide component of the Gene Writer™ system is expressed from mRNA described in Example 12 (Improved expression of Gene Writer polypeptide by heterologous UTRs). The plasmid template for the RNA template production included T7 promoter followed by the IRES-expressing reporter gene (eGFP) flanked by R2Tg untranslated regions (UTRs) and 100 bp of homology to its rDNA target. The plasmid template was linearized by enzymatic restriction resulting in blunt end or 5′ overhang downstream of the RNA template sequence and used for in vitro transcription (IVT) using T7 RNA polymerase (NEB). Following the IVT step the RNA was treated with DNase I (NEB) and either enzymatically polyadenylated by poly(A) polymerase (NEB) or not. After the buffer exchange step the enzymatic capping reaction was performed using Vaccinia capping enzyme (NEB) and 2′-O-methyltransferase (NEB) in the presence of GTP and SAM (NEB). The capped RNA was concentrated and buffer exchanged. 50,000 HEK293T cells were co-transfected with 0.5 to 1 μg of the GeneWriter mRNA and the RNA template in 1:4 to 1:12 molar ratios. The Neon transfection system was used for the RNA transfection (1150 V per pulse, 20 msec per pulse, 2 pulses in 10 μL tips in 96 well format).

[1191] After transfection, HEK293T cells were cultured for at least 1 day and then assayed for site-specific genome editing. Genomic DNA was isolated from each group of HEK293 cells. ddPCR was performed to confirm integration and assess integration efficiency. Taqman probes and primers were designed as described in PCT/US2019/048607 to amplify the expected product across 5′ and 3′ ends of integration junctions. The mean copy number of 0.498 integrants/genome was achieved in the presence of the 0.5 μg of mRNA and 1:8 molar ratio of Gene Writer mRNA to the RNA template when the RNA template was enzymatically polyadenylated, in comparison to that of 0.031 integrants/genome when the RNA transgene was not polyadenylated.

### Example 15: Gene Writers that Deliver Genetic Cargo Containing Introns

[1192] This example describes the use of a Gene Writer system to integrate genetic cargo that contains introns by using RNA-based delivery to tune expression of the gene of interest from its newly introduced genomic locus.

[1193] In this example, Gene writing technology uses an RNA template encoding a protein of interest including its native or non-native introns. For example, intron 6 of the triose phosphate isomerase (TPI) gene (Nott et al., 2003) will be used as one of the non-native introns in these experiments.

[1194] The presence of introns in the genomic copy of a gene and their removal by splicing has been reported to affect nearly every aspect of the gene expression, including its transcription rate, the mRNA processing, export, cell localization, translation and decay (reviewed in Shaul International Journal of Biochemistry and Cell Biology 91B, 145-155 (2017)). The introns can be inserted into different parts of the RNA template (FIG. 21) and depending on the intron location their role in gene expression can differ.

[1195] An intron in the 5′ UTRₑₓₚ, close to the transcription start site, introduces activating chromatin modifications (Bieberstein et al., Cell Reports 2, 62-68 (2012)), improves accuracy of transcription start site recognition and facilitates Poll recruitment (Laxa et al., Plant Physiology 172, 313-327 (2016)), increases rates of transcription initiation (Kwek et al., Nature Structural Biology 9, 800-805 (2002)) and elongation (Lin et al., Nature Structural and Molecular Biology 15, 819-826 (2008)), and improve the productive elongation in the sense relative to the antisense orientation (Almada et al., Nature 499, 360-363 (2013)).

[1196] An intron in the 3′ UTRₑₓₚ limits the mRNA expression to one protein molecule per mRNA: the exon junction complex (EJC) left by spliceosome downstream of stop codon is recognized by the nonsense-mediated decay (NMD) machinery and therefore the mRNA is marked for deletion at the end of the pioneering round of translation (Zhang et al., RNA 4, 801-815 (1998)).

[1197] The ability to employ introns in a therapeutic gene may, however, be limited by splicing that occurs prior to integration of the template. For example, an intron in the forward orientation would be spliced out when an RNA template was encoded and delivered on a DNA plasmid, since transcription in the same direction would yield a template RNA that would be spliced prior to integration, thus failing to incorporate the intron in the genome. Additionally, lentivirus constructs designed to deliver a transgene must encode a sequence with an intron in the reverse orientation, since the viral packaging process would result in intron splicing and absence of the intron in packaged viral particles (Miller et al. J Virol 62, 4337-45 (1988)). However, the reverse orientation has also been thought to result in a reduction in viral titer and transduction (Uchida et al., Nat Commun 10, 4479 (2019)). It is worth noting that since the Gene Writer template can be generated through in vitro transcription and delivered directly as RNA, the problem of pre-integration splicing of desired introns can be avoided. In some embodiments, the Gene Writer template may thus contain one or more introns in same-sense orientation with the transcript, which is generated by IVT and delivered to the target cell as RNA.

[1198] An intron in any location depicted in FIG. 21 will recruit U1 snRNP that protects mRNA from the premature cleavage and polyadenylation (Kaida et al., Nature 468 664-681 (2010); Berg et al., Cell 150, 53-64 (2012)). In addition, the EJC interacts with components of the TREX (transcription-export) complex and increases the rate of mRNA export from nucleus to cytoplasm 6-10-fold in comparison to the constructs lacking introns (Valencia et al., PNAS 105, 3386-3391 (2008)). It was also demonstrated that the binding of the polypyrimidine tract-binding protein, a splicing regulator protein, mediates a significant increase in the half-life of the spliced transcripts (Lu & Cullen, RNA 9, 618-630 (2003); Millevoi et al., Nucleic Acid Research 37, 4672-4683 (2009)). The efficiency of the mRNA translation was shown to be increased by the presence of the SR proteins (serine-arginine rich proteins, involved in RNA splicing) (Sanford et al., Genes & Development 18, 755-768 (2004); Sato et al., Molecular Cell 29, 255-262 (2008)) and the EJC proteins and its peripheral factors (Nott et al., Genes & Development 18, 210-222 (2004)).

[1199] In this example both the template RNAs harboring an intron or introns and Gene Writer polypeptide are delivered to the cells as in vitro transcribed capped RNAs as described in Example 14 (Improved Gene Writer components for RNA-based delivery). One to three days post-transfection the GOI expression and the genomic integration are assayed. In some embodiments, the genome integration and/or protein expression will be higher for the intron-containing RNA template.

### Example 16: Engineering of the Retrotransposon 5′ UTR to Improve Efficiency of Integration

[1200] This example describes the deletion, replacement, or mutation of the 5′UTR of a retrotransposon to increase integration efficiency.

[1201] The 5′UTR region of non-LTR retrotransposons has multiple functions including self-cleaving ribozyme activity, which has been shown in certain elements and is predicted in additional retrotransposons (see modules B and C of FIG. 27-28) (Ruminski et al. J Biol Chem 286, 41286-41295 (2011)). Ribozymal activity is predicted to cleave the RNA within or upstream of the 5′UTR. Either increasing or restricting this activity and structural component of the 5′UTR may benefit retrotransposition efficiency. A prediction of the ribozyme structure of R2Tg is provided in FIG. 29.

[1202] In order to evaluate engineering of the 5′UTR, constructs were designed to enhance or diminish these activities (FIG. 20). In case (A), the natural 5′UTR of R2Tg is used to integrate in trans as in previous experiments. Case (B) illustrates deletion of the 5′UTR. (C) and (D) represent cases in which the 5′UTR from the original species (in this case R2Tg from T. guttata) has been replaced by the 5′UTR of a retrotransposon from a distinct species. Case (C) provides an example in which the 5′UTR from A. maritima R2 has replaced that of R2Tg. (D) represents the generic case in which UTRs from additional species may be substituted (“Rx”), such as that from B. mori, D. ananasse, F. auricularia, L. polyphemus, N. giraulti, or O. latipes, or from a retrotransposon selected from a Table herein, or any of Tables 1-3 of PCT/US2019/048607, herein incorporated by reference in its entirety. Case (E) represents the substitution of a ribozyme, such as a hammerhead ribozyme, e.g., RiboJ (Lou et al Nat Biotechnol 30, 1137-1142 (2012)). Case (F) represents the inactivation of the 5′UTR of R2Tg through point mutations, e.g., 75C>T in the 5′ UTR (FIG. 20.B, position indicated by shaded box). 5′UTR sequences are expected to be modular to any insertion sequence mediated by the retrotransposon.

[1203] Each case is evaluated as in previous examples by transfection of Gene Writer polypeptide plasmid with template plasmid and evaluation of integration frequency via ddPCR. In some embodiments, substitution or mutation of the 5′ UTR results in increased efficiency of integration.

### Example 17: Modifying the 5′ and 3′ Ends of Gene Writer RNA Components to Improve RNA Stability

[1204] This example describes the addition of non-coding sequences to the 5′ and 3′ ends of RNA in order to improve stability in a mammalian cell.

[1205] The decay of eukaryotic RNAs in cells are mostly carried out by exoribonucleases. In this example, the half-life of RNAs is prolonged by introducing protective sequences and/or modifications at their 5′ and 3′ ends. The most common natural way of protecting the RNA ends is by introduction of 5′ cap structure and 3′ poly(A) tail. In this example, the polypeptide component of the Gene Writer™ system is expressed from mRNA described in Example 12 (Improved expression of Gene Writer polypeptide by heterologous UTRs). The plasmid template for the RNA template production included T7 promoter followed by the IRES-expressing reporter gene (eGFP) flanked by R2Tg untranslated regions (UTRs) and 100 bp of homology to its rDNA target. The plasmid template was linearized by enzymatic restriction resulting in blunt end or 5′ overhang downstream of the RNA template sequence and used for in vitro transcription (IVT) using T7 polymerase (NEB). Following the IVT step the RNA was treated with DNase I (NEB) and either enzymatically polyadenylated by poly(A) polymerase (NEB) or not. After the buffer exchange step the enzymatic capping reaction resulting in cap 1 structure was performed as described in Example 14 (Improved Gene Writer components for RNA-based delivery) or not performed. The template RNA was concentrated and buffer exchanged. 50,000 HEK293T cells were co-transfected with 0.5 μg with the GeneWriter mRNA and the RNA template in 1:1 to 1:8 molar ratios using Neon transfection system (1150 V per pulse, 20 msec per pulse, 2 pulses in 10 μL tips in 96 well format).

[1206] After transfection, HEK293T cells were cultured for 1-3 days and then assayed for site-specific genome editing. Genomic DNA was isolated from each group of HEK293 cells.

ddPCR was performed to confirm integration and assess integration efficiency. Taqman probes and primers were designed as described in PCT/US2019/048607 to amplify the expected product across 3′ end of integration junctions. The genome integration was improved when the enzymatically capped and poly(A) tailed template was used (FIG. 22).

[1207] The mean copy number of 0.498 integrants/genome was achieved in the presence of the 0.5 μg of mRNA and 1:8 molar ratio of mRNA:RNA template when the RNA template was enzymatically polyadenylated, in comparison to that of 0.031 integrants/genome when the RNA transgene was not enzymatically polyadenylated.

### 3′ End Modifications of RNAs.

[1208] It has been reported that the interactions between poly(A) tail shorter than 15-20 nts and the poly(A) binding protein (PABP) are destabilized resulting in the fast degradation of the RNA (Chang et al., Molecular Cell 53, 1044-1052 (2014); Subtelny et al., Nature 508, 66-71 (2014)). To determine the suitable lengths of the poly(A) tail of the template RNA we will test its lengths of 30, 40, 50, 60, 70, 80, 90 and 100 nucleotides. The IVT templates will be produced by PCR using reverse primers encoding the poly(A) tails of the abovementioned length. The IVT, DNase I treatment and capping of Gene Writer and the RNA template will be performed as described in Example 14 (Improved Gene Writer components for RNA-based delivery). After one to three days post-transfection the genomic integration will be assayed. In some embodiments, the genome integration will be higher for the RNA template tailed with a poly(A) tail of a suitable length.

[1209] In a cell the RNA degradation is initiated by shortening its poly(A) tail by deadenylases. Since the deadenylases are 3′-5′ exoribonucleases favoring the poly(A) stretches, the terminal uridine, cytidine and most often guanine detected in the natural poly(A) tails of many mRNA were proposed to protect the poly(A) tail from its shortening (Chang et al., Molecular Cell 53, 1044-1052 (2014)). We will assay the Gene Writer and template RNAs with the encoded poly(A) tail with terminal G or C, or intermittent Gs or Cs (similar to that used in Lim et al., Science 361, 701-704 (2018)) according as described before.

[1210] Some of the RNAs have been described to evolve alternative ways of protections their 3′ ends. A specific 16-nucleotide long stem-loop structure flanked with unpaired 5 nucleotides on both sides has been reported to protect the 3′ end of mRNA encoding H2a.X histone (Mannironi et al., Nucleic Acid Research 17, 9113-9126 (1989)). It has been shown that the heterologous mRNA ending with the histone stem-loop structure is cell cycle-regulated (Harris et al., Molecular Cellular Biology 11, 2416-2424 (1991); Stauber et al., EMBO Journal 5, 3297-3303 (1986)). The stem-loop structure is recognized and protected by the Stem-Loop Binding Protein (SLBP). The protein accumulates shortly before cells enter S-phase and is rapidly degraded at the end of S-phase (Whifield et al., Molecular Cellular Biology 20, 4188-4198 (2000)). The stem-loop element will be inserted to the 3′ end of the Gene Writer mRNA and the RNA templates and tested as described above to induce cell-cycle specific genome integration events.

[1211] Some viral and long non-coding RNAs have evolved to protect their 3′ ends with triple-helical structures (Brown et al., PNAS 109, 19202-19207 (2012)). Additionally, the structural elements of tRNA, Y RNA and vault RNA (reviewed in Labno et al., Biochemica et Biophysica Acta 1863, 3125-3147 (2016)) have been reported to extend half-life of these non-coding RNAs. We will insert the structures to protect the 3′ end of the RNA templates and probe their efficiencies in Gene Writing system as described above.

[1212] Finally, we will incorporate dNTP, 2′O-Methylated NTPs or phosphorothioate-NTP at the 3′ of the RNA transgenes to increase the half-life of these molecules by protecting the 3′ end of the RNA from exoribonucleases. We will incorporate single modified nucleotides or their stretches by extending the 3′end of the RNA by the DNA polymerases (for example, Klenow fragment) capable of extending an RNA sequence by adding modified nucleotides (Shcherbakova & Brenowitz, Nature Protocols 3, 288-302 (2008)).

[1213] A single nucleotide chemical modification of the 3′ end of the RNA can be done by first oxidation of 3′ terminal end of ribose sugar with sodium periodate to form a reactive aldehyde followed by conjugation of an aldehyde-reactive modified nucleotide.

Alternatively, T4 DNA or T4 RNA ligases can be used for the splinted ligation (Moore & Query, Methods in Enzymology 317, 109-123 (2000)) of the stretches of modified nucleotides to the 3′ end of the RNAs.

[1214] Chemical ligation of two fragments is also possible. The phosphodiester bond linkage between two RNA substrates can be formed either by activating the phosphomonoester group using a reactive imidazolide or by using a condensing reagent such as cyanogen bromide. A disadvantage of chemical ligation is that it can also result in the creation of a 2′-5′ phosphodiester linkage, together with the desired 3′-5′ phosphodiester linkages.

### 5′ End Modifications of RNAs

[1215] In addition to the cap 1 structure described in Example 14 (Improved Gene Writer components for RNA-based delivery) other 5′ end protection groups will be explored. Particularly, we will use hypermethylated (Wurth et al. Nucleic Acid Res 42, 8663-8677 (2014)), phosphorothioate (Kuhn et al., Gene Therapy 17, 961-971 (2010)), NAD⁺-derived (Kiledjian, Trends in Cell Biology 28, 454-464 (2018)) and modified (for example, biotinylated: Bednarek et al., Phil Trans R Soc B 373, 20180167 (2018)) cap analogs for co-transcriptional capping.

[1216] We will also label the 5′ of the RNA with 5′-[γ-thio]triphosphate to create a reactive sulfur group and chemically modify the 5′ end with the protective modifications using a haloacetamide derivative of the modified group.

[1217] The proposed modifications to protect 3′ and 5′ end of the RNA will be introduced in RNA templates and/or Gene Writer mRNA (if compatible with translation). The genome integration efficiencies of the RNAs will be tested as described in Example 14 (Improved Gene Writer components for RNA-based delivery).

### Example 18: Use of Modified RNA Bases in a Gene Writer System

[1218] This example describes Gene Writer systems comprising modified RNA bases to potentially improve features of the system, e.g., increase efficiency of integration, decrease cellular response to foreign nucleic acids. For the Gene Writer polypeptide, the proposed modifications pertaining to the coding region are compatible with translation. For the RNA template, the proposed modifications are compatible with reverse transcription.

[1219] In this example, mRNA encoding the Gene Writer polypeptide was in vitro transcribed with a 100% replacement of the corresponding rNTP with one of the modified rNTPs: pseudouridine (Ψ), 1-N-methylpseudouridine (1-Me-Ψ), 5-methoxyuridine (5-MO-U) or 5-methylcytidine (5mC). Otherwise, the RNA preparation, purification and cell transfections were performed as described in the Example 14 (Improved Gene Writer components for RNA-based delivery). The gene integration capacity of the modified mRNAs was compared with that of the non-modified mRNA (G0) using ddPCR, with all polypeptide mRNAs being paired with an unmodified template RNA (FIG. 23). Integration was detected when the polypeptide was encoded using each modified rNTP, with the highest signal coming from 5-MO-U and the lowest from 5mC. This demonstrates that the Gene Writer polypeptide component is functional when expressed from mRNA containing modified bases.

[1220] Further, this example describes the modularity of the Gene Writer template molecule where it is composed of all or a subset of exemplary modules listed in FIG. 6 and illustrated in FIG. 5. Individual modules can be produced by chemical or in vitro syntheses as a contiguous nucleic acid molecule or in separate pieces that are later combined together. The individual modules of the Gene Writer template molecule can be chemically modified nucleic acids, be comprised in part or in entirety of non-nucleic acids, re-arranged in order, and/or omitted to form the Gene Writer template molecule.

[1221] In some embodiments, the Gene Writer template molecule (all modules, A-F) is synthesized by in vitro transcription where 0-100% replacement of a corresponding rNTP (adenosine, cytidine, guanosine, and/or uridine) is with one or more modified rNTPs (base or ribose modification), e.g., 5′ hydroxyl, 5′ Phosphate, 2′-O-methyl, 2′-O-ethyl, 2′-fluoro, ribothymidine, C-5 propynyl-dC (pdC), C-5 propynyl-dU (pdU), C-5 propynyl-C(pC), C-5 propynyl-U (pU), 5-methyl C, 5-methyl U, 5-methyl dC, 5-methyl dU methoxy, (2,6-diaminopurine), 5′-Dimethoxytrityl-N4-ethyl-2′-deoxyCytidine, C-5 propynyl-fC (pfC), C-5 propynyl-fU (pfU), 5-methyl fC, 5-methyl fU, C-5 propynyl-mC (pmC), C-5 propynyl-fU (pmU), 5-methyl mC, 5-methyl mU, LNA (locked nucleic acid), MGB (minor groove binder) pseudouridine (Ψ), 1-N-methylpseudouridine (1-Me-Ψ), 5-methoxyuridine (5-MO-U). The modified nucleotides in this embodiment rely on incorporation through a transcription reaction which utilizes a natural or mutant polypeptide sequence of a RNA polymerase that readily incorporates modified nucleotides into a RNA transcript that is made in vitro (Padilla, R., Nucleic Acids Research, 30(24), 138e-138, 2002; Ibach, J., et. al., Journal of Biotechnology, 167(3), 287-295, 2013; Meyer, A. J., et. al., Nucleic Acids Research, 43(15), 7480-7488, 2015). The modified Gene Writer template molecule is typically in whole or in part compatible with the reverse transcriptase activity of the Gene Writer polypeptide sequence; for modules or parts of modules of the Gene Writer template molecule used as a template for reverse transcription, preference is given to modifications that are compatible with reverse transcription (Motorin et al., Methods in Enzymology 425 21-53, 2007; Mauger et al., PNAS 116, 24075-24083, 2019). Gene Writer systems with template molecules containing modified rNTPs are tested as described above and in Example 14 (Improved Gene Writer components for RNA-based delivery).

[1222] In some embodiments, individual modules are chemically synthesized containing modified nucleotides, e.g., 5′ hydroxyl, 5′ Phosphate, 2′-O-methyl, 2′-O-ethyl, 2′-fluoro, ribothymidine, C-5 propynyl-dC (pdC), C-5 propynyl-dU (pdU), C-5 propynyl-C(pC), C-5 propynyl-U (pU), 5-methyl C, 5-methyl U, 5-methyl dC, 5-methyl dU methoxy, (2,6-diaminopurine), 5′-Dimethoxytrityl-N4-ethyl-2′-deoxyCytidine, C-5 propynyl-fC (pfC), C-5 propynyl-fU (pfU), 5-methyl fC, 5-methyl fU, C-5 propynyl-mC (pmC), C-5 propynyl-fU (pmU), 5-methyl mC, 5-methyl mU, LNA (locked nucleic acid), MGB (minor groove binder) pseudouridine (Ψ), 1-N-methylpseudouridine (1-Me-Ψ), 5-methoxyuridine (5-MO-U), where the individual modules are then ligated together through enzymatic (e.g., splint ligation using T4 DNA ligase, Moore, M. J., & Query, C. C. Methods in Enzymology, 317, 109-123, 2000) or chemical processes (e.g., Fedorova, O. A., et. al., Nucleosides and Nucleotides, 15(6), 1137-1147, 1996) to form a complete Gene Writer template molecule.

[1223] An example of a modified Gene Writer template molecule is where modules A and F are each 100 nt of chemically synthesized RNA with cytidine and uridine nucleotides containing 2′-O-methyl ribose modifications and module A contains (3) phosphorothioate linkages between the first 3 nucleotides on the 5′ end and module F contains (3) phosphorothioate linkages between the last 3 nucleotides on the 3′ end of the module. Modules B-E are synthesized by in vitro transcription using an RNA polymerase (RNAP), e.g., T7 RNAP, T3 RNAP, or SP6 RNAP (NEB), or derivatives thereof that possess enhanced properties, e.g., increased fidelity, increased processivity, or increased efficiency of incorporating modified nucleotides. Module A is ligated to the 5′ end of the in vitro transcribed module B-E molecule and module F is ligated on to the 3′ end of the in vitro transcribed module B-E molecule by splint ligation (described by Moore, M. J., & Query, C. C. Methods in Enzymology, 317, 109-123, 2000). This fully assembled template RNA (all modules, A-F) is then used with a Gene Writer polypeptide (or nucleic acid encoding the polypeptide) in a target cell to assess genomic integration as in previous examples. In some embodiments, RNA modifications do not decrease the efficiency of integration greater than 50%, e.g., as measured by ddPCR. In some embodiments, RNA modifications improve the efficiency of integration, e.g., as measured by ddPCR. In some embodiments, RNA modifications improve the reverse transcription reaction, e.g., improve the processivity or fidelity as measured by sequencing of integration events.

### Example 19: Gene Writer Templates that do not Incorporate UTRs

[1224] This example describes a configuration of the Gene Writer template molecule that results in an exclusion of the UTRs, such that these regions used in retrotransposition are not integrated into the host cell.

[1225] In this example, we describe the positioning, omission, and/or substitution of the UTR modules of the Gene Writer template molecule (FIGS. 5 and 6) to result in the Gene Writer driver to not incorporate the UTR modules into the genome as a part of retrotransposition. In some embodiments, the Gene Writer template molecule modules for the 5′ and 3′ UTRs (modules B+C and E of Gene Writer template molecule) are moved to the ends of the molecule so that their function of interacting with the Gene Writer driver does not change but the homology arm is now located adjacent to the heterologous object sequence (module D) where complementarity of the homology arms act as a primer for reverse transcription. In some cases, modules B and/or C are omitted from the Gene Writer template molecule with module E following module F.

[1226] Additional examples of not incorporating the UTRs into the genome are removing modules B and C from the Gene Writer template molecule, re-positioning module F (3′ homology arm) to follow module D (heterologous object sequence) and have module E be substituted with a binding ligand such as biotin. This Gene Writer template molecule would now consist of module A (5′ homology arm)—module D (heterologous object sequence)—module F (3′ homology arm)—module E comprised of biotin. The Gene Writer driver polypeptide sequence would be modified to incorporate the amino acid sequence for monomeric streptavidin. This example illustrates how the utility of mediating a non-nucleic acid mediated association of the Gene Writer template molecule with the Gene Writer driver polypeptide sequence.

### Example 20: Gene Writers can Integrate Genetic Cargo Independently of the Homology Directed Repair Pathway

[1227] This example describes the use of a Gene Writer system in a human cell wherein the homologous recombination repair pathway is inhibited.

[1228] In this example, U2OS cells were treated with 30 pmols (1.5 μM) non-targeting control siRNA (Ctrl) or a siRNA against Rad51, a core component of the homologous recombination repair pathway. SiRNAs were co-delivered with R2Tg driver and transgene plasmid in trans (see FIG. 24 for driver and transgene configuration schematic). Specifically, Plasmid expressing R2Tg, control R2Tg with a mutation in the RT domain, or control R2Tg with an endonuclease inactivating mutation were used in conjunction with transgene (FIG. 25 A, B). A total of 250 ng DNA plasmids with a 1:4 molar ration of driver to transgene, along with 30 pmol of siRNAs were nucleofected into 200 k U2OS cells resuspended in 20 μL of nucleofection buffer SE using pulse code DN100. Protein lysates collected on day 3 showed the absence of Rad51 in the siRad51 treated condition (FIG. 25C). gDNA was extracted at day 3 and ddPCR assays to detect transgene integration at the rDNA locus was performed. The results of the ddPCR copy number analysis (in comparison to reference gene RPP30) are shown in FIG. 26. The absence of Rad51 leads to a ˜20% reduction in R2Tg mediated transgene integration at the rDNA locus both at the 3′ and 5′ junctions (FIG. 26), indicating that R2TG mediated transgene insertion is not wholly dependent on the presence of the homologous recombination pathway, and can occur in the absence of the endogenous HR pathway. In some embodiments, HR independence enables Gene Writing to work in cells and tissues with endogenously low levels of HR, e.g., liver, brain, retina, muscle, bone, nerve, cells in G₀ or G₁ phase, non-dividing cells, senescent cells, terminally differentiated cells. In some embodiments, HR independence enables Gene Writing to work in cells or in patients or tissues containing cells with mutations in genes involved in the HR pathway, e.g., BRCA1, BRCA2, P53, RAD51.

### Example 21: Gene Writers can Integrate Genetic Cargo Independently of the Single-Stranded Template Repair Pathway

[1229] This example describes the use of a Gene Writer system in a human cell wherein the single-stranded template repair (SSTR) pathway is inhibited.

[1230] In this example, the SSTR pathway will be inhibited using siRNAs against the core components of the pathway: FANCA, FANCD2, FANCE, USP1. Control siRNAs of a non-target control will also be included. 200 k U2OS cells will be nucleofected with 30 pmols (1.5 μM) siRNAs, as well as R2Tg driver and transgene plasmids (trans configuration). Specifically, 250 ng of Plasmids expressing R2Tg, control R2Tg with a mutation in the RT domain, or control R2Tg with an endonuclease inactivating mutation) are used in conjunction with transgene at a 1:4 molar ratio (driver to transgene). Transfections of U2OS cells is performed in SE buffer using program DN100. After nucleofection, cells are grown in complete medium for 3 days. gDNA is harvested on day 3 and ddPCR is performed to assess integration at the rDNA site. Transgene integration at rDNA is detected in the absence of core SSTR pathway components.

### Example 22: Gene Writer Systems with Enhanced Activity for Target Vs Non-Target Cells

[1231] This example describes the incorporation of regulatory sequences into Gene Writer systems in order to decrease integration activity in non-target cells.

[1232] In this example, genetic regulation is accomplished through (i) using tissue-specific promoters to upregulate component expression and integration in target cells and (ii) using miRNA binding sites to decrease integration in non-target cells that have increased endogenous levels of the corresponding miRNA. Target cells used are human hepatocytes and non-target cells are hematopoetic stem cells (HSCs). The driver of integration here is a plasmid encoding the Gene Writer polypeptide (e.g., R2Tg retrotransposase) driven by different promoters and with scrambled or specific miRNA binding sites after the coding sequence. The template for integration is encoded on plasmid DNA, such that transcription results in a homology- and UTR-flanked heterologous object sequence. The heterologous object sequence may comprise a reporter gene that is driven by different promoters and with scrambled or specific miRNA binding sites after the coding sequence. The control promoter used here is CMV and the control for miRNA binding site is a randomly scrambled version of the binding site for miR-142. The target tissue-specific promoter used here is ApoE.HCR.hAAT, which is expressed in liver cells, and the off-target tissue-specific miRNA binding site is complementary to miR-142 (uguaguguuuccuacuuuaugga (SEQ ID NO: 1684)), which is expressed in HSCs.

[1233] Target cells and non-target cells are nucleofected with a combination of Gene Writer polypeptide (1) and template (2) selected from:

### Gene Writer Polypeptide Constructs (1):

[1234] a. Non-specific driver: CMV-R2Tg
[1235] b. Non-specific inactivated driver: CMV-R2Tg(EN*)
[1236] c. Tissue-specific driver: ApoE.HCR.hAAT-R2Tg-miR142
[1237] d. Tissue-specific inactivated driver: ApoE.HCR.hAAT-R2Tg(EN*)-miR142

### Gene Writer Template Constructs (2):

[1238] a. Non-specific transgene: CMV-gfp
[1239] b. Tissue-specific transgene: ApoE.HCR.hAAT-gfp-miR142
   Cells are incubated for at least three days and subsequently evaluated for integration efficiency and reporter expression. For integration efficiency, ddPCR is performed to quantify the average number of integrations per genome for each sample. In some embodiments, the ratio between the integration efficiency in target cells and non-target cells is higher when using a template paired with the tissue-specific driver (1a) vs a non-specific driver (1c). To assess reporter expression, cells are analyzed by flow cytometry to detect GFP fluorescence and RT-qPCR to detect transcription. In some embodiments, the ratio between fluorescence in target cells and non-target cells is higher when using a driver paired with a tissue-specific transgene cassette (2b) vs a non-specific transgene cassette (2a). In some embodiments, the ratio between transcript levels in target cells and non-target cells is higher when using a driver paired with a tissue-specific transgene cassette (2b) vs a non-specific transgene cassette (2a). In some embodiments, the combination of a tissue-specific driver (1a) with a tissue-specific transgene cassette (2b) results in the highest ratio of transcription or expression between target and non-target cells. Alternatively, a screening assay can be performed in the same cell line artificially expressing or not expressing a given miRNA, e.g., the on-target screening cell is a HEK293T cell and the non-target cell is mimicked by introducing overexpression of miR-142 in HEK293T cells.

### Example 23: Correction of Alpha-1 Antitrypsin Deficiency Using Lipid Nanoparticles Comprising Gene Writers

[1240] This example describes the use of a Gene Writer™ gene editing system to alter a genomic sequence at a single nucleotide in vivo. More specifically, the Gene Writer™ polypeptide and writing template are delivered to mouse liver cells via lipid nanoparticles to correct the SERPINA1 PiZ mutation causing alpha-1 antitrypsin deficiency.

[1241] Formulation and treatment of murine models with LNPs (LNP-INT01 system) carrying Cas9 and gRNA are taught by Finn et al. Cell Reports 22:2227-2235 (2018), the methods of which are incorporated herein by reference.

[1242] Capped and polyadenylated Gene Writer polypeptide mRNA containing N1-methyl pseudo-U is generated by in vitro transcription using a linearized plasmid DNA template and T7 RNA polymerase. The polypeptide mRNA is purified from enzyme and nucleotides using a MegaClear Transcription Clean-up Kit, in accordance with the manufacturer's protocol (ThermoFisher). The transcript concentration is determined by measuring the light absorbance at 260 nm (Nanodrop), and the transcript is analyzed by capillary electrophoresis by TapeStation (Agilent). Template RNA comprising the mutation correcting sequence is also prepared by in vitro transcription and translation using similar methods. In this example, the template RNA comprises the sequence as exemplified in Example 1.

[1243] LNPs are formulated with an amine-to-RNA-phosphate (N:P) ratio of 4.5. The lipid nanoparticle components are dissolved in 100% ethanol with the following molar ratios: 45 mol % LP01 lipid, 44 mol % cholesterol, 9 mol % DSPC, and 2 mol % PEG2k-DMG. The RNA cargo (1:40 molar ratio of polypeptide mRNA:template RNA) is dissolved in 50 mM acetate buffer (pH 4.5), resulting in a concentration of RNA cargo of approximately 0.45 mg/mL. LNPs are formed by microfluidic mixing of the lipid and RNA solutions using a Precision Nanosystems NanoAssemblr Benchtop Instrument, in accordance with the manufacturer's protocol. After mixing, the LNPs are collected and diluted in PBS (approximately 1:1), and then the remaining buffer is exchanged into PBS (100-fold excess of sample volume) overnight at 4 C under gentle stirring using a 10 kDa Slide-a-Lyzer G2 Dialysis Cassette (ThermoFisher Scientific). The resultant mixture is then filtered using a 0.2-mm sterile filter. The filtrate is stored at 2 C-8 C. Multi-dose formulations may be formulated using 25 mM citrate, 100 mM NaCl cargo buffer (pH 5), and buffer exchanged by TFF into tris-saline sucrose buffer (TSS) buffer (5% sucrose, 45 mM NaCl, and 50 mM Tris). Formulated LNPs have an average size of 105 nm. Encapsulation efficiencies are determined by ribogreen assay (Leung et al., 2012). Particle size and polydispersity are measured by dynamic light scattering (DLS) using a Malvern Zetasizer DLS instrument.

[1244] NSG-PiZ mice carrying the human SERPINA1 PiZ allele (E342K) are acquired from The Jackson Laboratory. To assess the ability of Gene Writing to edit the mutant allele in vivo, LNPs are dosed via the lateral tail vein at 3 mg/kg in a volume of 0.2 mL per animal. Excipient-treated animals are used as negative controls for all studies. Animals are euthanized at various time points by exsanguination via cardiac puncture under isoflurane anesthesia. In some embodiments, animals are euthanized at one week post-treatment to be analyzed for Gene Writing. Liver tissue is collected from the median or left lateral lobe from each animal for DNA extraction and analysis.

[1245] For NGS analysis of editing efficiency, PCR primers are designed around the target site, and the region of interest is amplified from extracted genomic DNA. Additional PCR is performed in accordance with the manufacturer's protocols (Illumina) to add the appropriate chemistry for sequencing, and amplicons are then sequenced on an Illumina MiSeq. Sequencing reads are aligned to the mouse reference genome after eliminating those having low quality scores. The resultant files containing the reads are mapped to the reference genome (BAM files), where reads that overlap the target region of interest are selected, and the number of wild-type reads versus the number of reads that contain the SERPINA1 reversion mutation encoded in the template RNA are calculated. The editing percentage (e.g., the “editing efficiency” or “percent editing”) is defined as the total number of reversion sequence reads over the total number of sequence reads.

[1246] In some embodiments, this example is repeated with additional groups of mice and a redosing regimen is used to analyze dose-to-effect properties of the system. In these experiments, mice are assigned to groups for weekly dosing up to 4 weeks, with euthanasia and tissue analysis as described herein being performed each week. In some embodiments, mice that receive more doses of the LNP formulation demonstrate higher Gene Writing efficiency by sequencing, e.g., mice receiving 2 doses one week apart that are analyzed at week three show a higher fraction of gene corrected reads by NGS of liver tissue samples as compared to mice receiving a single dose and analyzed at week three. In application, dosing in this manner may allow tuning of therapeutic intervention after evaluating patient response to one or more doses.

### Example 24: Using Gene Writing to Address Repeat Expansion Diseases

[1247] This example describes the use of a Gene Writer™ gene editing system to treat a repeat expansion disease by rewriting a normal number of repeats into the locus. More specifically, the Gene Writer™ polypeptide and writing template are delivered to mouse CNS via AAV to reset the CAG repeats in HTT as per the custom template RNA to cure Huntington Disease. Healthy humans tend to carry between 10 and 35 CAG repeats within the huntingtin gene (HTT), while those with Huntington Disease may possess between 36 to greater than 120 repeats.

[1248] In this example, the template RNA is designed to correct the CAG repeat region of the HTT gene by encoding a sequence with 10 such repeats and homology to the flanking target sequence to fully write across the target locus. Multiple examples of such template RNAs could be designed, with an exemplary template RNA, as encoded in DNA, comprising the sequence (1) GGCGGCTGAGGAAGCTGAGG (2) GTTTTAGAGCTAGAAATAGCAAGTTAAAATAAGGCTAGTCCGTTATCAACTTGAAAAAGTGGGACCGAGTCGGTCC (3) AGTCCCTCAAGTCCTTCcagcagcagcagcagcagcagcagcagcagccgccaccgccgccgccgccgccgccgcctcct (4) CAGCTTCCTCAG (SEQ ID NO: 1685), where numbers are used to delineate the modules of the template in the order (5′-3′) (1) gRNA spacer, (2) gRNA scaffold, (3) heterologous object sequence, (4) 3′ homology priming domain, with the repeat correction being encoded in (3). The CAG repeat region is followed by a short repeat region encoding for 11 proline residues (8 residues being encoded by CCG triplets). Without wishing to be bound by theory, this region is included in (3) to place (4) in a more unique region to prevent mispriming. An exemplary gRNA for providing a second nick as described in embodiments of this system comprises the spacer sequence CGCTGCACCGACCGTGAGTT (SEQ ID NO: 1630) and directs a Cas9 nickase to nick the second strand of the target site within the homologous region. In some embodiments, this second nick improves the efficiency of the edit.

[1249] In order to deliver a complete Gene Writing system to the CNS, in this example, the Gene Writer is split across two AAV genomes, with the first encoding the nickase Cas9 domain fused to intein-N of a split intein pair (DnaE Intein-N: CLSYETEILTVEYGLLPIGKIVEKRIECTVYSVDNNGNIYTQPVAQWHDRGEQEVFEYCLEDGSLIRATKDHKFMTVDGQMLPIDEIFERELDLMRVDNLPN (SEQ ID NO: 1638)) and the second encoding the RT domain fused to an intein-C of a split intein pair (DnaE Intein-C, MIKIATRKYLGKQNVYDIGVERDHNFALKNGFIASN (SEQ ID NO: 1640)) and the template RNA. The two polypeptide components are expressed from a polymerase II promoter, e.g. a neuronal cell-specific promoter described herein, and the template RNA and gRNA for providing a second nick are expressed from a polymerase III promoter, e.g. a U6 promoter. When co-infecting a cell, the two polypeptide components reconstitute a complete Gene Writer polypeptide with N-terminal Cas9 and C-terminal RT and the template RNA is expressed and reverse transcribed into the target locus. To achieve delivery for cells of the CNS (specifically the claudate nucleus and the putamen of the basal ganglia), the pseudotyped system rAAV2/1 is used here, where the AAV2 ITRs are used to package the described nucleic acids into particles with AAV1 capsid. AAV preparation and mouse injection and harvesting protocols used here follow the teachings of Monteys et al. Mol Ther 25(1):12-23 (2017).

[1250] FVB-Tg(YAC128)53Hay/J mice are acquired from The Jackson Laboratory. These transgenic mice express the full-length human huntingtin protein with ˜118 glutamine repeats (CAG trinucleotide repeats) and develop hyperkinesis at three months of age. At 8 weeks of age, mice are treated with a combination 1:1 of rAAV2/1-Cas9 virus and rAAV-MMLV_RT/hU6templateRNA virus. For rAAV injections, mice are anesthetized with isoflurane and 5 μL of rAAV mixture injected unilaterally into the right striata at 0.2 μL/min. After three weeks, mice are sacrificed and brain tissue taken for genomic DNA extraction and NGS analysis.

[1251] For NGS analysis of editing efficiency, PCR primers are designed flanking the target site, and the region of interest is amplified from extracted genomic DNA. Additional PCR is performed in accordance with the manufacturer's protocols (Illumina) to add the necessary chemistry for sequencing, and amplicons are then sequenced on an Illumina MiSeq. Sequencing reads are aligned to the mouse reference genome after eliminating those having low quality scores. The resultant files containing the reads are mapped to the reference genome (BAM files), where reads that overlap the target region of interest are selected, and the number of diseased allele (>35 CAG repeats) reads versus the number of repaired allele (10-35 CAG repeats) reads are calculated. The editing percentage (e.g., the “editing efficiency” or “percent editing”) is defined as the total number of repaired reads, as defined above, over the total number of sequence reads.

### Example 25: Delivery of a Gene Writing System by LNP and AAV Vehicles

[1252] This example describes the use of a Gene Writer™ gene editing system to alter a genomic sequence at a single nucleotide in vivo. More specifically, the Gene Writer™ polypeptide and writing template are delivered to mouse liver cells via a combination of lipid nanoparticles (mRNA encoding polypeptide) and AAV (DNA encoding the RNA template) to correct the SERPINA1 PiZ mutation causing alpha-1 antitrypsin deficiency.

[1253] Capped and tailed mRNA encoding the Gene Writer polypeptide are prepared by in vitro transcription and formulated into LNP-INT01 as described in Example 23, but without template RNA co-formulation.

[1254] In this example, the template RNA is encoded as DNA and delivered via AAV. The teachings of Cunningham et al. Mol Ther 16(6):1081-1088 (2008) describe the use of rAAV2/8 with the human alpha-1 antitrypsin (hAAT) promoter and two copies of the hepatic control region of the apolipoprotein E enhancer (ApoE) to effectively transduce and drive expression of cargo in juvenile mouse liver. Accordingly, rAAV2/8.ApoE-hAAT.PiZ (rAAV2/8.PiZ) as described here comprises the above described AAV and promoter system driving expression of an RNA template for correcting the PiZ mutation, in addition to a second nick-directing gRNA being driven by a U6 promoter (RNA sequences previously described in Example 1).

[1255] NGS-PiZ mice carrying the human SERPINA1 PiZ allele (E342K) are acquired from The Jackson Laboratory. To assess the activity of Gene Writing to edit the mutant allele in vivo, 8-week-old mice are dosed i.p. with ˜10¹¹ vg of rAAV2/8.PiZ to express the template RNA and via the lateral tail vein with formulated LNPs at 3 mg/kg in a volume of 0.2 mL per animal to express the Gene Writer polypeptide. Animals are euthanized at various time points by exsanguination via cardiac puncture under isoflurane anesthesia. In some embodiments, animals are euthanized at one week post-treatment to be analyzed for Gene Writing. Liver tissue is collected from the median or left lateral lobe from each animal for DNA extraction and analysis.

[1256] For NGS analysis of editing efficiency, PCR primers are designed around the target site, and the region of interest is amplified from extracted genomic DNA. Additional PCR is performed in accordance with the manufacturer's protocols (Illumina) to add the necessary chemistry for sequencing, and amplicons are then sequenced on an Illumina MiSeq. Sequencing reads are aligned to the mouse reference genome after eliminating those having low quality scores. The resultant files containing the reads are mapped to the reference genome (BAM files), where reads that overlap the target region of interest are selected, and the number of wild-type reads versus the number of reads that contain the SERPINA1 reversion mutation encoded in the template RNA are calculated. The editing percentage is defined as the total number of reversion sequence reads over the total number of sequence reads.

### Example 26: Application of a Gene Writer™ System for Delivering Therapeutic Gene to Liver in a Human Chimeric Liver Mouse Model

[1257] This example describes a Gene Writer™ genome editing system delivered to the liver in vivo for integration and stable expression of a genetic payload. Specifically, LNPs are used to deliver a Gene Writing system capable of integrating a complete OTC expression cassette to treat a humanized mouse model of OTC-deficiency.

[1258] In this example, a Gene Writing system is used to treat a humanized mouse model of OTC deficiency, in which human hepatocytes derived from patients with OTC deficiency are engrafted into a mouse model (Ginn et al JHEP Reports 2019). An exemplary Gene Writing system for large payload integration comprises a Cas9-directed reverse transcriptase system utilizing a highly processive reverse transcriptase, e.g., MarathonRT. An exemplary template RNA component comprises, from 5′ to 3′, (1) a gRNA spacer with homology to the AAVS1 safe harbor site, (2) a gRNA scaffold, (3) a heterologous object sequence, and (4) a 3′ target homology region for annealing to the genomic DNA immediately upstream of the first strand nick to prime TPRT of the heterologous object sequence. An exemplary sequence for (1) is GGGGCCACTAGGGACAGGAT (SEQ ID NO: 1689). Region (2) carries the gRNA scaffold as described in this application, generally comprising the sequence GTTTTAGAGCTAGAAATAGCAAGTTAAAATAAGGCTAGTCCGTTATCAACTTGAAAAAGTGGGACCGAGTCGGTCC (SEQ ID NO: 1591). In this example, (3) comprises a complete OTC expression cassette, where a liver-codon-optimized sequence encoding human OTC (UniProt P00480) is in operable association with the ApoE.hAAT promoter system as described in Example 25. An exemplary sequence for (4) is CTGTCCCTAGTG (SEQ ID NO: 1690). An exemplary sequence of an additional gRNA spacer for generating a second strand nick to improve the efficiency of integration is AGAGAGATGGCTCCAGGAAA (SEQ ID NO: 1691).

[1259] Eight to 12-week-old female Fah^{-/-}Rag2^{-/-}Il2rg^{-/-} (FRG) mice are engrafted with human hepatocytes, isolated from pediatric donors or purchased from Lonza (Basel, Switzerland), as described previously (Azuma et al Nat Biotechnol 2007). Engrafted mice are cycled on and off 2-(2-nitro-4-trifluoro-methylbenzoyl)-1,3-cyclohexanedione (NTBC) in drinking water to promote liver repopulation. Blood is collected every two weeks and at the end of the experiment to measure the levels of human albumin, used as a marker to estimate the level of engraftment, in serum by enzyme-linked immunosorbent assay (ELISA; Bethyl Laboratories, Inc., Montgomery, TX). Eleven weeks after engraftment, mice are treated with the Gene Writer™s formulated as in Example 23. For treatment, LNPs are delivered via the lateral tail vein at 3 mg/kg in a volume of 0.2 mL per animal.

[1260] After vector injection, mice are cycled on NTBC for another 5 weeks before being euthanized. DNA and RNA are subsequently extracted from liver lysates by standard methods. OTC expression is subsequently assayed by performing RT-qPCR on isolated RNA samples using sequence-specific primers. Levels of human OTC are also measured throughout the experiment by using a human OTC ELISA kit (e.g., Aviva Systems Biology OTC ELISA Kit (Human) (OKCD07437)) on serum at Days −7, 0, 2, 4, 7, 14, 21, 28, and 35 post-injection, following the manufacturer's recommended protocol.

[1261] For analysis of editing efficiency, a ddPCR assay is performed using a pair of primers that anneal across either the 5′ junction or the 3′ junction of integration, with one primer in each set annealing to the heterologous object sequence, and the other to an appropriate region of the AAVS1 site on the genome. The assay is normalized to a reference gene to quantify the number of target site integrations per genome.

[1262] To analyze integrations at the target site, long-read sequencing across the integration site is performed. PCR primers are designed flanking the target site, and the region of interest is amplified from extracted genomic DNA. Additional PCR is performed in accordance with the manufacturer's protocols (PacBio) to add the necessary chemistry for sequencing, and amplicons are then sequenced via PacBio. Sequencing reads are aligned to the mouse reference genome after eliminating those having low quality scores. The resultant files containing the reads are mapped to the reference genome (BAM files), where reads that contain an insertion sequence relative to the reference genome are selected for further analysis to determine completeness of integration, defined in this example as containing the complete promoter and coding sequence of OTC.

### Example 27: Gene Writers for Integration of a CAR in T-Cells Ex Vivo

[1263] This example describes delivery of a Gene Writer™ genome editing system to T-cells ex vivo for integration and stable expression of a genetic payload. Specifically, LNPs are used to deliver a Gene Writing system capable of integrating a chimeric antigen receptor (CAR) into the TRAC locus to generate CAR-T cells for treating B-cell lymphoma.

[1264] In this example, a Gene Writing system comprises a Gene Writing polypeptide, e.g., a nickase Cas9 and R2Tg reverse transcriptase domain, as described herein, a gRNA for directing nickase activity to the target locus, and a template RNA comprising, from 5′ to 3′:
[1265] (1) 100 nt homology to target site 3′ of first strand nick
[1266] (2) 5′ UTR from R2Tg
[1267] (3) Heterologous object sequence
[1268] (4) 3′ UTR from R2Tg
[1269] (5) 100 nt homology to target site 5′ of first strand nick
   Wherein (3) comprises the coding sequence for the CD19-specific Hu19-CD828Z (Genbank MN698642; Brudno et al. Nat Med 26:270-280 (2020)) CAR molecule. The Gene Writer in this example is guided to the 5′ end of the first exon of TRAC by using a targeted gRNA, e.g., TCAGGGTTCTGGATATCTGT (SEQ ID NO: 1692), in order to place the cargo under endogenous expression control from that locus while disrupting the endogenous TCR, as taught by Eyquem et al. Nature 543:113-117 (2017). These three components (polypeptide, gRNA, and template) all comprise RNA, which is synthesized by in vitro transcription (e.g., polypeptide mRNA, template RNA) or chemical synthesis (gRNA).

[1270] The LNP formulation used in this example has been screened and validated for delivery to T-cells ex vivo, being taught in Billingsley et al. Nano Lett 20(3):1578-1589 (2020), which is incorporated herein by reference in its entirety. Specifically, the LNP formulation C14-4, comprising cholesterol, phospholipid, lipid-anchored PEG, and the ionizable lipid C14-4 (FIG. 2C of Billingsley et al. Nano Lett 20(3):1578-1589 (2020)) was used to encapsulate all three RNA components in a molar ratio of polypeptide mRNA:gRNA:template RNA of about 1:40:40.

[1271] Additional edits can be performed on T-cells in order to improve activity of the CAR-T cells against their cognate target. In some embodiments, a second LNP formulation of C14-4 as described comprises a Cas9/gRNA preformed RNP complex, wherein the gRNA targets the Pdcd1 exon 1 for PD-1 inactivation, which can enhance anti-tumor activity of CAR-T cells by disruption of this inhibitory checkpoint that can otherwise trigger suppression of the cells (see Rupp et al. Sci Rep 7:737 (2017)). The application of both nanoparticle formulation thus enables lymphoma targeting by providing the anti-CD19 cargo, while simultaneously boosting efficacy by knocking out the PD-1 checkpoint inhibitor. In some embodiments, cells may be treated with the nanoparticles simultaneously. In some embodiments, the cells may be treated with the nanoparticles in separate steps, e.g., first deliver the RNP for generating the PD-1 knockout, and subsequently treat cells with the nanoparticles carrying the anti-CD19 CAR. In some embodiments, the second component of the system that improves T cell efficacy may result in the knockout of PD-1, TCR, CTLA-4, HLA-I, HLA-II, CS1, CD52, B2M, MHC-I, MHC-II, CD3, FAS, PDC1, CISH, TRAC, or a combination thereof. In some embodiments, knockdown of PD-1, TCR, CTLA-4, HLA-I, HLA-II, CS1, CD52, B2M, MHC-I, MHC-II, CD3, FAS, PDC1, CISH, or TRAC may be preferred, e.g., using siRNA targeting PD-1. In some embodiments, siRNA targeting PD-1 may be achieved using self-delivering RNAi as described by Ligtenberg et al. Mol Ther 26(6):1482-1493 (2018) and in WO2010033247, incorporated herein by reference in its entirety, in which extensive chemical modifications of siRNAs, conferring the resulting hydrophobically modified siRNA molecules the ability to penetrate all cell types ex vivo and in vivo and achieve long-lasting specific target gene knockdown without any additional delivery formulations or techniques. In some embodiments, one or more components of the system may be delivered by other methods, e.g., electroporation. In some embodiments, additional regulators are knocked in to the cells for overexpression to control T cell- and NK cell-mediated immune responses and macrophage engulfment, e.g., PD-L1, HLA-G, CD47 (Han et al. PNAS 116(21):10441-10446 (2019)). Knock-in may be accomplished through application of an additional Gene Writing system with a template carrying an expression cassette for one or more such factors (3) with targeting to a safe harbor locus, e.g., AAVS1, e.g., using gRNA GGGGCCACTAGGGACAGGAT (SEQ ID NO: 1689) to target the Gene Writer polypeptide to AAVS1.

[1272] LNPs are used to treat primary T cells activated by Dynabeads at a 1:1 CD4⁺:CD8⁺ ratio at 450 ng/μL total mRNA concentrations. The resulting T cell populations are analyzed for integration, expression, and effect. For assessing integration, ddPCR is used with primers producing an amplicon extending from within the integrated CAR to the flanking genomic TRAC sequence. Comparing signal to a reference gene (e.g., RPP30), allows quantification of the average copy number per genome and integration efficiency. To analyze expression, flow cytometry with immunological probes is used to assess the level and percent of cells displaying surface CAR expression. To analyze activity of the CAR-T cells, treated cells are assessed via a co-plated cancer cell killing assay. By engineering Nalm6 ALL cells to express luciferase, cancer cell killing can be assessed by change in luminescence after co-culture with CAR-T cells as compared to signal from Nalm6 cells alone Billingsley et al. Nano Lett 20(3):1578-1589 (2020). Thus, a Gene Writing system can be used to generate CAR-T cells ex vivo with the desired cytotoxic activity.

### Example 28: Gene Writers for Integration of a CAR in T-Cells In Vivo

[1273] This example describes a Gene Writer™ genome editing system delivered to T-cells in vivo for integration and stable expression of a genetic payload. Specifically, targeted nanoparticles are used to deliver a Gene Writing system capable of integrating a chimeric antigen receptor (CAR) expression cassette into the murine Rosa26 locus to generate CAR-T cells in a murine model.

[1274] In this example, a Gene Writing system comprises a Gene Writing polypeptide, e.g., a nickase Cas9 and R2Tg reverse transcriptase domain, as described herein, a gRNA for directing nickase activity to the target locus, and a template RNA comprising, from 5′ to 3′:
[1275] (1) 100 nt homology to target site 3′ of first strand nick
[1276] (2) 5′ UTR from R2Tg
[1277] (3) Heterologous object sequence
[1278] (4) 3′ UTR from R2Tg
[1279] (5) 100 nt homology to target site 5′ of first strand nick
   Wherein (3) comprises the coding sequence for the CD19-specific m194-1BBz CAR driven by the EF1a promoter (Smith et al. Nat Nanotechnol 12(8):813-820 (2017)). The Gene Writer in this example is guided to the murine Rosa26 locus using a gRNA, e.g., ACTCCAGTCTTTCTAGAAGA (SEQ ID NO: 1693) (Chu et al. Nat Biotechnol 33(5):543-548 (2015)). Production of RNA molecules is as according to examples provided herein, e.g., by in vitro transcription (e.g., Gene Writer polypeptide mRNA, template RNA) and by chemical synthesis (e.g., gRNA). Modifications to the RNA components of the system are as described elsewhere. For Gene Writer mRNA, the sequence additionally comprises a 5′ UTR (e.g., GGGAAAUAAGAGAGAAAAGAAGAGUAAGAAGAAAUAUAAGAGCCACC (SEQ ID NO: 1603)) and a 3′ UTR (e.g., UGAUAAUAGGCUGGAGCCUCGGUGGCCAUGCUUCUUGCCCCUUGGGCCUCCCCCCAGCCCCUCCUCCCCUUCCUGCACCCGUACCCCCGUGGUCUUUGAAUAAAGUCUGA (SEQ ID NO: 1604)) flanking the coding sequence. This combination of 5′ UTR and 3′ UTR has been shown to result in good expression of an operably linked ORF (Richner et al. Cell 168(6): P 1114-1125 (2017)).

[1280] In order to achieve delivery specifically to T-cells, targeted LNPs (tLNPs) are generated that carry a conjugated mAb against CD4. See, e.g., Ramishetti et al. ACS Nano 9(7):6706-6716 (2015). Alternatively, conjugating a mAb against CD3 can be used to target both CD4⁺ and CD8⁺ T-cells (Smith et al. Nat Nanotechnol 12(8):813-820 (2017)). In other embodiments, the nanoparticle used to deliver to T-cells in vivo is a constrained nanoparticle that lacks a targeting ligand, as taught by Lokugamage et al. Adv Mater 31(41):e1902251 (2019).

[1281] The tLNP can be made by first preparing the nucleic acid mix (e.g., polypeptide mRNA:gRNA:template RNA molar ratio of 1:40:40) with a mixture of lipids (cholesterol, DSPC, PEG-DMG, Dlin-MC3-DMA, and DSPE-PEG-maleimide) and then chemically conjugating the desired DTT-reduced mAb (e.g., anti-CD4, e.g., clone YTS.177) to the maleimide functional group on the LNPs. See Ramishetti et al. ACS Nano 9(7):6706-6716 (2015).

[1282] Six to 8 week old C57BL6/J mice are injected intravenously with formulated LNP at a dose of 1 mg RNA/kg body weight. Blood is collected at one day and three days post-administration in heparin-coated collection tubes, and the leukocytes are isolated by density centrifugation using Ficoll-Paque PLUS (GE Healthcare). Five days post-administration, animals are euthanized and blood and organs (spleen, lymph nodes, bone marrow cells) are harvested for T-cell analysis. Expression of the anti-CD19 CAR is detected by FACS using specific immunological sorting. Positive cells are confirmed for integration by ddPCR on the sorted population, where primers are used that flank an integration junction, e.g., one primer of the pair annealing to the integrated cargo and the other to genomic DNA from the Rosa26 target site.

### Example 29: Assessment of Distance and PAM Orientation Between the First and Second Nicks to Reduce Non-Templated Indel Formation During Gene Writing

[1283] This examples describes how the placement of a second nick used in a Gene Writing system can be optimized to (1) increase the frequency of installation of a desired edit using a Gene Writer polypeptide with a template RNA, while (2) decreasing undesired insertions and/or deletions that may arise as a byproduct of the second nick.

[1284] An exemplary Gene Writing system can install a desired genomic modification (e.g., an insertion, deletion, or point mutation) using 1) a template RNA that comprises a gRNA and a heterologous object sequence comprising the desired genomic modification, and 2) a Gene Writing polypeptide comprising a nickase Cas9 (e.g., Cas9 N863A) fused to a reverse transcriptase (RT) (e.g., an RT domain from MMLV). In said exemplary Gene Writing system, the Cas9-RT fusion introduces a first nick, which exposes an available 3′OH to initiate the reverse transcriptase reaction using the template RNA as a template for target primed reverse transcription. The placement of a second nick adjacent to, but on the opposite strand as the first nick, enhances the installation of the desired genome modification.

[1285] In this experiment, a 3 nt insertion (CTT) is directed to the HEK3 locus. The template RNA for the insertion comprises (1) a gRNA spacer with homology to the HEK3 site, (2) a gRNA scaffold, (3) a heterologous object sequence including the CTT insertion, and (4) a 3′ target homology region for annealing to the genomic DNA immediately upstream of the first strand nick to set up target-primed reverse transcription of the heterologous object sequence. The sequence of the template RNA used is (5′-3′) GGCCCAGACTGAGCACGTGAGTTTTAGAGCTAGAAATAGCAAGTTAAAATAAGGCTAGTCC GTTATCAACTTGAAAAAGTGGCACCGAGTCGGTGCTCTGCCATCA<AAG>CGTGCTCAGTCTG (SEQ ID NO: 3579), where “< >” is used to denote the insertion sequence.

[1286] In addition, a set of second nick gRNAs, targeting a nick to the opposite DNA strand as the first nick, were designed that place a second nick either upstream or downstream of the location of the desired CTT insertion at various distances ranging from 26 to 257 bp. The upstream second nick creates a set of nicks with an inward orientation, with the PAM sites out (PAM-out), while the downstream second nick creates a set of nicks with an outward orientation, with the PAM sites inside the nicks (PAM-in), as described herein. Second nick gRNAs were designed using a web-based tool and are listed in Tables E5 and E6. The distance between dual nicks indicates the distance between the first nick directed by the template RNA and the second nick directed by the second nick gRNA, and the PAM orientation (e.g., “PAM-in” and thus outward orientation, or “PAM-out” and thus inward orientation) is provided with respect to the first nick as depicted in FIG. 31.

TABLE E5
gRNA targeting the second nick upstream of the
first nick in “PAM-out” orientation

| | | Distance | | |
|---|---|---|---|---|
| PAM | | between | | |
| orientation | | dual | | |
| to first | | nicks | | PAM |
| nick | Orientation | (nts) | sgRNA Sequence | Sequence |
| out | antisense | 28 | TGGGCCCCAAGGATTGACCC | AGG |
| | | | (SEQ ID NO: 1695) | |
| out | antisense | 33 | CCCAAGGATTGACCCAGGCC | AGG |
| | | | (SEQ ID NO: 1696) | |
| out | antisense | 34 | CCAAGGATTGACCCAGGCCA | GGG |
| | | | (SEQ ID NO: 1697) | |
| out | antisense | 38 | GGATTGACCCAGGCCAGGGC | TGG |
| | | | (SEQ ID NO: 1698) | |
| out | antisense | 108 | GCAGAAATAGACTAATTGCA | TGG |
| | | | (SEQ ID NO: 1699) | |
| out | antisense | 109 | CAGAAATAGACTAATTGCAT | GGG |
| | | | (SEQ ID NO: 1700) | |
| out | antisense | 120 | TAATTGCATGGGCGTTTCCC | TGG |
| | | | (SEQ ID NO: 1701) | |
| out | antisense | 121 | AATTGCATGGGCGTTTCCCT | GGG |
| | | | (SEQ ID NO: 1702) | |
| out | antisense | 136 | TCCCTGGGATCCCTGTCTCC | AGG |
| | | | (SEQ ID NO: 1703) | |
| out | antisense | 161 | TCTCTCATCCATGCCTTTCT | AGG |
| | | | (SEQ ID NO: 1704) | |
| out | antisense | 197 | CCCTTGCTTAAAACTCTCCA | AGG |
| | | | (SEQ ID NO: 1705) | |
| out | antisense | 222 | TCTCATGCCAAGCTCCCTGC | AGG |
| | | | (SEQ ID NO: 1706) | |
| out | antisense | 232 | AGCTCCCTGCAGGACATCCC | AGG |
| | | | (SEQ ID NO: 1707) | |
| out | antisense | 240 | GCAGGACATCCCAGGCCCTC | TGG |
| | | | (SEQ ID NO: 1708) | |
| out | antisense | 241 | CAGGACATCCCAGGCCCTCT | GGG |
| | | | (SEQ ID NO: 1709) | |
| out | antisense | 255 | CCCTCTGGGACAGCAGCTCA | CGG |
| | | | (SEQ ID NO: 1710) | |
| out | antisense | 256 | CCTCTGGGACAGCAGCTCAC | GGG |
| | | | (SEQ ID NO: 1711) | |

TABLE E6
gRNA targeting the second nick downstream of the
first nick in “PAM-in” orientation

| | | Distance | | |
|---|---|---|---|---|
| PAM | | between | | |
| orientation | | dual | | |
| to first | | nicks | | PAM |
| nick | Orientation | (nts) | sgRNA Sequence | Sequence |
| In | antisense | 26 | GACGCCCTCTGGAGGAAGCA | GGG |
| | | | (SEQ ID NO: 1712) | |
| In | antisense | 27 | CGACGCCCTCTGGAGGAAGC | AGG |
| | | | (SEQ ID NO: 1713) | |
| In | antisense | 34 | TGTCCTGCGACGCCCTCTGG | AGG |
| | | | (SEQ ID NO: 1714) | |
| In | antisense | 37 | AGCTGTCCTGCGACGCCCTC | TGG |
| | | | (SEQ ID NO: 1715) | |
| In | antisense | 63 | GCACATACTAGCCCCTGTCT | AGG |
| | | | (SEQ ID NO: 1716) | |
| In | antisense | 90 | GTCAACCAGTATCCCGGTGC | AGG |
| | | | (SEQ ID NO: 1717) | |
| In | antisense | 96 | AAACTTGTCAACCAGTATCC | CGG |
| | | | (SEQ ID NO: 1718) | |
| In | antisense | 133 | CCAGGGACCTCCCTAGGTGC | TGG |
| | | | (SEQ ID NO: 1719) | |
| In | antisense | 139 | CCCCTTCCAGGGACCTCCCT | AGG |
| | | | (SEQ ID NO: 1720) | |
| In | antisense | 150 | GGTGAGGCTGGCCCCTTCCA | GGG |
| | | | (SEQ ID NO: 1721) | |
| In | antisense | 151 | TGGTGAGGCTGGCCCCTTCC | AGG |
| | | | (SEQ ID NO: 1722) | |
| In | antisense | 162 | CCCTCCTCTCCTGGTGAGGC | TGG |
| | | | (SEQ ID NO: 1723) | |
| In | antisense | 166 | AGGTCCCTCCTCTCCTGGTG | AGG |
| | | | (SEQ ID NO: 1724) | |
| In | antisense | 171 | GGGCCAGGTCCCTCCTCTCC | TGG |
| | | | (SEQ ID NO: 1725) | |
| In | antisense | 186 | GAGCTCGACCCTGAAGGGCC | AGG |
| | | | (SEQ ID NO: 1726) | |
| In | antisense | 191 | CTGTTGAGCTCGACCCTGAA | GGG |
| | | | (SEQ ID NO: 1727) | |
| In | antisense | 192 | TCTGTTGAGCTCGACCCTGA | AGG |
| | | | (SEQ ID NO: 1728) | |
| In | antisense | 233 | GCTGAAAGCCACTGGGCTCT | GGG |
| | | | (SEQ ID NO: 1729) | |
| In | antisense | 234 | TGCTGAAAGCCACTGGGCTC | TGG |
| | | | (SEQ ID NO: 1730) | |
| In | antisense | 240 | TGCAGGTGCTGAAAGCCACT | GGG |
| | | | (SEQ ID NO: 1731) | |
| In | antisense | 241 | ATGCAGGTGCTGAAAGCCAC | TGG |
| | | | (SEQ ID NO: 1732) | |
| In | antisense | 257 | TTGATCTCTGATTTTCATGC | AGG |
| | | | (SEQ ID NO: 1733) | |

[1287] To conduct the experiment, 200,000 U2OS cells in 20 μL SE buffer are nucleofected with 800 ng of plasmid encoding the Gene Writer polypeptide (N863ACas9-RT), 200 ng of template RNA, and 83 ng of a second nick gRNA listed in Tables E5 and E6. The Lonza Amaxa nucleofection system is used with the nucleofection code DN100. After nucleofection, 80 μL of DMEM+10% FBS medium are added to the cell suspension and the cells are plate in a 24 well plate with 500 μL of DMEM+10% oFBS. Genomic DNA is extracted at day 3 post-nucleofection.

[1288] To analyze extracted DNA for the desired CTT insertion, amplicon sequencing is performed as described herein by amplifying the HEK locus using primers surrounding the first nick. The anticipated 300-350 bp amplicon is then sequenced on an Illumina MiSeq. The frequency of the desired CCT insertions is determined using the CRISPResso computational analysis pipeline (Clement et al. Nat Biotechnol 37(3):224-226 (2019)).

[1289] To measure undesired insertions and/or deletions arising as byproducts of the reaction, long-range amplification is performed with primers located >1.5 kb upstream and downstream of the first nick site, producing an amplicon >3 kb. This amplicon is sequenced using long-read sequencing (e.g., PacBio) and analyzed for the presence of insertions and deletions resulting from the dual nicking.

[1290] In some embodiments, a reaction using a second nick gRNA that cuts downstream of the first nick and provides a “PAM in” or outward orientation results in fewer unintended mutations (e.g., mutations in the target site other than the targeted CTT insertion) as compared to gRNAs placed upstream of the first nick at a similar distance but providing a “PAM-out” or inward orientation, as measured by the methods described herein. In other embodiments, a second nick gRNA that cuts upstream of the first nick and provides a “PAM-out” or inward orientation results in fewer undesired mutations (e.g., mutations in the target site other than the targeted CTT insertion) when the distance between the first and second nick is at least 100 nt as compared to a second nick gRNA providing a distance between the first and second nick of less than 100 nt, as measured by the methods described herein.

[1291] Thus, in some embodiments, a preferred design for a second nick gRNA is one resulting in 1) a “PAM-in” or outward orientation, or 2) a “PAM-out” or inward orientation with at least 100 nt separation between the first and second nicks (FIG. 32).

### Example 30: Design and Human Cell Expression of Gene Writing Systems Utilizing Various Cas-RT Fusions

[1292] This example describes the construction and expression of Gene Writing polypeptides comprising fusions of Cas and reverse transcriptase domains in mammalian cells. Gene Writing polypeptides with these domains have been shown herein to enable the precise, site-specific modification of a DNA target from an RNA template molecule. Here, we describe the expression of a library of domains to create novel systems that may have diverse functional characteristics. More specifically, described here are fusion proteins comprising 1) a Cas-nuclease containing a mutation inactivating one endonuclease active site, e.g., the Cas9 nickase Cas9(N863A); 2) a peptide-linker to connect the functional protein domains, e.g., a sequence from Table 38 or 42, e.g., SGGSSGGSSGSETPGTSESATPESSGGSSGGSS (SEQ ID NO: 1589); and 3) a reverse transcriptase (RT), e.g., an RT domain described in this application, e.g., an RT domain comprising a sequence from Table 1, Table 3, Table 30, Table 31, or Table 41, or a derivative thereof may be used in such an assay, collectively referred to in this Example as Cas-RT. Accordingly, Cas-RT fusion proteins are assembled on a plasmid and co-delivered with a single guide RNA (sgRNA) expression plasmid to validate system expression in human cells.

[1293] Gene Writer polypeptides generated by Cas-RT domain fusions assayed here comprised: (1) a Cas9 wild-type or Cas9(N863A) nickase domain; (2) a peptide linker (SGGSSGGSSGSETPGTSESATPESSGGSSGGSS (SEQ ID NO: 1589)); (3) a selection of RT domains from Table 1 and Table 30 taken from diverse sources; and (4) at least one nuclear localization signal. U2OS or HEK293T cells were transfected by Lonza Amaxa nucleofection of 250,000 cells/well with ˜800 ng of Cas9(N863A)-RT fusion plasmid with 200 ng of a sgRNA plasmid. To assess the expression level of Cas9-RT fusions, cell lysates were collected on day 2 post-transfection and analyzed by Western blot using a primary antibody against Cas9. Several Cas9-RT fusions showed appreciable protein expression (FIG. 33), suggestive of expression levels sufficient for Gene Writing activity. Notably, a wide range of expression levels is observed for the different Cas9-RT constructs, demonstrating the impact of the fusion design and RT selection on expression level of Cas-RT in cells.

### Example 31: Improvement of Expression of Cas-RT Fusions Through Linker Selection

[1294] This example demonstrates the optimization of Cas-RT fusions to improve protein expression in mammalian cells. As described in Example 30, construction of novel Cas-RT fusions by the simple substitution of new functional domains may result in low or moderate expression of the Gene Writer polypeptide. Thus, it is contemplated here that modified configurations of the fusion may be advantageous in the context of different domains. Without wishing to be limited by the example, one such approach for improving the expression and stability of new fusions is through the use of a linker library. Here, the peptide linker sequence between the Cas and RT domains of the Cas-RT fusion is varied using a library of linker sequences. More specifically, linkers from Table 42 were used to generate new variants of a Cas9-RT fusion construct previously demonstrating low protein expression (see Example 30 and FIG. 33) and delivered to human cells to screen for improved Cas-RT protein expression.

[1295] A set of 22 peptide linkers (Table 42) with varying degrees of length, flexibility, hydrophobicity, and secondary structure was first used to generate variants of a Cas-RT fusion protein by substitution of the original linker (see Example 30). HEK293T cells were transfected by electroporation of 250,000 cells/well with ˜800 ng of each Cas9-RT fusion plasmid along with 200 ng of a single-guide RNA plasmid. To assess the expression level of Cas9-RT fusions, cell lysates were collected on day 2 post-transfection and analyzed by Western blot using a primary antibody against Cas9. linker 10 listed in Table 38 significantly improved Cas-RT fusion expression (FIG. 34), demonstrating the potentially profound impact of the peptide linker sequence on Cas-RT expression.

TABLE 42
Peptide sequences used as linkers between
the Cas and RT domains in Gene Writer
polypeptides comprising Cas-RT fusions

| | | SEQ ID | |
|---|---|---|---|
| # | Linker sequence | NO: | Notes |
| 1 | GGS | | Short |
| 2 | GGGGS | 1535 | Flexible, short |
| 3 | (GGGGS)₂ | 3303 | Flexible |
| 4 | (GGGGS)₃ | 3304 | Flexible, long |
| 5 | (GGGGS)₄ | 3305 | Flexible, very |
| | | | long |
| 6 | (G)₆ | 3310 | Flexible |
| 7 | (G)₈ | 3312 | Flexible |
| 8 | GSAGSAAG | 3410 | Flexible |
| | SGEF | | |
| 9 | (GSSGSS) | 1736 | Mid |
| 10 | (GSSGSS)₂ | 3314 | Mid, Flexible |
| 11 | (GSSGSS)₃ | 3316 | Mid |
| 12 | SGSETPGTS | 1023 | XTEN |
| | ESATPES | | |
| 13 | (EAAAK) | 1534 | Rigid helix, |
| | | | short |
| 14 | (EAAAK)₂ | 3317 | Rigid helix, |
| | | | mid |
| 15 | (EAAAK)₃ | 3318 | Rigid helix, |
| | | | long |
| 16 | PAP | | Rigid, short |
| 17 | PAPAP | 3322 | Rigid, short |
| 18 | PAPAPAPAP | 3324 | Rigid, mid |
| 19 | A(EAAAK)₄AL | 3407 | Rigid, very |
| | EA(EAAAK)₄A | | long with |
| | | | helices |
| 20 | GGGGS(EAAAK) | 3408 | Flexible- |
| | GGGGS | | helix-flex |
| 21 | (EAAAK)GGGGS | 3409 | Helix-flex- |
| | (EAAAK) | | helix |
| 22 | SGGSSGGSSGS | 1589 | Flexible- |
| | ETPGTSESATP | | XTEN- |
| | ESSGGSSGGSS | | flexible |

### Example 32: Cas-Mediated Cleavage Activity of Gene Writers Comprising Cas-RT Fusions

[1296] This example demonstrates the ability of Cas-RT fusions to retain functionality of the protein domains. Specifically, by assaying cells treated with Gene Writer polypeptides comprising a cleavage-competent Cas domain (cleavase), DNA binding can be read by target site analysis to demonstrate activity of Cas in the context of the fusions. Here, such Cas-RT cleavase fusions in which both nuclease active sites are functional, e.g., Cas9(wild-type)-RT, were co-delivered on plasmid vectors along with a sgRNA-expression plasmid to target the Cas to the AAVS1 site in human cells. Analysis of indel formation at the predicted cleavage site in AAVS1 by Cas-RT cleavase fusions functioned as a readout of both DNA binding activity and endonuclease activity, thereby confirming effective DNA targeting by the Cas-RT fusions.

[1297] Cas-RT fusions with fully functional endonuclease domains, e.g., comprising wild-type Cas9 with both nuclease active sites intact, e.g., Cas9(N863), were generated from Cas-RT fusion proteins described herein, e.g., comprising a Cas9 nickase, e.g., Cas9(N863A), in order to increase the sensitivity of detection of DNA binding and cleavage. Since the intact Cas9 nuclease can cut both strands to generate a double-stranded cleavage event in the genome, repair of these sites generates a higher mutation (indel) signal than repair of a single-stranded DNA nick. Thus, the frequency of indel formation of the fusions was compared to that of unfused, wild-type Cas9 in order to assess the maintenance of Cas functionality when placed in the context of the novel Cas-RT fusions.

[1298] U2OS or HEK293T cells were transfected by Lonza Amaxa nucleofection of 250,000 cells/well with ˜800 ng of Cas9(WT)-RT fusion plasmid along with 200 ng of a sgRNA plasmid to produce the gRNA targeting Cas9 to AAVS1 (Table 43 gRNA P7). To assess the DNA binding and cleavage activity of Cas9-RT cleavase fusions, genomic DNA (gDNA) was collected on day 3 post-transfection. Indel patterns in the gDNA were analyzed by amplicon sequencing at loci targeted by the sgRNA. Sequencing results were analyzed by the CRISPResso2 pipeline (Clement et al Nat Biotechnol 37(3):224-226 (2019)). All tested Cas-RT cleavase fusions showed indel formation commensurate to their respective protein expression levels (FIG. 33), indicating that Cas-mediated DNA binding activity is retained in Cas-RT fusions (FIG. 35).

### Example 33.1: Gene Writers Comprising Cas-RT Fusions with Various RT Domains Enable Precise Editing in Human Cells

[1299] This example demonstrates the ability of multiple tested Cas-RT fusions to programmably install mutations in genomic DNA in human cells. More specifically, the reverse transcriptase domain of Cas-RT fusions, e.g., an RT domain described in this application, was varied to determine the genome editing capacity of Cas-RT fusions employing novel RT combinations. Template RNAs were co-delivered on plasmid vectors along with Cas-RT expression plasmids in human cells to determine the Rewriting activity of Cas-RT fusions.

[1300] In order to generate domain libraries for Gene Writer polypeptides, Cas effector proteins were selected; see in Table 37 and Table 40A. Additional Cas9 domains were further selected for use in the Gene Writer polypeptides described herein, as features including PAM requirements of a target sequence, predicted mutations for conferring nickase activity (e.g., D10A, H840A, or N863A for SpCas9), and gRNA features including single-guide composition, e.g., specific spacer parameters and gRNA scaffold sequence for conferring polypeptide binding for the cognate Cas enzyme, were able to be determined (Table 40A). Linker sequences to connect Cas and RT domains were collected based on a search for diversity of length, flexibility, and composition in order to optimize fusion proteins (Tables 38 and 42). Optimization of fusion expression by linker screening is further described in Example 31. Reverse transcriptase domains were mined from a variety of sources using literature and RT protein domain signatures as described in this application, including from non-LTR retrotransposons, LTR retrotransposons, group II introns, diversity-generating elements, retrons, telomerases, retroplasmids, retroviruses, and polymerases with evolved RNA-dependent DNA polymerase activity (e.g., an RT domain comprising a sequence from Table 1, Table 3, Table 30, Table 31, Table 44, or Table N41, or a derivative thereof may be used in such an assay).

[1301] Specifically, to assess the use of novel RT domains in the context of a Gene Writer polypeptide to successfully edit the genome, a subset of exemplary RT domains from retroviruses was selected for fusion to a Cas9(N863A) nickase. Briefly, a database of POL proteins from Retroviridae was first generated and then prioritized (see The UniProt Consortium Nucleic Acids Res 47(D1):D506-D515 (2019); Mitchell et al. Nucleic Acids Res 47(D1):D351-D360 (2019)). Though not wishing to be limited by such example, retroviral RTs from the genera Betaretrovirus, Deltaretrovirus, Gammaretrovirus, and Spumavirus may function as monomeric proteins (see, for example, Table 1 from Herschhorn et al Cell Mol Life Sci 67(16):2717-2747 (2010)) and thus may be advantageous for use in a fusion protein, as described herein. A selection of retroviral monomeric RT sequences emerging from the analysis with these criteria is shown in Table 44. Further, mutations that have been shown to stabilize RT domains, as described in this application and in the literature (Table 45) (Anzalone et al Nat Biotechnol 38(7):824-844 (2020); Baranauskas et al Protein Eng Des Sel 25(10):657-668 (2012); Arezi and Hogrefe Nucleic Acids Res 37(2):473-481 (2009); Yasukawa et al J Biotechnol 150(3):299-306 (2010); the findings of which as they relate to improving RT stability and function are incorporated herein in their entirety), were analyzed for application to candidate RT domains (positions provided here based on the MMLV RT amino acid sequence as reference). As examples, MMLV RT with the mutational profile L139P/D200N/T330P/L603W/E607K showed an approximately 65-fold increase in processivity and 48-fold increase in template affinity (Baranauskas et al Protein Eng Des Sel 25(10):657-668 (2012)) and increased efficiency of prime editing of genomic DNA by a range of 1.6-5.1-fold with mutational profile D200N/T306K/W313F/T330P/L603W (Anzalone et al Nat Biotechnol 38(7):824-844 (2020)). From these studies, the core set of D200N/T330P/L603W was identified and an alignment of RT domains from the retroviral genera described here was used to predict the relevant amino acid positions where conserved (FIG. 36 A). The additional mutations T306K and/or W313F were also applied where relevant and L139P and/or E607K was used when neither mutation of the T306K/W313F set was able to be applied (FIG. 36 B). Cas9 nickase fusions with these wild-type RT domains or mutational variants with potentially improved activity were generated and exemplary fusions are described in Table 46.

[1302] To generate precise edits using Gene Writer Cas-RT fusions, Template RNAs were constructed to template reverse transcription of an edit into the genomic target site by the RT domain. Template RNAs were designed to comprise (i) a gRNA spacer sequence for guiding the Cas-RT to the target region, e.g., a sequence complementary to a 20-nucleotide sequence in the HEK3 locus; (ii) a primer-binding sequence capable of complementary base pairing with a single strand of the nicked DNA for target-primed reverse transcription; (iii) a heterologous object sequence providing a template for reverse transcription that further comprises the intended final target sequence; and (iv) a gRNA scaffold sequence to associate with the Cas9 domain of the Cas9-RT polypeptide fusion. The constructs employed here specifically followed the 5′ to 3′ orientation (i), (iv), (iii), (ii). Template RNAs encoded on plasmids were cloned such that expression was driven by the U6 promoter and transcription termination controlled by a 7 nt polyT stretch following the primer-binding sequence at the 3′ end of the Template RNA cassette. Template compositions are described in Table 43 (Templates P1, P2, P3).

[1303] U2OS or HEK293T cells were transfected by electroporation of 250,000 cells/well with ˜800 ng of Cas9-RT(MMLV) fusion expression plasmid, 200 ng of a Template RNA expression plasmid, and 83 ng of an additional second-nick gRNA (2gRNA P5) expression plasmid (Table 43). To assess the genome editing capacity of Cas-RT fusions, genomic DNA (gDNA) was collected on day 3 post-transfection. The frequency of intended (exact and scarless edit as designed) versus unintended (any non-intended changes to the target sequence) edits (“Activity ratio”) at target loci were analyzed by amplicon sequencing. As used herein, amplicon sequencing of a target site comprises the use of site-specific primers in PCR amplification of the target site, sequencing of amplicons on an Illumina MiSeq, and detection and characterization of editing events using the CRISPResso2 pipeline (Clement et al Nat Biotechnol 37(3):224-226 (2019)). Several Cas-RT fusions showed appreciable genome editing activity, with multiple Cas-RT fusions having Activity Ratios of ˜3 (FIG. 37), demonstrating that various Cas-RT fusions drawing from reverse transcriptase domains described herein can efficiently and precisely encode edits into the human genome.

TABLE 43
List of Template RNA and gRNA used in select examples.

| Name | Description | spacer | scaffold | RT + ins | PBS | Template RNA |
|---|---|---|---|---|---|---|
| Tem- | HEK3_8PBS_10RT | GGCCCAGACTGA | GTTTTAGA | TCTGCCATCAA | CGTG | GGCCCAGACTGAG |
| plate | (CTTat1) | GCACGTGA (SEQ | GCTAGAAA | AG (SEQ ID NO: | CTCA | CACGTGAGTTTTAG |
| P1 | | ID NO: 3574) | TAGCAAGT | 3576) | | AGCTAGAAATAGC |
| | | | TAAAATAA | | | AAGTTAAAATAAG |
| | | | GGCTAGTC | | | GCTAGTCCGTTATC |
| | | | CGTTATCA | | | AACTTGAAAAAGT |
| | | | ACTTGAAA | | | GGCACCGAGTCGGT |
| | | | AAGTGGCA | | | GCTCTGCCATCAAA |
| | | | CCGAGTCG | | | GCGTGCTCA (SEQ |
| | | | GTGC (SEQ | | | ID NO: 3577) |
| | | | ID NO: 3575) | | | |
| Tem- | HEK3_13PBS_10RT | GGCCCAGACTGA | GTTTTAGA | TCTGCCATCAA | CGTG | GGCCCAGACTGAG |
| plate | (CTTat1) | GCACGTGA (SEQ | GCTAGAAA | AG (SEQ ID NO: | CTCA | CACGTGAGTTTTAG |
| P2 | | ID NO: 3574) | TAGCAAGT | 3576) | GTCT | AGCTAGAAATAGC |
| | | | TAAAATAA | | G | AAGTTAAAATAAG |
| | | | GGCTAGTC | | (SEQ | GCTAGTCCGTTATC |
| | | | CGTTATCA | | ID | AACTTGAAAAAGT |
| | | | ACTTGAAA | | NO: | GGCACCGAGTCGGT |
| | | | AAGTGGCA | | 3578) | GCTCTGCCATCAAA |
| | | | CCGAGTCG | | | GCGTGCTCAGTCTG |
| | | | GTGC (SEQ | | | (SEQ ID NO: 3579) |
| | | | ID NO: 3575) | | | |
| Tem- | HEK3_17PBS_10RT | GGCCCAGACTGA | GTTTTAGA | TCTGCCATCAA | CGTG | GGCCCAGACTGAG |
| plate | (CTTat1) | GCACGTGA (SEQ | GCTAGAAA | AG (SEQ ID NO: | CTCA | CACGTGAGTTTTAG |
| P3 | | ID NO: 3574) | TAGCAAGT | 3576) | GTCT | AGCTAGAAATAGC |
| | | | TAAAATAA | | GGGC | AAGTTAAAATAAG |
| | | | GGCTAGTC | | C | GCTAGTCCGTTATC |
| | | | CGTTATCA | | (SEQ | AACTTGAAAAAGT |
| | | | ACTTGAAA | | ID | GGCACCGAGTCGGT |
| | | | AAGTGGCA | | NO: | GCTCTGCCATCAAA |
| | | | CCGAGTCG | | 3580) | GCGTGCTCAGTCTG |
| | | | GTGC (SEQ | | | GGCC (SEQ ID NO: |
| | | | ID NO: 3575) | | | 3581) |
| Tem- | HBB_13PBS_10RT | GCATGGTGCACC | GTTTTAGA | AGACTTCTCCA | GAGT | GCATGGTGCACCTG |
| plate | (TtoAat4) | TGACTCCTG | GCTAGAAA | CAG (SEQ ID | CAGG | ACTCCTGGTTTTAG |
| P4 | | (SEQ ID NO: 3582) | TAGCAAGT | NO: 3583) | TGCA | AGCTAGAAATAGC |
| | | | TAAAATAA | | C | AAGTTAAAATAAG |
| | | | GGCTAGTC | | (SEQ | GCTAGTCCGTTATC |
| | | | CGTTATCA | | ID | AACTTGAAAAAGT |
| | | | ACTTGAAA | | NO: | GGCACCGAGTCGGT |
| | | | AAGTGGCA | | 3584) | GCAGACTTCTCCAC |
| | | | CCGAGTCG | | | AGGAGTCAGGTGC |
| | | | GTGC (SEQ | | | AC (SEQ ID NO: |
| | | | ID NO: 3575) | | | 3585) |
| 2gRNA | HEK3_+90 | GTCAACCAGTAT | GTTTTAGA | NA | NA | NA |
| | | CCCGGTGC (SEQ | GCTAGAAA | | | |
| P5 | | ID NO: 1717) | TAGCAAGT | | | |
| | | | TAAAATAA | | | |
| | | | GGCTAGTC | | | |
| | | | CGTTATCA | | | |
| | | | ACTTGAAA | | | |
| | | | AAGTGGCA | | | |
| | | | CCGAGTCG | | | |
| | | | GTGC (SEQ | | | |
| | | | ID NO: 3575) | | | |
| 2gRNA | HBB_+72 | GCCTTGATACCA | GTTTTAGA | NA | NA | NA |
| | | ACCTGCCCA | GCTAGAAA | | | |
| P6 | | (SEQ ID NO: 3586) | TAGCAAGT | | | |
| | | | TAAAATAA | | | |
| | | | GGCTAGTC | | | |
| | | | CGTTATCA | | | |
| | | | ACTTGAAA | | | |
| | | | AAGTGGCA | | | |
| | | | CCGAGTCG | | | |
| | | | GTGC (SEQ | | | |
| | | | ID NO: 3575) | | | |
| gRNA | g19_AAVS1 | GTCCCCTCCACC | GTTTTAGA | NA | NA | NA |
| | | CCACAGTG (SEQ | GCTAGAAA | | | |
| P7 | | ID NO: 3587) | TAGCAAGT | | | |
| | | | TAAAATAA | | | |
| | | | GGCTAGTC | | | |
| | | | CGTTATCA | | | |
| | | | ACTTGAAA | | | |
| | | | AAGTGGCA | | | |
| | | | CCGAGTCG | | | |
| | | | GTGC (SEQ | | | |
| | | | ID NO: 3575) | | | |

### Example 33.2 Additional Gene Writers Comprising Cas-Linker-RT Fusions Exhibiting Precise Editing in Human Cells

[1304] This example further corroborates the ability of multiple tested Cas-linker-RT fusions to programmably install mutations in genomic DNA in human cells. For these experiments, a Cas effector protein, SpCas9(N863A), was combined with various reverse transcriptase (RT) domains and intervening linkers described herein, and the genome editing capacity of Cas-linker-RT fusions was assessed.

[1305] Linker domains tested in the Cas-linker-RT fusions described herein were selected from those shown in Tables 38 and 42. Retroviral-derived RT domains tested in the Cas-linker-RT fusions described herein were selected from those shown in Table 44. The complete amino acid sequence of each of the Cas-linker-RT fusions tested herein is shown in Table 52.

[1306] For generating precise edits using Gene Writer fusions, Template P2 was used as the template RNA and gRNA P5 was used as the second-nick RNA (see Table 43 for both sequences) as described and utilized in Example 33. The constructs employed here to express the RNAs are also as described in Example 33.

[1307] The Cas-linker-RT fusions (Table 52) were assessed for genome editing activity in human U2OS cells as in Example 33, with minor modifications to the protocol. In particular, U2OS cells were transfected by electroporation of 250,000 cells/well with either approximately 800 ng (FIG. 37B) or approximately 300 ng (FIGS. 37C and 37D) of Cas-linker-RT fusion expression plasmid, 200 ng of a Template RNA (Template P2) expression plasmid (Table 43), and 83 ng of an additional second-nick gRNA (2gRNA P5) expression plasmid (Table 43). To assess the genome editing capacity of Cas-linker-RT fusions, genomic DNA (gDNA) was collected on day 3 or 4 post-transfection. As in Example 33, the Activity ratios at target loci were analyzed by amplicon sequencing. It is expected that activity ratios observed for a given construct will not be identical from experiment to experiment (e.g., due to differing experimental parameters, slight batch-to-batch variation etc.). Nonetheless, intra-experimental relationships between activity ratios and overall activity ratio trends are indicative of genome editing capacity.

TABLE 52
Exemplary Cas-linker-RT fusion sequences

| RT Group | Construct | SEQ ID NO: | Amino acid sequence |
|---|---|---|---|
| MMLV | 1 | 3665 | MAPKKKRKVGIHGVPAADKKYSIGLDIGTNSVGWAVITDEYKVPSKKFKVLGNTDRHSIKKNLIGALLFDSGETAEATRLKRTARRRYTRRKNRICYLQEIFSNEM |
| | | | AKVDDSFFHRLEESFLVEEDKKHERHPIFGNIVDEVAYHEKYPTIYHLRKKLVDSTDKADLRLIYLALAHMIKFRGHFLIEGDLNPDNSDVDKLFIQLVQTYNQLF |
| | | | EENPINASGVDAKAILSARLSKSRRLENLIAQLPGEKKNGLFGNLIALSLGLTPNFKSNFDLAEDAKLQLSKDTYDDDLDNLLAQIGDQYADLFLAAKNLSDAILL |
| | | | SDILRVNTEITKAPLSASMIKRYDEHHQDLTLLKALVRQQLPEKYKEIFFDQSKNGYAGYIDGGASQEEFYKFIKPILEKMDGTEELLVKLNREDLLRKQRTFDNG |
| | | | SIPHQIHLGELHAILRRQEDFYPFLKDNREKIEKILTFRIPYYVGPLARCNSRFAWMTRKSEETITPWNFEEVVDKGASAQSFIERMTNFDKNLPNEKVLPKHSLL |
| | | | YEYFTVYNELTKVKYVTEGMRKPAFLSGEQKKAIVDLLFKTNRKVTVKQLKEDYFKKIECFDSVEISGVEDRFNASLGTYHDLLKIIKDKDFLDNEENEDILEDIV |
| | | | LTLTLFEDREMIEERLKTYAHLFDDKVMKQLKRRRYTGWCRLSRKLINGIRDKQSGKTILDFLKSDGFANRNFMQLIHDDSLTFKEDIQKAQVSGQGDSLHEKIAN |
| | | | LAGSPAIKKGILQTVKVVDELVKVMGRHKPENIVIEMARENQTTQKGQKNSRERMKRIEEGIKELGSQILKEKPVENTQLQNEKLYLYYLQNGRDMYVDQELDINR |
| | | | LSDYDVDHIVPQSFLKDDSIDNKVLTRSDKARGKSDNVPSEEVVKKMKNYWRQLLNAKLITQRKFDNLTKAERCCLSELDKAGFIKRQLVETRQITKHVAQILDSR |
| | | | MNTKYDENDKLIREVKVITLKSKLVSDFRKDFQFYKVREINNYHHAHDAYLNAVVGTALIKKYPKLESEFVYGDYKVYDVRKMIAKSEQEIGKATAKYFFYSNIMN |
| | | | FFKTEITLANGEIRKRPLIETNGETGEIVWDKGRDFATVRKVLSMPQVNIVKKTEVQTGGFSKESILPKRNSDKLLARKKDWDPKKYGGFDSPTVAYSVLVVAKVE |
| | | | KGKSKKLKSVKELLGITIMERSSFEKNPIDFLEAKGYKEVKKDLIIKLPKYSLFELENGRKRMLASAGELQKGNELALPSKYVNFLYLASHYEKLKGSPEDNEQKQ |
| | | | LFVEQHKHYLDEIIEQISEFSKRVILADANLDKVLSAYNKHRDKPIREQAENIIHLFTLTNLGAPAAFKYFDTTIDRKRYTSTKEVLDATLIHQSITGLYETRIDL |
| | | | SQLGGDSGCSSGCSSGsETPGTSESATPESSGCSSGESSTLNIEDEYRLHETSKEPDVSLGSTWLSDFPQAWAETGGMELAVRQAPLIIPLKATSTPVSIKQYPMS |
| | | | QEARLCIKPHIQRLLDQGILVPCQSPWNTPLLPVKKPGTNDYRPVQDLREVNKRVEDIHPTVPNPYNLLSGLPPSHQWYTVLDLKDAFFCLRLHPTSQPLFAFEWR |
| | | | DPEMGISGQLTWTRLPQGFKNSPTLFNEALHRDLADFRIQHPDLILLQYVDDLLLAATSELDCQQGTRALLQTLGNLGYRASAKKAQICQKQVKYLGYLLKEGQRW |
| | | | LTEARKETVMGQPTPKTPRQLREFLGKAGFCRLFIPGFAEMAAPLYPLTKPGTLFNWGPDQQKAYQEIKQALLTAPALGLPDLTKPFELFVDEKQGYAKGVLTQKL |
| | | | GPWRRPVAYLSKKLDPVAAGWPPCLRMVAAIAVLTKDAGKLTMGQPLVILAPHAVEALVKQPPDRWLSNARMTHYQALLLDTDRVQFGPVVALNPATLLPLPEEGL |
| | | | QHNCLDILAEAHGTRPDLTDQPLPDADHTWYTDGSSLLQEGQRKAGAAVTTETEVIWAKALPAGTSAQRAELIALTQALKMAEGKKLNVYTDSRYAFATAHIHGEI |
| | | | YRRRGWLTSEGKEIKNKDEILALLKALFLPKRLSIIHCPGHQKCHSAEARGNRMADQAARKAAITETPDTSTLLIENSSP |
| MMLV | 2 | 3666 | MKRTADGSEFESPKKKRKVDKKYSIGLDIGTNSVGWAVITDEYKVPSKKFKVLGNTDRHSIKKNLIGALLFDSGETAEATRLKRTARRRYTRRKNRICYLQEIFSN |
| | | | EMAKVDDSFFHRLEESFLVEEDKKHERHPIFGNIVDEVAYHEKYPTIYHLRKKLVDSTDKADLRLIYLALAHMIKFRGHFLIEGDLNPDNSDVDKLFIQLVQTYNQ |
| | | | LFEENPINASGVDAKAILSARLSKSRRLENLIAQLPGEKKNGLFGNLIALSLGLTPNFKSNFDLAEDAKLQLSKDTYDDDLDNLLAQIGDQYADLFLAAKNLSDAL |
| | | | LLSDILRVNTEITKAPLSASMIKRYDEHHQDLTLLKALVRQQLPEKYKEIFFDQSKNYAGYIDGGCASQEEFYKFIKPILEKMDGTEELLVKLNREDLLRKQRTFD |
| | | | NGSIPHQIHLGELHAILRRQEDFYPFLKDNREKIEKILTFRIPYYVGPLARGNSRFAWMTRKSEETITPWNFEEVVDKGASAQSFIERMTNFDKNLPNEKVLPKHS |
| | | | LLYEYFTVYNELTKVKYVTEGMRKPAFLSGEQKKAIVDLLFKTNRKVTVKQLKEDYFKKIECFDSVEISGVEDRFNASLGTYHDLLKIIKDKDFLDNEENEDILED |
| | | | IVLTLTLFEDREMIEERLKTYAHLFDDKVMKQLKRRRYTGWCRLSRKLINGIRDKQSGKTILDFLKSDGFANRNFMQLIHDDSLTFKEDIQKAQVSGQGDSLHEHI |
| | | | ANLAGSPAIKKGILQTVKVVDELVKVMGRHKPENIVIEMARENQTTQKGQKNSRERMKRIEECIKELGSQILKEHPVENTQLQNEKLYLYYLQNGRDMYVDQELDI |
| | | | NRLSDYDVDHIVPQSFLKDDSIDNKVLTRSDKARGKSDNVPSEEVVKKMKNYWRQLLNAKLITQRKFDNLTKAERGGLSELDKAGFIKRQLVETRQITKHVAQILD |
| | | | SRMNTKYDENDKLIREVKVITLKSKLVSDFRKDFQFYKVREINNYHHAHDAYLNAVVGTALIKKYPKLESEFVYGDYKVYDVRKMIAKSEQEIGKATAKYFFYSNI |
| | | | MNFFKTEITLANGEIRKRPLIETNGETGEIVWDKGRDFATVRKVLSMPQVNIVKKTEVQTGGFSKESILPKRNSDKLLARKKDWDPKKYGGFDSPTVAYSVLVVAK |
| | | | VEKCKSKKLKSVKELLGITIMERSSFEKNPIDFLEAKGYKEVKKDLIIKLPKYSLFELENGRKRMLASAGELQKGNELALPSKYVNFLYLASHYEKLKGSPEDNEQ |
| | | | KQLFVEQHKHYLDEIIEQISEFSKRVILADANLDKVLSAYNKHRDKPIREQAENIIHLFTLTNLGAPAAFKYFDTTIDRKRYTSTKEVLDATLIHQSITGLYETRI |
| | | | DLSQLGGDSGGSSGGSSGSETPCGTSESATPESSGGSSGGSSTLNIEDEYRLHETSKEPDVSLGSTWLSDFPQAWAETGMCLAVRQAPLIIPLKATSTPVSIKQYP |
| | | | MSQEARLGIKPHIQRLLDQGILVPCQSPWNTPLLPVKKPGTNDYRPVQDLREVNKRVEDIHPTVPNPYNLLSGLPPSHQWYTVLDLKDAFFCLRLHPTSQPLFAFE |
| | | | WRDPEMGISGQLTWTRLPQGFKNSPTLFNEALHRDLADFRIQHPDLILLQYVDDLLLAATSELDCQQGTRALLQTLGNLGYRASAKKAQICQKQVKYLGYLLKEGQ |
| | | | RWLTEARKETVMGQPTPKTPRQLREFLGKAGFCRLFIPGFAEMAAPLYPLTKPGTLFNWGPDQQKAYQEIKQALLTAPALGLPDLTKPFELFVDEKQCYAKGVLTQ |
| | | | KLGPWRRPVAYLSKKLDPVAAGWPPCLRMVAAIAVLTKDAGKLTMGQPLVILAPHAVEALVKQPPDRWLSNARMTHYQALLLDTDRVQFGPVVALNPATLLPLPEE |
| | | | GLQHNCLDILAEAHGTRPDLTDQPLPDADHTWYTDGSSLLQEGQRKAGAAVTTETEVIWAKALPAGTSAQRAELIALTQALKMAECKKLNVYTDSRYAFATAHIHG |
| | | | EIYRRRGWLTSEGKEIKNKDEILALLKALFLPKRLSIIHCPCGHQQKCHSAEARCGNRMADQAARKAAITETPDTSTLLIENSSPSGGSKRTADGSEFEPKKKRKV |
| MMLV | 3 | 3667 | MPAAKRVKLDGGDKKYSIGLDIGTNSVGWAVITDEYKVPSKKFKVLGNTDRHSIKKNLIGALLFDSGETAEATRLKRTARRRYTRRKNRICYLQEIFSNEMAKVDD |
| | | | SFFHRLEESFLVEEDKKHERHPIFGNIVDEVAYHEKYPTIYHLRKKLVDSTDKADLRLIYLALAHMIKFRGHFLIEGDLNPDNSDVDKLFIQLVQTYNQLFEENPI |
| | | | NASGVDAKAILSARLSKSRRLENLIAQLPGEKKNGLFGNLIALSLGLTPNFKSNFDLAEDAKLQLSKDTYDDDLDNLLAQIGDQYADLFLAAKNLSDAILLSDILR |
| | | | VNTEITKAPLSASMIKRYDEHHQDLTLLKALVRQQLPEKYKEIFFDQSKNGYAGYIDGGASQEEFYKFIKPILEKMDGTEELLVKLNREDLLRKQRTFDNGSIPHQ |
| | | | IHLGELHAILRRQEDFYPFLKDNREKIEKILTFRIPYYVGPLARGNSRFAWMTRKSEETITPWNFEEVVDKGASAQSFIERMTNFDKNLPNEKVLPKHSLLYEYFT |
| | | | VYNELTKVKYVTEGMRKPAFLSGEQKKAIVDLLFKTNRKVTVKQLKEDYFKKIECFDSVEISGVEDRFNASLGTYHDLLKIIKDKDFLDNEENEDILEDIVLTLTL |
| | | | FEDREMIEERLKTYAHLFDDKVMKQLKRRRYTGWGRLSRKLINGIRDKQSGKTILDFLKSDGFANRNFMQLIHDDSLTFKEDIQKAQVSGQGDSLHEHIANLAGSP |
| | | | AIKKGILQTVKVVDELVKVMGRHKPENIVIEMARENQTTQKGQKNSRERMKRIEEGIKELGSQILKEHPVENTQLQNEKLYLYYLQNGRDMYVDQELDINRLSDYD |
| | | | VDHIVPQSFLKDDSIDNKVLTRSDKARGKSDNVPSEEVVKKMKNYWRQLLNAKLITQRKFDNLTKAERGGLSELDKAGFIKRQLVETRQITKHVAQILDSRMNTKY |
| | | | DENDKLIREVKVITLKSKLVSDFRKDFQFYKVREINNYHHAHDAYLNAVVGTALIKKYPKLESEFVYGDYKVYDVRKMIAKSEQEIGKATAKYFFYSNIMNFFKTE |
| | | | ITLANGEIRKRPLIETNGETGEIVWDKGRDFATVRKVLSMPQVNIVKKTEVQTGGFSKESILPKRNSDKLIARKKDWDPKKYGGFDSPTVAYSVLVVAKVEKGKSK |
| | | | KLKSVKELLGITIMERSSFEKNPIDFLEAKGYKEVKKDLIIKLPKYSLFELENGRKRMLASAGELQKGNELALPSKYVNFLYLASHYEKLKGSPEDNEQKQLFVEQ |
| | | | HKHYLDEIIEQISEFSKRVILADANLDKVLSAYNKHRDKPIREQAENIIHLFTLTNLGAPAAFKYFDTTIDRKRYTSTKEVLDATLIHQSITGLYETRIDLSQLGG |
| | | | DSGGSSGGSSGSETPGTSESATPESSGGSSGGSSTLNIEDEYRLHETSKEPDVSLGSTWLSDFPQAWAETGGMGLAVRQAPLIIPLKATSTPVSIKQYPMSQEARL |
| | | | GIKPHIQRLLDQGILVPCQSPWNTPLLPVKKPGTNDYRPVQDLREVNKRVEDIHPTVPNPYNLLSGLPPSHQWYTVLDLKDAFFCLRLHPTSQPLFAFEWRDPEMG |
| | | | ISGQLTWTRLPQGFKNSPTLFNEALHRDLADFRIQHPDLILLQYVDDLLLAATSELDCQQGTRALLQTLGNLGYRASAKKAQICQKQVKYLGYLLKEGQRWLTEAR |
| | | | KETVMGQPTPKTPRQLREFLGKAGFCRLFIPGFAEMAAPLYPLTKPGTLFNWGPDQQKAYQEIKQALLTAPALGLPDLTKPFELFVDEKQGYAKGVLTQKLGPWRR |
| | | | PVAYLSKKLDPVAAGWPPCLRMVAAIAVLTKDAGKLTMGQPLVILAPHAVEALVKQPPDRWLSNARMTHYQALLLDTDRVQFGPVVALNPATLLPLPEEGLQHNCL |
| | | | DILAEAHGTRPDLTDQPLPDADHTWYTDGSSLLQEGQRKAGAAVTTETEVIWAKALPAGTSAQRAELIALTQALKMAEGKKLNVYTDSRYAFATAHIHGEIYRRRG |
| | | | WLTSEGKEIKNKDEILALLKALFLPKRLSIIHCPGHQKGHSAEARGNRMADQAARKAAITETPDTSTLLIENSSPSGGSKRTADGSEFEKRTADGSEFESPKKKAK |
| | | | VE |
| MMLV | 4 | 3668 | MPAAKRVKLDGGDKKYSIGLDIGTNSVGWAVITDEYKVPSKKFKVLGNTDRHSIKKNLIGALLFDSGETAEATRLKRTARRRYTRRKNRICYLQEIFSNEMAKVDD |
| | | | SFFHRLEESFLVEEDKKHERHPIFGNIVDEVAYHEKYPTIYHLRKKLVDSTDKADLRLIYLALAHMIKFRGHFLIEGDLNPDNSDVDKLFIQLVQTYNQLFEENPI |
| | | | NASGVDAKAILSARLSKSRRLENLIAQLPGEKKNGLFGNLIALSLGLTPNFKSNFDLAEDAKLQLSKDTYDDDLDNLLAQIGDQYADLFLAAKNLSDAILLSDILR |
| | | | VNTEITKAPLSASMIKRYDEHHQDLTLLKALVRQQLPEKYKEIFFDQSKNGYAGYIDGGASQEEFYKFIKPILEKMDGTEELLVKLNREDLLRKQRTFDNGSIPHQ |
| | | | IHLGELHAILRRQEDFYPFLKDNREKIEKILTFRIPYYVGPLARGNSRFAWMTRKSEETITPWNFEEVVDKGASAQSFIERMTNFDKNLPNEKVLPKHSLLYEYFT |
| | | | VYNELTKVKYVTEGMRKPAFLSGEQKKAIVDLLFKTNRKVTVKQLKEDYFKKIECFDSVEISGVEDRFNASLGTYHDLLKIIKDKDFLDNEENEDILEDIVLTLTL |
| | | | FEDREMIEERLKTYAHLFDDKVMKQLKRRRYTGWGRLSRKLINGIRDKQSGKTILDFLKSDGFANRNFMQLIHDDSLTFKEDIQKAQVSGQGDSLHEHIANLAGSP |
| | | | AIKKGILQTVKVVDELVKVMGRHKPENIVIEMARENQTTQKGQKNSRERMKRIEEGIKELGSQILKEHPVENTQLQNEKLYLYYLQNGRDMYVDQELDINRLSDYD |
| | | | VDHIVPQSFLKDDSIDNKVLTRSDKARGKSDNVPSEEVVKKMKNYWRQLLNAKLITQRKFDNLTKAERGGLSELDKAGFIKRQLVETRQITKHVAQILDSRMNTKY |
| | | | DENDKLIREVKVITLKSKLVSDFRKDFQFYKVREINNYHHAHDAYLNAVVGTALIKKYPKLESEFVYGDYKVYDVRKMIAKSEQEIGKATAKYFFYSNIMNFFKTE |
| | | | ITLANGEIRKRPLIETNGETGEIVWDKGRDFATVRKVLSMPQVNIVKKTEVQTGGFSKESILPKRNSDKLIARKKDWDPKKYGGFDSPTVAYSVLVVAKVEKGKSK |
| | | | KLKSVKELLGITIMERSSFEKNPIDFLEAKGYKEVKKDLIIKLPKYSLFELENGRKRMLASAGELQKGNELALPSKYVNFLYLASHYEKLKGSPEDNEQKQLFVEQ |
| | | | HKHYLDEIIEQISEFSKRVILADANLDKVLSAYNKHRDKPIREQAENIIHLFTLTNLGAPAAFKYFDTTIDRKRYTSTKEVLDATLIHQSITGLYETRIDLSQLGG |
| | | | DGGSGGSSGGSSGSETPGTSESATPESSGGSSGGSSGGTLNIEDEYRLHETSKEPDVSLGSTWLSDFPQAWAETGGMGLAVRQAPLIIPLKATSTPVSIKQYPMSQ |
| | | | EARLGIKPHIQRLLDQGILVPCQSPWNTPLLPVKKPGTNDYRPVQDLREVNKRVEDIHPTVPNPYNLLSGLPPSHQWYTVLDLKDAFFCLRLHPTSQPLFAFEWRD |
| | | | PEMGISGQLTWTRLPQGFKNSPTLFNEALHRDLADFRIQHPDLILLQYVDDLLLAATSELDCQQGTRALLQTLGNLGYRASAKKAQICQKQVKYLGYLLKEGQRWL |
| | | | TEARKETVMGQPTPKTPRQLREFLGKAGFCRLFIPGFAEMAAPLYPLTKPGTLFNWGPDQQKAYQEIKQALLTAPALGLPDLTKPFELFVDEKQGYAKGVLTQKLG |
| | | | PWRRPVAYLSKKLDPVAAGWPPCLRMVAAIAVLTKDAGKLTMGQPLVILAPHAVEALVKQPPDRWLSNARMTHYQALLLDTDRVQFGPVVALNPATLLPLPEEGLQ |
| | | | HNCLDILAEAHGTRPDLTDQPLPDADHTWYTDGSSLLQEGQRKAGAAVTTETEVIWAKALPAGTSAQRAELIALTQALKMAEGKKLNVYTDSRYAFATAHIHGEIY |
| | | | RRRGWLTSEGKEIKNKDEILALLKALFLPKRLSIIHCPGHQKGHSAEARGNRMADQAARKAAITETPDTSTLLIENSSPSGGSKRTADGSEFEAGKRTADGSEFEK |
| | | | RTADGSEFESPKKKAKVEGSGEGRGSLLTCGDVEENPG |
| MMLV | 5 | 3669 | MPAAKRVKLDGGDKKYSIGLDIGTNSVGWAVITDEYKVPSKKFKVLGNTDRHSIKKNLIGALLFDSGETAEATRLKRTARRRYTRRKNRICYLQEIFSNEMAKVDD |
| | | | SFFHRLEESFLVEEDKKHERHPIFGNIVDEVAYHEKYPTIYHLRKKLVDSTDKADLRLIYLALAHMIKFRGHFLIEGDLNPDNSDVDKLFIQLVQTYNQLFEENPI |
| | | | NASGVDAKAILSARLSKSRRLENLIAQLPGEKKNGLFGNLIALSLGLTPNFKSNFDLAEDAKLQLSKDTYDDDLDNLLAQIGDQYADLFLAAKNLSDAILLSDILR |
| | | | VNTEITKAPLSASMIKRYDEHHQDLTLLKALVRQQLPEKYKEIFFDQSKNGYAGYIDGGASQEEFYKFIKPILEKMDGTEELLVKLNREDLLRKQRTFDNGSIPHQ |
| | | | IHLGELHAILRRQEDFYPFLKDNREKIEKILTFRIPYYVGPLARGNSRFAWMTRKSEETITPWNFEEVVDKGASAQSFIERMTNFDKNLPNEKVLPKHSLLYEYFT |
| | | | VYNELTKVKYVTEGMRKPAFLSGEQKKAIVDLLFKTNRKVTVKQLKEDYFKKIECFDSVEISGVEDRFNASLGTYHDLLKIIKDKDFLDNEENEDILEDIVLTLTL |
| | | | FEDREMIEERLKTYAHLFDDKVMKQLKRRRYTGWGRLSRKLINGIRDKQSGKTILDFLKSDGFANRNFMQLIHDDSLTFKEDIQKAQVSGQGDSLHEHIANLAGSP |
| | | | AIKKGILQTVKVVDELVKVMGRHKPENIVIEMARENQTTQKGQKNSRERMKRIEEGIKELGSQILKEHPVENTQLQNEKLYLYYLQNGRDMYVDQELDINRLSDYD |
| | | | VDHIVPQSFLKDDSIDNKVLTRSDKARGKSDNVPSEEVVKKMKNYWRQLLNAKLITQRKFDNLTKAERGGLSELDKAGFIKRQLVETRQITKHVAQILDSRMNTKY |
| | | | DENDKLIREVKVITLKSKLVSDFRKDFQFYKVREINNYHHAHDAYLNAVVGTALIKKYPKLESEFVYGDYKVYDVRKMIAKSEQEIGKATAKYFFYSNIMNFFKTE |
| | | | ITLANGEIRKRPLIETNGETGEIVWDKGRDFATVRKVLSMPQVNIVKKTEVQTGGFSKESILPKRNSDKLIARKKDWDPKKYGGFDSPTVAYSVLVVAKVEKGKSK |
| | | | KLKSVKELLGITIMERSSFEKNPIDFLEAKGYKEVKKDLIIKLPKYSLFELENGRKRMLASAGELQKGNELALPSKYVNFLYLASHYEKLKGSPEDNEQKQLFVEQ |
| | | | HKHYLDEIIEQISEFSKRVILADANLDKVLSAYNKHRDKPIREQAENIIHLFTLTNLGAPAAFKYFDTTIDRKRYTSTKEVLDATLIHQSITGLYETRIDLSQLGG |
| | | | DGGPAPAPAPAPAPGGTLNIEDEYRLHETSKEPDVSLGSTWLSDFPQAWAETGGMGLAVRQAPLIIPLKATSTPVSIKQYPMSQEARLGIKPHIQRLLDQGILVPC |
| | | | QSPWNTPLLPVKKPGTNDYRPVQDLREVNKRVEDIHPTVPNPYNLLSGLPPSHQWYTVLDLKDAFFCLRLHPTSQPLFAFEWRDPEMGISGQLTWTRLPQGFKNSP |
| | | | TLFNEALHRDLADFRIQHPDLILLQYVDDLLLAATSELDCQQGTRALLQTLGNLGYRASAKKAQICQKQVKYLGYLLKEGQRWLTEARKETVMGQPTPKTPRQLRE |
| | | | FLGKAGFCRLFIPGFAEMAAPLYPLTKPGTLFNWGPDQQKAYQEIKQALLTAPALGLPDLTKPFELFVDEKQGYAKGVLTQKLGPWRRPVAYLSKKLDPVAAGWPP |
| | | | CLRMVAAIAVLTKDAGKLTMGQPLVILAPHAVEALVKQPPDRWLSNARMTHYQALLLDTDRVQFGPVVALNPATLLPLPEEGLQHNCLDILAEAHGTRPDLTDQPL |
| | | | PDADHTWYTDGSSLLQEGQRKAGAAVTTETEVIWAKALPAGTSAQRAELIALTQALKMAEGKKLNVYTDSRYAFATAHIHGEIYRRRGWLTSEGKEIKNKDEILAL |
| | | | LKALFLPKRLSIIHCPGHQKGHSAEARGNRMADQAARKAAITETPDTSTLLIENSSPSGGSKRTADGSEFEAGKRTADGSEFEKRTADGSEFESPKKKAKVEGSGE |
| | | | GRGSLLTCGDVEENPG |
| MMKV | 6 | 3670 | MPAAKRVKLDGGDKKYSIGLDIGTNSVGWAVITDEYKVPSKKFKVLGNTDRHSIKKNLIGALLFDSGETAEATRLKRTARRRYTRRKNRICYLQEIFSNEMAKVDD |
| | | | SFFHRLEESFLVEEDKKHERHPIFGNIVDEVAYHEKYPTIYHLRKKLVDSTDKADLRLIYLALAHMIKFRGHFLIEGDLNPDNSDVDKLFIQLVQTYNQLFEENPI |
| | | | NASGVDAKAILSARLSKSRRLENLIAQLPGEKKNGLFGNLIALSLGLTPNFKSNFDLAEDAKLQLSKDTYDDDLDNLLAQIGDQYADLFLAAKNLSDAILLSDILR |
| | | | VNTEITKAPLSASMIKRYDEHHQDLTLLKALVRQQLPEKYKEIFFDQSKNGYAGYIDGGASQEEFYKFIKPILEKMDGTEELLVKLNREDLLRKQRTFDNGSIPHQ |
| | | | IHLGELHAILRRQEDFYPFLKDNREKIEKILTFRIPYYVGPLARGNSRFAWMTRKSEETITPWNFEEVVDKGASAQSFIERMTNFDKNLPNEKVLPKHSLLYEYFT |
| | | | VYNELTKVKYVTEGMRKPAFLSGEQKKAIVDLLFKTNRKVTVKQLKEDYFKKIECFDSVEISGVEDRFNASLGTYHDLLKIIKDKDFLDNEENEDILEDIVLTLTL |
| | | | FEDREMIEERLKTYAHLFDDKVMKQLKRRRYTGWGRLSRKLINGIRDKQSGKTILDFLKSDGFANRNFMQLIHDDSLTFKEDIQKAQVSGQGDSLHEHIANLAGSP |
| | | | AIKKGILQTVKVVDELVKVMGRHKPENIVIEMARENQTTQKGQKNSRERMKRIEEGIKELGSQILKEHPVENTQLQNEKLYLYYLQNGRDMYVDQELDINRLSDYD |
| | | | VDHIVPQSFLKDDSIDNKVLTRSDKARGKSDNVPSEEVVKKMKNYWRQLLNAKLITQRKFDNLTKAERGGLSELDKAGFIKRQLVETRQITKHVAQILDSRMNTKY |
| | | | DENDKLIREVKVITLKSKLVSDFRKDFQFYKVREINNYHHAHDAYLNAVVGTALIKKYPKLESEFVYGDYKVYDVRKMIAKSEQEIGKATAKYFFYSNIMNFFKTE |
| | | | ITLANGEIRKRPLIETNGETGEIVWDKGRDFATVRKVLSMPQVNIVKKTEVQTGGFSKESILPKRNSDKLIARKKDWDPKKYGGFDSPTVAYSVLVVAKVEKGKSK |
| | | | KLKSVKELLGITIMERSSFEKNPIDFLEAKGYKEVKKDLIIKLPKYSLFELENGRKRMLASAGELQKGNELALPSKYVNFLYLASHYEKLKGSPEDNEQKQLFVEQ |
| | | | HKHYLDEIIEQISEFSKRVILADANLDKVLSAYNKHRDKPIREQAENIIHLFTLTNLGAPAAFKYFDTTIDRKRYTSTKEVLDATLIHQSITGLYETRIDLSQLGG |
| | | | DGGGGSGGGGGTLNIEDEYRLHETSKEPDVSLGSTWLSDFPQAWAETGGMGLAVRQAPLIIPLKATSTPVSIKQYPMSQEARLGIKPHIQRLLDQGILVPCQSPWN |
| | | | TPLLPVKKPGTNDYRPVQDLREVNKRVEDIHPTVPNPYNLLSGLPPSHQWYTVLDLKDAFFCLRLHPTSQPLFAFEWRDPEMGISGQLTWTRLPQGFKNSPTLFNE |
| | | | ALHRDLADFRIQHPDLILLQYVDDLLLAATSELDCQQGTRALLQTLGNLGYRASAKKAQICQKQVKYLGYLLKEGQRWLTEARKETVMGQPTPKTPRQLREFLGKA |
| | | | GFCRLFIPGFAEMAAPLYPLTKPGTLFNWGPDQQKAYQEIKQALLTAPALGLPDLTKPFELFVDEKQGYAKGVLTQKLGPWRRPVAYLSKKLDPVAAGWPPCLRMV |
| | | | AAIAVLTKDAGKLTMGQPLVILAPHAVEALVKQPPDRWLSNARMTHYQALLLDTDRVQFGPVVALNPATLLPLPEEGLQHNCLDILAEAHGTRPDLTDQPLPDADH |
| | | | TWYTDGSSLLQEGQRKAGAAVTTETEVIWAKALPAGTSAQRAELIALTQALKMAEGKKLNVYTDSRYAFATAHIHGEIYRRRGWLTSEGKEIKNKDEILALLKALF |
| | | | LPKRLSIIHCPGHQKGHSAEARGNRMADQAARKAAITETPDTSTLLIENSSPSGGSKRTADGSEFEAGKRTADGSEFEKRTADGSEFESPKKKAKVEGSGEGRGSL |
| | | | LTCGDVEENPG |
| MMKV | 7 | 3671 | MPAAKRVKLDGGDKKYSIGLDIGTNSVGWAVITDEYKVPSKKFKVLGNTDRHSIKKNLIGALLFDSGETAEATRLKRTARRRYTRRKNRICYLQEIFSNEMAKVDD |
| | | | SFFHRLEESFLVEEDKKHERHPIFGNIVDEVAYHEKYPTIYHLRKKLVDSTDKADLRLIYLALAHMIKFRGHFLIEGDLNPDNSDVDKLFIQLVQTYNQLFEENPI |
| | | | NASGVDAKAILSARLSKSRRLENLIAQLPGEKKNGLFGNLIALSLGLTPNFKSNFDLAEDAKLQLSKDTYDDDLDNLLAQIGDQYADLFLAAKNLSDAILLSDILR |
| | | | VNTEITKAPLSASMIKRYDEHHQDLTLLKALVRQQLPEKYKEIFFDQSKNGYAGYIDGGASQEEFYKFIKPILEKMDGTEELLVKLNREDLLRKQRTFDNGSIPHQ |
| | | | IHLGELHAILRRQEDFYPFLKDNREKIEKILTFRIPYYVGPLARGNSRFAWMTRKSEETITPWNFEEVVDKGASAQSFIERMTNFDKNLPNEKVLPKHSLLYEYFT |
| | | | VYNELTKVKYVTEGMRKPAFLSGEQKKAIVDLLFKTNRKVTVKQLKEDYFKKIECFDSVEISGVEDRFNASLGTYHDLLKIIKDKDFLDNEENEDILEDIVLTLTL |
| | | | FEDREMIEERLKTYAHLFDDKVMKQLKRRRYTGWGRLSRKLINGIRDKQSGKTILDFLKSDGFANRNFMQLIHDDSLTFKEDIQKAQVSGQGDSLHEHIANLAGSP |
| | | | AIKKGILQTVKVVDELVKVMGRHKPENIVIEMARENQTTQKGQKNSRERMKRIEEGIKELGSQILKEHPVENTQLQNEKLYLYYLQNGRDMYVDQELDINRLSDYD |
| | | | VDHIVPQSFLKDDSIDNKVLTRSDKARGKSDNVPSEEVVKKMKNYWRQLLNAKLITQRKFDNLTKAERGGLSELDKAGFIKRQLVETRQITKHVAQILDSRMNTKY |
| | | | DENDKLIREVKVITLKSKLVSDFRKDFQFYKVREINNYHHAHDAYLNAVVGTALIKKYPKLESEFVYGDYKVYDVRKMIAKSEQEIGKATAKYFFYSNIMNFFKTE |
| | | | ITLANGEIRKRPLIETNGETGEIVWDKGRDFATVRKVLSMPQVNIVKKTEVQTGGFSKESILPKRNSDKLIARKKDWDPKKYGGFDSPTVAYSVLVVAKVEKGKSK |
| | | | KLKSVKELLGITIMERSSFEKNPIDFLEAKGYKEVKKDLIIKLPKYSLFELENGRKRMLASAGELQKGNELALPSKYVNFLYLASHYEKLKGSPEDNEQKQLFVEQ |
| | | | HKHYLDEIIEQISEFSKRVILADANLDKVLSAYNKHRDKPIREQAENIIHLFTLTNLGAPAAFKYFDTTIDRKRYTSTKEVLDATLIHQSITGLYETRIDLSQLGG |
| | | | DGGGGSGGGEAAAKGGTLNIEDEYRLHETSKEPDVSLGSTWLSDFPQAWAETGGMGLAVRQAPLIIPLKATSTPVSIKQYPMSQEARLGIKPHIQRLLDQGILVPC |
| | | | QSPWNTPLLPVKKPGTNDYRPVQDLREVNKRVEDIHPTVPNPYNLLSGLPPSHQWYTVLDLKDAFFCLRLHPTSQPLFAFEWRDPEMGISGQLTWTRLPQGFKNSP |
| | | | TLFNEALHRDLADFRIQHPDLILLQYVDDLLLAATSELDCQQGTRALLQTLGNLGYRASAKKAQICQKQVKYLGYLLKEGQRWLTEARKETVMGQPTPKTPRQLRE |
| | | | FLGKAGFCRLFIPGFAEMAAPLYPLTKPGTLFNWGPDQQKAYQEIKQALLTAPALGLPDLTKPFELFVDEKQGYAKGVLTQKLGPWRRPVAYLSKKLDPVAAGWPP |
| | | | CLRMVAAIAVLTKDAGKLTMGQPLVILAPHAVEALVKQPPDRWLSNARMTHYQALLLDTDRVQFGPVVALNPATLLPLPEEGLQHNCLDILAEAHGTRPDLTDQPL |
| | | | PDADHTWYTDGSSLLQEGQRKAGAAVTTETEVIWAKALPAGTSAQRAELIALTQALKMAEGKKLNVYTDSRYAFATAHIHGEIYRRRGWLTSEGKEIKNKDEILAL |
| | | | LKALFLPKRLSIIHCPGHQKGHSAEARGNRMADQAARKAAITETPDTSTLLIENSSPSGGSKRTADGSEFEAGKRTADGSEFEKRTADGSEFESPKKKAKVEGSGE |
| | | | GRGSLLTCGDVEENPG |
| MMLV | 8 | 3672 | MPAAKRVKLDGGDKKYSIGLDIGTNSVGWAVITDEYKVPSKKFKVLGNTDRHSIKKNLIGALLFDSGETAEATRLKRTARRRYTRRKNRICYLQEIFSNEMAKVDD |
| | | | SFFHRLEESFLVEEDKKHERHPIFGNIVDEVAYHEKYPTIYHLRKKLVDSTDKADLRLIYLALAHMIKFRGHFLIEGDLNPDNSDVDKLFIQLVQTYNQLFEENPI |
| | | | NASGVDAKAILSARLSKSRRLENLIAQLPGEKKNGLFGNLIALSLGLTPNFKSNFDLAEDAKLQLSKDTYDDDLDNLLAQIGDQYADLFLAAKNLSDAILLSDILR |
| | | | VNTEITKAPLSASMIKRYDEHHQDLTLLKALVRQQLPEKYKEIFFDQSKNGYAGYIDGGASQEEFYKFIKPILEKMDGTEELLVKLNREDLLRKQRTFDNGSIPHQ |
| | | | IHLGELHAILRRQEDFYPFLKDNREKIEKILTFRIPYYVGPLARGNSRFAWMTRKSEETITPWNFEEVVDKGASAQSFIERMTNFDKNLPNEKVLPKHSLLYEYFT |
| | | | VYNELTKVKYVTEGMRKPAFLSGEQKKAIVDLLFKTNRKVTVKQLKEDYFKKIECFDSVEISGVEDRFNASLGTYHDLLKIIKDKDFLDNEENEDILEDIVLTLTL |
| | | | FEDREMIEERLKTYAHLFDDKVMKQLKRRRYTGWGRLSRKLINGIRDKQSGKTILDFLKSDGFANRNFMQLIHDDSLTFKEDIQKAQVSGQGDSLHEHIANLAGSP |
| | | | AIKKGILQTVKVVDELVKVMGRHKPENIVIEMARENQTTQKGQKNSRERMKRIEEGIKELGSQILKEHPVENTQLQNEKLYLYYLQNGRDMYVDQELDINRLSDYD |
| | | | VDHIVPQSFLKDDSIDNKVLTRSDKARGKSDNVPSEEVVKKMKNYWRQLLNAKLITQRKFDNLTKAERGGLSELDKAGFIKRQLVETRQITKHVAQILDSRMNTKY |
| | | | DENDKLIREVKVITLKSKLVSDFRKDFQFYKVREINNYHHAHDAYLNAVVGTALIKKYPKLESEFVYGDYKVYDVRKMIAKSEQEIGKATAKYFFYSNIMNFFKTE |
| | | | ITLANGEIRKRPLIETNGETGEIVWDKGRDFATVRKVLSMPQVNIVKKTEVQTGGFSKESILPKRNSDKLIARKKDWDPKKYGGFDSPTVAYSVLVVAKVEKGKSK |
| | | | KLKSVKELLGITIMERSSFEKNPIDFLEAKGYKEVKKDLIIKLPKYSLFELENGRKRMLASAGELQKGNELALPSKYVNFLYLASHYEKLKGSPEDNEQKQLFVEQ |
| | | | HKHYLDEIIEQISEFSKRVILADANLDKVLSAYNKHRDKPIREQAENIIHLFTLTNLGAPAAFKYFDTTIDRKRYTSTKEVLDATLIHQSITGLYETRIDLSQLGG |
| | | | DGGEAAAKGGSGGGGGTLNIEDEYRLHETSKEPDVSLGSTWLSDFPQAWAETGGMGLAVRQAPLIIPLKATSTPVSIKQYPMSQEARLGIKPHIQRLLDQGILVPC |
| | | | QSPWNTPLLPVKKPGTNDYRPVQDLREVNKRVEDIHPTVPNPYNLLSGLPPSHQWYTVLDLKDAFFCLRLHPTSQPLFAFEWRDPEMGISGQLTWTRLPQGFKNSP |
| | | | TLFNEALHRDLADFRIQHPDLILLQYVDDLLLAATSELDCQQGTRALLQTLGNLGYRASAKKAQICQKQVKYLGYLLKEGQRWLTEARKETVMGQPTPKTPRQLRE |
| | | | FLGKAGFCRLFIPGFAEMAAPLYPLTKPGTLFNWGPDQQKAYQEIKQALLTAPALGLPDLTKPFELFVDEKQGYAKGVLTQKLGPWRRPVAYLSKKLDPVAAGWPP |
| | | | CLRMVAAIAVLTKDAGKLTMGQPLVILAPHAVEALVKQPPDRWLSNARMTHYQALLLDTDRVQFGPVVALNPATLLPLPEEGLQHNCLDILAEAHGTRPDLTDQPL |
| | | | PDADHTWYTDGSSLLQEGQRKAGAAVTTETEVIWAKALPAGTSAQRAELIALTQALKMAEGKKLNVYTDSRYAFATAHIHGEIYRRRGWLTSEGKEIKNKDEILAL |
| | | | LKALFLPKRLSIIHCPGHQKGHSAEARGNRMADQAARKAAITETPDTSTLLIENSSPSGGSKRTADGSEFEAGKRTADGSEFEKRTADGSEFESPKKKAKVEGSGE |
| | | | GRGSLLTCGDVEENPG |
| MMLV | 9 | 3673 | MPAAKRVKLDGGDKKYSIGLDIGTNSVGWAVITDEYKVPSKKFKVLGNTDRHSIKKNLIGALLFDSGETAEATRLKRTARRRYTRRKNRICYLQEIFSNEMAKVDD |
| | | | SFFHRLEESFLVEEDKKHERHPIFGNIVDEVAYHEKYPTIYHLRKKLVDSTDKADLRLIYLALAHMIKFRGHFLIEGDLNPDNSDVDKLFIQLVQTYNQLFEENPI |
| | | | NASGVDAKAILSARLSKSRRLENLIAQLPGEKKNGLFGNLIALSLGLTPNFKSNFDLAEDAKLQLSKDTYDDDLDNLLAQIGDQYADLFLAAKNLSDAILLSDILR |
| | | | VNTEITKAPLSASMIKRYDEHHQDLTLLKALVRQQLPEKYKEIFFDQSKNGYAGYIDGGASQEEFYKFIKPILEKMDGTEELLVKLNREDLLRKQRTFDNGSIPHQ |
| | | | IHLGELHAILRRQEDFYPFLKDNREKIEKILTFRIPYYVGPLARGNSRFAWMTRKSEETITPWNFEEVVDKGASAQSFIERMTNFDKNLPNEKVLPKHSLLYEYFT |
| | | | VYNELTKVKYVTEGMRKPAFLSGEQKKAIVDLLFKTNRKVTVKQLKEDYFKKIECFDSVEISGVEDRFNASLGTYHDLLKIIKDKDFLDNEENEDILEDIVLTLTL |
| | | | FEDREMIEERLKTYAHLFDDKVMKQLKRRRYTGWGRLSRKLINGIRDKQSGKTILDFLKSDGFANRNFMQLIHDDSLTFKEDIQKAQVSGQGDSLHEHIANLAGSP |
| | | | AIKKGILQTVKVVDELVKVMGRHKPENIVIEMARENQTTQKGQKNSRERMKRIEEGIKELGSQILKEHPVENTQLQNEKLYLYYLQNGRDMYVDQELDINRLSDYD |
| | | | VDHIVPQSFLKDDSIDNKVLTRSDKARGKSDNVPSEEVVKKMKNYWRQLLNAKLITQRKFDNLTKAERGGLSELDKAGFIKRQLVETRQITKHVAQILDSRMNTKY |
| | | | DENDKLIREVKVITLKSKLVSDFRKDFQFYKVREINNYHHAHDAYLNAVVGTALIKKYPKLESEFVYGDYKVYDVRKMIAKSEQEIGKATAKYFFYSNIMNFFKTE |
| | | | ITLANGEIRKRPLIETNGETGEIVWDKGRDFATVRKVLSMPQVNIVKKTEVQTGGFSKESILPKRNSDKLIARKKDWDPKKYGGFDSPTVAYSVLVVAKVEKGKSK |
| | | | KLKSVKELLGITIMERSSFEKNPIDFLEAKGYKEVKKDLIIKLPKYSLFELENGRKRMLASAGELQKGNELALPSKYVNFLYLASHYEKLKGSPEDNEQKQLFVEQ |
| | | | HKHYLDEIIEQISEFSKRVILADANLDKVLSAYNKHRDKPIREQAENIIHLFTLTNLGAPAAFKYFDTTIDRKRYTSTKEVLDATLIHQSITGLYETRIDLSQLGG |
| | | | DGGGGSGGGPAPGGTLNIEDEYRLHETSKEPDVSLGSTWLSDFPQAWAETGGMGLAVRQAPLIIPLKATSTPVSIKQYPMSQEARLGIKPHIQRLLDQGILVPCQS |
| | | | PWNTPLLPVKKPGTNDYRPVQDLREVNKRVEDIHPTVPNPYNLLSGLPPSHQWYTVLDLKDAFFCLRLHPTSQPLFAFEWRDPEMGISGQLTWTRLPQGFKNSPTL |
| | | | FNEALHRDLADFRIQHPDLILLQYVDDLLLAATSELDCQQGTRALLQTLGNLGYRASAKKAQICQKQVKYLGYLLKEGQRWLTEARKETVMGQPTPKTPRQLREFL |
| | | | GKAGFCRLFIPGFAEMAAPLYPLTKPGTLFNWGPDQQKAYQEIKQALLTAPALGLPDLTKPFELFVDEKQGYAKGVLTQKLGPWRRPVAYLSKKLDPVAAGWPPCL |
| | | | RMVAAIAVLTKDAGKLTMGQPLVILAPHAVEALVKQPPDRWLSNARMTHYQALLLDTDRVQFGPVVALNPATLLPLPEEGLQHNCLDILAEAHGTRPDLTDQPLPD |
| | | | ADHTWYTDGSSLLQEGQRKAGAAVTTETEVIWAKALPAGTSAQRAELIALTQALKMAEGKKLNVYTDSRYAFATAHIHGEIYRRRGWLTSEGKEIKNKDEILALLK |
| | | | ALFLPKRLSIIHCPGHQKGHSAEARGNRMADQAARKAAITETPDTSTLLIENSSPSGGSKRTADGSEFEAGKRTADGSEFEKRTADGSEFESPKKKAKVEGSGEGR |
| | | | GSLLTCGDVEENPG |
| MMLV | 10 | 3674 | MPAAKRVKLDGGDKKYSIGLDIGTNSVGWAVITDEYKVPSKKFKVLGNTDRHSIKKNLIGALLFDSGETAEATRLKRTARRRYTRRKNRICYLQEIFSNEMAKVDD |
| | | | SFFHRLEESFLVEEDKKHERHPIFGNIVDEVAYHEKYPTIYHLRKKLVDSTDKADLRLIYLALAHMIKFRGHFLIEGDLNPDNSDVDKLFIQLVQTYNQLFEENPI |
| | | | NASGVDAKAILSARLSKSRRLENLIAQLPGEKKNGLFGNLIALSLGLTPNFKSNFDLAEDAKLQLSKDTYDDDLDNLLAQIGDQYADLFLAAKNLSDAILLSDILR |
| | | | VNTEITKAPLSASMIKRYDEHHQDLTLLKALVRQQLPEKYKEIFFDQSKNGYAGYIDGGASQEEFYKFIKPILEKMDGTEELLVKLNREDLLRKQRTFDNGSIPHQ |
| | | | IHLGELHAILRRQEDFYPFLKDNREKIEKILTFRIPYYVGPLARGNSRFAWMTRKSEETITPWNFEEVVDKGASAQSFIERMTNFDKNLPNEKVLPKHSLLYEYFT |
| | | | VYNELTKVKYVTEGMRKPAFLSGEQKKAIVDLLFKTNRKVTVKQLKEDYFKKIECFDSVEISGVEDRFNASLGTYHDLLKIIKDKDFLDNEENEDILEDIVLTLTL |
| | | | FEDREMIEERLKTYAHLFDDKVMKQLKRRRYTGWGRLSRKLINGIRDKQSGKTILDFLKSDGFANRNFMQLIHDDSLTFKEDIQKAQVSGQGDSLHEHIANLAGSP |
| | | | AIKKGILQTVKVVDELVKVMGRHKPENIVIEMARENQTTQKGQKNSRERMKRIEEGIKELGSQILKEHPVENTQLQNEKLYLYYLQNGRDMYVDQELDINRLSDYD |
| | | | VDHIVPQSFLKDDSIDNKVLTRSDKARGKSDNVPSEEVVKKMKNYWRQLLNAKLITQRKFDNLTKAERGGLSELDKAGFIKRQLVETRQITKHVAQILDSRMNTKY |
| | | | DENDKLIREVKVITLKSKLVSDFRKDFQFYKVREINNYHHAHDAYLNAVVGTALIKKYPKLESEFVYGDYKVYDVRKMIAKSEQEIGKATAKYFFYSNIMNFFKTE |
| | | | ITLANGEIRKRPLIETNGETGEIVWDKGRDFATVRKVLSMPQVNIVKKTEVQTGGFSKESILPKRNSDKLIARKKDWDPKKYGGFDSPTVAYSVLVVAKVEKGKSK |
| | | | KLKSVKELLGITIMERSSFEKNPIDFLEAKGYKEVKKDLIIKLPKYSLFELENGRKRMLASAGELQKGNELALPSKYVNFLYLASHYEKLKGSPEDNEQKQLFVEQ |
| | | | HKHYLDEIIEQISEFSKRVILADANLDKVLSAYNKHRDKPIREQAENIIHLFTLTNLGAPAAFKYFDTTIDRKRYTSTKEVLDATLIHQSITGLYETRIDLSQLGG |
| | | | DGGEAAAKGGGGSSGGTLNIEDEYRLHETSKEPDVSLGSTWLSDFPQAWAETGGMGLAVRQAPLIIPLKATSTPVSIKQYPMSQEARLGIKPHIQRLLDQGILVPC |
| | | | QSPWNTPLLPVKKPGTNDYRPVQDLREVNKRVEDIHPTVPNPYNLLSGLPPSHQWYTVLDLKDAFFCLRLHPTSQPLFAFEWRDPEMGISGQLTWTRLPQGFKNSP |
| | | | TLFNEALHRDLADFRIQHPDLILLQYVDDLLLAATSELDCQQGTRALLQTLGNLGYRASAKKAQICQKQVKYLGYLLKEGQRWLTEARKETVMGQPTPKTPRQLRE |
| | | | FLGKAGFCRLFIPGFAEMAAPLYPLTKPGTLFNWGPDQQKAYQEIKQALLTAPALGLPDLTKPFELFVDEKQGYAKGVLTQKLGPWRRPVAYLSKKLDPVAAGWPP |
| | | | CLRMVAAIAVLTKDAGKLTMGQPLVILAPHAVEALVKQPPDRWLSNARMTHYQALLLDTDRVQFGPVVALNPATLLPLPEEGLQHNCLDILAEAHGTRPDLTDQPL |
| | | | PDADHTWYTDGSSLLQEGQRKAGAAVTTETEVIWAKALPAGTSAQRAELIALTQALKMAEGKKLNVYTDSRYAFATAHIHGEIYRRRGWLTSEGKEIKNKDEILAL |
| | | | LKALFLPKRLSIIHCPGHQKGHSAEARGNRMADQAARKAAITETPDTSTLLIENSSPSGGSKRTADGSEFEAGKRTADGSEFEKRTADGSEFESPKKKAKVEGSGE |
| | | | GRGSLLTCGDVEENPG |
| MMLV | 11 | 3675 | MPAAKRVKLDGGDKKYSIGLDIGTNSVGWAVITDEYKVPSKKFKVLGNTDRHSIKKNLIGALLFDSGETAEATRLKRTARRRYTRRKNRICYLQEIFSNEMAKVDD |
| | | | SFFHRLEESFLVEEDKKHERHPIFGNIVDEVAYHEKYPTIYHLRKKLVDSTDKADLRLIYLALAHMIKFRGHFLIEGDLNPDNSDVDKLFIQLVQTYNQLFEENPI |
| | | | NASGVDAKAILSARLSKSRRLENLIAQLPGEKKNGLFGNLIALSLGLTPNFKSNFDLAEDAKLQLSKDTYDDDLDNLLAQIGDQYADLFLAAKNLSDAILLSDILR |
| | | | VNTEITKAPLSASMIKRYDEHHQDLTLLKALVRQQLPEKYKEIFFDQSKNGYAGYIDGGASQEEFYKFIKPILEKMDGTEELLVKLNREDLLRKQRTFDNGSIPHQ |
| | | | IHLGELHAILRRQEDFYPFLKDNREKIEKILTFRIPYYVGPLARGNSRFAWMTRKSEETITPWNFEEVVDKGASAQSFIERMTNFDKNLPNEKVLPKHSLLYEYFT |
| | | | VYNELTKVKYVTEGMRKPAFLSGEQKKAIVDLLFKTNRKVTVKQLKEDYFKKIECFDSVEISGVEDRFNASLGTYHDLLKIIKDKDFLDNEENEDILEDIVLTLTL |
| | | | FEDREMIEERLKTYAHLFDDKVMKQLKRRRYTGWGRLSRKLINGIRDKQSGKTILDFLKSDGFANRNFMQLIHDDSLTFKEDIQKAQVSGQGDSLHEHIANLAGSP |
| | | | AIKKGILQTVKVVDELVKVMGRHKPENIVIEMARENQTTQKGQKNSRERMKRIEEGIKELGSQILKEHPVENTQLQNEKLYLYYLQNGRDMYVDQELDINRLSDYD |
| | | | VDHIVPQSFLKDDSIDNKVLTRSDKARGKSDNVPSEEVVKKMKNYWRQLLNAKLITQRKFDNLTKAERGGLSELDKAGFIKRQLVETRQITKHVAQILDSRMNTKY |
| | | | DENDKLIREVKVITLKSKLVSDFRKDFQFYKVREINNYHHAHDAYLNAVVGTALIKKYPKLESEFVYGDYKVYDVRKMIAKSEQEIGKATAKYFFYSNIMNFFKTE |
| | | | ITLANGEIRKRPLIETNGETGEIVWDKGRDFATVRKVLSMPQVNIVKKTEVQTGGFSKESILPKRNSDKLIARKKDWDPKKYGGFDSPTVAYSVLVVAKVEKGKSK |
| | | | KLKSVKELLGITIMERSSFEKNPIDFLEAKGYKEVKKDLIIKLPKYSLFELENGRKRMLASAGELQKGNELALPSKYVNFLYLASHYEKLKGSPEDNEQKQLFVEQ |
| | | | HKHYLDEIIEQISEFSKRVILADANLDKVLSAYNKHRDKPIREQAENIIHLFTLTNLGAPAAFKYFDTTIDRKRYTSTKEVLDATLIHQSITGLYETRIDLSQLGG |
| | | | DGGAEAAAKEAAAKEAAAKEAAAKALEAEAAAKEAAAKEAAAKEAAAKAGGTLNIEDEYRLHETSKEPDVSLGSTWLSDFPQAWAETGGMGLAVRQAPLIIPLKAT |
| | | | STPVSIKQYPMSQEARLGIKPHIQRLLDQGILVPCQSPWNTPLLPVKKPGTNDYRPVQDLREVNKRVEDIHPTVPNPYNLLSGLPPSHQWYTVLDLKDAFFCLRLH |
| | | | PTSQPLFAFEWRDPEMGISGQLTWTRLPQGFKNSPTLFNEALHRDLADFRIQHPDLILLQYVDDLLLAATSELDCQQGTRALLQTLGNLGYRASAKKAQICQKQVK |
| | | | YLGYLLKEGQRWLTEARKETVMGQPTPKTPRQLREFLGKAGFCRLFIPGFAEMAAPLYPLTKPGTLFNWGPDQQKAYQEIKQALLTAPALGLPDLTKPFELFVDEK |
| | | | QGYAKGVLTQKLGPWRRPVAYLSKKLDPVAAGWPPCLRMVAAIAVLTKDAGKLTMGQPLVILAPHAVEALVKQPPDRWLSNARMTHYQALLLDTDRVQFGPVVALN |
| | | | PATLLPLPEEGLQHNCLDILAEAHGTRPDLTDQPLPDADHTWYTDGSSLLQEGQRKAGAAVTTETEVIWAKALPAGTSAQRAELIALTQALKMAEGKKLNVYTDSR |
| | | | YAFATAHIHGEIYRRRGWLTSEGKEIKNKDEILALLKALFLPKRLSIIHCPGHQKGHSAEARGNRMADQAARKAAITETPDTSTLLIENSSPSGGSKRTADGSEFE |
| | | | AGKRTADGSEFEKRTADGSEFESPKKKAKVEGSGEGRGSLLTCGDVEENPG |
| MLVBM | 1 | 3676 | MAPKKKRKVGIHGVPAADKKYSIGLDIGTNSVGWAVITDEYKVPSKKFKVLGNTDRHSIKKNLIGALLFDSGETAEATRLKRTARRRYTRRKNRICYLQEIFSNEM |
| | | | AKVDDSFFHRLEESFLVEEDKKHERHPIFGNIVDEVAYHEKYPTIYHLRKKLVDSTDKADLRLIYLALAHMIKFRGHFLIEGDLNPDNSDVDKLFIQLVQTYNQLF |
| | | | EENPINASGVDAKAILSARLSKSRRLENLIAQLPGEKKNGLFGNLIALSLGLTPNFKSNFDLAEDAKLQLSKDTYDDDLDNLLAQIGDQYADLFLAAKNLSDAILL |
| | | | SDILRVNTEITKAPLSASMIKRYDEHHQDLTLLKALVRQQLPEKYKEIFFDQSKNGYAGYIDGGASQEEFYKFIKPILEKMDGTEELLVKLNREDLLRKQRTFDNG |
| | | | SIPHQIHLGELHAILRRQEDFYPFLKDNREKIEKILTFRIPYYVGPLARGNSRFAWMTRKSEETITPWNFEEVVDKGASAQSFIERMTNFDKNLPNEKVLPKHSLL |
| | | | YEYFTVYNELTKVKYVTEGMRKPAFLSGEQKKAIVDLLFKTNRKVTVKQLKEDYFKKIECFDSVEISGVEDRFNASLGTYHDLLKIIKDKDFLDNEENEDILEDIV |
| | | | LTLTLFEDREMIEERLKTYAHLFDDKVMKQLKRRRYTGWGRLSRKLINGIRDKQSGKTILDFLKSDGFANRNFMQLIHDDSLTFKEDIQKAQVSGQGDSLHEHIAN |
| | | | LAGSPAIKKGILQTVKVVDELVKVMGRHKPENIVIEMARENQTTQKGQKNSRERMKRIEEGIKELGSQILKEHPVENTQLQNEKLYLYYLQNGRDMYVDQELDINR |
| | | | LSDYDVDHIVPQSFLKDDSIDNKVLTRSDKARGKSDNVPSEEVVKKMKNYWRQLLNAKLITQRKFDNLTKAERGGLSELDKAGFIKRQLVETRQITKHVAQILDSR |
| | | | MNTKYDENDKLIREVKVITLKSKLVSDFRKDFQFYKVREINNYHHAHDAYLNAVVGTALIKKYPKLESEFVYGDYKVYDVRKMIAKSEQEIGKATAKYFFYSNIMN |
| | | | FFKTEITLANGEIRKRPLIETNGETGEIVWDKGRDFATVRKVLSMPQVNIVKKTEVQTGGFSKESILPKRNSDKLIARKKDWDPKKYGGFDSPTVAYSVLVVAKVE |
| | | | KGKSKKLKSVKELLGITIMERSSFEKNPIDFLEAKGYKEVKKDLIIKLPKYSLFELENGRKRMLASAGELQKGNELALPSKYVNFLYLASHYEKLKGSPEDNEQKQ |
| | | | LFVEQHKHYLDEIIEQISEFSKRVILADANLDKVLSAYNKHRDKPIREQAENIIHLFTLTNLGAPAAFKYFDTTIDRKRYTSTKEVLDATLIHQSITGLYETRIDL |
| | | | SQLGGDSGGSSGGSSGSETPGTSESATPESSGGSSGGSSLGIEDEYRLHETSTEPDVSLGSTWLSDFPQAWAETGGMGLAVRQAPLIIPLKATSTPVSIQQYPMSH |
| | | | EARLGIKPHIQRLLDQGILVPCQSPWNTPLLPVKKPGTNDYRPVQDLREVNKRVEDIHPTVPNPYNLLSGLPPSHQWYTVLDLKDAFFCLRLHPTSQPLFAFEWRD |
| | | | PGMGISGQLTWTRLPQGFKNSPTLFNEALHRDLADFRIQHPDLILLQYVDDILLAATSELDCQQGTRALLQTLGDLGYRASAKKAQICQKQVKYLGYLLREGQRWL |
| | | | TEARKETVMGQPVPKTPRQLREFLGKAGFCRLFIPGFAEMAAPLYPLTKPGTLFSWGPDQQKAYQEIKQALLTAPALGLPDLTKPFELFVDEKQGYAKGVLTQKLG |
| | | | PWRRPVAYLSKKLDPVAAGWPPCLRMVAAIAVLTKDAGKLTMGQPLVILAPHAVEALVKQPPDRWLSNARMTHYQAMLLDTDRVQFGPVVALNPATLLPLPEEGAP |
| | | | HDCLEILAETHGTRPDLTDQPIPDADHTWYTDGSSFLQEGQRKAGAAVTTETEVIWAGALPAGTSAQRAELIALTQALKMAEGKRLNVYTDSRYAFATAHIHGEIY |
| | | | RRRGWLTSEGREIKNKSEILALLKALFLPKRLSIIHCLGHQKGDSAEARGNRLADQAAREAAIKTPPDTSTLLI |
| MLVBM | 2 | 3677 | MKRTADGSEFESPKKKRKVDKKYSIGLDIGTNSVGWAVITDEYKVPSKKFKVLGNTDRHSIKKNLIGALLFDSGETAEATRLKRTARRRYTRRKNRICYLQEIFSN |
| | | | EMAKVDDSFFHRLEESFLVEEDKKHERHPIFGNIVDEVAYHEKYPTIYHLRKKLVDSTDKADLRLIYLALAHMIKFRGHFLIEGDLNPDNSDVDKLFIQLVQTYNQ |
| | | | LFEENPINASGVDAKAILSARLSKSRRLENLIAQLPGEKKNGLFGNLIALSLGLTPNFKSNFDLAEDAKLQLSKDTYDDDLDNLLAQIGDQYADLFLAAKNLSDAI |
| | | | LLSDILRVNTEITKAPLSASMIKRYDEHHQDLTLLKALVRQQLPEKYKEIFFDQSKNGYAGYIDGGASQEEFYKFIKPILEKMDGTEELLVKLNREDLLRKQRTFD |
| | | | NGSIPHQIHLGELHAILRRQEDFYPFLKDNREKIEKILTFRIPYYVGPLARGNSRFAWMTRKSEETITPWNFEEVVDKGASAQSFIERMTNFDKNLPNEKVLPKHS |
| | | | LLYEYFTVYNELTKVKYVTEGMRKPAFLSGEQKKAIVDLLFKTNRKVTVKQLKEDYFKKIECFDSVEISGVEDRFNASLGTYHDLLKIIKDKDFLDNEENEDILED |
| | | | IVLTLTLFEDREMIEERLKTYAHLFDDKVMKQLKRRRYTGWGRLSRKLINGIRDKQSGKTILDFLKSDGFANRNFMQLIHDDSLTFKEDIQKAQVSGQGDSLHEHI |
| | | | ANLAGSPAIKKGILQTVKVVDELVKVMGRHKPENIVIEMARENQTTQKGQKNSRERMKRIEEGIKELGSQILKEHPVENTQLQNEKLYLYYLQNGRDMYVDQELDI |
| | | | NRLSDYDVDHIVPQSFLKDDSIDNKVLTRSDKARGKSDNVPSEEVVKKMKNYWRQLLNAKLITQRKFDNLTKAERGGLSELDKAGFIKRQLVETRQITKHVAQILD |
| | | | SRMNTKYDENDKLIREVKVITLKSKLVSDFRKDFQFYKVREINNYHHAHDAYLNAVVGTALIKKYPKLESEFVYGDYKVYDVRKMIAKSEQEIGKATAKYFFYSNI |
| | | | MNFFKTEITLANGEIRKRPLIETNGETGEIVWDKGRDFATVRKVLSMPQVNIVKKTEVQTGGFSKESILPKRNSDKLIARKKDWDPKKYGGFDSPTVAYSVLVVAK |
| | | | VEKGKSKKLKSVKELLGITIMERSSFEKNPIDFLEAKGYKEVKKDLIIKLPKYSLFELENGRKRMLASAGELQKGNELALPSKYVNFLYLASHYEKLKGSPEDNEQ |
| | | | KQLFVEQHKHYLDEIIEQISEFSKRVILADANLDKVLSAYNKHRDKPIREQAENIIHLFTLTNLGAPAAFKYFDTTIDRKRYTSTKEVLDATLIHQSITGLYETRI |
| | | | DLSQLGGDSGGSSGGSSGSETPGTSESATPESSGGSSGGSSLGIEDEYRLHETSTEPDVSLGSTWLSDFPQAWAETGGMGLAVRQAPLIIPLKATSTPVSIQQYPM |
| | | | SHEARLGIKPHIQRLLDQGILVPCQSPWNTPLLPVKKPGTNDYRPVQDLREVNKRVEDIHPTVPNPYNLLSGLPPSHQWYTVLDLKDAFFCLRLHPTSQPLFAFEW |
| | | | RDPGMGISGQLTWTRLPQGFKNSPTLFNEALHRDLADFRIQHPDLILLQYVDDILLAATSELDCQQGTRALLQTLGDLGYRASAKKAQICQKQVKYLGYLLREGQR |
| | | | WLTEARKETVMGQPVPKTPRQLREFLGKAGFCRLFIPGFAEMAAPLYPLTKPGTLFSWGPDQQKAYQEIKQALLTAPALGLPDLTKPFELFVDEKQGYAKGVLTQK |
| | | | LGPWRRPVAYLSKKLDPVAAGWPPCLRMVAAIAVLTKDAGKLTMGQPLVILAPHAVEALVKQPPDRWLSNARMTHYQAMLLDTDRVQFGPVVALNPATLLPLPEEG |
| | | | APHDCLEILAETHGTRPDLTDQPIPDADHTWYTDGSSFLQEGQRKAGAAVTTETEVIWAGALPAGTSAQRAELIALTQALKMAEGKRLNVYTDSRYAFATAHIHGE |
| | | | IYRRRGWLTSEGREIKNKSEILALLKALFLPKRLSIIHCLGHQKGDSAEARGNRLADQAAREAAIKTPPDTSTLLISGGSKRTADGSEFEPKKKRKV |
| MLVBM | 3 | 3678 | MPAAKRVKLDGGDKKYSIGLDIGTNSVGWAVITDEYKVPSKKFKVLGNTDRHSIKKNLIGALLFDSGETAEATRLKRTARRRYTRRKNRICYLQEIFSNEMAKVDD |
| | | | SFFHRLEESFLVEEDKKHERHPIFGNIVDEVAYHEKYPTIYHLRKKLVDSTDKADLRLIYLALAHMIKFRGHFLIEGDLNPDNSDVDKLFIQLVQTYNQLFEENPI |
| | | | NASGVDAKAILSARLSKSRRLENLIAQLPGEKKNGLFGNLIALSLGLTPNFKSNFDLAEDAKLQLSKDTYDDDLDNLLAQIGDQYADLFLAAKNLSDAILLSDILR |
| | | | VNTEITKAPLSASMIKRYDEHHQDLTLLKALVRQQLPEKYKEIFFDQSKNGYAGYIDGGASQEEFYKFIKPILEKMDGTEELLVKLNREDLLRKQRTFDNGSIPHQ |
| | | | IHLGELHAILRRQEDFYPFLKDNREKIEKILTFRIPYYVGPLARGNSRFAWMTRKSEETITPWNFEEVVDKGASAQSFIERMTNFDKNLPNEKVLPKHSLLYEYFT |
| | | | VYNELTKVKYVTEGMRKPAFLSGEQKKAIVDLLFKTNRKVTVKQLKEDYFKKIECFDSVEISGVEDRFNASLGTYHDLLKIIKDKDFLDNEENEDILEDIVLTLTL |
| | | | FEDREMIEERLKTYAHLFDDKVMKQLKRRRYTGWGRLSRKLINGIRDKQSGKTILDFLKSDGFANRNFMQLIHDDSLTFKEDIQKAQVSGQGDSLHEHIANLAGSP |
| | | | AIKKGILQTVKVVDELVKVMGRHKPENIVIEMARENQTTQKGQKNSRERMKRIEEGIKELGSQILKEHPVENTQLQNEKLYLYYLQNGRDMYVDQELDINRLSDYD |
| | | | VDHIVPQSFLKDDSIDNKVLTRSDKARGKSDNVPSEEVVKKMKNYWRQLLNAKLITQRKFDNLTKAERGGLSELDKAGFIKRQLVETRQITKHVAQILDSRMNTKY |
| | | | DENDKLIREVKVITLKSKLVSDFRKDFQFYKVREINNYHHAHDAYLNAVVGTALIKKYPKLESEFVYGDYKVYDVRKMIAKSEQEIGKATAKYFFYSNIMNFFKTE |
| | | | ITLANGEIRKRPLIETNGETGEIVWDKGRDFATVRKVLSMPQVNIVKKTEVQTGGFSKESILPKRNSDKLIARKKDWDPKKYGGFDSPTVAYSVLVVAKVEKGKSK |
| | | | KLKSVKELLGITIMERSSFEKNPIDFLEAKGYKEVKKDLIIKLPKYSLFELENGRKRMLASAGELQKGNELALPSKYVNFLYLASHYEKLKGSPEDNEQKQLFVEQ |
| | | | HKHYLDEIIEQISEFSKRVILADANLDKVLSAYNKHRDKPIREQAENIIHLFTLTNLGAPAAFKYFDTTIDRKRYTSTKEVLDATLIHQSITGLYETRIDLSQLGG |
| | | | DSGGSSGGSSGSETPGTSESATPESSGGSSGGSSLGIEDEYRLHETSTEPDVSLGSTWLSDFPQAWAETGGMGLAVRQAPLIIPLKATSTPVSIQQYPMSHEARLG |
| | | | IKPHIQRLLDQGILVPCQSPWNTPLLPVKKPGTNDYRPVQDLREVNKRVEDIHPTVPNPYNLLSGLPPSHQWYTVLDLKDAFFCLRLHPTSQPLFAFEWRDPGMGI |
| | | | SGQLTWTRLPQGFKNSPTLFNEALHRDLADFRIQHPDLILLQYVDDILLAATSELDCQQGTRALLQTLGDLGYRASAKKAQICQKQVKYLGYLLREGQRWLTEARK |
| | | | ETVMGQPVPKTPRQLREFLGKAGFCRLFIPGFAEMAAPLYPLTKPGTLFSWGPDQQKAYQEIKQALLTAPALGLPDLTKPFELFVDEKQGYAKGVLTQKLGPWRRP |
| | | | VAYLSKKLDPVAAGWPPCLRMVAAIAVLTKDAGKLTMGQPLVILAPHAVEALVKQPPDRWLSNARMTHYQAMLLDTDRVQFGPVVALNPATLLPLPEEGAPHDCLE |
| | | | ILAETHGTRPDLTDQPIPDADHTWYTDGSSFLQEGQRKAGAAVTTETEVIWAGALPAGTSAQRAELIALTQALKMAEGKRLNVYTDSRYAFATAHIHGEIYRRRGW |
| | | | LTSEGREIKNKSEILALLKALFLPKRLSIIHCLGHQKGDSAEARGNRLADQAAREAAIKTPPDTSTLLISGGSKRTADGSEFEKRTADGSEFESPKKKAKVE |
| MLVBM | 4 | 3679 | MPAAKRVKLDGGDKKYSIGLDIGTNSVGWAVITDEYKVPSKKFKVLGNTDRHSIKKNLIGALLFDSGETAEATRLKRTARRRYTRRKNRICYLQEIFSNEMAKVDD |
| | | | SFFHRLEESFLVEEDKKHERHPIFGNIVDEVAYHEKYPTIYHLRKKLVDSTDKADLRLIYLALAHMIKFRGHFLIEGDLNPDNSDVDKLFIQLVQTYNQLFEENPI |
| | | | NASGVDAKAILSARLSKSRRLENLIAQLPGEKKNGLFGNLIALSLGLTPNFKSNFDLAEDAKLQLSKDTYDDDLDNLLAQIGDQYADLFLAAKNLSDAILLSDILR |
| | | | VNTEITKAPLSASMIKRYDEHHQDLTLLKALVRQQLPEKYKEIFFDQSKNGYAGYIDGGASQEEFYKFIKPILEKMDGTEELLVKLNREDLLRKQRTFDNGSIPHQ |
| | | | IHLGELHAILRRQEDFYPFLKDNREKIEKILTFRIPYYVGPLARGNSRFAWMTRKSEETITPWNFEEVVDKGASAQSFIERMTNFDKNLPNEKVLPKHSLLYEYFT |
| | | | VYNELTKVKYVTEGMRKPAFLSGEQKKAIVDLLFKTNRKVTVKQLKEDYFKKIECFDSVEISGVEDRFNASLGTYHDLLKIIKDKDFLDNEENEDILEDIVLTLTL |
| | | | FEDREMIEERLKTYAHLFDDKVMKQLKRRRYTGWGRLSRKLINGIRDKQSGKTILDFLKSDGFANRNFMQLIHDDSLTFKEDIQKAQVSGQGDSLHEHIANLAGSP |
| | | | AIKKGILQTVKVVDELVKVMGRHKPENIVIEMARENQTTQKGQKNSRERMKRIEEGIKELGSQILKEHPVENTQLQNEKLYLYYLQNGRDMYVDQELDINRLSDYD |
| | | | VDHIVPQSFLKDDSIDNKVLTRSDKARGKSDNVPSEEVVKKMKNYWRQLLNAKLITQRKFDNLTKAERGGLSELDKAGFIKRQLVETRQITKHVAQILDSRMNTKY |
| | | | DENDKLIREVKVITLKSKLVSDFRKDFQFYKVREINNYHHAHDAYLNAVVGTALIKKYPKLESEFVYGDYKVYDVRKMIAKSEQEIGKATAKYFFYSNIMNFFKTE |
| | | | ITLANGEIRKRPLIETNGETGEIVWDKGRDFATVRKVLSMPQVNIVKKTEVQTGGFSKESILPKRNSDKLIARKKDWDPKKYGGFDSPTVAYSVLVVAKVEKGKSK |
| | | | KLKSVKELLGITIMERSSFEKNPIDFLEAKGYKEVKKDLIIKLPKYSLFELENGRKRMLASAGELQKGNELALPSKYVNFLYLASHYEKLKGSPEDNEQKQLFVEQ |
| | | | HKHYLDEIIEQISEFSKRVILADANLDKVLSAYNKHRDKPIREQAENIIHLFTLTNLGAPAAFKYFDTTIDRKRYTSTKEVLDATLIHQSITGLYETRIDLSQLGG |
| | | | DGGSGGSSGGSSGSETPGTSESATPESSGGSSGGSSGGLGIEDEYRLHETSTEPDVSLGSTWLSDFPQAWAETGGMGLAVRQAPLIIPLKATSTPVSIQQYPMSHE |
| | | | ARLGIKPHIQRLLDQGILVPCQSPWNTPLLPVKKPGTNDYRPVQDLREVNKRVEDIHPTVPNPYNLLSGLPPSHQWYTVLDLKDAFFCLRLHPTSQPLFAFEWRDP |
| | | | GMGISGQLTWTRLPQGFKNSPTLFNEALHRDLADFRIQHPDLILLQYVDDILLAATSELDCQQGTRALLQTLGDLGYRASAKKAQICQKQVKYLGYLLREGQRWLT |
| | | | EARKETVMGQPVPKTPRQLREFLGKAGFCRLFIPGFAEMAAPLYPLTKPGTLFSWGPDQQKAYQEIKQALLTAPALGLPDLTKPFELFVDEKQGYAKGVLTQKLGP |
| | | | WRRPVAYLSKKLDPVAAGWPPCLRMVAAIAVLTKDAGKLTMGQPLVILAPHAVEALVKQPPDRWLSNARMTHYQAMLLDTDRVQFGPVVALNPATLLPLPEEGAPH |
| | | | DCLEILAETHGTRPDLTDQPIPDADHTWYTDGSSFLQEGQRKAGAAVTTETEVIWAGALPAGTSAQRAELIALTQALKMAEGKRLNVYTDSRYAFATAHIHGEIYR |
| | | | RRGWLTSEGREIKNKSEILALLKALFLPKRLSIIHCLGHQKGDSAEARGNRLADQAAREAAIKTPPDTSTLLIAGKRTADGSEFEKRTADGSEFESPKKKAKVEGS |
| | | | GEGRGSLLTCGDVEENPG |
| MLVBM | 5 | 3680 | MPAAKRVKLDGGDKKYSIGLDIGTNSVGWAVITDEYKVPSKKFKVLGNTDRHSIKKNLIGALLFDSGETAEATRLKRTARRRYTRRKNRICYLQEIFSNEMAKVDD |
| | | | SFFHRLEESFLVEEDKKHERHPIFGNIVDEVAYHEKYPTIYHLRKKLVDSTDKADLRLIYLALAHMIKFRGHFLIEGDLNPDNSDVDKLFIQLVQTYNQLFEENPI |
| | | | NASGVDAKAILSARLSKSRRLENLIAQLPGEKKNGLFGNLIALSLGLTPNFKSNFDLAEDAKLQLSKDTYDDDLDNLLAQIGDQYADLFLAAKNLSDAILLSDILR |
| | | | VNTEITKAPLSASMIKRYDEHHQDLTLLKALVRQQLPEKYKEIFFDQSKNGYAGYIDGGASQEEFYKFIKPILEKMDGTEELLVKLNREDLLRKQRTFDNGSIPHQ |
| | | | IHLGELHAILRRQEDFYPFLKDNREKIEKILTFRIPYYVGPLARGNSRFAWMTRKSEETITPWNFEEVVDKGASAQSFIERMTNFDKNLPNEKVLPKHSLLYEYFT |
| | | | VYNELTKVKYVTEGMRKPAFLSGEQKKAIVDLLFKTNRKVTVKQLKEDYFKKIECFDSVEISGVEDRFNASLGTYHDLLKIIKDKDFLDNEENEDILEDIVLTLTL |
| | | | FEDREMIEERLKTYAHLFDDKVMKQLKRRRYTGWGRLSRKLINGIRDKQSGKTILDFLKSDGFANRNFMQLIHDDSLTFKEDIQKAQVSGQGDSLHEHIANLAGSP |
| | | | AIKKGILQTVKVVDELVKVMGRHKPENIVIEMARENQTTQKGQKNSRERMKRIEEGIKELGSQILKEHPVENTQLQNEKLYLYYLQNGRDMYVDQELDINRLSDYD |
| | | | VDHIVPQSFLKDDSIDNKVLTRSDKARGKSDNVPSEEVVKKMKNYWRQLLNAKLITQRKFDNLTKAERGGLSELDKAGFIKRQLVETRQITKHVAQILDSRMNTKY |
| | | | DENDKLIREVKVITLKSKLVSDFRKDFQFYKVREINNYHHAHDAYLNAVVGTALIKKYPKLESEFVYGDYKVYDVRKMIAKSEQEIGKATAKYFFYSNIMNFFKTE |
| | | | ITLANGEIRKRPLIETNGETGEIVWDKGRDFATVRKVLSMPQVNIVKKTEVQTGGFSKESILPKRNSDKLIARKKDWDPKKYGGFDSPTVAYSVLVVAKVEKGKSK |
| | | | KLKSVKELLGITIMERSSFEKNPIDFLEAKGYKEVKKDLIIKLPKYSLFELENGRKRMLASAGELQKGNELALPSKYVNFLYLASHYEKLKGSPEDNEQKQLFVEQ |
| | | | HKHYLDEIIEQISEFSKRVILADANLDKVLSAYNKHRDKPIREQAENIIHLFTLTNLGAPAAFKYFDTTIDRKRYTSTKEVLDATLIHQSITGLYETRIDLSQLGG |
| | | | DGGPAPGGGGSSGGLGIEDEYRLHETSTEPDVSLGSTWLSDFPQAWAETGGMGLAVRQAPLIIPLKATSTPVSIQQYPMSHEARLGIKPHIQRLLDQGILVPCQSP |
| | | | WNTPLLPVKKPGTNDYRPVQDLREVNKRVEDIHPTVPNPYNLLSGLPPSHQWYTVLDLKDAFFCLRLHPTSQPLFAFEWRDPGMGISGQLTWTRLPQGFKNSPTLF |
| | | | NEALHRDLADFRIQHPDLILLQYVDDILLAATSELDCQQGTRALLQTLGDLGYRASAKKAQICQKQVKYLGYLLREGQRWLTEARKETVMGQPVPKTPRQLREFLG |
| | | | KAGFCRLFIPGFAEMAAPLYPLTKPGTLFSWGPDQQKAYQEIKQALLTAPALGLPDLTKPFELFVDEKQGYAKGVLTQKLGPWRRPVAYLSKKLDPVAAGWPPCLR |
| | | | MVAAIAVLTKDAGKLTMGQPLVILAPHAVEALVKQPPDRWLSNARMTHYQAMLLDTDRVQFGPVVALNPATLLPLPEEGAPHDCLEILAETHGTRPDLTDQPIPDA |
| | | | DHTWYTDGSSFLQEGQRKAGAAVTTETEVIWAGALPAGTSAQRAELIALTQALKMAEGKRLNVYTDSRYAFATAHIHGEIYRRRGWLTSEGREIKNKSEILALLKA |
| | | | LFLPKRLSIIHCLGHQKGDSAEARGNRLADQAAREAAIKTPPDTSTLLIAGKRTADGSEFEKRTADGSEFESPKKKAKVEGSGEGRGSLLTCGDVEENPG |
| MLVBM | 6 | 3681 | MPAAKRVKLDGGDKKYSIGLDIGTNSVGWAVITDEYKVPSKKFKVLGNTDRHSIKKNLIGALLFDSGETAEATRLKRTARRRYTRRKNRICYLQEIFSNEMAKVDD |
| | | | SFFHRLEESFLVEEDKKHERHPIFGNIVDEVAYHEKYPTIYHLRKKLVDSTDKADLRLIYLALAHMIKFRGHFLIEGDLNPDNSDVDKLFIQLVQTYNQLFEENPI |
| | | | NASGVDAKAILSARLSKSRRLENLIAQLPGEKKNGLFGNLIALSLGLTPNFKSNFDLAEDAKLQLSKDTYDDDLDNLLAQIGDQYADLFLAAKNLSDAILLSDILR |
| | | | VNTEITKAPLSASMIKRYDEHHQDLTLLKALVRQQLPEKYKEIFFDQSKNGYAGYIDGGASQEEFYKFIKPILEKMDGTEELLVKLNREDLLRKQRTFDNGSIPHQ |
| | | | IHLGELHAILRRQEDFYPFLKDNREKIEKILTFRIPYYVGPLARGNSRFAWMTRKSEETITPWNFEEVVDKGASAQSFIERMTNFDKNLPNEKVLPKHSLLYEYFT |
| | | | VYNELTKVKYVTEGMRKPAFLSGEQKKAIVDLLFKTNRKVTVKQLKEDYFKKIECFDSVEISGVEDRFNASLGTYHDLLKIIKDKDFLDNEENEDILEDIVLTLTL |
| | | | FEDREMIEERLKTYAHLFDDKVMKQLKRRRYTGWGRLSRKLINGIRDKQSGKTILDFLKSDGFANRNFMQLIHDDSLTFKEDIQKAQVSGQGDSLHEHIANLAGSP |
| | | | AIKKGILQTVKVVDELVKVMGRHKPENIVIEMARENQTTQKGQKNSRERMKRIEEGIKELGSQILKEHPVENTQLQNEKLYLYYLQNGRDMYVDQELDINRLSDYD |
| | | | VDHIVPQSFLKDDSIDNKVLTRSDKARGKSDNVPSEEVVKKMKNYWRQLLNAKLITQRKFDNLTKAERGGLSELDKAGFIKRQLVETRQITKHVAQILDSRMNTKY |
| | | | DENDKLIREVKVITLKSKLVSDFRKDFQFYKVREINNYHHAHDAYLNAVVGTALIKKYPKLESEFVYGDYKVYDVRKMIAKSEQEIGKATAKYFFYSNIMNFFKTE |
| | | | ITLANGEIRKRPLIETNGETGEIVWDKGRDFATVRKVLSMPQVNIVKKTEVQTGGFSKESILPKRNSDKLIARKKDWDPKKYGGFDSPTVAYSVLVVAKVEKGKSK |
| | | | KLKSVKELLGITIMERSSFEKNPIDFLEAKGYKEVKKDLIIKLPKYSLFELENGRKRMLASAGELQKGNELALPSKYVNFLYLASHYEKLKGSPEDNEQKQLFVEQ |
| | | | HKHYLDEIIEQISEFSKRVILADANLDKVLSAYNKHRDKPIREQAENIIHLFTLTNLGAPAAFKYFDTTIDRKRYTSTKEVLDATLIHQSITGLYETRIDLSQLGG |
| | | | DGGPAPGSSEAAAKGGLGIEDEYRLHETSTEPDVSLGSTWLSDFPQAWAETGGMGLAVRQAPLIIPLKATSTPVSIQQYPMSHEARLGIKPHIQRLLDQGILVPCQ |
| | | | SPWNTPLLPVKKPGTNDYRPVQDLREVNKRVEDIHPTVPNPYNLLSGLPPSHQWYTVLDLKDAFFCLRLHPTSQPLFAFEWRDPGMGISGQLTWTRLPQGFKNSPT |
| | | | LFNEALHRDLADFRIQHPDLILLQYVDDILLAATSELDCQQGTRALLQTLGDLGYRASAKKAQICQKQVKYLGYLLREGQRWLTEARKETVMGQPVPKTPRQLREF |
| | | | LGKAGFCRLFIPGFAEMAAPLYPLTKPGTLFSWGPDQQKAYQEIKQALLTAPALGLPDLTKPFELFVDEKQGYAKGVLTQKLGPWRRPVAYLSKKLDPVAAGWPPC |
| | | | LRMVAAIAVLTKDAGKLTMGQPLVILAPHAVEALVKQPPDRWLSNARMTHYQAMLLDTDRVQFGPVVALNPATLLPLPEEGAPHDCLEILAETHGTRPDLTDQPIP |
| | | | DADHTWYTDGSSFLQEGQRKAGAAVTTETEVIWAGALPAGTSAQRAELIALTQALKMAEGKRLNVYTDSRYAFATAHIHGEIYRRRGWLTSEGREIKNKSEILALL |
| | | | KALFLPKRLSIIHCLGHQKGDSAEARGNRLADQAAREAAIKTPPDTSTLLIAGKRTADGSEFEKRTADGSEFESPKKKAKVEGSGEGRGSLLTCGDVEENPG |
| MLVBM | 7 | 3682 | MPAAKRVKLDGGDKKYSIGLDIGTNSVGWAVITDEYKVPSKKFKVLGNTDRHSIKKNLIGALLFDSGETAEATRLKRTARRRYTRRKNRICYLQEIFSNEMAKVDD |
| | | | SFFHRLEESFLVEEDKKHERHPIFGNIVDEVAYHEKYPTIYHLRKKLVDSTDKADLRLIYLALAHMIKFRGHFLIEGDLNPDNSDVDKLFIQLVQTYNQLFEENPI |
| | | | NASGVDAKAILSARLSKSRRLENLIAQLPGEKKNGLFGNLIALSLGLTPNFKSNFDLAEDAKLQLSKDTYDDDLDNLLAQIGDQYADLFLAAKNLSDAILLSDILR |
| | | | VNTEITKAPLSASMIKRYDEHHQDLTLLKALVRQQLPEKYKEIFFDQSKNGYAGYIDGGASQEEFYKFIKPILEKMDGTEELLVKLNREDLLRKQRTFDNGSIPHQ |
| | | | IHLGELHAILRRQEDFYPFLKDNREKIEKILTFRIPYYVGPLARGNSRFAWMTRKSEETITPWNFEEVVDKGASAQSFIERMTNFDKNLPNEKVLPKHSLLYEYFT |
| | | | VYNELTKVKYVTEGMRKPAFLSGEQKKAIVDLLFKTNRKVTVKQLKEDYFKKIECFDSVEISGVEDRFNASLGTYHDLLKIIKDKDFLDNEENEDILEDIVLTLTL |
| | | | FEDREMIEERLKTYAHLFDDKVMKQLKRRRYTGWGRLSRKLINGIRDKQSGKTILDFLKSDGFANRNFMQLIHDDSLTFKEDIQKAQVSGQGDSLHEHIANLAGSP |
| | | | AIKKGILQTVKVVDELVKVMGRHKPENIVIEMARENQTTQKGQKNSRERMKRIEEGIKELGSQILKEHPVENTQLQNEKLYLYYLQNGRDMYVDQELDINRLSDYD |
| | | | VDHIVPQSFLKDDSIDNKVLTRSDKARGKSDNVPSEEVVKKMKNYWRQLLNAKLITQRKFDNLTKAERGGLSELDKAGFIKRQLVETRQITKHVAQILDSRMNTKY |
| | | | DENDKLIREVKVITLKSKLVSDFRKDFQFYKVREINNYHHAHDAYLNAVVGTALIKKYPKLESEFVYGDYKVYDVRKMIAKSEQEIGKATAKYFFYSNIMNFFKTE |
| | | | ITLANGEIRKRPLIETNGETGEIVWDKGRDFATVRKVLSMPQVNIVKKTEVQTGGFSKESILPKRNSDKLIARKKDWDPKKYGGFDSPTVAYSVLVVAKVEKGKSK |
| | | | KLKSVKELLGITIMERSSFEKNPIDFLEAKGYKEVKKDLIIKLPKYSLFELENGRKRMLASAGELQKGNELALPSKYVNFLYLASHYEKLKGSPEDNEQKQLFVEQ |
| | | | HKHYLDEIIEQISEFSKRVILADANLDKVLSAYNKHRDKPIREQAENIIHLFTLTNLGAPAAFKYFDTTIDRKRYTSTKEVLDATLIHQSITGLYETRIDLSQLGG |
| | | | DGGEAAAKGGGGSEAAAKGGLGIEDEYRLHETSTEPDVSLGSTWLSDFPQAWAETGGMGLAVRQAPLIIPLKATSTPVSIQQYPMSHEARLGIKPHIQRLLDQGIL |
| | | | VPCQSPWNTPLLPVKKPGTNDYRPVQDLREVNKRVEDIHPTVPNPYNLLSGLPPSHQWYTVLDLKDAFFCLRLHPTSQPLFAFEWRDPGMGISGQLTWTRLPQGFK |
| | | | NSPTLFNEALHRDLADFRIQHPDLILLQYVDDILLAATSELDCQQGTRALLQTLGDLGYRASAKKAQICQKQVKYLGYLLREGQRWLTEARKETVMGQPVPKTPRQ |
| | | | LREFLGKAGFCRLFIPGFAEMAAPLYPLTKPGTLFSWGPDQQKAYQEIKQALLTAPALGLPDLTKPFELFVDEKQGYAKGVLTQKLGPWRRPVAYLSKKLDPVAAG |
| | | | WPPCLRMVAAIAVLTKDAGKLTMGQPLVILAPHAVEALVKQPPDRWLSNARMTHYQAMLLDTDRVQFGPVVALNPATLLPLPEEGAPHDCLEILAETHGTRPDLTD |
| | | | QPIPDADHTWYTDGSSFLQEGQRKAGAAVTTETEVIWAGALPAGTSAQRAELIALTQALKMAEGKRLNVYTDSRYAFATAHIHGEIYRRRGWLTSEGREIKNKSEI |
| | | | LALLKALFLPKRLSIIHCLGHQKGDSAEARGNRLADQAAREAAIKTPPDTSTLLIAGKRTADGSEFEKRTADGSEFESPKKKAKVEGSGEGRGSLLTCGDVEENPG |
| MLVBM | 8 | 3683 | MPAAKRVKLDGGDKKYSIGLDIGTNSVGWAVITDEYKVPSKKFKVLGNTDRHSIKKNLIGALLFDSGETAEATRLKRTARRRYTRRKNRICYLQEIFSNEMAKVDD |
| | | | SFFHRLEESFLVEEDKKHERHPIFGNIVDEVAYHEKYPTIYHLRKKLVDSTDKADLRLIYLALAHMIKFRGHFLIEGDLNPDNSDVDKLFIQLVQTYNQLFEENPI |
| | | | NASGVDAKAILSARLSKSRRLENLIAQLPGEKKNGLFGNLIALSLGLTPNFKSNFDLAEDAKLQLSKDTYDDDDNLLAQIGDQYADLFLAAKNLSDAILLSDILR |
| | | | VNTEITKAPLSASMIKRYDEHHQDLTLLKALVRQQLPEKYKEIFFDQSKNGYAGYIDGGASQEEFYKFIKPILEKMDGTEELLVKLNREDLLRKQRTFDNGSIPHQ |
| | | | IHLGELHAILRRQEDFYPFLKDNREKIEKILTFRIPYYVGPLARGNSRFAWMTRKSEETITPWNFEEVVDKGASAQSFIERMTNFDKNLPNEKVLPKHSLLYEYFT |
| | | | VYNELTKVKYVTEGMRKPAFLSGEQKKAIVDLLFKTNRKVTVKQLKEDYFKKIECFDSVEISGVEDRFNASLGTYHDLLKIIKDKDFLDNEENEDILEDIVLTLTL |
| | | | FEDREMIEERLKTYAHLFDDKVMKQLKRRRYTGWGRLSRKLINGIRDKQSGKTILDFLKSDGFANRNFMQLIHDDSLTFKEDIQKAQVSGQGDSLHEHIANLAGSP |
| | | | AIKKGILQTVKVVDELVKVMGRHKPENIVIEMARENQTTQKGQKNSRERMKRIEEGIKELGSQILKEHPVENTQLQNEKLYLYYLQNGRDMYVDQELDINRLSDYD |
| | | | VDHIVPQSFLKDDSIDNKVLTRSDKARGKSDNVPSEEVVKKMKNYWRQLLNAKLITQRKFDNLTKAERGGLSELDKAGFIKRQLVETRQITKHVAQILDSRMNTKY |
| | | | DENDKLIREVKVITLKSKLVSDFRKDFQFYKVREINNYHHAHDAYLNAVVGTALIKKYPKLESEFVYGDYKVYDVRKMIAKSEQEIGKATAKYFFYSNIMNFFKTE |
| | | | ITLANGEIRKRPLIETNGETGEIVWDKGRDFATVRKVLSMPQVNIVKKTEVQTGGFSKESILPKRNSDKLIARKKDWDPKKYGGFDSPTVAYSVLVVAKVEKGKSK |
| | | | KLKSVKELLGITIMERSSFEKNPIDFLEAKGYKEVKKDLIIKLPKYSLFELENGRKRMLASAGELQKGNELALPSKYVNFLYLASHYEKLKGSPEDNEQKQLFVEQ |
| | | | HKHYLDEIIEQISEFSKRVILADANLDKVLSAYNKHRDKPIREQAENIIHLFTLTNLGAPAAFKYFDTTIDRKRYTSTKEVLDATLIHQSITGLYETRIDLSQLGG |
| | | | DGGGGSPAPGGGGGLGIEDEYRLHETSTEPDVSLGSTWLSDFPQAWAETGGMGLAVRQAPLIIPLKATSTPVSIQQYPMSHEARLGIKPHIQRLLDQGILVPCQSP |
| | | | WNTPLLPVKKPGTNDYRPVQDLREVNKRVEDIHPTVPNPYNLLSGLPPSHQWYTVLDLKDAFFCLRLHPTSQPLFAFEWRDPGMGISGQLTWTRLPQGFKNSPTLF |
| | | | NEALHRDLADFRIQHPDLILLQYVDDILLAATSELDCQQGTRALLQTLGDLGYRASAKKAQICQKQVKYLGYLLREGQRWLTEARKETVMGQPVPKTPRQLREFLG |
| | | | KAGFCRLFIPGFAEMAAPLYPLTKPGTLFSWGPDQQKAYQEIKQALLTAPALGLPDLTKPFELFVDEKQGYAKGVLTQKLGPWRRPVAYLSKKLDPVAAGWPPCLR |
| | | | MVAAIAVLTKDAGKLTMGQPLVILAPHAVEALVKQPPDRWLSNARMTHYQAMLLDTDRVQFGPVVALNPATLLPLPEEGAPHDCLEILAETHGTRPDLTDQPIPDA |
| | | | DHTWYTDGSSFLQEGQRKAGAAVTTETEVIWAGALPAGTSAQRAELIALTQALKMAEGKRLNVYTDSRYAFATAHIHGEIYRRRGWLTSEGREIKNKSEILALLKA |
| | | | LFLPKRLSIIHCLGHQKGDSAEARGNRLADQAAREAAIKTPPDTSTLLIAGKRTADGSEFEKRTADGSEFESPKKKAKVEGSGEGRGSLLTCGDVEENPG |
| MLVBM | 9 | 3684 | MPAAKRVKLDGGDKKYSIGLDIGTNSVGWAVITDEYKVPSKKFKVLGNTDRHSIKKNLIGALLFDSGETAEATRLKRTARRRYTRRKNRICYLQEIFSNEMAKVDD |
| | | | SFFHRLEESFLVEEDKKHERHPIFGNIVDEVAYHEKYPTIYHLRKKLVDSTDKADLRLIYLALAHMIKFRGHFLIEGDLNPDNSDVDKLFIQLVQTYNQLFEENPI |
| | | | NASGVDAKAILSARLSKSRRLENLIAQLPGEKKNGLFGNLIALSLGLTPNFKSNFDLAEDAKLQLSKDTYDDDLDNLLAQIGDQYADLFLAAKNLSDAILLSDILR |
| | | | VNTEITKAPLSASMIKRYDEHHQDLTLLKALVRQQLPEKYKEIFFDQSKNGYAGYIDGGASQEEFYKFIKPILEKMDGTEELLVKLNREDLLRKQRTFDNGSIPHQ |
| | | | IHLGELHAILRRQEDFYPFLKDNREKIEKILTFRIPYYVGPLARGNSRFAWMTRKSEETITPWNFEEVVDKGASAQSFIERMTNFDKNLPNEKVLPKHSLLYEYFT |
| | | | VYNELTKVKYVTEGMRKPAFLSGEQKKAIVDLLFKTNRKVTVKQLKEDYFKKIECFDSVEISGVEDRFNASLGTYHDLLKIIKDKDFLDNEENEDILEDIVLTLTL |
| | | | FEDREMIEERLKTYAHLFDDKVMKQLKRRRYTGWGRLSRKLINGIRDKQSGKTILDFLKSDGFANRNFMQLIHDDSLTFKEDIQKAQVSGQGDSLHEHIANLAGSP |
| | | | AIKKGILQTVKVVDELVKVMGRHKPENIVIEMARENQTTQKGQKNSRERMKRIEEGIKELGSQILKEHPVENTQLQNEKLYLYYLQNGRDMYVDQELDINRLSDYD |
| | | | VDHIVPQSFLKDDSIDNKVLTRSDKARGKSDNVPSEEVVKKMKNYWRQLLNAKLITQRKFDNLTKAERGGLSELDKAGFIKRQLVETRQITKHVAQILDSRMNTKY |
| | | | DENDKLIREVKVITLKSKLVSDFRKDFQFYKVREINNYHHAHDAYLNAVVGTALIKKYPKLESEFVYGDYKVYDVRKMIAKSEQEIGKATAKYFFYSNIMNFFKTE |
| | | | ITLANGEIRKRPLIETNGETGEIVWDKGRDFATVRKVLSMPQVNIVKKTEVQTGGFSKESILPKRNSDKLIARKKDWDPKKYGGFDSPTVAYSVLVVAKVEKGKSK |
| | | | KLKSVKELLGITIMERSSFEKNPIDFLEAKGYKEVKKDLIIKLPKYSLFELENGRKRMLASAGELQKGNELALPSKYVNFLYLASHYEKLKGSPEDNEQKQLFVEQ |
| | | | HKHYLDEIIEQISEFSKRVILADANLDKVLSAYNKHRDKPIREQAENIIHLFTLTNLGAPAAFKYFDTTIDRKRYTSTKEVLDATLIHQSITGLYETRIDLSQLGG |
| | | | DGGPAPGGSEAAAKGGLGIEDEYRLHETSTEPDVSLGSTWLSDFPQAWAETGGMGLAVRQAPLIIPLKATSTPVSIQQYPMSHEARLGIKPHIQRLLDQGILVPCQ |
| | | | SPWNTPLLPVKKPGTNDYRPVQDLREVNKRVEDIHPTVPNPYNLLSGLPPSHQWYTVLDLKDAFFCLRLHPTSQPLFAFEWRDPGMGISGQLTWTRLPQGFKNSPT |
| | | | LFNEALHRDLADFRIQHPDLILLQYVDDILLAATSELDCQQGTRALLQTLGDLGYRASAKKAQICQKQVKYLGYLLREGQRWLTEARKETVMGQPVPKTPRQLREF |
| | | | LGKAGFCRLFIPGFAEMAAPLYPLTKPGTLFSWGPDQQKAYQEIKQALLTAPALGLPDLTKPFELFVDEKQGYAKGVLTQKLGPWRRPVAYLSKKLDPVAAGWPPC |
| | | | LRMVAAIAVLTKDAGKLTMGQPLVILAPHAVEALVKQPPDRWLSNARMTHYQAMLLDTDRVQFGPVVALNPATLLPLPEEGAPHDCLEILAETHGTRPDLTDQPIP |
| | | | DADHTWYTDGSSFLQEGQRKAGAAVTTETEVIWAGALPAGTSAQRAELIALTQALKMAEGKRLNVYTDSRYAFATAHIHGEIYRRRGWLTSEGREIKNKSEILALL |
| | | | KALFLPKRLSIIHCLGHQKGDSAEARGNRLADQAAREAAIKTPPDTSTLLIAGKRTADGSEFEKRTADGSEFESPKKKAKVEGSGEGRGSLLTCGDVEENPG |
| MLVBM | 10 | 3685 | MPAAKRVKLDGGDKKYSIGLDIGTNSVGWAVITDEYKVPSKKFKVLGNTDRHSIKKNLIGALLFDSGETAEATRLKRTARRRYTRRKNRICYLQEIFSNEMAKVDD |
| | | | SFFHRLEESFLVEEDKKHERHPIFGNIVDEVAYHEKYPTIYHLRKKLVDSTDKADLRLIYLALAHMIKFRGHFLIEGDLNPDNSDVDKLFIQLVQTYNQLFEENPI |
| | | | NASGVDAKAILSARLSKSRRLENLIAQLPGEKKNGLFGNLIALSLGLTPNFKSNFDLAEDAKLQLSKDTYDDDLDNLLAQIGDQYADLFLAAKNLSDAILLSDILR |
| | | | VNTEITKAPLSASMIKRYDEHHQDLTLLKALVRQQLPEKYKEIFFDQSKNGYAGYIDGGASQEEFYKFIKPILEKMDGTEELLVKLNREDLLRKQRTFDNGSIPHQ |
| | | | IHLGELHAILRRQEDFYPFLKDNREKIEKILTFRIPYYVGPLARGNSRFAWMTRKSEETITPWNFEEVVDKGASAQSFIERMTNFDKNLPNEKVLPKHSLLYEYFT |
| | | | VYNELTKVKYVTEGMRKPAFLSGEQKKAIVDLLFKTNRKVTVKQLKEDYFKKIECFDSVEISGVEDRFNASLGTYHDLLKIIKDKDFLDNEENEDILEDIVLTLTL |
| | | | FEDREMIEERLKTYAHLFDDKVMKQLKRRRYTGWGRLSRKLINGIRDKQSGKTILDFLKSDGFANRNFMQLIHDDSLTFKEDIQKAQVSGQGDSLHEHIANLAGSP |
| | | | AIKKGILQTVKVVDELVKVMGRHKPENIVIEMARENQTTQKGQKNSRERMKRIEEGIKELGSQILKEHPVENTQLQNEKLYLYYLQNGRDMYVDQELDINRLSDYD |
| | | | VDHIVPQSFLKDDSIDNKVLTRSDKARGKSDNVPSEEVVKKMKNYWRQLLNAKLITQRKFDNLTKAERGGLSELDKAGFIKRQLVETRQITKHVAQILDSRMNTKY |
| | | | DENDKLIREVKVITLKSKLVSDFRKDFQFYKVREINNYHHAHDAYLNAVVGTALIKKYPKLESEFVYGDYKVYDVRKMIAKSEQEIGKATAKYFFYSNIMNFFKTE |
| | | | ITLANGEIRKRPLIETNGETGEIVWDKGRDFATVRKVLSMPQVNIVKKTEVQTGGFSKESILPKRNSDKLIARKKDWDPKKYGGFDSPTVAYSVLVVAKVEKGKSK |
| | | | KLKSVKELLGITIMERSSFEKNPIDFLEAKGYKEVKKDLIIKLPKYSLFELENGRKRMLASAGELQKGNELALPSKYVNFLYLASHYEKLKGSPEDNEQKQLFVEQ |
| | | | HKHYLDEIIEQISEFSKRVILADANLDKVLSAYNKHRDKPIREQAENIIHLFTLTNLGAPAAFKYFDTTIDRKRYTSTKEVLDATLIHQSITGLYETRIDLSQLGG |
| | | | DGGPAPEAAAKGGSGGLGIEDEYRLHETSTEPDVSLGSTWLSDFPQAWAETGGMGLAVRQAPLIIPLKATSTPVSIQQYPMSHEARLGIKPHIQRLLDQGILVPCQ |
| | | | SPWNTPLLPVKKPGTNDYRPVQDLREVNKRVEDIHPTVPNPYNLLSGLPPSHQWYTVLDLKDAFFCLRLHPTSQPLFAFEWRDPGMGISGQLTWTRLPQGFKNSPT |
| | | | LFNEALHRDLADFRIQHPDLILLQYVDDILLAATSELDCQQGTRALLQTLGDLGYRASAKKAQICQKQVKYLGYLLREGQRWLTEARKETVMGQPVPKTPRQLREF |
| | | | LGKAGFCRLFIPGFAEMAAPLYPLTKPGTLFSWGPDQQKAYQEIKQALLTAPALGLPDLTKPFELFVDEKQGYAKGVLTQKLGPWRRPVAYLSKKLDPVAAGWPPC |
| | | | LRMVAAIAVLTKDAGKLTMGQPLVILAPHAVEALVKQPPDRWLSNARMTHYQAMLLDTDRVQFGPVVALNPATLLPLPEEGAPHDCLEILAETHGTRPDLTDQPIP |
| | | | DADHTWYTDGSSFLQEGQRKAGAAVTTETEVIWAGALPAGTSAQRAELIALTQALKMAEGKRLNVYTDSRYAFATAHIHGEIYRRRGWLTSEGREIKNKSEILALL |
| | | | KALFLPKRLSIIHCLGHQKGDSAEARGNRLADQAAREAAIKTPPDTSTLLIAGKRTADGSEFEKRTADGSEFESPKKKAKVEGSGEGRGSLLTCGDVEENPG |
| MLVBM | 11 | 3686 | MPAAKRVKLDGGDKKYSIGLDIGTNSVGWAVITDEYKVPSKKFKVLGNTDRHSIKKNLIGALLFDSGETAEATRLKRTARRRYTRRKNRICYLQEIFSNEMAKVDD |
| | | | SFFHRLEESFLVEEDKKHERHPIFGNIVDEVAYHEKYPTIYHLRKKLVDSTDKADLRLIYLALAHMIKFRGHFLIEGDLNPDNSDVDKLFIQLVQTYNQLFEENPI |
| | | | NASGVDAKAILSARLSKSRRLENLIAQLPGEKKNGLFGNLIALSLGLTPNFKSNFDLAEDAKLQLSKDTYDDDLDNLLAQIGDQYADLFLAAKNLSDAILLSDILR |
| | | | VNTEITKAPLSASMIKRYDEHHQDLTLLKALVRQQLPEKYKEIFFDQSKNGYAGYIDGGASQEEFYKFIKPILEKMDGTEELLVKLNREDLLRKQRTFDNGSIPHQ |
| | | | IHLGELHAILRRQEDFYPFLKDNREKIEKILTFRIPYYVGPLARGNSRFAWMTRKSEETITPWNFEEVVDKGASAQSFIERMTNFDKNLPNEKVLPKHSLLYEYFT |
| | | | VYNELTKVKYVTEGMRKPAFLSGEQKKAIVDLLFKTNRKVTVKQLKEDYFKKIECFDSVEISGVEDRFNASLGTYHDLLKIIKDKDFLDNEENEDILEDIVLTLTL |
| | | | FEDREMIEERLKTYAHLFDDKVMKQLKRRRYTGWGRLSRKLINGIRDKQSGKTILDFLKSDGFANRNFMQLIHDDSLTFKEDIQKAQVSGQGDSLHEHIANLAGSP |
| | | | AIKKGILQTVKVVDELVKVMGRHKPENIVIEMARENQTTQKGQKNSRERMKRIEEGIKELGSQILKEHPVENTQLQNEKLYLYYLQNGRDMYVDQELDINRLSDYD |
| | | | VDHIVPQSFLKDDSIDNKVLTRSDKARGKSDNVPSEEVVKKMKNYWRQLLNAKLITQRKFDNLTKAERGGLSELDKAGFIKRQLVETRQITKHVAQILDSRMNTKY |
| | | | DENDKLIREVKVITLKSKLVSDFRKDFQFYKVREINNYHHAHDAYLNAVVGTALIKKYPKLESEFVYGDYKVYDVRKMIAKSEQEIGKATAKYFFYSNIMNFFKTE |
| | | | ITLANGEIRKRPLIETNGETGEIVWDKGRDFATVRKVLSMPQVNIVKKTEVQTGGFSKESILPKRNSDKLIARKKDWDPKKYGGFDSPTVAYSVLVVAKVEKGKSK |
| | | | KLKSVKELLGITIMERSSFEKNPIDFLEAKGYKEVKKDLIIKLPKYSLFELENGRKRMLASAGELQKGNELALPSKYVNFLYLASHYEKLKGSPEDNEQKQLFVEQ |
| | | | HKHYLDEIIEQISEFSKRVILADANLDKVLSAYNKHRDKPIREQAENIIHLFTLTNLGAPAAFKYFDTTIDRKRYTSTKEVLDATLIHQSITGLYETRIDLSQLGG |
| | | | DGGAEAAAKEAAAKEAAAKEAAAKALEAEAAAKEAAAKEAAAKEAAAKAGGLGIEDEYRLHETSTEPDVSLGSTWLSDFPQAWAETGGMGLAVRQAPLIIPLKATS |
| | | | TPVSIQQYPMSHEARLGIKPHIQRLLDQGILVPCQSPWNTPLLPVKKPGTNDYRPVQDLREVNKRVEDIHPTVPNPYNLLSGLPPSHQWYTVLDLKDAFFCLRLHP |
| | | | TSQPLFAFEWRDPGMGISGQLTWTRLPQGFKNSPTLFNEALHRDLADFRIQHPDLILLQYVDDILLAATSELDCQQGTRALLQTLGDLGYRASAKKAQICQKQVKY |
| | | | LGYLLREGQRWLTEARKETVMGQPVPKTPRQLREFLGKAGFCRLFIPGFAEMAAPLYPLTKPGTLFSWGPDQQKAYQEIKQALLTAPALGLPDLTKPFELFVDEKQ |
| | | | GYAKGVLTQKLGPWRRPVAYLSKKLDPVAAGWPPCLRMVAAIAVLTKDAGKLTMGQPLVILAPHAVEALVKQPPDRWLSNARMTHYQAMLLDTDRVQFGPVVALNP |
| | | | ATLLPLPEEGAPHDCLEILAETHGTRPDLTDQPIPDADHTWYTDGSSFLQEGQRKAGAAVTTETEVIWAGALPAGTSAQRAELIALTQALKMAEGKRLNVYTDSRY |
| | | | AFATAHIHGEIYRRRGWLTSEGREIKNKSEILALLKALFLPKRLSIIHCLGHQKGDSAEARGNRLADQAAREAAIKTPPDTSTLLIAGKRTADGSEFEKRTADGSE |
| | | | FESPKKKAKVEGSGEGRGSLLTCGDVEENPG |
| PERV | 1 | 3687 | MAPKKKRKVGIHGVPAADKKYSIGLDIGTNSVGWAVITDEYKVPSKKFKVLGNTDRHSIKKNLIGALLFDSGETAEATRLKRTARRRYTRRKNRICYLQEIFSNEM |
| | | | AKVDDSFFHRLEESFLVEEDKKHERHPIFGNIVDEVAYHEKYPTIYHLRKKLVDSTDKADLRLIYLALAHMIKFRGHFLIEGDLNPDNSDVDKLFIQLVQTYNQLF |
| | | | EENPINASGVDAKAILSARLSKSRRLENLIAQLPGEKKNGLFGNLIALSLGLTPNFKSNFDLAEDAKLQLSKDTYDDDLDNLLAQIGDQYADLFLAAKNLSDAILL |
| | | | SDILRVNTEITKAPLSASMIKRYDEHHQDLTLLKALVRQQLPEKYKEIFFDQSKNGYAGYIDGGASQEEFYKFIKPILEKMDGTEELLVKLNREDLLRKQRTFDNG |
| | | | SIPHQIHLGELHAILRRQEDFYPFLKDNREKIEKILTFRIPYYVGPLARGNSRFAWMTRKSEETITPWNFEEVVDKGASAQSFIERMTNFDKNLPNEKVLPKHSLL |
| | | | YEYFTVYNELTKVKYVTEGMRKPAFLSGEQKKAIVDLLFKTNRKVTVKQLKEDYFKKIECFDSVEISGVEDRFNASLGTYHDLLKIIKDKDFLDNEENEDILEDIV |
| | | | LTLTLFEDREMIEERLKTYAHLFDDKVMKQLKRRRYTGWGRLSRKLINGIRDKQSGKTILDFLKSDGFANRNFMQLIHDDSLTFKEDIQKAQVSGQGDSLHEHIAN |
| | | | LAGSPAIKKGILQTVKVVDELVKVMGRHKPENIVIEMARENQTTQKGQKNSRERMKRIEEGIKELGSQILKEHPVENTQLQNEKLYLYYLQNGRDMYVDQELDINR |
| | | | LSDYDVDHIVPQSFLKDDSIDNKVLTRSDKARGKSDNVPSEEVVKKMKNYWRQLLNAKLITQRKFDNLTKAERGGLSELDKAGFIKRQLVETRQITKHVAQILDSR |
| | | | MNTKYDENDKLIREVKVITLKSKLVSDFRKDFQFYKVREINNYHHAHDAYLNAVVGTALIKKYPKLESEFVYGDYKVYDVRKMIAKSEQEIGKATAKYFFYSNIMN |
| | | | FFKTEITLANGEIRKRPLIETNGETGEIVWDKGRDFATVRKVLSMPQVNIVKKTEVQTGGFSKESILPKRNSDKLIARKKDWDPKKYGGFDSPTVAYSVLVVAKVE |
| | | | KGKSKKLKSVKELLGITIMERSSFEKNPIDFLEAKGYKEVKKDLIIKLPKYSLFELENGRKRMLASAGELQKGNELALPSKYVNFLYLASHYEKLKGSPEDNEQKQ |
| | | | LFVEQHKHYLDEIIEQISEFSKRVILADANLDKVLSAYNKHRDKPIREQAENIIHLFTLTNLGAPAAFKYFDTTIDRKRYTSTKEVLDATLIHQSITGLYETRIDL |
| | | | SQLGGDSGGSSGGSSGSETPGTSESATPESSGGSSGGSSMDDEYRLYSPLVKPDQNIQFWLEQFPQAWAETAGMGLAKQVPPQVIQLKASATPVSVRQYPLSKEAQ |
| | | | EGIRPHVQRLIQQGILVPVQSPWNTPLLPVRKPGTNDYRPVQDLREVNKRVQDIHPTVPNPYNLLCALPPQRSWYTVLDLKDAFFCLRLHPTSQPLFAFEWRDPGT |
| | | | GRTGQLTWTRLPQGFKNSPTIFNEALHRDLANFRIQHPQVTLLQYVDDLLLAGATKQDCLEGTKALLLELSDLGYRASAKKAQICRREVTYLGYSLRDGQRWLTEA |
| | | | RKKTVVQIPAPTTAKQVREFLGKAGFCRLFIPGFATLAAPLYPLTKPKGEFSWAPEHQKAFDAIKKALLSAPALALPDVTKPFTLYVDERKGVARGVLTQTLGPWR |
| | | | RPVAYLSKKLDPVASGWPVCLKAIAAVAILVKDADKLTLGQNITVIAPHALENIVRQPPDRWMTNARMTHYQSLLLTERVTFAPPAALNPATLLPEETDEPVTHDC |
| | | | HQLLIEETGVRKDLTDIPLTGEVLTWFTDGSSYVVEGKRMAGAAVVDGTRTIWASSLPEGTSAQKAELMALTQALRLAEGKSINIYTDSRYAFATAHVHGAIYKQR |
| | | | GWLTSAGREIKNKEEILSLLEALHLPKRLAIIHCPGHQKAKDPISRGNQMADRVAKQAAQGVNLLP |
| PERV | 2 | 3688 | MKRTADGSEFESPKKKRKVDKKYSIGLDIGTNSVGWAVITDEYKVPSKKFKVLGNTDRHSIKKNLIGALLFDSGETAEATRLKRTARRRYTRRKNRICYLQEIFSN |
| | | | EMAKVDDSFFHRLEESFLVEEDKKHERHPIFGNIVDEVAYHEKYPTIYHLRKKLVDSTDKADLRLIYLALAHMIKFRGHFLIEGDLNPDNSDVDKLFIQLVQTYNQ |
| | | | LFEENPINASGVDAKAILSARLSKSRRLENLIAQLPGEKKNGLFGNLIALSLGLTPNFKSNFDLAEDAKLQLSKDTYDDDLDNLLAQIGDQYADLFLAAKNLSDAI |
| | | | LLSDILRVNTEITKAPLSASMIKRYDEHHQDLTLLKALVRQQLPEKYKEIFFDQSKNGYAGYIDGGASQEEFYKFIKPILEKMDGTEELLVKLNREDLLRKQRTFD |
| | | | NGSIPHQIHLGELHAILRRQEDFYPFLKDNREKIEKILTFRIPYYVGPLARGNSRFAWMTRKSEETITPWNFEEVVDKGASAQSFIERMTNFDKNLPNEKVLPKHS |
| | | | LLYEYFTVYNELTKVKYVTEGMRKPAFLSGEQKKAIVDLLFKTNRKVTVKQLKEDYFKKIECFDSVEISGVEDRFNASLGTYHDLLKIIKDKDFLDNEENEDILED |
| | | | IVLTLTLFEDREMIEERLKTYAHLFDDKVMKQLKRRRYTGWGRLSRKLINGIRDKQSGKTILDFLKSDGFANRNFMQLIHDDSLTFKEDIQKAQVSGQGDSLHEHI |
| | | | ANLAGSPAIKKGILQTVKVVDELVKVMGRHKPENIVIEMARENQTTQKGQKNSRERMKRIEEGIKELGSQILKEHPVENTQLQNEKLYLYYLQNGRDMYVDQELDI |
| | | | NRLSDYDVDHIVPQSFLKDDSIDNKVLTRSDKARGKSDNVPSEEVVKKMKNYWRQLLNAKLITQRKFDNLTKAERGGLSELDKAGFIKRQLVETRQITKHVAQILD |
| | | | SRMNTKYDENDKLIREVKVITLKSKLVSDFRKDFQFYKVREINNYHHAHDAYLNAVVGTALIKKYPKLESEFVYGDYKVYDVRKMIAKSEQEIGKATAKYFFYSNI |
| | | | MNFFKTEITLANGEIRKRPLIETNGETGEIVWDKGRDFATVRKVLSMPQVNIVKKTEVQTGGFSKESILPKRNSDKLIARKKDWDPKKYGGFDSPTVAYSVLVVAK |
| | | | VEKGKSKKLKSVKELLGITIMERSSFEKNPIDFLEAKGYKEVKKDLIIKLPKYSLFELENGRKRMLASAGELQKGNELALPSKYVNFLYLASHYEKLKGSPEDNEQ |
| | | | KQLFVEQHKHYLDEIIEQISEFSKRVILADANLDKVLSAYNKHRDKPIREQAENIIHLFTLTNLGAPAAFKYFDTTIDRKRYTSTKEVLDATLIHQSITGLYETRI |
| | | | DLSQLGGDSGGSSGGSSGSETPGTSESATPESSGGSSGGSSMDDEYRLYSPLVKPDQNIQFWLEQFPQAWAETAGMGLAKQVPPQVIQLKASATPVSVRQYPLSKE |
| | | | AQEGIRPHVQRLIQQGILVPVQSPWNTPLLPVRKPGTNDYRPVQDLREVNKRVQDIHPTVPNPYNLLCALPPQRSWYTVLDLKDAFFCLRLHPTSQPLFAFEWRDP |
| | | | GTGRTGQLTWTRLPQGFKNSPTIFNEALHRDLANFRIQHPQVTLLQYVDDLLLAGATKQDCLEGTKALLLELSDLGYRASAKKAQICRREVTYLGYSLRDGQRWLT |
| | | | EARKKTVVQIPAPTTAKQVREFLGKAGFCRLFIPGFATLAAPLYPLTKPKGEFSWAPEHQKAFDAIKKALLSAPALALPDVTKPFTLYVDERKGVARGVLTQTLGP |
| | | | WRRPVAYLSKKLDPVASGWPVCLKAIAAVAILVKDADKLTLGQNITVIAPHALENIVRQPPDRWMTNARMTHYQSLLLTERVTFAPPAALNPATLLPEETDEPVTH |
| | | | DCHQLLIEETGVRKDLTDIPLTGEVLTWFTDGSSYVVEGKRMAGAAVVDGTRTIWASSLPEGTSAQKAELMALTQALRLAEGKSINIYTDSRYAFATAHVHGAIYK |
| | | | QRGWLTSAGREIKNKEEILSLLEALHLPKRLAIIHCPGHQKAKDPISRGNQMADRVAKQAAQGVNLLPSGGSKRTADGSEFEPKKKRKV |
| PERV | 3 | 3689 | MPAAKRVKLDGGDKKYSIGLDIGTNSVGWAVITDEYKVPSKKFKVLGNTDRHSIKKNLIGALLFDSGETAEATRLKRTARRRYTRRKNRICYLQEIFSNEMAKVDD |
| | | | SFFHRLEESFLVEEDKKHERHPIFGNIVDEVAYHEKYPTIYHLRKKLVDSTDKADLRLIYLALAHMIKFRGHFLIEGDLNPDNSDVDKLFIQLVQTYNQLFEENPI |
| | | | NASGVDAKAILSARLSKSRRLENLIAQLPGEKKNGLFGNLIALSLGLTPNFKSNFDLAEDAKLQLSKDTYDDDLDNLLAQIGDQYADLFLAAKNLSDAILLSDILR |
| | | | VNTEITKAPLSASMIKRYDEHHQDLTLLKALVRQQLPEKYKEIFFDQSKNGYAGYIDGGASQEEFYKFIKPILEKMDGTEELLVKLNREDLLRKQRTFDNGSIPHQ |
| | | | IHLGELHAILRRQEDFYPFLKDNREKIEKILTFRIPYYVGPLARGNSRFAWMTRKSEETITPWNFEEVVDKGASAQSFIERMTNFDKNLPNEKVLPKHSLLYEYFT |
| | | | VYNELTKVKYVTEGMRKPAFLSGEQKKAIVDLLFKTNRKVTVKQLKEDYFKKIECFDSVEISGVEDRFNASLGTYHDLLKIIKDKDFLDNEENEDILEDIVLTLTL |
| | | | FEDREMIEERLKTYAHLFDDKVMKQLKRRRYTGWGRLSRKLINGIRDKQSGKTILDFLKSDGFANRNFMQLIHDDSLTFKEDIQKAQVSGQGDSLHEHIANLAGSP |
| | | | AIKKGILQTVKVVDELVKVMGRHKPENIVIEMARENQTTQKGQKNSRERMKRIEEGIKELGSQILKEHPVENTQLQNEKLYLYYLQNGRDMYVDQELDINRLSDYD |
| | | | VDHIVPQSFLKDDSIDNKVLTRSDKARGKSDNVPSEEVVKKMKNYWRQLLNAKLITQRKFDNLTKAERGGLSELDKAGFIKRQLVETRQITKHVAQILDSRMNTKY |
| | | | DENDKLIREVKVITLKSKLVSDFRKDFQFYKVREINNYHHAHDAYLNAVVGTALIKKYPKLESEFVYGDYKVYDVRKMIAKSEQEIGKATAKYFFYSNIMNFFKTE |
| | | | ITLANGEIRKRPLIETNGETGEIVWDKGRDFATVRKVLSMPQVNIVKKTEVQTGGFSKESILPKRNSDKLIARKKDWDPKKYGGFDSPTVAYSVLVVAKVEKGKSK |
| | | | KLKSVKELLGITIMERSSFEKNPIDFLEAKGYKEVKKDLIIKLPKYSLFELENGRKRMLASAGELQKGNELALPSKYVNFLYLASHYEKLKGSPEDNEQKQLFVEQ |
| | | | HKHYLDEIIEQISEFSKRVILADANLDKVLSAYNKHRDKPIREQAENIIHLFTLTNLGAPAAFKYFDTTIDRKRYTSTKEVLDATLIHQSITGLYETRIDLSQLGG |
| | | | DSGGSSGGSSGSETPGTSESATPESSGGSSGGSSMDDEYRLYSPLVKPDQNIQFWLEQFPQAWAETAGMGLAKQVPPQVIQLKASATPVSVRQYPLSKEAQEGIRP |
| | | | HVQRLIQQGILVPVQSPWNTPLLPVRKPGTNDYRPVQDLREVNKRVQDIHPTVPNPYNLLCALPPQRSWYTVLDLKDAFFCLRLHPTSQPLFAFEWRDPGTGRTGQ |
| | | | LTWTRLPQGFKNSPTIFNEALHRDLANFRIQHPQVTLLQYVDDLLLAGATKQDCLEGTKALLLELSDLGYRASAKKAQICRREVTYLGYSLRDGQRWLTEARKKTV |
| | | | VQIPAPTTAKQVREFLGKAGFCRLFIPGFATLAAPLYPLTKPKGEFSWAPEHQKAFDAIKKALLSAPALALPDVTKPFTLYVDERKGVARGVLTQTLGPWRRPVAY |
| | | | LSKKLDPVASGWPVCLKAIAAVAILVKDADKLTLGQNITVIAPHALENIVRQPPDRWMTNARMTHYQSLLLTERVTFAPPAALNPATLLPEETDEPVTHDCHQLLI |
| | | | EETGVRKDLTDIPLTGEVLTWFTDGSSYVVEGKRMAGAAVVDGTRTIWASSLPEGTSAQKAELMALTQALRLAEGKSINIYTDSRYAFATAHVHGAIYKQRGWLTS |
| | | | AGREIKNKEEILSLLEALHLPKRLAIIHCPGHQKAKDPISRGNQMADRVAKQAAQGVNLLPSGGSKRTADGSEFEKRTADGSEFESPKKKAKVE |
| PERV | 4 | 3690 | MPAAKRVKLDGGDKKYSIGLDIGTNSVGWAVITDEYKVPSKKFKVLGNTDRHSIKKNLIGALLFDSGETAEATRLKRTARRRYTRRKNRICYLQEIFSNEMAKVDD |
| | | | SFFHRLEESFLVEEDKKHERHPIFGNIVDEVAYHEKYPTIYHLRKKLVDSTDKADLRLIYLALAHMIKFRGHFLIEGDLNPDNSDVDKLFIQLVQTYNQLFEENPI |
| | | | NASGVDAKAILSARLSKSRRLENLIAQLPGEKKNGLFGNLIALSLGLTPNFKSNFDLAEDAKLQLSKDTYDDDLDNLLAQIGDQYADLFLAAKNLSDAILLSDILR |
| | | | VNTEITKAPLSASMIKRYDEHHQDLTLLKALVRQQLPEKYKEIFFDQSKNGYAGYIDGGASQEEFYKFIKPILEKMDGTEELLVKLNREDLLRKQRTFDNGSIPHQ |
| | | | IHLGELHAILRRQEDFYPFLKDNREKIEKILTFRIPYYVGPLARGNSRFAWMTRKSEETITPWNFEEVVDKGASAQSFIERMTNFDKNLPNEKVLPKHSLLYEYFT |
| | | | VYNELTKVKYVTEGMRKPAFLSGEQKKAIVDLLFKTNRKVTVKQLKEDYFKKIECFDSVEISGVEDRFNASLGTYHDLLKIIKDKDFLDNEENEDILEDIVLTLTL |
| | | | FEDREMIEERLKTYAHLFDDKVMKQLKRRRYTGWGRLSRKLINGIRDKQSGKTILDFLKSDGFANRNFMQLIHDDSLTFKEDIQKAQVSGQGDSLHEHIANLAGSP |
| | | | AIKKGILQTVKVVDELVKVMGRHKPENIVIEMARENQTTQKGQKNSRERMKRIEEGIKELGSQILKEHPVENTQLQNEKLYLYYLQNGRDMYVDQELDINRLSDYD |
| | | | VDHIVPQSFLKDDSIDNKVLTRSDKARGKSDNVPSEEVVKKMKNYWRQLLNAKLITQRKFDNLTKAERGGLSELDKAGFIKRQLVETRQITKHVAQILDSRMNTKY |
| | | | DENDKLIREVKVITLKSKLVSDFRKDFQFYKVREINNYHHAHDAYLNAVVGTALIKKYPKLESEFVYGDYKVYDVRKMIAKSEQEIGKATAKYFFYSNIMNFFKTE |
| | | | ITLANGEIRKRPLIETNGETGEIVWDKGRDFATVRKVLSMPQVNIVKKTEVQTGGFSKESILPKRNSDKLIARKKDWDPKKYGGFDSPTVAYSVLVVAKVEKGKSK |
| | | | KLKSVKELLGITIMERSSFEKNPIDFLEAKGYKEVKKDLIIKLPKYSLFELENGRKRMLASAGELQKGNELALPSKYVNFLYLASHYEKLKGSPEDNEQKQLFVEQ |
| | | | HKHYLDEIIEQISEFSKRVILADANLDKVLSAYNKHRDKPIREQAENIIHLFTLTNLGAPAAFKYFDTTIDRKRYTSTKEVLDATLIHQSITGLYETRIDLSQLGG |
| | | | DGGSGGSSGGSSGSETPGTSESATPESSGGSSGGSSGGMDDEYRLYSPLVKPDQNIQFWLEQFPQAWAETAGMGLAKQVPPQVIQLKASATPVSVRQYPLSKEAQE |
| | | | GIRPHVQRLIQQGILVPVQSPWNTPLLPVRKPGTNDYRPVQDLREVNKRVQDIHPTVPNPYNLLCALPPQRSWYTVLDLKDAFFCLRLHPTSQPLFAFEWRDPGTG |
| | | | RTGQLTWTRLPQGFKNSPTIFNEALHRDLANFRIQHPQVTLLQYVDDLLLAGATKQDCLEGTKALLLELSDLGYRASAKKAQICRREVTYLGYSLRDGQRWLTEAR |
| | | | KKTVVQIPAPTTAKQVREFLGKAGFCRLFIPGFATLAAPLYPLTKPKGEFSWAPEHQKAFDAIKKALLSAPALALPDVTKPFTLYVDERKGVARGVLTQTLGPWRR |
| | | | PVAYLSKKLDPVASGWPVCLKAIAAVAILVKDADKLTLGQNITVIAPHALENIVRQPPDRWMTNARMTHYQSLLLTERVTFAPPAALNPATLLPEETDEPVTHDCH |
| | | | QLLIEETGVRKDLTDIPLTGEVLTWFTDGSSYVVEGKRMAGAAVVDGTRTIWASSLPEGTSAQKAELMALTQALRLAEGKSINIYTDSRYAFATAHVHGAIYKQRG |
| | | | WLTSAGREIKNKEEILSLLEALHLPKRLAIIHCPGHQKAKDPISRGNQMADRVAKQAAQGVNLLPAGKRTADGSEFEKRTADGSEFESPKKKAKVEGSGEGRGSLL |
| | | | TCGDVEENPG |
| PERV | 5 | 3691 | MPAAKRVKLDGGDKKYSIGLDIGTNSVGWAVITDEYKVPSKKFKVLGNTDRHSIKKNLIGALLFDSGETAEATRLKRTARRRYTRRKNRICYLQEIFSNEMAKVDD |
| | | | SFFHRLEESFLVEEDKKHERHPIFGNIVDEVAYHEKYPTIYHLRKKLVDSTDKADLRLIYLALAHMIKFRGHFLIEGDLNPDNSDVDKLFIQLVQTYNQLFEENPI |
| | | | NASGVDAKAILSARLSKSRRLENLIAQLPGEKKNGLFGNLIALSLGLTPNFKSNFDLAEDAKLQLSKDTYDDDLDNLLAQIGDQYADLFLAAKNLSDAILLSDILR |
| | | | VNTEITKAPLSASMIKRYDEHHQDLTLLKALVRQQLPEKYKEIFFDQSKNGYAGYIDGGASQEEFYKFIKPILEKMDGTEELLVKLNREDLLRKQRTFDNGSIPHQ |
| | | | IHLGELHAILRRQEDFYPFLKDNREKIEKILTFRIPYYVGPLARGNSRFAWMTRKSEETITPWNFEEVVDKGASAQSFIERMTNFDKNLPNEKVLPKHSLLYEYFT |
| | | | VYNELTKVKYVTEGMRKPAFLSGEQKKAIVDLLFKTNRKVTVKQLKEDYFKKIECFDSVEISGVEDRFNASLGTYHDLLKIIKDKDFLDNEENEDILEDIVLTLTL |
| | | | FEDREMIEERLKTYAHLFDDKVMKQLKRRRYTGWGRLSRKLINGIRDKQSGKTILDFLKSDGFANRNFMQLIHDDSLTFKEDIQKAQVSGQGDSLHEHIANLAGSP |
| | | | AIKKGILQTVKVVDELVKVMGRHKPENIVIEMARENQTTQKGQKNSRERMKRIEEGIKELGSQILKEHPVENTQLQNEKLYLYYLQNGRDMYVDQELDINRLSDYD |
| | | | VDHIVPQSFLKDDSIDNKVLTRSDKARGKSDNVPSEEVVKKMKNYWRQLLNAKLITQRKFDNLTKAERGGLSELDKAGFIKRQLVETRQITKHVAQILDSRMNTKY |
| | | | DENDKLIREVKVITLKSKLVSDFRKDFQFYKVREINNYHHAHDAYLNAVVGTALIKKYPKLESEFVYGDYKVYDVRKMIAKSEQEIGKATAKYFFYSNIMNFFKTE |
| | | | ITLANGEIRKRPLIETNGETGEIVWDKGRDFATVRKVLSMPQVNIVKKTEVQTGGFSKESILPKRNSDKLIARKKDWDPKKYGGFDSPTVAYSVLVVAKVEKGKSK |
| | | | KLKSVKELLGITIMERSSFEKNPIDFLEAKGYKEVKKDLIIKLPKYSLFELENGRKRMLASAGELQKGNELALPSKYVNFLYLASHYEKLKGSPEDNEQKQLFVEQ |
| | | | HKHYLDEIIEQISEFSKRVILADANLDKVLSAYNKHRDKPIREQAENIIHLFTLTNLGAPAAFKYFDTTIDRKRYTSTKEVLDATLIHQSITGLYETRIDLSQLGG |
| | | | DGGPAPEAAAKGGGGGMDDEYRLYSPLVKPDQNIQFWLEQFPQAWAETAGMGLAKQVPPQVIQLKASATPVSVRQYPLSKEAQEGIRPHVQRLIQQGILVPVQSPW |
| | | | NTPLLPVRKPGTNDYRPVQDLREVNKRVQDIHPTVPNPYNLLCALPPQRSWYTVLDLKDAFFCLRLHPTSQPLFAFEWRDPGTGRTGQLTWTRLPQGFKNSPTIFN |
| | | | EALHRDLANFRIQHPQVTLLQYVDDLLLAGATKQDCLEGTKALLLELSDLGYRASAKKAQICRREVTYLGYSLRDGQRWLTEARKKTVVQIPAPTTAKQVREFLGK |
| | | | AGFCRLFIPGFATLAAPLYPLTKPKGEFSWAPEHQKAFDAIKKALLSAPALALPDVTKPFTLYVDERKGVARGVLTQTLGPWRRPVAYLSKKLDPVASGWPVCLKA |
| | | | IAAVAILVKDADKLTLGQNITVIAPHALENIVRQPPDRWMTNARMTHYQSLLLTERVTFAPPAALNPATLLPEETDEPVTHDCHQLLIEETGVRKDLTDIPLTGEV |
| | | | LTWFTDGSSYVVEGKRMAGAAVVDGTRTIWASSLPEGTSAQKAELMALTQALRLAEGKSINIYTDSRYAFATAHVHGAIYKQRGWLTSAGREIKNKEEILSLLEAL |
| | | | HLPKRLAIIHCPGHQKAKDPISRGNQMADRVAKQAAQGVNLLPAGKRTADGSEFEKRTADGSEFESPKKKAKVEGSGEGRGSLLTCGDVEENPG |
| PERV | 6 | 3692 | MPAAKRVKLDGGDKKYSIGLDIGTNSVGWAVITDEYKVPSKKFKVLGNTDRHSIKKNLIGALLFDSGETAEATRLKRTARRRYTRRKNRICYLQEIFSNEMAKVDD |
| | | | SFFHRLEESFLVEEDKKHERHPIFGNIVDEVAYHEKYPTIYHLRKKLVDSTDKADLRLIYLALAHMIKFRGHFLIEGDLNPDNSDVDKLFIQLVQTYNQLFEENPI |
| | | | NASGVDAKAILSARLSKSRRLENLIAQLPGEKKNGLFGNLIALSLGLTPNFKSNFDLAEDAKLQLSKDTYDDDLDNLLAQIGDQYADLFLAAKNLSDAILLSDILR |
| | | | VNTEITKAPLSASMIKRYDEHHQDLTLLKALVRQQLPEKYKEIFFDQSKNGYAGYIDGGASQEEFYKFIKPILEKMDGTEELLVKLNREDLLRKQRTFDNGSIPHQ |
| | | | IHLGELHAILRRQEDFYPFLKDNREKIEKILTFRIPYYVGPLARGNSRFAWMTRKSEETITPWNFEEVVDKGASAQSFIERMTNFDKNLPNEKVLPKHSLLYEYFT |
| | | | VYNELTKVKYVTEGMRKPAFLSGEQKKAIVDLLFKTNRKVTVKQLKEDYFKKIECFDSVEISGVEDRFNASLGTYHDLLKIIKDKDFLDNEENEDILEDIVLTLTL |
| | | | FEDREMIEERLKTYAHLFDDKVMKQLKRRRYTGWGRLSRKLINGIRDKQSGKTILDFLKSDGFANRNFMQLIHDDSLTFKEDIQKAQVSGQGDSLHEHIANLAGSP |
| | | | AIKKGILQTVKVVDELVKVMGRHKPENIVIEMARENQTTQKGQKNSRERMKRIEEGIKELGSQILKEHPVENTQLQNEKLYLYYLQNGRDMYVDQELDINRLSDYD |
| | | | VDHIVPQSFLKDDSIDNKVLTRSDKARGKSDNVPSEEVVKKMKNYWRQLLNAKLITQRKFDNLTKAERGGLSELDKAGFIKRQLVETRQITKHVAQILDSRMNTKY |
| | | | DENDKLIREVKVITLKSKLVSDFRKDFQFYKVREINNYHHAHDAYLNAVVGTALIKKYPKLESEFVYGDYKVYDVRKMIAKSEQEIGKATAKYFFYSNIMNFFKTE |
| | | | ITLANGEIRKRPLIETNGETGEIVWDKGRDFATVRKVLSMPQVNIVKKTEVQTGGFSKESILPKRNSDKLIARKKDWDPKKYGGFDSPTVAYSVLVVAKVEKGKSK |
| | | | KLKSVKELLGITIMERSSFEKNPIDFLEAKGYKEVKKDLIIKLPKYSLFELENGRKRMLASAGELQKGNELALPSKYVNFLYLASHYEKLKGSPEDNEQKQLFVEQ |
| | | | HKHYLDEIIEQISEFSKRVILADANLDKVLSAYNKHRDKPIREQAENIIHLFTLTNLGAPAAFKYFDTTIDRKRYTSTKEVLDATLIHQSITGLYETRIDLSQLGG |
| | | | DGGGGSGGSGGSGGSGGSGGSGGMDDEYRLYSPLVKPDQNIQFWLEQFPQAWAETAGMGLAKQVPPQVIQLKASATPVSVRQYPLSKEAQEGIRPHVQRLIQQGIL |
| | | | VPVQSPWNTPLLPVRKPGTNDYRPVQDLREVNKRVQDIHPTVPNPYNLLCALPPQRSWYTVLDLKDAFFCLRLHPTSQPLFAFEWRDPGTGRTGQLTWTRLPQGFK |
| | | | NSPTIFNEALHRDLANFRIQHPQVTLLQYVDDLLLAGATKQDCLEGTKALLLELSDLGYRASAKKAQICRREVTYLGYSLRDGQRWLTEARKKTVVQIPAPTTAKQ |
| | | | VREFLGKAGFCRLFIPGFATLAAPLYPLTKPKGEFSWAPEHQKAFDAIKKALLSAPALALPDVTKPFTLYVDERKGVARGVLTQTLGPWRRPVAYLSKKLDPVASG |
| | | | WPVCLKAIAAVAILVKDADKLTLGQNITVIAPHALENIVRQPPDRWMTNARMTHYQSLLLTERVTFAPPAALNPATLLPEETDEPVTHDCHQLLIEETGVRKDLTD |
| | | | IPLTGEVLTWFTDGSSYVVEGKRMAGAAVVDGTRTIWASSLPEGTSAQKAELMALTQALRLAEGKSINIYTDSRYAFATAHVHGAIYKQRGWLTSAGREIKNKEEI |
| | | | LSLLEALHLPKRLAIIHCPGHQKAKDPISRGNQMADRVAKQAAQGVNLLPAGKRTADGSEFEKRTADGSEFESPKKKAKVEGSGEGRGSLLTCGDVEENPG |
| PERV | 7 | 3693 | MPAAKRVKLDGGDKKYSIGLDIGTNSVGWAVITDEYKVPSKKFKVLGNTDRHSIKKNLIGALLFDSGETAEATRLKRTARRRYTRRKNRICYLQEIFSNEMAKVDD |
| | | | SFFHRLEESFLVEEDKKHERHPIFGNIVDEVAYHEKYPTIYHLRKKLVDSTDKADLRLIYLALAHMIKFRGHFLIEGDLNPDNSDVDKLFIQLVQTYNQLFEENPI |
| | | | NASGVDAKAILSARLSKSRRLENLIAQLPGEKKNGLFGNLIALSLGLTPNFKSNFDLAEDAKLQLSKDTYDDDLDNLLAQIGDQYADLFLAAKNLSDAILLSDILR |
| | | | VNTEITKAPLSASMIKRYDEHHQDLTLLKALVRQQLPEKYKEIFFDQSKNGYAGYIDGGASQEEFYKFIKPILEKMDGTEELLVKLNREDLLRKQRTFDNGSIPHQ |
| | | | IHLGELHAILRRQEDFYPFLKDNREKIEKILTFRIPYYVGPLARGNSRFAWMTRKSEETITPWNFEEVVDKGASAQSFIERMTNFDKNLPNEKVLPKHSLLYEYFT |
| | | | VYNELTKVKYVTEGMRKPAFLSGEQKKAIVDLLFKTNRKVTVKQLKEDYFKKIECFDSVEISGVEDRFNASLGTYHDLLKIIKDKDFLDNEENEDILEDIVLTLTL |
| | | | FEDREMIEERLKTYAHLFDDKVMKQLKRRRYTGWGRLSRKLINGIRDKQSGKTILDFLKSDGFANRNFMQLIHDDSLTFKEDIQKAQVSGQGDSLHEHIANLAGSP |
| | | | AIKKGILQTVKVVDELVKVMGRHKPENIVIEMARENQTTQKGQKNSRERMKRIEEGIKELGSQILKEHPVENTQLQNEKLYLYYLQNGRDMYVDQELDINRLSDYD |
| | | | VDHIVPQSFLKDDSIDNKVLTRSDKARGKSDNVPSEEVVKKMKNYWRQLLNAKLITQRKFDNLTKAERGGLSELDKAGFIKRQLVETRQITKHVAQILDSRMNTKY |
| | | | DENDKLIREVKVITLKSKLVSDFRKDFQFYKVREINNYHHAHDAYLNAVVGTALIKKYPKLESEFVYGDYKVYDVRKMIAKSEQEIGKATAKYFFYSNIMNFFKTE |
| | | | ITLANGEIRKRPLIETNGETGEIVWDKGRDFATVRKVLSMPQVNIVKKTEVQTGGFSKESILPKRNSDKLIARKKDWDPKKYGGFDSPTVAYSVLVVAKVEKGKSK |
| | | | KLKSVKELLGITIMERSSFEKNPIDFLEAKGYKEVKKDLIIKLPKYSLFELENGRKRMLASAGELQKGNELALPSKYVNFLYLASHYEKLKGSPEDNEQKQLFVEQ |
| | | | HKHYLDEIIEQISEFSKRVILADANLDKVLSAYNKHRDKPIREQAENIIHLFTLTNLGAPAAFKYFDTTIDRKRYTSTKEVLDATLIHQSITGLYETRIDLSQLGG |
| | | | DGGGGGGGSPAPGGMDDEYRLYSPLVKPDQNIQFWLEQFPQAWAETAGMGLAKQVPPQVIQLKASATPVSVRQYPLSKEAQEGIRPHVQRLIQQGILVPVQSPWNT |
| | | | PLLPVRKPGTNDYRPVQDLREVNKRVQDIHPTVPNPYNLLCALPPQRSWYTVLDLKDAFFCLRLHPTSQPLFAFEWRDPGTGRTGQLTWTRLPQGFKNSPTIFNEA |
| | | | LHRDLANFRIQHPQVTLLQYVDDLLLAGATKQDCLEGTKALLLELSDLGYRASAKKAQICRREVTYLGYSLRDGQRWLTEARKKTVVQIPAPTTAKQVREFLGKAG |
| | | | FCRLFIPGFATLAAPLYPLTKPKGEFSWAPEHQKAFDAIKKALLSAPALALPDVTKPFTLYVDERKGVARGVLTQTLGPWRRPVAYLSKKLDPVASGWPVCLKAIA |
| | | | AVAILVKDADKLTLGQNITVIAPHALENIVRQPPDRWMTNARMTHYQSLLLTERVTFAPPAALNPATLLPEETDEPVTHDCHQLLIEETGVRKDLTDIPLTGEVLT |
| | | | WFTDGSSYVVEGKRMAGAAVVDGTRTIWASSLPEGTSAQKAELMALTQALRLAEGKSINIYTDSRYAFATAHVHGAIYKQRGWLTSAGREIKNKEEILSLLEALHL |
| | | | PKRLAIIHCPGHQKAKDPISRGNQMADRVAKQAAQGVNLLPAGKRTADGSEFEKRTADGSEFESPKKKAKVEGSGEGRGSLLTCGDVEENPG |
| PERV | 8 | 3694 | MPAAKRVKLDGGDKKYSIGLDIGTNSVGWAVITDEYKVPSKKFKVLGNTDRHSIKKNLIGALLFDSGETAEATRLKRTARRRYTRRKNRICYLQEIFSNEMAKVDD |
| | | | SFFHRLEESFLVEEDKKHERHPIFGNIVDEVAYHEKYPTIYHLRKKLVDSTDKADLRLIYLALAHMIKFRGHFLIEGDLNPDNSDVDKLFIQLVQTYNQLFEENPI |
| | | | NASGVDAKAILSARLSKSRRLENLIAQLPGEKKNGLFGNLIALSLGLTPNFKSNFDLAEDAKLQLSKDTYDDDLDNLLAQIGDQYADLFLAAKNLSDAILLSDILR |
| | | | VNTEITKAPLSASMIKRYDEHHQDLTLLKALVRQQLPEKYKEIFFDQSKNGYAGYIDGGASQEEFYKFIKPILEKMDGTEELLVKLNREDLLRKQRTFDNGSIPHQ |
| | | | IHLGELHAILRRQEDFYPFLKDNREKIEKILTFRIPYYVGPLARGNSRFAWMTRKSEETITPWNFEEVVDKGASAQSFIERMTNFDKNLPNEKVLPKHSLLYEYFT |
| | | | VYNELTKVKYVTEGMRKPAFLSGEQKKAIVDLLFKTNRKVTVKQLKEDYFKKIECFDSVEISGVEDRFNASLGTYHDLLKIIKDKDFLDNEENEDILEDIVLTLTL |
| | | | FEDREMIEERLKTYAHLFDDKVMKQLKRRRYTGWGRLSRKLINGIRDKQSGKTILDFLKSDGFANRNFMQLIHDDSLTFKEDIQKAQVSGQGDSLHEHIANLAGSP |
| | | | AIKKGILQTVKVVDELVKVMGRHKPENIVIEMARENQTTQKGQKNSRERMKRIEEGIKELGSQILKEHPVENTQLQNEKLYLYYLQNGRDMYVDQELDINRLSDYD |
| | | | VDHIVPQSFLKDDSIDNKVLTRSDKARGKSDNVPSEEVVKKMKNYWRQLLNAKLITQRKFDNLTKAERGGLSELDKAGFIKRQLVETRQITKHVAQILDSRMNTKY |
| | | | DENDKLIREVKVITLKSKLVSDFRKDFQFYKVREINNYHHAHDAYLNAVVGTALIKKYPKLESEFVYGDYKVYDVRKMIAKSEQEIGKATAKYFFYSNIMNFFKTE |
| | | | ITLANGEIRKRPLIETNGETGEIVWDKGRDFATVRKVLSMPQVNIVKKTEVQTGGFSKESILPKRNSDKLIARKKDWDPKKYGGFDSPTVAYSVLVVAKVEKGKSK |
| | | | KLKSVKELLGITIMERSSFEKNPIDFLEAKGYKEVKKDLIIKLPKYSLFELENGRKRMLASAGELQKGNELALPSKYVNFLYLASHYEKLKGSPEDNEQKQLFVEQ |
| | | | HKHYLDEIIEQISEFSKRVILADANLDKVLSAYNKHRDKPIREQAENIIHLFTLTNLGAPAAFKYFDTTIDRKRYTSTKEVLDATLIHQSITGLYETRIDLSQLGG |
| | | | DGGGSSEAAAKGGSGGMDDEYRLYSPLVKPDQNIQFWLEQFPQAWAETAGMGLAKQVPPQVIQLKASATPVSVRQYPLSKEAQEGIRPHVQRLIQQGILVPVQSPW |
| | | | NTPLLPVRKPGTNDYRPVQDLREVNKRVQDIHPTVPNPYNLLCALPPQRSWYTVLDLKDAFFCLRLHPTSQPLFAFEWRDPGTGRTGQLTWTRLPQGFKNSPTIFN |
| | | | EALHRDLANFRIQHPQVTLLQYVDDLLLAGATKQDCLEGTKALLLELSDLGYRASAKKAQICRREVTYLGYSLRDGQRWLTEARKKTVVQIPAPTTAKQVREFLGK |
| | | | AGFCRLFIPGFATLAAPLYPLTKPKGEFSWAPEHQKAFDAIKKALLSAPALALPDVTKPFTLYVDERKGVARGVLTQTLGPWRRPVAYLSKKLDPVASGWPVCLKA |
| | | | IAAVAILVKDADKLTLGQNITVIAPHALENIVRQPPDRWMTNARMTHYQSLLLTERVTFAPPAALNPATLLPEETDEPVTHDCHQLLIEETGVRKDLTDIPLTGEV |
| | | | LTWFTDGSSYVVEGKRMAGAAVVDGTRTIWASSLPEGTSAQKAELMALTQALRLAEGKSINIYTDSRYAFATAHVHGAIYKQRGWLTSAGREIKNKEEILSLLEAL |
| | | | HLPKRLAIIHCPGHQKAKDPISRGNQMADRVAKQAAQGVNLLPAGKRTADGSEFEKRTADGSEFESPKKKAKVEGSGEGRGSLLTCGDVEENPG |
| PERV | 9 | 3695 | MPAAKRVKLDGGDKKYSIGLDIGTNSVGWAVITDEYKVPSKKFKVLGNTDRHSIKKNLIGALLFDSGETAEATRLKRTARRRYTRRKNRICYLQEIFSNEMAKVDD |
| | | | SFFHRLEESFLVEEDKKHERHPIFGNIVDEVAYHEKYPTIYHLRKKLVDSTDKADLRLIYLALAHMIKFRGHFLIEGDLNPDNSDVDKLFIQLVQTYNQLFEENPI |
| | | | NASGVDAKAILSARLSKSRRLENLIAQLPGEKKNGLFGNLIALSLGLTPNFKSNFDLAEDAKLQLSKDTYDDDLDNLLAQIGDQYADLFLAAKNLSDAILLSDILR |
| | | | VNTEITKAPLSASMIKRYDEHHQDLTLLKALVRQQLPEKYKEIFFDQSKNGYAGYIDGGASQEEFYKFIKPILEKMDGTEELLVKLNREDLLRKQRTFDNGSIPHQ |
| | | | IHLGELHAILRRQEDFYPFLKDNREKIEKILTFRIPYYVGPLARGNSRFAWMTRKSEETITPWNFEEVVDKGASAQSFIERMTNFDKNLPNEKVLPKHSLLYEYFT |
| | | | VYNELTKVKYVTEGMRKPAFLSGEQKKAIVDLLFKTNRKVTVKQLKEDYFKKIECFDSVEISGVEDRFNASLGTYHDLLKIIKDKDFLDNEENEDILEDIVLTLTL |
| | | | FEDREMIEERLKTYAHLFDDKVMKQLKRRRYTGWGRLSRKLINGIRDKQSGKTILDFLKSDGFANRNFMQLIHDDSLTFKEDIQKAQVSGQGDSLHEHIANLAGSP |
| | | | AIKKGILQTVKVVDELVKVMGRHKPENIVIEMARENQTTQKGQKNSRERMKRIEEGIKELGSQILKEHPVENTQLQNEKLYLYYLQNGRDMYVDQELDINRLSDYD |
| | | | VDHIVPQSFLKDDSIDNKVLTRSDKARGKSDNVPSEEVVKKMKNYWRQLLNAKLITQRKFDNLTKAERGGLSELDKAGFIKRQLVETRQITKHVAQILDSRMNTKY |
| | | | DENDKLIREVKVITLKSKLVSDFRKDFQFYKVREINNYHHAHDAYLNAVVGTALIKKYPKLESEFVYGDYKVYDVRKMIAKSEQEIGKATAKYFFYSNIMNFFKTE |
| | | | ITLANGEIRKRPLIETNGETGEIVWDKGRDFATVRKVLSMPQVNIVKKTEVQTGGFSKESILPKRNSDKLIARKKDWDPKKYGGFDSPTVAYSVLVVAKVEKGKSK |
| | | | KLKSVKELLGITIMERSSFEKNPIDFLEAKGYKEVKKDLIIKLPKYSLFELENGRKRMLASAGELQKGNELALPSKYVNFLYLASHYEKLKGSPEDNEQKQLFVEQ |
| | | | HKHYLDEIIEQISEFSKRVILADANLDKVLSAYNKHRDKPIREQAENIIHLFTLTNLGAPAAFKYFDTTIDRKRYTSTKEVLDATLIHQSITGLYETRIDLSQLGG |
| | | | DGGGGSGSSPAPGGMDDEYRLYSPLVKPDQNIQFWLEQFPQAWAETAGMGLAKQVPPQVIQLKASATPVSVRQYPLSKEAQEGIRPHVQRLIQQGILVPVQSPWNT |
| | | | PLLPVRKPGTNDYRPVQDLREVNKRVQDIHPTVPNPYNLLCALPPQRSWYTVLDLKDAFFCLRLHPTSQPLFAFEWRDPGTGRTGQLTWTRLPQGFKNSPTIFNEA |
| | | | LHRDLANFRIQHPQVTLLQYVDDLLLAGATKQDCLEGTKALLLELSDLGYRASAKKAQICRREVTYLGYSLRDGQRWLTEARKKTVVQIPAPTTAKQVREFLGKAG |
| | | | FCRLFIPGFATLAAPLYPLTKPKGEFSWAPEHQKAFDAIKKALLSAPALALPDVTKPFTLYVDERKGVARGVLTQTLGPWRRPVAYLSKKLDPVASGWPVCLKAIA |
| | | | AVAILVKDADKLTLGQNITVIAPHALENIVRQPPDRWMTNARMTHYQSLLLTERVTFAPPAALNPATLLPEETDEPVTHDCHQLLIEETGVRKDLTDIPLTGEVLT |
| | | | WFTDGSSYVVEGKRMAGAAVVDGTRTIWASSLPEGTSAQKAELMALTQALRLAEGKSINIYTDSRYAFATAHVHGAIYKQRGWLTSAGREIKNKEEILSLLEALHL |
| | | | PKRLAIIHCPGHQKAKDPISRGNQMADRVAKQAAQGVNLLPAGKRTADGSEFEKRTADGSEFESPKKKAKVEGSGEGRGSLLTCGDVEENPG |
| PERV | 10 | 3696 | MPAAKRVKLDGGDKKYSIGLDIGTNSVGWAVITDEYKVPSKKFKVLGNTDRHSIKKNLIGALLFDSGETAEATRLKRTARRRYTRRKNRICYLQEIFSNEMAKVDD |
| | | | SFFHRLEESFLVEEDKKHERHPIFGNIVDEVAYHEKYPTIYHLRKKLVDSTDKADLRLIYLALAHMIKFRGHFLIEGDLNPDNSDVDKLFIQLVQTYNQLFEENPI |
| | | | NASGVDAKAILSARLSKSRRLENLIAQLPGEKKNGLFGNLIALSLGLTPNFKSNFDLAEDAKLQLSKDTYDDDLDNLLAQIGDQYADLFLAAKNLSDAILLSDILR |
| | | | VNTEITKAPLSASMIKRYDEHHQDLTLLKALVRQQLPEKYKEIFFDQSKNGYAGYIDGGASQEEFYKFIKPILEKMDGTEELLVKLNREDLLRKQRTFDNGSIPHQ |
| | | | IHLGELHAILRRQEDFYPFLKDNREKIEKILTFRIPYYVGPLARGNSRFAWMTRKSEETITPWNFEEVVDKGASAQSFIERMTNFDKNLPNEKVLPKHSLLYEYFT |
| | | | VYNELTKVKYVTEGMRKPAFLSGEQKKAIVDLLFKTNRKVTVKQLKEDYFKKIECFDSVEISGVEDRFNASLGTYHDLLKIIKDKDFLDNEENEDILEDIVLTLTL |
| | | | FEDREMIEERLKTYAHLFDDKVMKQLKRRRYTGWGRLSRKLINGIRDKQSGKTILDFLKSDGFANRNFMQLIHDDSLTFKEDIQKAQVSGQGDSLHEHIANLAGSP |
| | | | AIKKGILQTVKVVDELVKVMGRHKPENIVIEMARENQTTQKGQKNSRERMKRIEEGIKELGSQILKEHPVENTQLQNEKLYLYYLQNGRDMYVDQELDINRLSDYD |
| | | | VDHIVPQSFLKDDSIDNKVLTRSDKARGKSDNVPSEEVVKKMKNYWRQLLNAKLITQRKFDNLTKAERGGLSELDKAGFIKRQLVETRQITKHVAQILDSRMNTKY |
| | | | DENDKLIREVKVITLKSKLVSDFRKDFQFYKVREINNYHHAHDAYLNAVVGTALIKKYPKLESEFVYGDYKVYDVRKMIAKSEQEIGKATAKYFFYSNIMNFFKTE |
| | | | ITLANGEIRKRPLIETNGETGEIVWDKGRDFATVRKVLSMPQVNIVKKTEVQTGGFSKESILPKRNSDKLIARKKDWDPKKYGGFDSPTVAYSVLVVAKVEKGKSK |
| | | | KLKSVKELLGITIMERSSFEKNPIDFLEAKGYKEVKKDLIIKLPKYSLFELENGRKRMLASAGELQKGNELALPSKYVNFLYLASHYEKLKGSPEDNEQKQLFVEQ |
| | | | HKHYLDEIIEQISEFSKRVILADANLDKVLSAYNKHRDKPIREQAENIIHLFTLTNLGAPAAFKYFDTTIDRKRYTSTKEVLDATLIHQSITGLYETRIDLSQLGG |
| | | | DGGGSSGGGEAAAKGGMDDEYRLYSPLVKPDQNIQFWLEQFPQAWAETAGMGLAKQVPPQVIQLKASATPVSVRQYPLSKEAQEGIRPHVQRLIQQGILVPVQSPW |
| | | | NTPLLPVRKPGTNDYRPVQDLREVNKRVQDIHPTVPNPYNLLCALPPQRSWYTVLDLKDAFFCLRLHPTSQPLFAFEWRDPGTGRTGQLTWTRLPQGFKNSPTIFN |
| | | | EALHRDLANFRIQHPQVTLLQYVDDLLLAGATKQDCLEGTKALLLELSDLGYRASAKKAQICRREVTYLGYSLRDGQRWLTEARKKTVVQIPAPTTAKQVREFLGK |
| | | | AGFCRLFIPGFATLAAPLYPLTKPKGEFSWAPEHQKAFDAIKKALLSAPALALPDVTKPFTLYVDERKGVARGVLTQTLGPWRRPVAYLSKKLDPVASGWPVCLKA |
| | | | IAAVAILVKDADKLTLGQNITVIAPHALENIVRQPPDRWMTNARMTHYQSLLLTERVTFAPPAALNPATLLPEETDEPVTHDCHQLLIEETGVRKDLTDIPLTGEV |
| | | | LTWFTDGSSYVVEGKRMAGAAVVDGTRTIWASSLPEGTSAQKAELMALTQALRLAEGKSINIYTDSRYAFATAHVHGAIYKQRGWLTSAGREIKNKEEILSLLEAL |
| | | | HLPKRLAIIHCPGHQKAKDPISRGNQMADRVAKQAAQGVNLLPAGKRTADGSEFEKRTADGSEFESPKKKAKVEGSGEGRGSLLTCGDVEENPG |
| PERV | 11 | 3697 | MPAAKRVKLDGGDKKYSIGLDIGTNSVGWAVITDEYKVPSKKFKVLGNTDRHSIKKNLIGALLFDSGETAEATRLKRTARRRYTRRKNRICYLQEIFSNEMAKVDD |
| | | | SFFHRLEESFLVEEDKKHERHPIFGNIVDEVAYHEKYPTIYHLRKKLVDSTDKADLRLIYLALAHMIKFRGHFLIEGDLNPDNSDVDKLFIQLVQTYNQLFEENPI |
| | | | NASGVDAKAILSARLSKSRRLENLIAQLPGEKKNGLFGNLIALSLGLTPNFKSNFDLAEDAKLQLSKDTYDDDLDNLLAQIGDQYADLFLAAKNLSDAILLSDILR |
| | | | VNTEITKAPLSASMIKRYDEHHQDLTLLKALVRQQLPEKYKEIFFDQSKNGYAGYIDGGASQEEFYKFIKPILEKMDGTEELLVKLNREDLLRKQRTFDNGSIPHQ |
| | | | IHLGELHAILRRQEDFYPFLKDNREKIEKILTFRIPYYVGPLARGNSRFAWMTRKSEETITPWNFEEVVDKGASAQSFIERMTNFDKNLPNEKVLPKHSLLYEYFT |
| | | | VYNELTKVKYVTEGMRKPAFLSGEQKKAIVDLLFKTNRKVTVKQLKEDYFKKIECFDSVEISGVEDRFNASLGTYHDLLKIIKDKDFLDNEENEDILEDIVLTLTL |
| | | | FEDREMIEERLKTYAHLFDDKVMKQLKRRRYTGWGRLSRKLINGIRDKQSGKTILDFLKSDGFANRNFMQLIHDDSLTFKEDIQKAQVSGQGDSLHEHIANLAGSP |
| | | | AIKKGILQTVKVVDELVKVMGRHKPENIVIEMARENQTTQKGQKNSRERMKRIEEGIKELGSQILKEHPVENTQLQNEKLYLYYLQNGRDMYVDQELDINRLSDYD |
| | | | VDHIVPQSFLKDDSIDNKVLTRSDKARGKSDNVPSEEVVKKMKNYWRQLLNAKLITQRKFDNLTKAERGGLSELDKAGFIKRQLVETRQITKHVAQILDSRMNTKY |
| | | | DENDKLIREVKVITLKSKLVSDFRKDFQFYKVREINNYHHAHDAYLNAVVGTALIKKYPKLESEFVYGDYKVYDVRKMIAKSEQEIGKATAKYFFYSNIMNFFKTE |
| | | | ITLANGEIRKRPLIETNGETGEIVWDKGRDFATVRKVLSMPQVNIVKKTEVQTGGFSKESILPKRNSDKLIARKKDWDPKKYGGFDSPTVAYSVLVVAKVEKGKSK |
| | | | KLKSVKELLGITIMERSSFEKNPIDFLEAKGYKEVKKDLIIKLPKYSLFELENGRKRMLASAGELQKGNELALPSKYVNFLYLASHYEKLKGSPEDNEQKQLFVEQ |
| | | | HKHYLDEIIEQISEFSKRVILADANLDKVLSAYNKHRDKPIREQAENIIHLFTLTNLGAPAAFKYFDTTIDRKRYTSTKEVLDATLIHQSITGLYETRIDLSQLGG |
| | | | DGGAEAAAKEAAAKEAAAKEAAAKALEAEAAAKEAAAKEAAAKEAAAKAGGMDDEYRLYSPLVKPDQNIQFWLEQFPQAWAETAGMGLAKQVPPQVIQLKASATPV |
| | | | SVRQYPLSKEAQEGIRPHVQRLIQQGILVPVQSPWNTPLLPVRKPGTNDYRPVQDLREVNKRVQDIHPTVPNPYNLLCALPPQRSWYTVLDLKDAFFCLRLHPTSQ |
| | | | PLFAFEWRDPGTGRTGQLTWTRLPQGFKNSPTIFNEALHRDLANFRIQHPQVTLLQYVDDLLLAGATKQDCLEGTKALLLELSDLGYRASAKKAQICRREVTYLGY |
| | | | SLRDGQRWLTEARKKTVVQIPAPTTAKQVREFLGKAGFCRLFIPGFATLAAPLYPLTKPKGEFSWAPEHQKAFDAIKKALLSAPALALPDVTKPFTLYVDERKGVA |
| | | | RGVLTQTLGPWRRPVAYLSKKLDPVASGWPVCLKAIAAVAILVKDADKLTLGQNITVIAPHALENIVRQPPDRWMTNARMTHYQSLLLTERVTFAPPAALNPATLL |
| | | | PEETDEPVTHDCHQLLIEETGVRKDLTDIPLTGEVLTWFTDGSSYVVEGKRMAGAAVVDGTRTIWASSLPEGTSAQKAELMALTQALRLAEGKSINIYTDSRYAFA |
| | | | TAHVHGAIYKQRGWLTSAGREIKNKEEILSLLEALHLPKRLAIIHCPGHQKAKDPISRGNQMADRVAKQAAQGVNLLPAGKRTADGSEFEKRTADGSEFESPKKKA |
| | | | KVEGSGEGRGSLLTCGDVEENPG |
| MMTVB | 1 | 3698 | MAPKKKRKVGIHGVPAADKKYSIGLDIGTNSVGWAVITDEYKVPSKKFKVLGNTDRHSIKKNLIGALLFDSGETAEATRLKRTARRRYTRRKNRICYLQEIFSNEM |
| | | | AKVDDSFFHRLEESFLVEEDKKHERHPIFGNIVDEVAYHEKYPTIYHLRKKLVDSTDKADLRLIYLALAHMIKFRGHFLIEGDLNPDNSDVDKLFIQLVQTYNQLF |
| | | | EENPINASGVDAKAILSARLSKSRRLENLIAQLPGEKKNGLFGNLIALSLGLTPNFKSNFDLAEDAKLQLSKDTYDDDLDNLLAQIGDQYADLFLAAKNLSDAILL |
| | | | SDILRVNTEITKAPLSASMIKRYDEHHQDLTLLKALVRQQLPEKYKEIFFDQSKNGYAGYIDGGASQEEFYKFIKPILEKMDGTEELLVKLNREDLLRKQRTFDNG |
| | | | SIPHQIHLGELHAILRRQEDFYPFLKDNREKIEKILTFRIPYYVGPLARGNSRFAWMTRKSEETITPWNFEEVVDKGASAQSFIERMTNFDKNLPNEKVLPKHSLL |
| | | | YEYFTVYNELTKVKYVTEGMRKPAFLSGEQKKAIVDLLFKTNRKVTVKQLKEDYFKKIECFDSVEISGVEDRFNASLGTYHDLLKIIKDKDFLDNEENEDILEDIV |
| | | | LTLTLFEDREMIEERLKTYAHLFDDKVMKQLKRRRYTGWGRLSRKLINGIRDKQSGKTILDFLKSDGFANRNFMQLIHDDSLTFKEDIQKAQVSGQGDSLHEHIAN |
| | | | LAGSPAIKKGILQTVKVVDELVKVMGRHKPENIVIEMARENQTTQKGQKNSRERMKRIEEGIKELGSQILKEHPVENTQLQNEKLYLYYLQNGRDMYVDQELDINR |
| | | | LSDYDVDHIVPQSFLKDDSIDNKVLTRSDKARGKSDNVPSEEVVKKMKNYWRQLLNAKLITQRKFDNLTKAERGGLSELDKAGFIKRQLVETRQITKHVAQILDSR |
| | | | MNTKYDENDKLIREVKVITLKSKLVSDFRKDFQFYKVREINNYHHAHDAYLNAVVGTALIKKYPKLESEFVYGDYKVYDVRKMIAKSEQEIGKATAKYFFYSNIMN |
| | | | FFKTEITLANGEIRKRPLIETNGETGEIVWDKGRDFATVRKVLSMPQVNIVKKTEVQTGGFSKESILPKRNSDKLIARKKDWDPKKYGGFDSPTVAYSVLVVAKVE |
| | | | KGKSKKLKSVKELLGITIMERSSFEKNPIDFLEAKGYKEVKKDLIIKLPKYSLFELENGRKRMLASAGELQKGNELALPSKYVNFLYLASHYEKLKGSPEDNEQKQ |
| | | | LFVEQHKHYLDEIIEQISEFSKRVILADANLDKVLSAYNKHRDKPIREQAENIIHLFTLTNLGAPAAFKYFDTTIDRKRYTSTKEVLDATLIHQSITGLYETRIDL |
| | | | SQLGGDSGGSSGGSSGSETPGTSESATPESSGGSSGGSSVQEISDSRPMLHIYLNGRRFLGLLDTGADKTCIAGRDWPANWPIHQTESSLQGLGMACGVARSSQPL |
| | | | RWQHEDKSGIIHPFVIPTLPFTLWGRDIMKDIKVRLMTDSPDDSQDLMIGAIESNLFADQISWKSDQPVWLNQWPLKQEKLQALQQLVTEQLQLGHLEESNSPWNT |
| | | | PVFVIKKKSGKWRLLQDLRAVNATMHDMGALQPGLPSPVAVPKGWEIIIIDLQDCFFNIKLHPEDCKRFAFSVPSPNFKRPYQRFQWKVLPQGMKNSPTLCQKFVD |
| | | | KAILTVRDKYQDSYIVHYMDDILLAHPSRSIVDEILTSMIQALNKHGLVVSTEKIQKYDNLKYLGTHIQGDSVSYQKLQIRTDKLRTLNDFQKLLGNINWIRPFLK |
| | | | LTTGELKPLFEILNGDSNPISTRKLTPEACKALQLMNERLSTARVKRLDLSQPWSLCILKTEYTPTACLWQDGVVEWIHLPHISPKVITPYDIFCTQLIIKGRHRS |
| | | | KELFSKDPDYIVVPYTKVQFDLLLQEKEDWPISLLGFLGEVHFHLPKDPLLTFTLQTAIIFPHMTSTTPLEKGIVIFTDGSANGRSVTYIQGREPIIKENTQNTAQ |
| | | | QAEIVAVITAFEEVSQPFNLYTDSKYVTGLFPEIETATLSPRTKIYTELKHLQRLIHKRQEKFYIGHIRGHTGLPGPLAQGNAYADSLTRILTA |
| MMTVB | 2 | 3699 | MKRTADGSEFESPKKKRKVDKKYSIGLDIGTNSVGWAVITDEYKVPSKKFKVLGNTDRHSIKKNLIGALLFDSGETAEATRLKRTARRRYTRRKNRICYLQEIFSN |
| | | | EMAKVDDSFFHRLEESFLVEEDKKHERHPIFGNIVDEVAYHEKYPTIYHLRKKLVDSTDKADLRLIYLALAHMIKFRGHFLIEGDLNPDNSDVDKLFIQLVQTYNQ |
| | | | LFEENPINASGVDAKAILSARLSKSRRLENLIAQLPGEKKNGLFGNLIALSLGLTPNFKSNFDLAEDAKLQLSKDTYDDDLDNLLAQIGDQYADLFLAAKNLSDAI |
| | | | LLSDILRVNTEITKAPLSASMIKRYDEHHQDLTLLKALVRQQLPEKYKEIFFDQSKNGYAGYIDGGASQEEFYKFIKPILEKMDGTEELLVKLNREDLLRKQRTFD |
| | | | NGSIPHQIHLGELHAILRRQEDFYPFLKDNREKIEKILTFRIPYYVGPLARGNSRFAWMTRKSEETITPWNFEEVVDKGASAQSFIERMTNFDKNLPNEKVLPKHS |
| | | | LLYEYFTVYNELTKVKYVTEGMRKPAFLSGEQKKAIVDLLFKTNRKVTVKQLKEDYFKKIECFDSVEISGVEDRFNASLGTYHDLLKIIKDKDFLDNEENEDILED |
| | | | IVLTLTLFEDREMIEERLKTYAHLFDDKVMKQLKRRRYTGWGRLSRKLINGIRDKQSGKTILDFLKSDGFANRNFMQLIHDDSLTFKEDIQKAQVSGQGDSLHEHI |
| | | | ANLAGSPAIKKGILQTVKVVDELVKVMGRHKPENIVIEMARENQTTQKGQKNSRERMKRIEEGIKELGSQILKEHPVENTQLQNEKLYLYYLQNGRDMYVDQELDI |
| | | | NRLSDYDVDHIVPQSFLKDDSIDNKVLTRSDKARGKSDNVPSEEVVKKMKNYWRQLLNAKLITQRKFDNLTKAERGGLSELDKAGFIKRQLVETRQITKHVAQILD |
| | | | SRMNTKYDENDKLIREVKVITLKSKLVSDFRKDFQFYKVREINNYHHAHDAYLNAVVGTALIKKYPKLESEFVYGDYKVYDVRKMIAKSEQEIGKATAKYFFYSNI |
| | | | MNFFKTEITLANGEIRKRPLIETNGETGEIVWDKGRDFATVRKVLSMPQVNIVKKTEVQTGGFSKESILPKRNSDKLIARKKDWDPKKYGGFDSPTVAYSVLVVAK |
| | | | VEKGKSKKLKSVKELLGITIMERSSFEKNPIDFLEAKGYKEVKKDLIIKLPKYSLFELENGRKRMLASAGELQKGNELALPSKYVNFLYLASHYEKLKGSPEDNEQ |
| | | | KQLFVEQHKHYLDEIIEQISEFSKRVILADANLDKVLSAYNKHRDKPIREQAENIIHLFTLTNLGAPAAFKYFDTTIDRKRYTSTKEVLDATLIHQSITGLYETRI |
| | | | DLSQLGGDSGGSSGGSSGSETPGTSESATPESSGGSSGGSSVQEISDSRPMLHIYLNGRRFLGLLDTGADKTCIAGRDWPANWPIHQTESSLQGLGMACGVARSSQ |
| | | | PLRWQHEDKSGIIHPFVIPTLPFTLWGRDIMKDIKVRLMTDSPDDSQDLMIGAIESNLFADQISWKSDQPVWLNQWPLKQEKLQALQQLVTEQLQLGHLEESNSPW |
| | | | NTPVFVIKKKSGKWRLLQDLRAVNATMHDMGALQPGLPSPVAVPKGWEIIIIDLQDCFFNIKLHPEDCKRFAFSVPSPNFKRPYQRFQWKVLPQGMKNSPTLCQKF |
| | | | VDKAILTVRDKYQDSYIVHYMDDILLAHPSRSIVDEILTSMIQALNKHGLVVSTEKIQKYDNLKYLGTHIQGDSVSYQKLQIRTDKLRTLNDFQKLLGNINWIRPF |
| | | | LKLTTGELKPLFEILNGDSNPISTRKLTPEACKALQLMNERLSTARVKRLDLSQPWSLCILKTEYTPTACLWQDGVVEWIHLPHISPKVITPYDIFCTQLIIKGRH |
| | | | RSKELFSKDPDYIVVPYTKVQFDLLLQEKEDWPISLLGFLGEVHFHLPKDPLLTFTLQTAIIFPHMTSTTPLEKGIVIFTDGSANGRSVTYIQGREPIIKENTQNT |
| | | | AQQAEIVAVITAFEEVSQPFNLYTDSKYVTGLFPEIETATLSPRTKIYTELKHLQRLIHKRQEKFYIGHIRGHTGLPGPLAQGNAYADSLTRILTASGGSKRTADG |
| | | | SEFEPKKKRKV |
| MMTVB | 3 | 3700 | MPAAKRVKLDGGDKKYSIGLDIGTNSVGWAVITDEYKVPSKKFKVLGNTDRHSIKKNLIGALLFDSGETAEATRLKRTARRRYTRRKNRICYLQEIFSNEMAKVDD |
| | | | SFFHRLEESFLVEEDKKHERHPIFGNIVDEVAYHEKYPTIYHLRKKLVDSTDKADLRLIYLALAHMIKFRGHFLIEGDLNPDNSDVDKLFIQLVQTYNQLFEENPI |
| | | | NASGVDAKAILSARLSKSRRLENLIAQLPGEKKNGLFGNLIALSLGLTPNFKSNFDLAEDAKLQLSKDTYDDDLDNLLAQIGDQYADLFLAAKNLSDAILLSDILR |
| | | | VNTEITKAPLSASMIKRYDEHHQDLTLLKALVRQQLPEKYKEIFFDQSKNGYAGYIDGGASQEEFYKFIKPILEKMDGTEELLVKLNREDLLRKQRTFDNGSIPHQ |
| | | | IHLGELHAILRRQEDFYPFLKDNREKIEKILTFRIPYYVGPLARGNSRFAWMTRKSEETITPWNFEEVVDKGASAQSFIERMTNFDKNLPNEKVLPKHSLLYEYFT |
| | | | VYNELTKVKYVTEGMRKPAFLSGEQKKAIVDLLFKTNRKVTVKQLKEDYFKKIECFDSVEISGVEDRFNASLGTYHDLLKIIKDKDFLDNEENEDILEDIVLTLTL |
| | | | FEDREMIEERLKTYAHLFDDKVMKQLKRRRYTGWGRLSRKLINGIRDKQSGKTILDFLKSDGFANRNFMQLIHDDSLTFKEDIQKAQVSGQGDSLHEHIANLAGSP |
| | | | AIKKGILQTVKVVDELVKVMGRHKPENIVIEMARENQTTQKGQKNSRERMKRIEEGIKELGSQILKEHPVENTQLQNEKLYLYYLQNGRDMYVDQELDINRLSDYD |
| | | | VDHIVPQSFLKDDSIDNKVLTRSDKARGKSDNVPSEEVVKKMKNYWRQLLNAKLITQRKFDNLTKAERGGLSELDKAGFIKRQLVETRQITKHVAQILDSRMNTKY |
| | | | DENDKLIREVKVITLKSKLVSDFRKDFQFYKVREINNYHHAHDAYLNAVVGTALIKKYPKLESEFVYGDYKVYDVRKMIAKSEQEIGKATAKYFFYSNIMNFFKTE |
| | | | ITLANGEIRKRPLIETNGETGEIVWDKGRDFATVRKVLSMPQVNIVKKTEVQTGGFSKESILPKRNSDKLIARKKDWDPKKYGGFDSPTVAYSVLVVAKVEKGKSK |
| | | | KLKSVKELLGITIMERSSFEKNPIDFLEAKGYKEVKKDLIIKLPKYSLFELENGRKRMLASAGELQKGNELALPSKYVNFLYLASHYEKLKGSPEDNEQKQLFVEQ |
| | | | HKHYLDEIIEQISEFSKRVILADANLDKVLSAYNKHRDKPIREQAENIIHLFTLTNLGAPAAFKYFDTTIDRKRYTSTKEVLDATLIHQSITGLYETRIDLSQLGG |
| | | | DSGGSSGGSSGSETPGTSESATPESSGGSSGGSSVQEISDSRPMLHIYLNGRRFLGLLDTGADKTCIAGRDWPANWPIHQTESSLQGLGMACGVARSSQPLRWQHE |
| | | | DKSGIIHPFVIPTLPFTLWGRDIMKDIKVRLMTDSPDDSQDLMIGAIESNLFADQISWKSDQPVWLNQWPLKQEKLQALQQLVTEQLQLGHLEESNSPWNTPVFVI |
| | | | KKKSGKWRLLQDLRAVNATMHDMGALQPGLPSPVAVPKGWEIIIIDLQDCFFNIKLHPEDCKRFAFSVPSPNFKRPYQRFQWKVLPQGMKNSPTLCQKFVDKAILT |
| | | | VRDKYQDSYIVHYMDDILLAHPSRSIVDEILTSMIQALNKHGLVVSTEKIQKYDNLKYLGTHIQGDSVSYQKLQIRTDKLRTLNDFQKLLGNINWIRPFLKLTTGE |
| | | | LKPLFEILNGDSNPISTRKLTPEACKALQLMNERLSTARVKRLDLSQPWSLCILKTEYTPTACLWQDGVVEWIHLPHISPKVITPYDIFCTQLIIKGRHRSKELFS |
| | | | KDPDYIVVPYTKVQFDLLLQEKEDWPISLLGFLGEVHFHLPKDPLLTFTLQTAIIFPHMTSTTPLEKGIVIFTDGSANGRSVTYIQGREPIIKENTQNTAQQAEIV |
| | | | AVITAFEEVSQPFNLYTDSKYVTGLFPEIETATLSPRTKIYTELKHLQRLIHKRQEKFYIGHIRGHTGLPGPLAQGNAYADSLTRILTASGGSKRTADGSEFEKRT |
| | | | ADGSEFESPKKKAKVE |
| MMTVB | 4 | 3701 | MPAAKRVKLDGGDKKYSIGLDIGTNSVGWAVITDEYKVPSKKFKVLGNTDRHSIKKNLIGALLFDSGETAEATRLKRTARRRYTRRKNRICYLQEIFSNEMAKVDD |
| | | | SFFHRLEESFLVEEDKKHERHPIFGNIVDEVAYHEKYPTIYHLRKKLVDSTDKADLRLIYLALAHMIKFRGHFLIEGDLNPDNSDVDKLFIQLVQTYNQLFEENPI |
| | | | NASGVDAKAILSARLSKSRRLENLIAQLPGEKKNGLFGNLIALSLGLTPNFKSNFDLAEDAKLQLSKDTYDDDLDNLLAQIGDQYADLFLAAKNLSDAILLSDILR |
| | | | VNTEITKAPLSASMIKRYDEHHQDLTLLKALVRQQLPEKYKEIFFDQSKNGYAGYIDGGASQEEFYKFIKPILEKMDGTEELLVKLNREDLLRKQRTFDNGSIPHQ |
| | | | IHLGELHAILRRQEDFYPFLKDNREKIEKILTFRIPYYVGPLARGNSRFAWMTRKSEETITPWNFEEVVDKGASAQSFIERMTNFDKNLPNEKVLPKHSLLYEYFT |
| | | | VYNELTKVKYVTEGMRKPAFLSGEQKKAIVDLLFKTNRKVTVKQLKEDYFKKIECFDSVEISGVEDRFNASLGTYHDLLKIIKDKDFLDNEENEDILEDIVLTLTL |
| | | | FEDREMIEERLKTYAHLFDDKVMKQLKRRRYTGWGRLSRKLINGIRDKQSGKTILDFLKSDGFANRNFMQLIHDDSLTFKEDIQKAQVSGQGDSLHEHIANLAGSP |
| | | | AIKKGILQTVKVVDELVKVMGRHKPENIVIEMARENQTTQKGQKNSRERMKRIEEGIKELGSQILKEHPVENTQLQNEKLYLYYLQNGRDMYVDQELDINRLSDYD |
| | | | VDHIVPQSFLKDDSIDNKVLTRSDKARGKSDNVPSEEVVKKMKNYWRQLLNAKLITQRKFDNLTKAERGGLSELDKAGFIKRQLVETRQITKHVAQILDSRMNTKY |
| | | | DENDKLIREVKVITLKSKLVSDFRKDFQFYKVREINNYHHAHDAYLNAVVGTALIKKYPKLESEFVYGDYKVYDVRKMIAKSEQEIGKATAKYFFYSNIMNFFKTE |
| | | | ITLANGEIRKRPLIETNGETGEIVWDKGRDFATVRKVLSMPQVNIVKKTEVQTGGFSKESILPKRNSDKLIARKKDWDPKKYGGFDSPTVAYSVLVVAKVEKGKSK |
| | | | KLKSVKELLGITIMERSSFEKNPIDFLEAKGYKEVKKDLIIKLPKYSLFELENGRKRMLASAGELQKGNELALPSKYVNFLYLASHYEKLKGSPEDNEQKQLFVEQ |
| | | | HKHYLDEIIEQISEFSKRVILADANLDKVLSAYNKHRDKPIREQAENIIHLFTLTNLGAPAAFKYFDTTIDRKRYTSTKEVLDATLIHQSITGLYETRIDLSQLGG |
| | | | DGGSGGSSGGSSGSETPGTSESATPESSGGSSGGSSGGVQEISDSRPMLHIYLNGRRFLGLLDTGADKTCIAGRDWPANWPIHQTESSLQGLGMACGVARSSQPLR |
| | | | WQHEDKSGIIHPFVIPTLPFTLWGRDIMKDIKVRLMTDSPDDSQDLMIGAIESNLFADQISWKSDQPVWLNQWPLKQEKLQALQQLVTEQLQLGHLEESNSPWNTP |
| | | | VFVIKKKSGKWRLLQDLRAVNATMHDMGALQPGLPSPVAVPKGWEIIIIDLQDCFFNIKLHPEDCKRFAFSVPSPNFKRPYQRFQWKVLPQGMKNSPTLCQKFVDK |
| | | | AILTVRDKYQDSYIVHYMDDILLAHPSRSIVDEILTSMIQALNKHGLVVSTEKIQKYDNLKYLGTHIQGDSVSYQKLQIRTDKLRTLNDFQKLLGNINWIRPFLKL |
| | | | TTGELKPLFEILNGDSNPISTRKLTPEACKALQLMNERLSTARVKRLDLSQPWSLCILKTEYTPTACLWQDGVVEWIHLPHISPKVITPYDIFCTQLIIKGRHRSK |
| | | | ELFSKDPDYIVVPYTKVQFDLLLQEKEDWPISLLGFLGEVHFHLPKDPLLTFTLQTAIIFPHMTSTTPLEKGIVIFTDGSANGRSVTYIQGREPIIKENTQNTAQQ |
| | | | AEIVAVITAFEEVSQPFNLYTDSKYVTGLFPEIETATLSPRTKIYTELKHLQRLIHKRQEKFYIGHIRGHTGLPGPLAQGNAYADSLTRILTAAGKRTADGSEFEK |
| | | | RTADGSEFESPKKKAKVEGSGEGRGSLLTCGDVEENPG |
| MMTVB | 5 | 3702 | MPAAKRVKLDGGDKKYSIGLDIGTNSVGWAVITDEYKVPSKKFKVLGNTDRHSIKKNLIGALLFDSGETAEATRLKRTARRRYTRRKNRICYLQEIFSNEMAKVDD |
| | | | SFFHRLEESFLVEEDKKHERHPIFGNIVDEVAYHEKYPTIYHLRKKLVDSTDKADLRLIYLALAHMIKFRGHFLIEGDLNPDNSDVDKLFIQLVQTYNQLFEENPI |
| | | | NASGVDAKAILSARLSKSRRLENLIAQLPGEKKNGLFGNLIALSLGLTPNFKSNFDLAEDAKLQLSKDTYDDDLDNLLAQIGDQYADLFLAAKNLSDAILLSDILR |
| | | | VNTEITKAPLSASMIKRYDEHHQDLTLLKALVRQQLPEKYKEIFFDQSKNGYAGYIDGGASQEEFYKFIKPILEKMDGTEELLVKLNREDLLRKQRTFDNGSIPHQ |
| | | | IHLGELHAILRRQEDFYPFLKDNREKIEKILTFRIPYYVGPLARGNSRFAWMTRKSEETITPWNFEEVVDKGASAQSFIERMTNFDKNLPNEKVLPKHSLLYEYFT |
| | | | VYNELTKVKYVTEGMRKPAFLSGEQKKAIVDLLFKTNRKVTVKQLKEDYFKKIECFDSVEISGVEDRFNASLGTYHDLLKIIKDKDFLDNEENEDILEDIVLTLTL |
| | | | FEDREMIEERLKTYAHLFDDKVMKQLKRRRYTGWGRLSRKLINGIRDKQSGKTILDFLKSDGFANRNFMQLIHDDSLTFKEDIQKAQVSGQGDSLHEHIANLAGSP |
| | | | AIKKGILQTVKVVDELVKVMGRHKPENIVIEMARENQTTQKGQKNSRERMKRIEEGIKELGSQILKEHPVENTQLQNEKLYLYYLQNGRDMYVDQELDINRLSDYD |
| | | | VDHIVPQSFLKDDSIDNKVLTRSDKARGKSDNVPSEEVVKKMKNYWRQLLNAKLITQRKFDNLTKAERGGLSELDKAGFIKRQLVETRQITKHVAQILDSRMNTKY |
| | | | DENDKLIREVKVITLKSKLVSDFRKDFQFYKVREINNYHHAHDAYLNAVVGTALIKKYPKLESEFVYGDYKVYDVRKMIAKSEQEIGKATAKYFFYSNIMNFFKTE |
| | | | ITLANGEIRKRPLIETNGETGEIVWDKGRDFATVRKVLSMPQVNIVKKTEVQTGGFSKESILPKRNSDKLIARKKDWDPKKYGGFDSPTVAYSVLVVAKVEKGKSK |
| | | | KLKSVKELLGITIMERSSFEKNPIDFLEAKGYKEVKKDLIIKLPKYSLFELENGRKRMLASAGELQKGNELALPSKYVNFLYLASHYEKLKGSPEDNEQKQLFVEQ |
| | | | HKHYLDEIIEQISEFSKRVILADANLDKVLSAYNKHRDKPIREQAENIIHLFTLTNLGAPAAFKYFDTTIDRKRYTSTKEVLDATLIHQSITGLYETRIDLSQLGG |
| | | | DGGGSSGSSGSSGSSGSSGGVQEISDSRPMLHIYLNGRRFLGLLDTGADKTCIAGRDWPANWPIHQTESSLQGLGMACGVARSSQPLRWQHEDKSGIIHPFVIPTL |
| | | | PFTLWGRDIMKDIKVRLMTDSPDDSQDLMIGAIESNLFADQISWKSDQPVWLNQWPLKQEKLQALQQLVTEQLQLGHLEESNSPWNTPVFVIKKKSGKWRLLQDLR |
| | | | AVNATMHDMGALQPGLPSPVAVPKGWEIIIIDLQDCFFNIKLHPEDCKRFAFSVPSPNFKRPYQRFQWKVLPQGMKNSPTLCQKFVDKAILTVRDKYQDSYIVHYM |
| | | | DDILLAHPSRSIVDEILTSMIQALNKHGLVVSTEKIQKYDNLKYLGTHIQGDSVSYQKLQIRTDKLRTLNDFQKLLGNINWIRPFLKLTTGELKPLFEILNGDSNP |
| | | | ISTRKLTPEACKALQLMNERLSTARVKRLDLSQPWSLCILKTEYTPTACLWQDGVVEWIHLPHISPKVITPYDIFCTQLIIKGRHRSKELFSKDPDYIVVPYTKVQ |
| | | | FDLLLQEKEDWPISLLGFLGEVHFHLPKDPLLTFTLQTAIIFPHMTSTTPLEKGIVIFTDGSANGRSVTYIQGREPIIKENTQNTAQQAEIVAVITAFEEVSQPFN |
| | | | LYTDSKYVTGLFPEIETATLSPRTKIYTELKHLQRLIHKRQEKFYIGHIRGHTGLPGPLAQGNAYADSLTRILTAAGKRTADGSEFEKRTADGSEFESPKKKAKVE |
| | | | GSGEGRGSLLTCGDVEENPG |
| MMTVB | 6 | 3703 | MPAAKRVKLDGGDKKYSIGLDIGTNSVGWAVITDEYKVPSKKFKVLGNTDRHSIKKNLIGALLFDSGETAEATRLKRTARRRYTRRKNRICYLQEIFSNEMAKVDD |
| | | | SFFHRLEESFLVEEDKKHERHPIFGNIVDEVAYHEKYPTIYHLRKKLVDSTDKADLRLIYLALAHMIKFRGHFLIEGDLNPDNSDVDKLFIQLVQTYNQLFEENPI |
| | | | NASGVDAKAILSARLSKSRRLENLIAQLPGEKKNGLFGNLIALSLGLTPNFKSNFDLAEDAKLQLSKDTYDDDLDNLLAQIGDQYADLFLAAKNLSDAILLSDILR |
| | | | VNTEITKAPLSASMIKRYDEHHQDLTLLKALVRQQLPEKYKEIFFDQSKNGYAGYIDGGASQEEFYKFIKPILEKMDGTEELLVKLNREDLLRKQRTFDNGSIPHQ |
| | | | IHLGELHAILRRQEDFYPFLKDNREKIEKILTFRIPYYVGPLARGNSRFAWMTRKSEETITPWNFEEVVDKGASAQSFIERMTNFDKNLPNEKVLPKHSLLYEYFT |
| | | | VYNELTKVKYVTEGMRKPAFLSGEQKKAIVDLLFKTNRKVTVKQLKEDYFKKIECFDSVEISGVEDRFNASLGTYHDLLKIIKDKDFLDNEENEDILEDIVLTLTL |
| | | | FEDREMIEERLKTYAHLFDDKVMKQLKRRRYTGWGRLSRKLINGIRDKQSGKTILDFLKSDGFANRNFMQLIHDDSLTFKEDIQKAQVSGQGDSLHEHIANLAGSP |
| | | | AIKKGILQTVKVVDELVKVMGRHKPENIVIEMARENQTTQKGQKNSRERMKRIEEGIKELGSQILKEHPVENTQLQNEKLYLYYLQNGRDMYVDQELDINRLSDYD |
| | | | VDHIVPQSFLKDDSIDNKVLTRSDKARGKSDNVPSEEVVKKMKNYWRQLLNAKLITQRKFDNLTKAERGGLSELDKAGFIKRQLVETRQITKHVAQILDSRMNTKY |
| | | | DENDKLIREVKVITLKSKLVSDFRKDFQFYKVREINNYHHAHDAYLNAVVGTALIKKYPKLESEFVYGDYKVYDVRKMIAKSEQEIGKATAKYFFYSNIMNFFKTE |
| | | | ITLANGEIRKRPLIETNGETGEIVWDKGRDFATVRKVLSMPQVNIVKKTEVQTGGFSKESILPKRNSDKLIARKKDWDPKKYGGFDSPTVAYSVLVVAKVEKGKSK |
| | | | KLKSVKELLGITIMERSSFEKNPIDFLEAKGYKEVKKDLIIKLPKYSLFELENGRKRMLASAGELQKGNELALPSKYVNFLYLASHYEKLKGSPEDNEQKQLFVEQ |
| | | | HKHYLDEIIEQISEFSKRVILADANLDKVLSAYNKHRDKPIREQAENIIHLFTLTNLGAPAAFKYFDTTIDRKRYTSTKEVLDATLIHQSITGLYETRIDLSQLGG |
| | | | DGGPAPAPAPAPGGVQEISDSRPMLHIYLNGRRFLGLLDTGADKTCIAGRDWPANWPIHQTESSLQGLGMACGVARSSQPLRWQHEDKSGIIHPFVIPTLPFTLWG |
| | | | RDIMKDIKVRLMTDSPDDSQDLMIGAIESNLFADQISWKSDQPVWLNQWPLKQEKLQALQQLVTEQLQLGHLEESNSPWNTPVFVIKKKSGKWRLLQDLRAVNATM |
| | | | HDMGALQPGLPSPVAVPKGWEIIIIDLQDCFFNIKLHPEDCKRFAFSVPSPNFKRPYQRFQWKVLPQGMKNSPTLCQKFVDKAILTVRDKYQDSYIVHYMDDILLA |
| | | | HPSRSIVDEILTSMIQALNKHGLVVSTEKIQKYDNLKYLGTHIQGDSVSYQKLQIRTDKLRTLNDFQKLLGNINWIRPFLKLTTGELKPLFEILNGDSNPISTRKL |
| | | | TPEACKALQLMNERLSTARVKRLDLSQPWSLCILKTEYTPTACLWQDGVVEWIHLPHISPKVITPYDIFCTQLIIKGRHRSKELFSKDPDYIVVPYTKVQFDLLLQ |
| | | | EKEDWPISLLGFLGEVHFHLPKDPLLTFTLQTAIIFPHMTSTTPLEKGIVIFTDGSANGRSVTYIQGREPIIKENTQNTAQQAEIVAVITAFEEVSQPFNLYTDSK |
| | | | YVTGLFPEIETATLSPRTKIYTELKHLQRLIHKRQEKFYIGHIRGHTGLPGPLAQGNAYADSLTRILTAAGKRTADGSEFEKRTADGSEFESPKKKAKVEGSGEGR |
| | | | GSLLTCGDVEENPG |
| MMTVB | 7 | 3704 | MPAAKRVKLDGGDKKYSIGLDIGTNSVGWAVITDEYKVPSKKFKVLGNTDRHSIKKNLIGALLFDSGETAEATRLKRTARRRYTRRKNRICYLQEIFSNEMAKVDD |
| | | | SFFHRLEESFLVEEDKKHERHPIFGNIVDEVAYHEKYPTIYHLRKKLVDSTDKADLRLIYLALAHMIKFRGHFLIEGDLNPDNSDVDKLFIQLVQTYNQLFEENPI |
| | | | NASGVDAKAILSARLSKSRRLENLIAQLPGEKKNGLFGNLIALSLGLTPNFKSNFDLAEDAKLQLSKDTYDDDLDNLLAQIGDQYADLFLAAKNLSDAILLSDILR |
| | | | VNTEITKAPLSASMIKRYDEHHQDLTLLKALVRQQLPEKYKEIFFDQSKNGYAGYIDGGASQEEFYKFIKPILEKMDGTEELLVKLNREDLLRKQRTFDNGSIPHQ |
| | | | IHLGELHAILRRQEDFYPFLKDNREKIEKILTFRIPYYVGPLARGNSRFAWMTRKSEETITPWNFEEVVDKGASAQSFIERMTNFDKNLPNEKVLPKHSLLYEYFT |
| | | | VYNELTKVKYVTEGMRKPAFLSGEQKKAIVDLLFKTNRKVTVKQLKEDYFKKIECFDSVEISGVEDRFNASLGTYHDLLKIIKDKDFLDNEENEDILEDIVLTLTL |
| | | | FEDREMIEERLKTYAHLFDDKVMKQLKRRRYTGWGRLSRKLINGIRDKQSGKTILDFLKSDGFANRNFMQLIHDDSLTFKEDIQKAQVSGQGDSLHEHIANLAGSP |
| | | | AIKKGILQTVKVVDELVKVMGRHKPENIVIEMARENQTTQKGQKNSRERMKRIEEGIKELGSQILKEHPVENTQLQNEKLYLYYLQNGRDMYVDQELDINRLSDYD |
| | | | VDHIVPQSFLKDDSIDNKVLTRSDKARGKSDNVPSEEVVKKMKNYWRQLLNAKLITQRKFDNLTKAERGGLSELDKAGFIKRQLVETRQITKHVAQILDSRMNTKY |
| | | | DENDKLIREVKVITLKSKLVSDFRKDFQFYKVREINNYHHAHDAYLNAVVGTALIKKYPKLESEFVYGDYKVYDVRKMIAKSEQEIGKATAKYFFYSNIMNFFKTE |
| | | | ITLANGEIRKRPLIETNGETGEIVWDKGRDFATVRKVLSMPQVNIVKKTEVQTGGFSKESILPKRNSDKLIARKKDWDPKKYGGFDSPTVAYSVLVVAKVEKGKSK |
| | | | KLKSVKELLGITIMERSSFEKNPIDFLEAKGYKEVKKDLIIKLPKYSLFELENGRKRMLASAGELQKGNELALPSKYVNFLYLASHYEKLKGSPEDNEQKQLFVEQ |
| | | | HKHYLDEIIEQISEFSKRVILADANLDKVLSAYNKHRDKPIREQAENIIHLFTLTNLGAPAAFKYFDTTIDRKRYTSTKEVLDATLIHQSITGLYETRIDLSQLGG |
| | | | DGGGGGGGSGSSGGVQEISDSRPMLHIYLNGRRFLGLLDTGADKTCIAGRDWPANWPIHQTESSLQGLGMACGVARSSQPLRWQHEDKSGIIHPFVIPTLPFTLWG |
| | | | RDIMKDIKVRLMTDSPDDSQDLMIGAIESNLFADQISWKSDQPVWLNQWPLKQEKLQALQQLVTEQLQLGHLEESNSPWNTPVFVIKKKSGKWRLLQDLRAVNATM |
| | | | HDMGALQPGLPSPVAVPKGWEIIIIDLQDCFFNIKLHPEDCKRFAFSVPSPNFKRPYQRFQWKVLPQGMKNSPTLCQKFVDKAILTVRDKYQDSYIVHYMDDILLA |
| | | | HPSRSIVDEILTSMIQALNKHGLVVSTEKIQKYDNLKYLGTHIQGDSVSYQKLQIRTDKLRTLNDFQKLLGNINWIRPFLKLTTGELKPLFEILNGDSNPISTRKL |
| | | | TPEACKALQLMNERLSTARVKRLDLSQPWSLCILKTEYTPTACLWQDGVVEWIHLPHISPKVITPYDIFCTQLIIKGRHRSKELFSKDPDYIVVPYTKVQFDLLLQ |
| | | | EKEDWPISLLGFLGEVHFHLPKDPLLTFTLQTAIIFPHMTSTTPLEKGIVIFTDGSANGRSVTYIQGREPIIKENTQNTAQQAEIVAVITAFEEVSQPFNLYTDSK |
| | | | YVTGLFPEIETATLSPRTKIYTELKHLQRLIHKRQEKFYIGHIRGHTGLPGPLAQGNAYADSLTRILTAAGKRTADGSEFEKRTADGSEFESPKKKAKVEGSGEGR |
| | | | GSLLTCGDVEENPG |
| MMTVB | 8 | 3705 | MPAAKRVKLDGGDKKYSIGLDIGTNSVGWAVITDEYKVPSKKFKVLGNTDRHSIKKNLIGALLFDSGETAEATRLKRTARRRYTRRKNRICYLQEIFSNEMAKVDD |
| | | | SFFHRLEESFLVEEDKKHERHPIFGNIVDEVAYHEKYPTIYHLRKKLVDSTDKADLRLIYLALAHMIKFRGHFLIEGDLNPDNSDVDKLFIQLVQTYNQLFEENPI |
| | | | NASGVDAKAILSARLSKSRRLENLIAQLPGEKKNGLFGNLIALSLGLTPNFKSNFDLAEDAKLQLSKDTYDDDLDNLLAQIGDQYADLFLAAKNLSDAILLSDILR |
| | | | VNTEITKAPLSASMIKRYDEHHQDLTLLKALVRQQLPEKYKEIFFDQSKNGYAGYIDGGASQEEFYKFIKPILEKMDGTEELLVKLNREDLLRKQRTFDNGSIPHQ |
| | | | IHLGELHAILRRQEDFYPFLKDNREKIEKILTFRIPYYVGPLARGNSRFAWMTRKSEETITPWNFEEVVDKGASAQSFIERMTNFDKNLPNEKVLPKHSLLYEYFT |
| | | | VYNELTKVKYVTEGMRKPAFLSGEQKKAIVDLLFKTNRKVTVKQLKEDYFKKIECFDSVEISGVEDRFNASLGTYHDLLKIIKDKDFLDNEENEDILEDIVLTLTL |
| | | | FEDREMIEERLKTYAHLFDDKVMKQLKRRRYTGWGRLSRKLINGIRDKQSGKTILDFLKSDGFANRNFMQLIHDDSLTFKEDIQKAQVSGQGDSLHEHIANLAGSP |
| | | | AIKKGILQTVKVVDELVKVMGRHKPENIVIEMARENQTTQKGQKNSRERMKRIEEGIKELGSQILKEHPVENTQLQNEKLYLYYLQNGRDMYVDQELDINRLSDYD |
| | | | VDHIVPQSFLKDDSIDNKVLTRSDKARGKSDNVPSEEVVKKMKNYWRQLLNAKLITQRKFDNLTKAERGGLSELDKAGFIKRQLVETRQITKHVAQILDSRMNTKY |
| | | | DENDKLIREVKVITLKSKLVSDFRKDFQFYKVREINNYHHAHDAYLNAVVGTALIKKYPKLESEFVYGDYKVYDVRKMIAKSEQEIGKATAKYFFYSNIMNFFKTE |
| | | | ITLANGEIRKRPLIETNGETGEIVWDKGRDFATVRKVLSMPQVNIVKKTEVQTGGFSKESILPKRNSDKLIARKKDWDPKKYGGFDSPTVAYSVLVVAKVEKGKSK |
| | | | KLKSVKELLGITIMERSSFEKNPIDFLEAKGYKEVKKDLIIKLPKYSLFELENGRKRMLASAGELQKGNELALPSKYVNFLYLASHYEKLKGSPEDNEQKQLFVEQ |
| | | | HKHYLDEIIEQISEFSKRVILADANLDKVLSAYNKHRDKPIREQAENIIHLFTLTNLGAPAAFKYFDTTIDRKRYTSTKEVLDATLIHQSITGLYETRIDLSQLGG |
| | | | DGGGGSGGSGGSGGSGGSGGVQEISDSRPMLHIYLNGRRFLGLLDTGADKTCIAGRDWPANWPIHQTESSLQGLGMACGVARSSQPLRWQHEDKSGIIHPFVIPTL |
| | | | PFTLWGRDIMKDIKVRLMTDSPDDSQDLMIGAIESNLFADQISWKSDQPVWLNQWPLKQEKLQALQQLVTEQLQLGHLEESNSPWNTPVFVIKKKSGKWRLLQDLR |
| | | | AVNATMHDMGALQPGLPSPVAVPKGWEIIIIDLQDCFFNIKLHPEDCKRFAFSVPSPNFKRPYQRFQWKVLPQGMKNSPTLCQKFVDKAILTVRDKYQDSYIVHYM |
| | | | DDILLAHPSRSIVDEILTSMIQALNKHGLVVSTEKIQKYDNLKYLGTHIQGDSVSYQKLQIRTDKLRTLNDFQKLLGNINWIRPFLKLTTGELKPLFEILNGDSNP |
| | | | ISTRKLTPEACKALQLMNERLSTARVKRLDLSQPWSLCILKTEYTPTACLWQDGVVEWIHLPHISPKVITPYDIFCTQLIIKGRHRSKELFSKDPDYIVVPYTKVQ |
| | | | FDLLLQEKEDWPISLLGFLGEVHFHLPKDPLLTFTLQTAIIFPHMTSTTPLEKGIVIFTDGSANGRSVTYIQGREPIIKENTQNTAQQAEIVAVITAFEEVSQPFN |
| | | | LYTDSKYVTGLFPEIETATLSPRTKIYTELKHLQRLIHKRQEKFYIGHIRGHTGLPGPLAQGNAYADSLTRILTAAGKRTADGSEFEKRTADGSEFESPKKKAKVE |
| | | | GSGEGRGSLLTCGDVEENPG |
| MMTVB | 9 | 3706 | MPAAKRVKLDGGDKKYSIGLDIGTNSVGWAVITDEYKVPSKKFKVLGNTDRHSIKKNLIGALLFDSGETAEATRLKRTARRRYTRRKNRICYLQEIFSNEMAKVDD |
| | | | SFFHRLEESFLVEEDKKHERHPIFGNIVDEVAYHEKYPTIYHLRKKLVDSTDKADLRLIYLALAHMIKFRGHFLIEGDLNPDNSDVDKLFIQLVQTYNQLFEENPI |
| | | | NASGVDAKAILSARLSKSRRLENLIAQLPGEKKNGLFGNLIALSLGLTPNFKSNFDLAEDAKLQLSKDTYDDDLDNLLAQIGDQYADLFLAAKNLSDAILLSDILR |
| | | | VNTEITKAPLSASMIKRYDEHHQDLTLLKALVRQQLPEKYKEIFFDQSKNGYAGYIDGGASQEEFYKFIKPILEKMDGTEELLVKLNREDLLRKQRTFDNGSIPHQ |
| | | | IHLGELHAILRRQEDFYPFLKDNREKIEKILTFRIPYYVGPLARGNSRFAWMTRKSEETITPWNFEEVVDKGASAQSFIERMTNFDKNLPNEKVLPKHSLLYEYFT |
| | | | VYNELTKVKYVTEGMRKPAFLSGEQKKAIVDLLFKTNRKVTVKQLKEDYFKKIECFDSVEISGVEDRFNASLGTYHDLLKIIKDKDFLDNEENEDILEDIVLTLTL |
| | | | FEDREMIEERLKTYAHLFDDKVMKQLKRRRYTGWGRLSRKLINGIRDKQSGKTILDFLKSDGFANRNFMQLIHDDSLTFKEDIQKAQVSGQGDSLHEHIANLAGSP |
| | | | AIKKGILQTVKVVDELVKVMGRHKPENIVIEMARENQTTQKGQKNSRERMKRIEEGIKELGSQILKEHPVENTQLQNEKLYLYYLQNGRDMYVDQELDINRLSDYD |
| | | | VDHIVPQSFLKDDSIDNKVLTRSDKARGKSDNVPSEEVVKKMKNYWRQLLNAKLITQRKFDNLTKAERGGLSELDKAGFIKRQLVETRQITKHVAQILDSRMNTKY |
| | | | DENDKLIREVKVITLKSKLVSDFRKDFQFYKVREINNYHHAHDAYLNAVVGTALIKKYPKLESEFVYGDYKVYDVRKMIAKSEQEIGKATAKYFFYSNIMNFFKTE |
| | | | ITLANGEIRKRPLIETNGETGEIVWDKGRDFATVRKVLSMPQVNIVKKTEVQTGGFSKESILPKRNSDKLIARKKDWDPKKYGGFDSPTVAYSVLVVAKVEKGKSK |
| | | | KLKSVKELLGITIMERSSFEKNPIDFLEAKGYKEVKKDLIIKLPKYSLFELENGRKRMLASAGELQKGNELALPSKYVNFLYLASHYEKLKGSPEDNEQKQLFVEQ |
| | | | HKHYLDEIIEQISEFSKRVILADANLDKVLSAYNKHRDKPIREQAENIIHLFTLTNLGAPAAFKYFDTTIDRKRYTSTKEVLDATLIHQSITGLYETRIDLSQLGG |
| | | | DGGGSSEAAAKGGSGGVQEISDSRPMLHIYLNGRRFLGLLDTGADKTCIAGRDWPANWPIHQTESSLQGLGMACGVARSSQPLRWQHEDKSGIIHPFVIPTLPFTL |
| | | | WGRDIMKDIKVRLMTDSPDDSQDLMIGAIESNLFADQISWKSDQPVWLNQWPLKQEKLQALQQLVTEQLQLGHLEESNSPWNTPVFVIKKKSGKWRLLQDLRAVNA |
| | | | TMHDMGALQPGLPSPVAVPKGWEIIIIDLQDCFFNIKLHPEDCKRFAFSVPSPNFKRPYQRFQWKVLPQGMKNSPTLCQKFVDKAILTVRDKYQDSYIVHYMDDIL |
| | | | LAHPSRSIVDEILTSMIQALNKHGLVVSTEKIQKYDNLKYLGTHIQGDSVSYQKLQIRTDKLRTLNDFQKLLGNINWIRPFLKLTTGELKPLFEILNGDSNPISTR |
| | | | KLTPEACKALQLMNERLSTARVKRLDLSQPWSLCILKTEYTPTACLWQDGVVEWIHLPHISPKVITPYDIFCTQLIIKGRHRSKELFSKDPDYIVVPYTKVQFDLL |
| | | | LQEKEDWPISLLGFLGEVHFHLPKDPLLTFTLQTAIIFPHMTSTTPLEKGIVIFTDGSANGRSVTYIQGREPIIKENTQNTAQQAEIVAVITAFEEVSQPENLYTD |
| | | | SKYVTGLFPEIETATLSPRTKIYTELKHLQRLIHKRQEKFYIGHIRGHTGLPGPLAQGNAYADSLTRILTAAGKRTADGSEFEKRTADGSEFESPKKKAKVEGSGE |
| | | | GRGSLLTCGDVEENPG |
| MMTVB | 10 | 3707 | MPAAKRVKLDGGDKKYSIGLDIGTNSVGWAVITDEYKVPSKKFKVLGNTDRHSIKKNLIGALLFDSGETAEATRLKRTARRRYTRRKNRICYLQEIFSNEMAKVDD |
| | | | SFFHRLEESFLVEEDKKHERHPIFGNIVDEVAYHEKYPTIYHLRKKLVDSTDKADLRLIYLALAHMIKFRGHFLIEGDLNPDNSDVDKLFIQLVQTYNQLFEENPI |
| | | | NASGVDAKAILSARLSKSRRLENLIAQLPGEKKNGLFGNLIALSLGLTPNFKSNFDLAEDAKLQLSKDTYDDDLDNLLAQIGDQYADLFLAAKNLSDAILLSDILR |
| | | | VNTEITKAPLSASMIKRYDEHHQDLTLLKALVRQQLPEKYKEIFFDQSKNGYAGYIDGGASQEEFYKFIKPILEKMDGTEELLVKLNREDLLRKQRTFDNGSIPHQ |
| | | | IHLGELHAILRRQEDFYPFLKDNREKIEKILTFRIPYYVGPLARGNSRFAWMTRKSEETITPWNFEEVVDKGASAQSFIERMTNFDKNLPNEKVLPKHSLLYEYFT |
| | | | VYNELTKVKYVTEGMRKPAFLSGEQKKAIVDLLFKTNRKVTVKQLKEDYFKKIECFDSVEISGVEDRFNASLGTYHDLLKIIKDKDFLDNEENEDILEDIVLTLTL |
| | | | FEDREMIEERLKTYAHLFDDKVMKQLKRRRYTGWGRLSRKLINGIRDKQSGKTILDFLKSDGFANRNFMQLIHDDSLTFKEDIQKAQVSGQGDSLHEHIANLAGSP |
| | | | AIKKGILQTVKVVDELVKVMGRHKPENIVIEMARENQTTQKGQKNSRERMKRIEEGIKELGSQILKEHPVENTQLQNEKLYLYYLQNGRDMYVDQELDINRLSDYD |
| | | | VDHIVPQSFLKDDSIDNKVLTRSDKARGKSDNVPSEEVVKKMKNYWRQLLNAKLITQRKFDNLTKAERGGLSELDKAGFIKRQLVETRQITKHVAQILDSRMNTKY |
| | | | DENDKLIREVKVITLKSKLVSDFRKDFQFYKVREINNYHHAHDAYLNAVVGTALIKKYPKLESEFVYGDYKVYDVRKMIAKSEQEIGKATAKYFFYSNIMNFFKTE |
| | | | ITLANGEIRKRPLIETNGETGEIVWDKGRDFATVRKVLSMPQVNIVKKTEVQTGGFSKESILPKRNSDKLIARKKDWDPKKYGGFDSPTVAYSVLVVAKVEKGKSK |
| | | | KLKSVKELLGITIMERSSFEKNPIDFLEAKGYKEVKKDLIIKLPKYSLFELENGRKRMLASAGELQKGNELALPSKYVNFLYLASHYEKLKGSPEDNEQKQLFVEQ |
| | | | HKHYLDEIIEQISEFSKRVILADANLDKVLSAYNKHRDKPIREQAENIIHLFTLTNLGAPAAFKYFDTTIDRKRYTSTKEVLDATLIHQSITGLYETRIDLSQLGG |
| | | | DGGGGSPAPEAAAKGGVQEISDSRPMLHIYLNGRRFLGLLDTGADKTCIAGRDWPANWPIHQTESSLQGLGMACGVARSSQPLRWQHEDKSGIIHPFVIPTLPFTL |
| | | | WGRDIMKDIKVRLMTDSPDDSQDLMIGAIESNLFADQISWKSDQPVWLNQWPLKQEKLQALQQLVTEQLQLGHLEESNSPWNTPVFVIKKKSGKWRLLQDLRAVNA |
| | | | TMHDMGALQPGLPSPVAVPKGWEIIIIDLQDCFFNIKLHPEDCKRFAFSVPSPNFKRPYQRFQWKVLPQGMKNSPTLCQKFVDKAILTVRDKYQDSYIVHYMDDIL |
| | | | LAHPSRSIVDEILTSMIQALNKHGLVVSTEKIQKYDNLKYLGTHIQGDSVSYQKLQIRTDKLRTLNDFQKLLGNINWIRPFLKLTTGELKPLFEILNGDSNPISTR |
| | | | KLTPEACKALQLMNERLSTARVKRLDLSQPWSLCILKTEYTPTACLWQDGVVEWIHLPHISPKVITPYDIFCTQLIIKGRHRSKELFSKDPDYIVVPYTKVQFDLL |
| | | | LQEKEDWPISLLGFLGEVHFHLPKDPLLTFTLQTAIIFPHMTSTTPLEKGIVIFTDGSANGRSVTYIQGREPIIKENTQNTAQQAEIVAVITAFEEVSQPFNLYTD |
| | | | SKYVTGLFPEIETATLSPRTKIYTELKHLQRLIHKRQEKFYIGHIRGHTGLPGPLAQGNAYADSLTRILTAAGKRTADGSEFEKRTADGSEFESPKKKAKVEGSGE |
| | | | GRGSLLTCGDVEENPG |
| MMTVB | 11 | 3708 | MPAAKRVKLDGGDKKYSIGLDIGTNSVGWAVITDEYKVPSKKFKVLGNTDRHSIKKNLIGALLFDSGETAEATRLKRTARRRYTRRKNRICYLQEIFSNEMAKVDD |
| | | | SFFHRLEESFLVEEDKKHERHPIFGNIVDEVAYHEKYPTIYHLRKKLVDSTDKADLRLIYLALAHMIKFRGHFLIEGDLNPDNSDVDKLFIQLVQTYNQLFEENPI |
| | | | NASGVDAKAILSARLSKSRRLENLIAQLPGEKKNGLFGNLIALSLGLTPNFKSNFDLAEDAKLQLSKDTYDDDLDNLLAQIGDQYADLFLAAKNLSDAILLSDILR |
| | | | VNTEITKAPLSASMIKRYDEHHQDLTLLKALVRQQLPEKYKEIFFDQSKNGYAGYIDGGASQEEFYKFIKPILEKMDGTEELLVKLNREDLLRKQRTFDNGSIPHQ |
| | | | IHLGELHAILRRQEDFYPFLKDNREKIEKILTFRIPYYVGPLARGNSRFAWMTRKSEETITPWNFEEVVDKGASAQSFIERMTNFDKNLPNEKVLPKHSLLYEYFT |
| | | | VYNELTKVKYVTEGMRKPAFLSGEQKKAIVDLLFKTNRKVTVKQLKEDYFKKIECFDSVEISGVEDRFNASLGTYHDLLKIIKDKDFLDNEENEDILEDIVLTLTL |
| | | | FEDREMIEERLKTYAHLFDDKVMKQLKRRRYTGWGRLSRKLINGIRDKQSGKTILDFLKSDGFANRNFMQLIHDDSLTFKEDIQKAQVSGQGDSLHEHIANLAGSP |
| | | | AIKKGILQTVKVVDELVKVMGRHKPENIVIEMARENQTTQKGQKNSRERMKRIEEGIKELGSQILKEHPVENTQLQNEKLYLYYLQNGRDMYVDQELDINRLSDYD |
| | | | VDHIVPQSFLKDDSIDNKVLTRSDKARGKSDNVPSEEVVKKMKNYWRQLLNAKLITQRKFDNLTKAERGGLSELDKAGFIKRQLVETRQITKHVAQILDSRMNTKY |
| | | | DENDKLIREVKVITLKSKLVSDFRKDFQFYKVREINNYHHAHDAYLNAVVGTALIKKYPKLESEFVYGDYKVYDVRKMIAKSEQEIGKATAKYFFYSNIMNFFKTE |
| | | | ITLANGEIRKRPLIETNGETGEIVWDKGRDFATVRKVLSMPQVNIVKKTEVQTGGFSKESILPKRNSDKLIARKKDWDPKKYGGFDSPTVAYSVLVVAKVEKGKSK |
| | | | KLKSVKELLGITIMERSSFEKNPIDFLEAKGYKEVKKDLIIKLPKYSLFELENGRKRMLASAGELQKGNELALPSKYVNFLYLASHYEKLKGSPEDNEQKQLFVEQ |
| | | | HKHYLDEIIEQISEFSKRVILADANLDKVLSAYNKHRDKPIREQAENIIHLFTLTNLGAPAAFKYFDTTIDRKRYTSTKEVLDATLIHQSITGLYETRIDLSQLGG |
| | | | DGGAEAAAKEAAAKEAAAKEAAAKALEAEAAAKEAAAKEAAAKEAAAKAGGVQEISDSRPMLHIYLNGRRFLGLLDTGADKTCIAGRDWPANWPIHQTESSLQGLG |
| | | | MACGVARSSQPLRWQHEDKSGIIHPFVIPTLPFTLWGRDIMKDIKVRLMTDSPDDSQDLMIGAIESNLFADQISWKSDQPVWLNQWPLKQEKLQALQQLVTEQLQL |
| | | | GHLEESNSPWNTPVFVIKKKSGKWRLLQDLRAVNATMHDMGALQPGLPSPVAVPKGWEIIIIDLQDCFFNIKLHPEDCKRFAFSVPSPNFKRPYQRFQWKVLPQGM |
| | | | KNSPTLCQKFVDKAILTVRDKYQDSYIVHYMDDILLAHPSRSIVDEILTSMIQALNKHGLVVSTEKIQKYDNLKYLGTHIQGDSVSYQKLQIRTDKLRTLNDFQKL |
| | | | LGNINWIRPFLKLTTGELKPLFEILNGDSNPISTRKLTPEACKALQLMNERLSTARVKRLDLSQPWSLCILKTEYTPTACLWQDGVVEWIHLPHISPKVITPYDIF |
| | | | CTQLIIKGRHRSKELFSKDPDYIVVPYTKVQFDLLLQEKEDWPISLLGFLGEVHFHLPKDPLLTFTLQTAIIFPHMTSTTPLEKGIVIFTDGSANGRSVTYIQGRE |
| | | | PIIKENTQNTAQQAEIVAVITAFEEVSQPFNLYTDSKYVTGLFPEIETATLSPRTKIYTELKHLQRLIHKRQEKFYIGHIRGHTGLPGPLAQGNAYADSLTRILTA |
| | | | AGKRTADGSEFEKRTADGSEFESPKKKAKVEGSGEGRGSLLTCGDVEENPG |
| MMTV | 1 | 3709 | MAPKKKRKVGIHGVPAADKKYSIGLDIGTNSVGWAVITDEYKVPSKKFKVLGNTDRHSIKKNLIGALLFDSGETAEATRLKRTARRRYTRRKNRICYLQEIFSNEM |
| | | | AKVDDSFFHRLEESFLVEEDKKHERHPIFGNIVDEVAYHEKYPTIYHLRKKLVDSTDKADLRLIYLALAHMIKFRGHFLIEGDLNPDNSDVDKLFIQLVQTYNQLF |
| | | | EENPINASGVDAKAILSARLSKSRRLENLIAQLPGEKKNGLFGNLIALSLGLTPNFKSNFDLAEDAKLQLSKDTYDDDLDNLLAQIGDQYADLFLAAKNLSDAILL |
| | | | SDILRVNTEITKAPLSASMIKRYDEHHQDLTLLKALVRQQLPEKYKEIFFDQSKNGYAGYIDGGASQEEFYKFIKPILEKMDGTEELLVKLNREDLLRKQRTFDNG |
| | | | SIPHQIHLGELHAILRRQEDFYPFLKDNREKIEKILTFRIPYYVGPLARGNSRFAWMTRKSEETITPWNFEEVVDKGASAQSFIERMTNFDKNLPNEKVLPKHSLL |
| | | | YEYFTVYNELTKVKYVTEGMRKPAFLSGEQKKAIVDLLFKTNRKVTVKQLKEDYFKKIECFDSVEISGVEDRFNASLGTYHDLLKIIKDKDFLDNEENEDILEDIV |
| | | | LTLTLFEDREMIEERLKTYAHLFDDKVMKQLKRRRYTGWGRLSRKLINGIRDKQSGKTILDFLKSDGFANRNFMQLIHDDSLTFKEDIQKAQVSGQGDSLHEHIAN |
| | | | LAGSPAIKKGILQTVKVVDELVKVMGRHKPENIVIEMARENQTTQKGQKNSRERMKRIEEGIKELGSQILKEHPVENTQLQNEKLYLYYLQNGRDMYVDQELDINR |
| | | | LSDYDVDHIVPQSFLKDDSIDNKVLTRSDKARGKSDNVPSEEVVKKMKNYWRQLLNAKLITQRKFDNLTKAERGGLSELDKAGFIKRQLVETRQITKHVAQILDSR |
| | | | MNTKYDENDKLIREVKVITLKSKLVSDFRKDFQFYKVREINNYHHAHDAYLNAVVGTALIKKYPKLESEFVYGDYKVYDVRKMIAKSEQEIGKATAKYFFYSNIMN |
| | | | FFKTEITLANGEIRKRPLIETNGETGEIVWDKGRDFATVRKVLSMPQVNIVKKTEVQTGGFSKESILPKRNSDKLIARKKDWDPKKYGGFDSPTVAYSVLVVAKVE |
| | | | KGKSKKLKSVKELLGITIMERSSFEKNPIDFLEAKGYKEVKKDLIIKLPKYSLFELENGRKRMLASAGELQKGNELALPSKYVNFLYLASHYEKLKGSPEDNEQKQ |
| | | | LFVEQHKHYLDEIIEQISEFSKRVILADANLDKVLSAYNKHRDKPIREQAENIIHLFTLTNLGAPAAFKYFDTTIDRKRYTSTKEVLDATLIHQSITGLYETRIDL |
| | | | SQLGGDSGGSSGGSSGSETPGTSESATPESSGGSSGGSSTAAIDILAPQQCAEPITWKSDEPVWVDQWPLTNDKLAAAQQLVQEQLEAGHITESSSPWNTPIFVIK |
| | | | KKSGKWRLLQDLRAVNATMVLMGALQPGLPSPVAIPQGYLKIIIDLKDCFFSIPLHPSDQKRFAFSLPSTNFKEPMQRFQWKVLPQGMANSPTLCQKYVATAIHKV |
| | | | RHAWKQMYIIHYMDDILIAGKDGQQVLQCFDQLKQELTAAGLHIAPEKVQLQDPYTYLGFELNGPKITNQKAVIRKDKLQTLNDFQKLLGDINWLRPYLKLTTGDL |
| | | | KPLFDTLKGDSDPNSHRSLSKEALASLEKVETAIAEQFVTHINYSLPLIFLIFNTALTPTGLFWQDNPIMWIHLPASPKKVLLPYYDAIADLIILGRDHSKKYFGI |
| | | | EPSTIIQPYSKSQIDWLMQNTEMWPIACASFVGILDNHYPPNKLIQFCKLHTFVFPQIISKTPLNNALLVFTDGSSTGMAAYTLTDTTIKFQTNLNSAQLVELQAL |
| | | | IAVLSAFPNQPLNIYTDSAYLAHSIPLLETVAQIKHISETAKLFLQCQQLIYNRSIPFYIGHVRAHSGLPGPIAQGNQRADLATKIVASNINTN |
| MPMV | 2 | 3710 | MKRTADGSEFESPKKKRKVDKKYSIGLDIGTNSVGWAVITDEYKVPSKKFKVLGNTDRHSIKKNLIGALLFDSGETAEATRLKRTARRRYTRRKNRICYLQEIFSN |
| | | | EMAKVDDSFFHRLEESFLVEEDKKHERHPIFGNIVDEVAYHEKYPTIYHLRKKLVDSTDKADLRLIYLALAHMIKFRGHFLIEGDLNPDNSDVDKLFIQLVQTYNQ |
| | | | LFEENPINASGVDAKAILSARLSKSRRLENLIAQLPGEKKNGLFGNLIALSLGLTPNFKSNFDLAEDAKLQLSKDTYDDDLDNLLAQIGDQYADLFLAAKNLSDAI |
| | | | LLSDILRVNTEITKAPLSASMIKRYDEHHQDLTLLKALVRQQLPEKYKEIFFDQSKNGYAGYIDGGASQEEFYKFIKPILEKMDGTEELLVKLNREDLLRKQRTFD |
| | | | NGSIPHQIHLGELHAILRRQEDFYPFLKDNREKIEKILTFRIPYYVGPLARGNSRFAWMTRKSEETITPWNFEEVVDKGASAQSFIERMTNFDKNLPNEKVLPKHS |
| | | | LLYEYFTVYNELTKVKYVTEGMRKPAFLSGEQKKAIVDLLFKTNRKVTVKQLKEDYFKKIECFDSVEISGVEDRFNASLGTYHDLLKIIKDKDFLDNEENEDILED |
| | | | IVLTLTLFEDREMIEERLKTYAHLFDDKVMKQLKRRRYTGWGRLSRKLINGIRDKQSGKTILDFLKSDGFANRNFMQLIHDDSLTFKEDIQKAQVSGQGDSLHEHI |
| | | | ANLAGSPAIKKGILQTVKVVDELVKVMGRHKPENIVIEMARENQTTQKGQKNSRERMKRIEEGIKELGSQILKEHPVENTQLQNEKLYLYYLQNGRDMYVDQELDI |
| | | | NRLSDYDVDHIVPQSFLKDDSIDNKVLTRSDKARGKSDNVPSEEVVKKMKNYWRQLLNAKLITQRKFDNLTKAERGGLSELDKAGFIKRQLVETRQITKHVAQILD |
| | | | SRMNTKYDENDKLIREVKVITLKSKLVSDFRKDFQFYKVREINNYHHAHDAYLNAVVGTALIKKYPKLESEFVYGDYKVYDVRKMIAKSEQEIGKATAKYFFYSNI |
| | | | MNFFKTEITLANGEIRKRPLIETNGETGEIVWDKGRDFATVRKVLSMPQVNIVKKTEVQTGGFSKESILPKRNSDKLIARKKDWDPKKYGGFDSPTVAYSVLVVAK |
| | | | VEKGKSKKLKSVKELLGITIMERSSFEKNPIDFLEAKGYKEVKKDLIIKLPKYSLFELENGRKRMLASAGELQKGNELALPSKYVNFLYLASHYEKLKGSPEDNEQ |
| | | | KQLFVEQHKHYLDEIIEQISEFSKRVILADANLDKVLSAYNKHRDKPIREQAENIIHLFTLTNLGAPAAFKYFDTTIDRKRYTSTKEVLDATLIHQSITGLYETRI |
| | | | DLSQLGGDSGGSSGGSSGSETPGTSESATPESSGGSSGGSSTAAIDILAPQQCAEPITWKSDEPVWVDQWPLTNDKLAAAQQLVQEQLEAGHITESSSPWNTPIFV |
| | | | IKKKSGKWRLLQDLRAVNATMVLMGALQPGLPSPVAIPQGYLKIIIDLKDCFFSIPLHPSDQKRFAFSLPSTNFKEPMQRFQWKVLPQGMANSPTLCQKYVATAIH |
| | | | KVRHAWKQMYIIHYMDDILIAGKDGQQVLQCFDQLKQELTAAGLHIAPEKVQLQDPYTYLGFELNGPKITNQKAVIRKDKLQTLNDFQKLLGDINWLRPYLKLTTG |
| | | | DLKPLFDTLKGDSDPNSHRSLSKEALASLEKVETAIAEQFVTHINYSLPLIFLIFNTALTPTGLFWQDNPIMWIHLPASPKKVLLPYYDAIADLIILGRDHSKKYF |
| | | | GIEPSTIIQPYSKSQIDWLMQNTEMWPIACASFVGILDNHYPPNKLIQFCKLHTFVFPQIISKTPLNNALLVFTDGSSTGMAAYTLTDTTIKFQTNLNSAQLVELQ |
| | | | ALIAVLSAFPNQPLNIYTDSAYLAHSIPLLETVAQIKHISETAKLFLQCQQLIYNRSIPFYIGHVRAHSGLPGPIAQGNQRADLATKIVASNINTNSGGSKRTADG |
| | | | SEFEPKKKRKV |
| MPMV | 3 | 3711 | MPAAKRVKLDGGDKKYSIGLDIGTNSVGWAVITDEYKVPSKKFKVLGNTDRHSIKKNLIGALLFDSGETAEATRLKRTARRRYTRRKNRICYLQEIFSNEMAKVDD |
| | | | SFFHRLEESFLVEEDKKHERHPIFGNIVDEVAYHEKYPTIYHLRKKLVDSTDKADLRLIYLALAHMIKFRGHFLIEGDLNPDNSDVDKLFIQLVQTYNQLFEENPI |
| | | | NASGVDAKAILSARLSKSRRLENLIAQLPGEKKNGLFGNLIALSLGLTPNFKSNFDLAEDAKLQLSKDTYDDDLDNLLAQIGDQYADLFLAAKNLSDAILLSDILR |
| | | | VNTEITKAPLSASMIKRYDEHHQDLTLLKALVRQQLPEKYKEIFFDQSKNGYAGYIDGGASQEEFYKFIKPILEKMDGTEELLVKLNREDLLRKQRTFDNGSIPHQ |
| | | | IHLGELHAILRRQEDFYPFLKDNREKIEKILTFRIPYYVGPLARGNSRFAWMTRKSEETITPWNFEEVVDKGASAQSFIERMTNFDKNLPNEKVLPKHSLLYEYFT |
| | | | VYNELTKVKYVTEGMRKPAFLSGEQKKAIVDLLFKTNRKVTVKQLKEDYFKKIECFDSVEISGVEDRFNASLGTYHDLLKIIKDKDFLDNEENEDILEDIVLTLTL |
| | | | FEDREMIEERLKTYAHLFDDKVMKQLKRRRYTGWGRLSRKLINGIRDKQSGKTILDFLKSDGFANRNFMQLIHDDSLTFKEDIQKAQVSGQGDSLHEHIANLAGSP |
| | | | AIKKGILQTVKVVDELVKVMGRHKPENIVIEMARENQTTQKGQKNSRERMKRIEEGIKELGSQILKEHPVENTQLQNEKLYLYYLQNGRDMYVDQELDINRLSDYD |
| | | | VDHIVPQSFLKDDSIDNKVLTRSDKARGKSDNVPSEEVVKKMKNYWRQLLNAKLITQRKFDNLTKAERGGLSELDKAGFIKRQLVETRQITKHVAQILDSRMNTKY |
| | | | DENDKLIREVKVITLKSKLVSDFRKDFQFYKVREINNYHHAHDAYLNAVVGTALIKKYPKLESEFVYGDYKVYDVRKMIAKSEQEIGKATAKYFFYSNIMNFFKTE |
| | | | ITLANGEIRKRPLIETNGETGEIVWDKGRDFATVRKVLSMPQVNIVKKTEVQTGGFSKESILPKRNSDKLIARKKDWDPKKYGGFDSPTVAYSVLVVAKVEKGKSK |
| | | | KLKSVKELLGITIMERSSFEKNPIDFLEAKGYKEVKKDLIIKLPKYSLFELENGRKRMLASAGELQKGNELALPSKYVNFLYLASHYEKLKGSPEDNEQKQLFVEQ |
| | | | HKHYLDEIIEQISEFSKRVILADANLDKVLSAYNKHRDKPIREQAENIIHLFTLTNLGAPAAFKYFDTTIDRKRYTSTKEVLDATLIHQSITGLYETRIDLSQLGG |
| | | | DSGGSSGGSSGSETPGTSESATPESSGGSSGGSSTAAIDILAPQQCAEPITWKSDEPVWVDQWPLTNDKLAAAQQLVQEQLEAGHITESSSPWNTPIFVIKKKSGK |
| | | | WRLLQDLRAVNATMVLMGALQPGLPSPVAIPQGYLKIIIDLKDCFFSIPLHPSDQKRFAFSLPSTNFKEPMQRFQWKVLPQGMANSPTLCQKYVATAIHKVRHAWK |
| | | | QMYIIHYMDDILIAGKDGQQVLQCFDQLKQELTAAGLHIAPEKVQLQDPYTYLGFELNGPKITNQKAVIRKDKLQTLNDFQKLLGDINWLRPYLKLTTGDLKPLFD |
| | | | TLKGDSDPNSHRSLSKEALASLEKVETAIAEQFVTHINYSLPLIFLIFNTALTPTGLFWQDNPIMWIHLPASPKKVLLPYYDAIADLIILGRDHSKKYFGIEPSTI |
| | | | IQPYSKSQIDWLMQNTEMWPIACASFVGILDNHYPPNKLIQFCKLHTFVFPQIISKTPLNNALLVFTDGSSTGMAAYTLTDTTIKFQTNLNSAQLVELQALIAVLS |
| | | | AFPNQPLNIYTDSAYLAHSIPLLETVAQIKHISETAKLFLQCQQLIYNRSIPFYIGHVRAHSGLPGPIAQGNQRADLATKIVASNINTNSGGSKRTADGSEFEKRT |
| | | | ADGSEFESPKKKAKVE |
| MPMV | 4 | 3712 | MPAAKRVKLDGGDKKYSIGLDIGTNSVGWAVITDEYKVPSKKFKVLGNTDRHSIKKNLIGALLFDSGETAEATRLKRTARRRYTRRKNRICYLQEIFSNEMAKVDD |
| | | | SFFHRLEESFLVEEDKKHERHPIFGNIVDEVAYHEKYPTIYHLRKKLVDSTDKADLRLIYLALAHMIKFRGHFLIEGDLNPDNSDVDKLFIQLVQTYNQLFEENPI |
| | | | NASGVDAKAILSARLSKSRRLENLIAQLPGEKKNGLFGNLIALSLGLTPNFKSNFDLAEDAKLQLSKDTYDDDLDNLLAQIGDQYADLFLAAKNLSDAILLSDILR |
| | | | VNTEITKAPLSASMIKRYDEHHQDLTLLKALVRQQLPEKYKEIFFDQSKNGYAGYIDGGASQEEFYKFIKPILEKMDGTEELLVKLNREDLLRKQRTFDNGSIPHQ |
| | | | IHLGELHAILRRQEDFYPFLKDNREKIEKILTFRIPYYVGPLARGNSRFAWMTRKSEETITPWNFEEVVDKGASAQSFIERMTNFDKNLPNEKVLPKHSLLYEYFT |
| | | | VYNELTKVKYVTEGMRKPAFLSGEQKKAIVDLLFKTNRKVTVKQLKEDYFKKIECFDSVEISGVEDRFNASLGTYHDLLKIIKDKDFLDNEENEDILEDIVLTLTL |
| | | | FEDREMIEERLKTYAHLFDDKVMKQLKRRRYTGWGRLSRKLINGIRDKQSGKTILDFLKSDGFANRNFMQLIHDDSLTFKEDIQKAQVSGQGDSLHEHIANLAGSP |
| | | | AIKKGILQTVKVVDELVKVMGRHKPENIVIEMARENQTTQKGQKNSRERMKRIEEGIKELGSQILKEHPVENTQLQNEKLYLYYLQNGRDMYVDQELDINRLSDYD |
| | | | VDHIVPQSFLKDDSIDNKVLTRSDKARGKSDNVPSEEVVKKMKNYWRQLLNAKLITQRKFDNLTKAERGGLSELDKAGFIKRQLVETRQITKHVAQILDSRMNTKY |
| | | | DENDKLIREVKVITLKSKLVSDFRKDFQFYKVREINNYHHAHDAYLNAVVGTALIKKYPKLESEFVYGDYKVYDVRKMIAKSEQEIGKATAKYFFYSNIMNFFKTE |
| | | | ITLANGEIRKRPLIETNGETGEIVWDKGRDFATVRKVLSMPQVNIVKKTEVQTGGFSKESILPKRNSDKLIARKKDWDPKKYGGFDSPTVAYSVLVVAKVEKGKSK |
| | | | KLKSVKELLGITIMERSSFEKNPIDFLEAKGYKEVKKDLIIKLPKYSLFELENGRKRMLASAGELQKGNELALPSKYVNFLYLASHYEKLKGSPEDNEQKQLFVEQ |
| | | | HKHYLDEIIEQISEFSKRVILADANLDKVLSAYNKHRDKPIREQAENIIHLFTLTNLGAPAAFKYFDTTIDRKRYTSTKEVLDATLIHQSITGLYETRIDLSQLGG |
| | | | DGGSGGSSGGSSGSETPGTSESATPESSGGSSGGSSGGMTAAIDILAPQQCAEPITWKSDEPVWVDQWPLTNDKLAAAQQLVQEQLEAGHITESSSPWNTPIFVIK |
| | | | KKSGKWRLLQDLRAVNATMVLMGALQPGLPSPVAIPQGYLKIIIDLKDCFFSIPLHPSDQKRFAFSLPSTNFKEPMQRFQWKVLPQGMANSPTLCQKYVATAIHKV |
| | | | RHAWKQMYIIHYMDDILIAGKDGQQVLQCFDQLKQELTAAGLHIAPEKVQLQDPYTYLGFELNGPKITNQKAVIRKDKLQTLNDFQKLLGDINWLRPYLKLTTGDL |
| | | | KPLFDTLKGDSDPNSHRSLSKEALASLEKVETAIAEQFVTHINYSLPLIFLIFNTALTPTGLFWQDNPIMWIHLPASPKKVLLPYYDAIADLIILGRDHSKKYFGI |
| | | | EPSTIIQPYSKSQIDWLMQNTEMWPIACASFVGILDNHYPPNKLIQFCKLHTFVFPQIISKTPLNNALLVFTDGSSTGMAAYTLTDTTIKFQTNLNSAQLVELQAL |
| | | | IAVLSAFPNQPLNIYTDSAYLAHSIPLLETVAQIKHISETAKLFLQCQQLIYNRSIPFYIGHVRAHSGLPGPIAQGNQRADLATKIVASNINTAGKRTADGSEFEK |
| | | | RTADGSEFESPKKKAKVEGSGEGRGSLLTCGDVEENPG |
| MPMV | 5 | 3713 | MPAAKRVKLDGGDKKYSIGLDIGTNSVGWAVITDEYKVPSKKFKVLGNTDRHSIKKNLIGALLFDSGETAEATRLKRTARRRYTRRKNRICYLQEIFSNEMAKVDD |
| | | | SFFHRLEESFLVEEDKKHERHPIFGNIVDEVAYHEKYPTIYHLRKKLVDSTDKADLRLIYLALAHMIKFRGHFLIEGDLNPDNSDVDKLFIQLVQTYNQLFEENPI |
| | | | NASGVDAKAILSARLSKSRRLENLIAQLPGEKKNGLFGNLIALSLGLTPNFKSNFDLAEDAKLQLSKDTYDDDLDNLLAQIGDQYADLFLAAKNLSDAILLSDILR |
| | | | VNTEITKAPLSASMIKRYDEHHQDLTLLKALVRQQLPEKYKEIFFDQSKNGYAGYIDGGASQEEFYKFIKPILEKMDGTEELLVKLNREDLLRKQRTFDNGSIPHQ |
| | | | IHLGELHAILRRQEDFYPFLKDNREKIEKILTFRIPYYVGPLARGNSRFAWMTRKSEETITPWNFEEVVDKGASAQSFIERMTNFDKNLPNEKVLPKHSLLYEYFT |
| | | | VYNELTKVKYVTEGMRKPAFLSGEQKKAIVDLLFKTNRKVTVKQLKEDYFKKIECFDSVEISGVEDRFNASLGTYHDLLKIIKDKDFLDNEENEDILEDIVLTLTL |
| | | | FEDREMIEERLKTYAHLFDDKVMKQLKRRRYTGWGRLSRKLINGIRDKQSGKTILDFLKSDGFANRNFMQLIHDDSLTFKEDIQKAQVSGQGDSLHEHIANLAGSP |
| | | | AIKKGILQTVKVVDELVKVMGRHKPENIVIEMARENQTTQKGQKNSRERMKRIEEGIKELGSQILKEHPVENTQLQNEKLYLYYLQNGRDMYVDQELDINRLSDYD |
| | | | VDHIVPQSFLKDDSIDNKVLTRSDKARGKSDNVPSEEVVKKMKNYWRQLLNAKLITQRKFDNLTKAERGGLSELDKAGFIKRQLVETRQITKHVAQILDSRMNTKY |
| | | | DENDKLIREVKVITLKSKLVSDFRKDFQFYKVREINNYHHAHDAYLNAVVGTALIKKYPKLESEFVYGDYKVYDVRKMIAKSEQEIGKATAKYFFYSNIMNFFKTE |
| | | | ITLANGEIRKRPLIETNGETGEIVWDKGRDFATVRKVLSMPQVNIVKKTEVQTGGFSKESILPKRNSDKLIARKKDWDPKKYGGFDSPTVAYSVLVVAKVEKGKSK |
| | | | KLKSVKELLGITIMERSSFEKNPIDFLEAKGYKEVKKDLIIKLPKYSLFELENGRKRMLASAGELQKGNELALPSKYVNFLYLASHYEKLKGSPEDNEQKQLFVEQ |
| | | | HKHYLDEIIEQISEFSKRVILADANLDKVLSAYNKHRDKPIREQAENIIHLFTLTNLGAPAAFKYFDTTIDRKRYTSTKEVLDATLIHQSITGLYETRIDLSQLGG |
| | | | DGGGSSGSSGSSGSSGSSGGMTAAIDILAPQQCAEPITWKSDEPVWVDQWPLTNDKLAAAQQLVQEQLEAGHITESSSPWNTPIFVIKKKSGKWRLLQDLRAVNAT |
| | | | MVLMGALQPGLPSPVAIPQGYLKIIIDLKDCFFSIPLHPSDQKRFAFSLPSTNFKEPMQRFQWKVLPQGMANSPTLCQKYVATAIHKVRHAWKQMYIIHYMDDILI |
| | | | AGKDGQQVLQCFDQLKQELTAAGLHIAPEKVQLQDPYTYLGFELNGPKITNQKAVIRKDKLQTLNDFQKLLGDINWLRPYLKLTTGDLKPLFDTLKGDSDPNSHRS |
| | | | LSKEALASLEKVETAIAEQFVTHINYSLPLIFLIFNTALTPTGLFWQDNPIMWIHLPASPKKVLLPYYDAIADLIILGRDHSKKYFGIEPSTIIQPYSKSQIDWLM |
| | | | QNTEMWPIACASFVGILDNHYPPNKLIQFCKLHTFVFPQIISKTPLNNALLVFTDGSSTGMAAYTLTDTTIKFQTNLNSAQLVELQALIAVLSAFPNQPLNIYTDS |
| | | | AYLAHSIPLLETVAQIKHISETAKLFLQCQQLIYNRSIPFYIGHVRAHSGLPGPIAQGNQRADLATKIVASNINTAGKRTADGSEFEKRTADGSEFESPKKKAKVE |
| | | | GSGEGRGSLLTCGDVEENPG |
| MPMV | 6 | 3714 | MPAAKRVKLDGGDKKYSIGLDIGTNSVGWAVITDEYKVPSKKFKVLGNTDRHSIKKNLIGALLFDSGETAEATRLKRTARRRYTRRKNRICYLQEIFSNEMAKVDD |
| | | | SFFHRLEESFLVEEDKKHERHPIFGNIVDEVAYHEKYPTIYHLRKKLVDSTDKADLRLIYLALAHMIKFRGHFLIEGDLNPDNSDVDKLFIQLVQTYNQLFEENPI |
| | | | NASGVDAKAILSARLSKSRRLENLIAQLPGEKKNGLFGNLIALSLGLTPNFKSNFDLAEDAKLQLSKDTYDDDLDNLLAQIGDQYADLFLAAKNLSDAILLSDILR |
| | | | VNTEITKAPLSASMIKRYDEHHQDLTLLKALVRQQLPEKYKEIFFDQSKNGYAGYIDGGASQEEFYKFIKPILEKMDGTEELLVKLNREDLLRKQRTFDNGSIPHQ |
| | | | IHLGELHAILRRQEDFYPFLKDNREKIEKILTFRIPYYVGPLARGNSRFAWMTRKSEETITPWNFEEVVDKGASAQSFIERMTNFDKNLPNEKVLPKHSLLYEYFT |
| | | | VYNELTKVKYVTEGMRKPAFLSGEQKKAIVDLLFKTNRKVTVKQLKEDYFKKIECFDSVEISGVEDRFNASLGTYHDLLKIIKDKDFLDNEENEDILEDIVLTLTL |
| | | | FEDREMIEERLKTYAHLFDDKVMKQLKRRRYTGWGRLSRKLINGIRDKQSGKTILDFLKSDGFANRNFMQLIHDDSLTFKEDIQKAQVSGQGDSLHEHIANLAGSP |
| | | | AIKKGILQTVKVVDELVKVMGRHKPENIVIEMARENQTTQKGQKNSRERMKRIEEGIKELGSQILKEHPVENTQLQNEKLYLYYLQNGRDMYVDQELDINRLSDYD |
| | | | VDHIVPQSFLKDDSIDNKVLTRSDKARGKSDNVPSEEVVKKMKNYWRQLLNAKLITQRKFDNLTKAERGGLSELDKAGFIKRQLVETRQITKHVAQILDSRMNTKY |
| | | | DENDKLIREVKVITLKSKLVSDFRKDFQFYKVREINNYHHAHDAYLNAVVGTALIKKYPKLESEFVYGDYKVYDVRKMIAKSEQEIGKATAKYFFYSNIMNFFKTE |
| | | | ITLANGEIRKRPLIETNGETGEIVWDKGRDFATVRKVLSMPQVNIVKKTEVQTGGFSKESILPKRNSDKLIARKKDWDPKKYGGFDSPTVAYSVLVVAKVEKGKSK |
| | | | KLKSVKELLGITIMERSSFEKNPIDFLEAKGYKEVKKDLIIKLPKYSLFELENGRKRMLASAGELQKGNELALPSKYVNFLYLASHYEKLKGSPEDNEQKQLFVEQ |
| | | | HKHYLDEIIEQISEFSKRVILADANLDKVLSAYNKHRDKPIREQAENIIHLFTLTNLGAPAAFKYFDTTIDRKRYTSTKEVLDATLIHQSITGLYETRIDLSQLGG |
| | | | DGGEAAAKEAAAKEAAAKEAAAKEAAAKGGMTAAIDILAPQQCAEPITWKSDEPVWVDQWPLTNDKLAAAQQLVQEQLEAGHITESSSPWNTPIFVIKKKSGKWRL |
| | | | LQDLRAVNATMVLMGALQPGLPSPVAIPQGYLKIIIDLKDCFFSIPLHPSDQKRFAFSLPSTNFKEPMQRFQWKVLPQGMANSPTLCQKYVATAIHKVRHAWKQMY |
| | | | IIHYMDDILIAGKDGQQVLQCFDQLKQELTAAGLHIAPEKVQLQDPYTYLGFELNGPKITNQKAVIRKDKLQTLNDFQKLLGDINWLRPYLKLTTGDLKPLFDTLK |
| | | | GDSDPNSHRSLSKEALASLEKVETAIAEQFVTHINYSLPLIFLIFNTALTPTGLFWQDNPIMWIHLPASPKKVLLPYYDAIADLIILGRDHSKKYFGIEPSTIIQP |
| | | | YSKSQIDWLMQNTEMWPIACASFVGILDNHYPPNKLIQFCKLHTFVFPQIISKTPLNNALLVFTDGSSTGMAAYTLTDTTIKFQTNLNSAQLVELQALIAVLSAFP |
| | | | NQPLNIYTDSAYLAHSIPLLETVAQIKHISETAKLFLQCQQLIYNRSIPFYIGHVRAHSGLPGPIAQGNQRADLATKIVASNINTAGKRTADGSEFEKRTADGSEF |
| | | | ESPKKKAKVEGSGEGRGSLLTCGDVEENPG |
| MPMV | 7 | 3715 | MPAAKRVKLDGGDKKYSIGLDIGTNSVGWAVITDEYKVPSKKFKVLGNTDRHSIKKNLIGALLFDSGETAEATRLKRTARRRYTRRKNRICYLQEIFSNEMAKVDD |
| | | | SFFHRLEESFLVEEDKKHERHPIFGNIVDEVAYHEKYPTIYHLRKKLVDSTDKADLRLIYLALAHMIKFRGHFLIEGDLNPDNSDVDKLFIQLVQTYNQLFEENPI |
| | | | NASGVDAKAILSARLSKSRRLENLIAQLPGEKKNGLFGNLIALSLGLTPNFKSNFDLAEDAKLQLSKDTYDDDLDNLLAQIGDQYADLFLAAKNLSDAILLSDILR |
| | | | VNTEITKAPLSASMIKRYDEHHQDLTLLKALVRQQLPEKYKEIFFDQSKNGYAGYIDGGASQEEFYKFIKPILEKMDGTEELLVKLNREDLLRKQRTFDNGSIPHQ |
| | | | IHLGELHAILRRQEDFYPFLKDNREKIEKILTFRIPYYVGPLARGNSRFAWMTRKSEETITPWNFEEVVDKGASAQSFIERMTNFDKNLPNEKVLPKHSLLYEYFT |
| | | | VYNELTKVKYVTEGMRKPAFLSGEQKKAIVDLLFKTNRKVTVKQLKEDYFKKIECFDSVEISGVEDRFNASLGTYHDLLKIIKDKDFLDNEENEDILEDIVLTLTL |
| | | | FEDREMIEERLKTYAHLFDDKVMKQLKRRRYTGWGRLSRKLINGIRDKQSGKTILDFLKSDGFANRNFMQLIHDDSLTFKEDIQKAQVSGQGDSLHEHIANLAGSP |
| | | | AIKKGILQTVKVVDELVKVMGRHKPENIVIEMARENQTTQKGQKNSRERMKRIEEGIKELGSQILKEHPVENTQLQNEKLYLYYLQNGRDMYVDQELDINRLSDYD |
| | | | VDHIVPQSFLKDDSIDNKVLTRSDKARGKSDNVPSEEVVKKMKNYWRQLLNAKLITQRKFDNLTKAERGGLSELDKAGFIKRQLVETRQITKHVAQILDSRMNTKY |
| | | | DENDKLIREVKVITLKSKLVSDFRKDFQFYKVREINNYHHAHDAYLNAVVGTALIKKYPKLESEFVYGDYKVYDVRKMIAKSEQEIGKATAKYFFYSNIMNFFKTE |
| | | | ITLANGEIRKRPLIETNGETGEIVWDKGRDFATVRKVLSMPQVNIVKKTEVQTGGFSKESILPKRNSDKLIARKKDWDPKKYGGFDSPTVAYSVLVVAKVEKGKSK |
| | | | KLKSVKELLGITIMERSSFEKNPIDFLEAKGYKEVKKDLIIKLPKYSLFELENGRKRMLASAGELQKGNELALPSKYVNFLYLASHYEKLKGSPEDNEQKQLFVEQ |
| | | | HKHYLDEIIEQISEFSKRVILADANLDKVLSAYNKHRDKPIREQAENIIHLFTLTNLGAPAAFKYFDTTIDRKRYTSTKEVLDATLIHQSITGLYETRIDLSQLGG |
| | | | DGGEAAAKEAAAKEAAAKEAAAKEAAAKEAAAKGGMTAAIDILAPQQCAEPITWKSDEPVWVDQWPLTNDKLAAAQQLVQEQLEAGHITESSSPWNTPIFVIKKKS |
| | | | GKWRLLQDLRAVNATMVLMGALQPGLPSPVAIPQGYLKIIIDLKDCFFSIPLHPSDQKRFAFSLPSTNFKEPMQRFQWKVLPQGMANSPTLCQKYVATAIHKVRHA |
| | | | WKQMYIIHYMDDILIAGKDGQQVLQCFDQLKQELTAAGLHIAPEKVQLQDPYTYLGFELNGPKITNQKAVIRKDKLQTLNDFQKLLGDINWLRPYLKLTTGDLKPL |
| | | | FDTLKGDSDPNSHRSLSKEALASLEKVETAIAEQFVTHINYSLPLIFLIFNTALTPTGLFWQDNPIMWIHLPASPKKVLLPYYDAIADLIILGRDHSKKYFGIEPS |
| | | | TIIQPYSKSQIDWLMQNTEMWPIACASFVGILDNHYPPNKLIQFCKLHTFVFPQIISKTPLNNALLVFTDGSSTGMAAYTLTDTTIKFQTNLNSAQLVELQALIAV |
| | | | LSAFPNQPLNIYTDSAYLAHSIPLLETVAQIKHISETAKLFLQCQQLIYNRSIPFYIGHVRAHSGLPGPIAQGNQRADLATKIVASNINTAGKRTADGSEFEKRTA |
| | | | DGSEFESPKKKAKVEGSGEGRGSLLTCGDVEENPG |
| MPMV | 8 | 3716 | MPAAKRVKLDGGDKKYSIGLDIGTNSVGWAVITDEYKVPSKKFKVLGNTDRHSIKKNLIGALLFDSGETAEATRLKRTARRRYTRRKNRICYLQEIFSNEMAKVDD |
| | | | SFFHRLEESFLVEEDKKHERHPIFGNIVDEVAYHEKYPTIYHLRKKLVDSTDKADLRLIYLALAHMIKFRGHFLIEGDLNPDNSDVDKLFIQLVQTYNQLFEENPI |
| | | | NASGVDAKAILSARLSKSRRLENLIAQLPGEKKNGLFGNLIALSLGLTPNFKSNFDLAEDAKLQLSKDTYDDDLDNLLAQIGDQYADLFLAAKNLSDAILLSDILR |
| | | | VNTEITKAPLSASMIKRYDEHHQDLTLLKALVRQQLPEKYKEIFFDQSKNGYAGYIDGGASQEEFYKFIKPILEKMDGTEELLVKLNREDLLRKQRTFDNGSIPHQ |
| | | | IHLGELHAILRRQEDFYPFLKDNREKIEKILTFRIPYYVGPLARGNSRFAWMTRKSEETITPWNFEEVVDKGASAQSFIERMTNFDKNLPNEKVLPKHSLLYEYFT |
| | | | VYNELTKVKYVTEGMRKPAFLSGEQKKAIVDLLFKTNRKVTVKQLKEDYFKKIECFDSVEISGVEDRFNASLGTYHDLLKIIKDKDFLDNEENEDILEDIVLTLTL |
| | | | FEDREMIEERLKTYAHLFDDKVMKQLKRRRYTGWGRLSRKLINGIRDKQSGKTILDFLKSDGFANRNFMQLIHDDSLTFKEDIQKAQVSGQGDSLHEHIANLAGSP |
| | | | AIKKGILQTVKVVDELVKVMGRHKPENIVIEMARENQTTQKGQKNSRERMKRIEEGIKELGSQILKEHPVENTQLQNEKLYLYYLQNGRDMYVDQELDINRLSDYD |
| | | | VDHIVPQSFLKDDSIDNKVLTRSDKARGKSDNVPSEEVVKKMKNYWRQLLNAKLITQRKFDNLTKAERGGLSELDKAGFIKRQLVETRQITKHVAQILDSRMNTKY |
| | | | DENDKLIREVKVITLKSKLVSDFRKDFQFYKVREINNYHHAHDAYLNAVVGTALIKKYPKLESEFVYGDYKVYDVRKMIAKSEQEIGKATAKYFFYSNIMNFFKTE |
| | | | ITLANGEIRKRPLIETNGETGEIVWDKGRDFATVRKVLSMPQVNIVKKTEVQTGGFSKESILPKRNSDKLIARKKDWDPKKYGGFDSPTVAYSVLVVAKVEKGKSK |
| | | | KLKSVKELLGITIMERSSFEKNPIDFLEAKGYKEVKKDLIIKLPKYSLFELENGRKRMLASAGELQKGNELALPSKYVNFLYLASHYEKLKGSPEDNEQKQLFVEQ |
| | | | HKHYLDEIIEQISEFSKRVILADANLDKVLSAYNKHRDKPIREQAENIIHLFTLTNLGAPAAFKYFDTTIDRKRYTSTKEVLDATLIHQSITGLYETRIDLSQLGG |
| | | | DGGEAAAKGSSGGMTAAIDILAPQQCAEPITWKSDEPVWVDQWPLTNDKLAAAQQLVQEQLEAGHITESSSPWNTPIFVIKKKSGKWRLLQDLRAVNATMVLMGAL |
| | | | QPGLPSPVAIPQGYLKIIIDLKDCFFSIPLHPSDQKRFAFSLPSTNFKEPMQRFQWKVLPQGMANSPTLCQKYVATAIHKVRHAWKQMYIIHYMDDILIAGKDGQQ |
| | | | VLQCFDQLKQELTAAGLHIAPEKVQLQDPYTYLGFELNGPKITNQKAVIRKDKLQTLNDFQKLLGDINWLRPYLKLTTGDLKPLFDTLKGDSDPNSHRSLSKEALA |
| | | | SLEKVETAIAEQFVTHINYSLPLIFLIFNTALTPTGLFWQDNPIMWIHLPASPKKVLLPYYDAIADLIILGRDHSKKYFGIEPSTIIQPYSKSQIDWLMQNTEMWP |
| | | | IACASFVGILDNHYPPNKLIQFCKLHTFVFPQIISKTPLNNALLVFTDGSSTGMAAYTLTDTTIKFQTNLNSAQLVELQALIAVLSAFPNQPLNIYTDSAYLAHSI |
| | | | PLLETVAQIKHISETAKLFLQCQQLIYNRSIPFYIGHVRAHSGLPGPIAQGNQRADLATKIVASNINTAGKRTADGSEFEKRTADGSEFESPKKKAKVEGSGEGRG |
| | | | SLLTCGDVEENPG |
| MPMV | 9 | 3717 | MPAAKRVKLDGGDKKYSIGLDIGTNSVGWAVITDEYKVPSKKFKVLGNTDRHSIKKNLIGALLFDSGETAEATRLKRTARRRYTRRKNRICYLQEIFSNEMAKVDD |
| | | | SFFHRLEESFLVEEDKKHERHPIFGNIVDEVAYHEKYPTIYHLRKKLVDSTDKADLRLIYLALAHMIKFRGHFLIEGDLNPDNSDVDKLFIQLVQTYNQLFEENPI |
| | | | NASGVDAKAILSARLSKSRRLENLIAQLPGEKKNGLFGNLIALSLGLTPNFKSNFDLAEDAKLQLSKDTYDDDLDNLLAQIGDQYADLFLAAKNLSDAILLSDILR |
| | | | VNTEITKAPLSASMIKRYDEHHQDLTLLKALVRQQLPEKYKEIFFDQSKNGYAGYIDGGASQEEFYKFIKPILEKMDGTEELLVKLNREDLLRKQRTFDNGSIPHQ |
| | | | IHLGELHAILRRQEDFYPFLKDNREKIEKILTFRIPYYVGPLARGNSRFAWMTRKSEETITPWNFEEVVDKGASAQSFIERMTNFDKNLPNEKVLPKHSLLYEYFT |
| | | | VYNELTKVKYVTEGMRKPAFLSGEQKKAIVDLLFKTNRKVTVKQLKEDYFKKIECFDSVEISGVEDRFNASLGTYHDLLKIIKDKDFLDNEENEDILEDIVLTLTL |
| | | | FEDREMIEERLKTYAHLFDDKVMKQLKRRRYTGWGRLSRKLINGIRDKQSGKTILDFLKSDGFANRNFMQLIHDDSLTFKEDIQKAQVSGQGDSLHEHIANLAGSP |
| | | | AIKKGILQTVKVVDELVKVMGRHKPENIVIEMARENQTTQKGQKNSRERMKRIEEGIKELGSQILKEHPVENTQLQNEKLYLYYLQNGRDMYVDQELDINRLSDYD |
| | | | VDHIVPQSFLKDDSIDNKVLTRSDKARGKSDNVPSEEVVKKMKNYWRQLLNAKLITQRKFDNLTKAERGGLSELDKAGFIKRQLVETRQITKHVAQILDSRMNTKY |
| | | | DENDKLIREVKVITLKSKLVSDFRKDFQFYKVREINNYHHAHDAYLNAVVGTALIKKYPKLESEFVYGDYKVYDVRKMIAKSEQEIGKATAKYFFYSNIMNFFKTE |
| | | | ITLANGEIRKRPLIETNGETGEIVWDKGRDFATVRKVLSMPQVNIVKKTEVQTGGFSKESILPKRNSDKLIARKKDWDPKKYGGFDSPTVAYSVLVVAKVEKGKSK |
| | | | KLKSVKELLGITIMERSSFEKNPIDFLEAKGYKEVKKDLIIKLPKYSLFELENGRKRMLASAGELQKGNELALPSKYVNFLYLASHYEKLKGSPEDNEQKQLFVEQ |
| | | | HKHYLDEIIEQISEFSKRVILADANLDKVLSAYNKHRDKPIREQAENIIHLFTLTNLGAPAAFKYFDTTIDRKRYTSTKEVLDATLIHQSITGLYETRIDLSQLGG |
| | | | DGGPAPEAAAKGGMTAAIDILAPQQCAEPITWKSDEPVWVDQWPLTNDKLAAAQQLVQEQLEAGHITESSSPWNTPIFVIKKKSGKWRLLQDLRAVNATMVLMGAL |
| | | | QPGLPSPVAIPQGYLKIIIDLKDCFFSIPLHPSDQKRFAFSLPSTNFKEPMQRFQWKVLPQGMANSPTLCQKYVATAIHKVRHAWKQMYIIHYMDDILIAGKDGQQ |
| | | | VLQCFDQLKQELTAAGLHIAPEKVQLQDPYTYLGFELNGPKITNQKAVIRKDKLQTLNDFQKLLGDINWLRPYLKLTTGDLKPLFDTLKGDSDPNSHRSLSKEALA |
| | | | SLEKVETAIAEQFVTHINYSLPLIFLIFNTALTPTGLFWQDNPIMWIHLPASPKKVLLPYYDAIADLIILGRDHSKKYFGIEPSTIIQPYSKSQIDWLMQNTEMWP |
| | | | IACASFVGILDNHYPPNKLIQFCKLHTFVFPQIISKTPLNNALLVFTDGSSTGMAAYTLTDTTIKFQTNLNSAQLVELQALIAVLSAFPNQPLNIYTDSAYLAHSI |
| | | | PLLETVAQIKHISETAKLFLQCQQLIYNRSIPFYIGHVRAHSGLPGPIAQGNQRADLATKIVASNINTAGKRTADGSEFEKRTADGSEFESPKKKAKVEGSGEGRG |
| | | | SLLTCGDVEENPG |
| MPMV | 10 | 3718 | MPAAKRVKLDGGDKKYSIGLDIGTNSVGWAVITDEYKVPSKKFKVLGNTDRHSIKKNLIGALLFDSGETAEATRLKRTARRRYTRRKNRICYLQEIFSNEMAKVDD |
| | | | SFFHRLEESFLVEEDKKHERHPIFGNIVDEVAYHEKYPTIYHLRKKLVDSTDKADLRLIYLALAHMIKFRGHFLIEGDLNPDNSDVDKLFIQLVQTYNQLFEENPI |
| | | | NASGVDAKAILSARLSKSRRLENLIAQLPGEKKNGLFGNLIALSLGLTPNFKSNFDLAEDAKLQLSKDTYDDDLDNLLAQIGDQYADLFLAAKNLSDAILLSDILR |
| | | | VNTEITKAPLSASMIKRYDEHHQDLTLLKALVRQQLPEKYKEIFFDQSKNGYAGYIDGGASQEEFYKFIKPILEKMDGTEELLVKLNREDLLRKQRTFDNGSIPHQ |
| | | | IHLGELHAILRRQEDFYPFLKDNREKIEKILTFRIPYYVGPLARGNSRFAWMTRKSEETITPWNFEEVVDKGASAQSFIERMTNFDKNLPNEKVLPKHSLLYEYFT |
| | | | VYNELTKVKYVTEGMRKPAFLSGEQKKAIVDLLFKTNRKVTVKQLKEDYFKKIECFDSVEISGVEDRFNASLGTYHDLLKIIKDKDFLDNEENEDILEDIVLTLTL |
| | | | FEDREMIEERLKTYAHLFDDKVMKQLKRRRYTGWGRLSRKLINGIRDKQSGKTILDFLKSDGFANRNFMQLIHDDSLTFKEDIQKAQVSGQGDSLHEHIANLAGSP |
| | | | AIKKGILQTVKVVDELVKVMGRHKPENIVIEMARENQTTQKGQKNSRERMKRIEEGIKELGSQILKEHPVENTQLQNEKLYLYYLQNGRDMYVDQELDINRLSDYD |
| | | | VDHIVPQSFLKDDSIDNKVLTRSDKARGKSDNVPSEEVVKKMKNYWRQLLNAKLITQRKFDNLTKAERGGLSELDKAGFIKRQLVETRQITKHVAQILDSRMNTKY |
| | | | DENDKLIREVKVITLKSKLVSDFRKDFQFYKVREINNYHHAHDAYLNAVVGTALIKKYPKLESEFVYGDYKVYDVRKMIAKSEQEIGKATAKYFFYSNIMNFFKTE |
| | | | ITLANGEIRKRPLIETNGETGEIVWDKGRDFATVRKVLSMPQVNIVKKTEVQTGGFSKESILPKRNSDKLIARKKDWDPKKYGGFDSPTVAYSVLVVAKVEKGKSK |
| | | | KLKSVKELLGITIMERSSFEKNPIDFLEAKGYKEVKKDLIIKLPKYSLFELENGRKRMLASAGELQKGNELALPSKYVNFLYLASHYEKLKGSPEDNEQKQLFVEQ |
| | | | HKHYLDEIIEQISEFSKRVILADANLDKVLSAYNKHRDKPIREQAENIIHLFTLTNLGAPAAFKYFDTTIDRKRYTSTKEVLDATLIHQSITGLYETRIDLSQLGG |
| | | | DGGPAPGGGGGSGGMTAAIDILAPQQCAEPITWKSDEPVWVDQWPLTNDKLAAAQQLVQEQLEAGHITESSSPWNTPIFVIKKKSGKWRLLQDLRAVNATMVLMGA |
| | | | LQPGLPSPVAIPQGYLKIIIDLKDCFFSIPLHPSDQKRFAFSLPSTNFKEPMQRFQWKVLPQGMANSPTLCQKYVATAIHKVRHAWKQMYIIHYMDDILIAGKDGQ |
| | | | QVLQCFDQLKQELTAAGLHIAPEKVQLQDPYTYLGFELNGPKITNQKAVIRKDKLQTLNDFQKLLGDINWLRPYLKLTTGDLKPLFDTLKGDSDPNSHRSLSKEAL |
| | | | ASLEKVETAIAEQFVTHINYSLPLIFLIFNTALTPTGLFWQDNPIMWIHLPASPKKVLLPYYDAIADLIILGRDHSKKYFGIEPSTIIQPYSKSQIDWLMQNTEMW |
| | | | PIACASFVGILDNHYPPNKLIQFCKLHTFVFPQIISKTPLNNALLVFTDGSSTGMAAYTLTDTTIKFQTNLNSAQLVELQALIAVLSAFPNQPLNIYTDSAYLAHS |
| | | | IPLLETVAQIKHISETAKLFLQCQQLIYNRSIPFYIGHVRAHSGLPGPIAQGNQRADLATKIVASNINTAGKRTADGSEFEKRTADGSEFESPKKKAKVEGSGEGR |
| | | | GSLLTCGDVEENPG |
| MPMV | 11 | 3719 | MPAAKRVKLDGGDKKYSIGLDIGTNSVGWAVITDEYKVPSKKFKVLGNTDRHSIKKNLIGALLFDSGETAEATRLKRTARRRYTRRKNRICYLQEIFSNEMAKVDD |
| | | | SFFHRLEESFLVEEDKKHERHPIFGNIVDEVAYHEKYPTIYHLRKKLVDSTDKADLRLIYLALAHMIKFRGHFLIEGDLNPDNSDVDKLFIQLVQTYNQLFEENPI |
| | | | NASGVDAKAILSARLSKSRRLENLIAQLPGEKKNGLFGNLIALSLGLTPNFKSNFDLAEDAKLQLSKDTYDDDLDNLLAQIGDQYADLFLAAKNLSDAILLSDILR |
| | | | VNTEITKAPLSASMIKRYDEHHQDLTLLKALVRQQLPEKYKEIFFDQSKNGYAGYIDGGASQEEFYKFIKPILEKMDGTEELLVKLNREDLLRKQRTFDNGSIPHQ |
| | | | IHLGELHAILRRQEDFYPFLKDNREKIEKILTFRIPYYVGPLARGNSRFAWMTRKSEETITPWNFEEVVDKGASAQSFIERMTNFDKNLPNEKVLPKHSLLYEYFT |
| | | | VYNELTKVKYVTEGMRKPAFLSGEQKKAIVDLLFKTNRKVTVKQLKEDYFKKIECFDSVEISGVEDRFNASLGTYHDLLKIIKDKDFLDNEENEDILEDIVLTLTL |
| | | | FEDREMIEERLKTYAHLFDDKVMKQLKRRRYTGWGRLSRKLINGIRDKQSGKTILDFLKSDGFANRNFMQLIHDDSLTFKEDIQKAQVSGQGDSLHEHIANLAGSP |
| | | | AIKKGILQTVKVVDELVKVMGRHKPENIVIEMARENQTTQKGQKNSRERMKRIEEGIKELGSQILKEHPVENTQLQNEKLYLYYLQNGRDMYVDQELDINRLSDYD |
| | | | VDHIVPQSFLKDDSIDNKVLTRSDKARGKSDNVPSEEVVKKMKNYWRQLLNAKLITQRKFDNLTKAERGGLSELDKAGFIKRQLVETRQITKHVAQILDSRMNTKY |
| | | | DENDKLIREVKVITLKSKLVSDFRKDFQFYKVREINNYHHAHDAYLNAVVGTALIKKYPKLESEFVYGDYKVYDVRKMIAKSEQEIGKATAKYFFYSNIMNFFKTE |
| | | | ITLANGEIRKRPLIETNGETGEIVWDKGRDFATVRKVLSMPQVNIVKKTEVQTGGFSKESILPKRNSDKLIARKKDWDPKKYGGFDSPTVAYSVLVVAKVEKGKSK |
| | | | KLKSVKELLGITIMERSSFEKNPIDFLEAKGYKEVKKDLIIKLPKYSLFELENGRKRMLASAGELQKGNELALPSKYVNFLYLASHYEKLKGSPEDNEQKQLFVEQ |
| | | | HKHYLDEIIEQISEFSKRVILADANLDKVLSAYNKHRDKPIREQAENIIHLFTLTNLGAPAAFKYFDTTIDRKRYTSTKEVLDATLIHQSITGLYETRIDLSQLGG |
| | | | DGGAEAAAKEAAAKEAAAKEAAAKALEAEAAAKEAAAKEAAAKEAAAKAGGMTAAIDILAPQQCAEPITWKSDEPVWVDQWPLTNDKLAAAQQLVQEQLEAGHITE |
| | | | SSSPWNTPIFVIKKKSGKWRLLQDLRAVNATMVLMGALQPGLPSPVAIPQGYLKIIIDLKDCFFSIPLHPSDQKRFAFSLPSTNFKEPMQRFQWKVLPQGMANSPT |
| | | | LCQKYVATAIHKVRHAWKQMYIIHYMDDILIAGKDGQQVLQCFDQLKQELTAAGLHIAPEKVQLQDPYTYLGFELNGPKITNQKAVIRKDKLQTLNDFQKLLGDIN |
| | | | WLRPYLKLTTGDLKPLFDTLKGDSDPNSHRSLSKEALASLEKVETAIAEQFVTHINYSLPLIFLIFNTALTPTGLFWQDNPIMWIHLPASPKKVLLPYYDAIADLI |
| | | | ILGRDHSKKYFGIEPSTIIQPYSKSQIDWLMQNTEMWPIACASFVGILDNHYPPNKLIQFCKLHTFVFPQIISKTPLNNALLVFTDGSSTGMAAYTLTDTTIKFQT |
| | | | NLNSAQLVELQALIAVLSAFPNQPLNIYTDSAYLAHSIPLLETVAQIKHISETAKLFLQCQQLIYNRSIPFYIGHVRAHSGLPGPIAQGNQRADLATKIVASNINT |
| | | | AGKRTADGSEFEKRTADGSEFESPKKKAKVEGSGEGRGSLLTCGDVEENPG |
| BFV | 1 | 3720 | MAPKKKRKVGIHGVPAADKKYSIGLDIGTNSVGWAVITDEYKVPSKKFKVLGNTDRHSIKKNLIGALLFDSGETAEATRLKRTARRRYTRRKNRICYLQEIFSNEM |
| | | | AKVDDSFFHRLEESFLVEEDKKHERHPIFGNIVDEVAYHEKYPTIYHLRKKLVDSTDKADLRLIYLALAHMIKFRGHFLIEGDLNPDNSDVDKLFIQLVQTYNQLF |
| | | | EENPINASGVDAKAILSARLSKSRRLENLIAQLPGEKKNGLFGNLIALSLGLTPNFKSNFDLAEDAKLQLSKDTYDDDLDNLLAQIGDQYADLFLAAKNLSDAILL |
| | | | SDILRVNTEITKAPLSASMIKRYDEHHQDLTLLKALVRQQLPEKYKEIFFDQSKNGYAGYIDGGASQEEFYKFIKPILEKMDGTEELLVKLNREDLLRKQRTFDNG |
| | | | SIPHQIHLGELHAILRRQEDFYPFLKDNREKIEKILTFRIPYYVGPLARGNSRFAWMTRKSEETITPWNFEEVVDKGASAQSFIERMTNFDKNLPNEKVLPKHSLL |
| | | | YEYFTVYNELTKVKYVTEGMRKPAFLSGEQKKAIVDLLFKTNRKVTVKQLKEDYFKKIECFDSVEISGVEDRFNASLGTYHDLLKIIKDKDFLDNEENEDILEDIV |
| | | | LTLTLFEDREMIEERLKTYAHLFDDKVMKQLKRRRYTGWGRLSRKLINGIRDKQSGKTILDFLKSDGFANRNFMQLIHDDSLTFKEDIQKAQVSGQGDSLHEHIAN |
| | | | LAGSPAIKKGILQTVKVVDELVKVMGRHKPENIVIEMARENQTTQKGQKNSRERMKRIEEGIKELGSQILKEHPVENTQLQNEKLYLYYLQNGRDMYVDQELDINR |
| | | | LSDYDVDHIVPQSFLKDDSIDNKVLTRSDKARGKSDNVPSEEVVKKMKNYWRQLLNAKLITQRKFDNLTKAERGGLSELDKAGFIKRQLVETRQITKHVAQILDSR |
| | | | MNTKYDENDKLIREVKVITLKSKLVSDFRKDFQFYKVREINNYHHAHDAYLNAVVGTALIKKYPKLESEFVYGDYKVYDVRKMIAKSEQEIGKATAKYFFYSNIMN |
| | | | FFKTEITLANGEIRKRPLIETNGETGEIVWDKGRDFATVRKVLSMPQVNIVKKTEVQTGGFSKESILPKRNSDKLIARKKDWDPKKYGGFDSPTVAYSVLVVAKVE |
| | | | KGKSKKLKSVKELLGITIMERSSFEKNPIDFLEAKGYKEVKKDLIIKLPKYSLFELENGRKRMLASAGELQKGNELALPSKYVNFLYLASHYEKLKGSPEDNEQKQ |
| | | | LFVEQHKHYLDEIIEQISEFSKRVILADANLDKVLSAYNKHRDKPIREQAENIIHLFTLTNLGAPAAFKYFDTTIDRKRYTSTKEVLDATLIHQSITGLYETRIDL |
| | | | SQLGGDSGGSSGGSSGSETPGTSESATPESSGGSSGGSSNQVGHRRIEPHKIATGALKPRPQKQYHINPRAKADIQIVIDDLLRQGVLRQQNSEMNTPVYPVPKAD |
| | | | GRWRMVLDYREVNKVTPLVATQNCHSASILNTLYRGPYKSTLDLANGFWAHPIKPEDYWITAFTWGGKTYCWTVLPQGFLNSPALFNADVVDILKDIPNVQVYVDD |
| | | | VYVSSATEQEHLDILETIFNRLSTAGYIVSLKKSKLAKETVEFLGFSISQNGRGLTDSYKQKLMDLQPPTTLRQLQSILGKINFARNFLPNFAELVAPLYQLIPKA |
| | | | KGQCIPWTMDHTTQLKTIIQALNSTENLEERRPDVDLIMKVHISNTAGYIRFYNHGGQKPIAYNNALFTSTELKFTPTEKIMATIHKGLLKALDLSLGKEIHVYSA |
| | | | IASMTKLQKTPLSERKALSIRWLKWQTYFEDPRIKFHHDATLPDLQNLPVPQQDTGKEMTILPLLHYEAIFYTDGSAIRSPKPNKTHSAGMGIIQAKFEPDFRIVH |
| | | | LWSFPLGDHTAQYAEIAAFEFAIRRATGIRGPVLIVTDSNYVAKSYNEELPYWESNGFVNNKKKTLKHISKWKAIAECKNLKADIHVIHEPGHQPAEASPHAQGNA |
| | | | LADKQAVSGSYKVFS |
| BFV | 2 | 3721 | MKRTADGSEFESPKKKRKVDKKYSIGLDIGTNSVGWAVITDEYKVPSKKFKVLGNTDRHSIKKNLIGALLFDSGETAEATRLKRTARRRYTRRKNRICYLQEIFSN |
| | | | EMAKVDDSFFHRLEESFLVEEDKKHERHPIFGNIVDEVAYHEKYPTIYHLRKKLVDSTDKADLRLIYLALAHMIKFRGHFLIEGDLNPDNSDVDKLFIQLVQTYNQ |
| | | | LFEENPINASGVDAKAILSARLSKSRRLENLIAQLPGEKKNGLFGNLIALSLGLTPNFKSNFDLAEDAKLQLSKDTYDDDLDNLLAQIGDQYADLFLAAKNLSDAI |
| | | | LLSDILRVNTEITKAPLSASMIKRYDEHHQDLTLLKALVRQQLPEKYKEIFFDQSKNGYAGYIDGGASQEEFYKFIKPILEKMDGTEELLVKLNREDLLRKQRTFD |
| | | | NGSIPHQIHLGELHAILRRQEDFYPFLKDNREKIEKILTFRIPYYVGPLARGNSRFAWMTRKSEETITPWNFEEVVDKGASAQSFIERMTNFDKNLPNEKVLPKHS |
| | | | LLYEYFTVYNELTKVKYVTEGMRKPAFLSGEQKKAIVDLLFKTNRKVTVKQLKEDYFKKIECFDSVEISGVEDRFNASLGTYHDLLKIIKDKDFLDNEENEDILED |
| | | | IVLTLTLFEDREMIEERLKTYAHLFDDKVMKQLKRRRYTGWGRLSRKLINGIRDKQSGKTILDFLKSDGFANRNFMQLIHDDSLTFKEDIQKAQVSGQGDSLHEHI |
| | | | ANLAGSPAIKKGILQTVKVVDELVKVMGRHKPENIVIEMARENQTTQKGQKNSRERMKRIEEGIKELGSQILKEHPVENTQLQNEKLYLYYLQNGRDMYVDQELDI |
| | | | NRLSDYDVDHIVPQSFLKDDSIDNKVLTRSDKARGKSDNVPSEEVVKKMKNYWRQLLNAKLITQRKFDNLTKAERGGLSELDKAGFIKRQLVETRQITKHVAQILD |
| | | | SRMNTKYDENDKLIREVKVITLKSKLVSDFRKDFQFYKVREINNYHHAHDAYLNAVVGTALIKKYPKLESEFVYGDYKVYDVRKMIAKSEQEIGKATAKYFFYSNI |
| | | | MNFFKTEITLANGEIRKRPLIETNGETGEIVWDKGRDFATVRKVLSMPQVNIVKKTEVQTGGFSKESILPKRNSDKLIARKKDWDPKKYGGFDSPTVAYSVLVVAK |
| | | | VEKGKSKKLKSVKELLGITIMERSSFEKNPIDFLEAKGYKEVKKDLIIKLPKYSLFELENGRKRMLASAGELQKGNELALPSKYVNFLYLASHYEKLKGSPEDNEQ |
| | | | KQLFVEQHKHYLDEIIEQISEFSKRVILADANLDKVLSAYNKHRDKPIREQAENIIHLFTLTNLGAPAAFKYFDTTIDRKRYTSTKEVLDATLIHQSITGLYETRI |
| | | | DLSQLGGDSGGSSGGSSGSETPGTSESATPESSGGSSGGSSNQVGHRRIEPHKIATGALKPRPQKQYHINPRAKADIQIVIDDLLRQGVLRQQNSEMNTPVYPVPK |
| | | | ADGRWRMVLDYREVNKVTPLVATQNCHSASILNTLYRGPYKSTLDLANGFWAHPIKPEDYWITAFTWGGKTYCWTVLPQGFLNSPALFNADVVDILKDIPNVQVYV |
| | | | DDVYVSSATEQEHLDILETIFNRLSTAGYIVSLKKSKLAKETVEFLGFSISQNGRGLTDSYKQKLMDLQPPTTLRQLQSILGKINFARNFLPNFAELVAPLYQLIP |
| | | | KAKGQCIPWTMDHTTQLKTIIQALNSTENLEERRPDVDLIMKVHISNTAGYIRFYNHGGQKPIAYNNALFTSTELKFTPTEKIMATIHKGLLKALDLSLGKEIHVY |
| | | | SAIASMTKLQKTPLSERKALSIRWLKWQTYFEDPRIKFHHDATLPDLQNLPVPQQDTGKEMTILPLLHYEAIFYTDGSAIRSPKPNKTHSAGMGIIQAKFEPDFRI |
| | | | VHLWSFPLGDHTAQYAEIAAFEFAIRRATGIRGPVLIVTDSNYVAKSYNEELPYWESNGFVNNKKKTLKHISKWKAIAECKNLKADIHVIHEPGHQPAEASPHAQG |
| | | | NALADKQAVSGSYKVFSSGGSKRTADGSEFEPKKKRKV |
| BFV | 2 | 3722 | MPAAKRVKLDGGDKKYSIGLDIGTNSVGWAVITDEYKVPSKKFKVLGNTDRHSIKKNLIGALLFDSGETAEATRLKRTARRRYTRRKNRICYLQEIFSNEMAKVDD |
| | | | SFFHRLEESFLVEEDKKHERHPIFGNIVDEVAYHEKYPTIYHLRKKLVDSTDKADLRLIYLALAHMIKFRGHFLIEGDLNPDNSDVDKLFIQLVQTYNQLFEENPI |
| | | | NASGVDAKAILSARLSKSRRLENLIAQLPGEKKNGLFGNLIALSLGLTPNFKSNFDLAEDAKLQLSKDTYDDDLDNLLAQIGDQYADLFLAAKNLSDAILLSDILR |
| | | | VNTEITKAPLSASMIKRYDEHHQDLTLLKALVRQQLPEKYKEIFFDQSKNGYAGYIDGGASQEEFYKFIKPILEKMDGTEELLVKLNREDLLRKQRTFDNGSIPHQ |
| | | | IHLGELHAILRRQEDFYPFLKDNREKIEKILTFRIPYYVGPLARGNSRFAWMTRKSEETITPWNFEEVVDKGASAQSFIERMTNFDKNLPNEKVLPKHSLLYEYFT |
| | | | VYNELTKVKYVTEGMRKPAFLSGEQKKAIVDLLFKTNRKVTVKQLKEDYFKKIECFDSVEISGVEDRFNASLGTYHDLLKIIKDKDFLDNEENEDILEDIVLTLTL |
| | | | FEDREMIEERLKTYAHLFDDKVMKQLKRRRYTGWGRLSRKLINGIRDKQSGKTILDFLKSDGFANRNFMQLIHDDSLTFKEDIQKAQVSGQGDSLHEHIANLAGSP |
| | | | AIKKGILQTVKVVDELVKVMGRHKPENIVIEMARENQTTQKGQKNSRERMKRIEEGIKELGSQILKEHPVENTQLQNEKLYLYYLQNGRDMYVDQELDINRLSDYD |
| | | | VDHIVPQSFLKDDSIDNKVLTRSDKARGKSDNVPSEEVVKKMKNYWRQLLNAKLITQRKFDNLTKAERGGLSELDKAGFIKRQLVETRQITKHVAQILDSRMNTKY |
| | | | DENDKLIREVKVITLKSKLVSDFRKDFQFYKVREINNYHHAHDAYLNAVVGTALIKKYPKLESEFVYGDYKVYDVRKMIAKSEQEIGKATAKYFFYSNIMNFFKTE |
| | | | ITLANGEIRKRPLIETNGETGEIVWDKGRDFATVRKVLSMPQVNIVKKTEVQTGGFSKESILPKRNSDKLIARKKDWDPKKYGGFDSPTVAYSVLVVAKVEKGKSK |
| | | | KLKSVKELLGITIMERSSFEKNPIDFLEAKGYKEVKKDLIIKLPKYSLFELENGRKRMLASAGELQKGNELALPSKYVNFLYLASHYEKLKGSPEDNEQKQLFVEQ |
| | | | HKHYLDEIIEQISEFSKRVILADANLDKVLSAYNKHRDKPIREQAENIIHLFTLTNLGAPAAFKYFDTTIDRKRYTSTKEVLDATLIHQSITGLYETRIDLSQLGG |
| | | | DSGGSSGGSSGSETPGTSESATPESSGGSSGGSSNQVGHRRIEPHKIATGALKPRPQKQYHINPRAKADIQIVIDDLLRQGVLRQQNSEMNTPVYPVPKADGRWRM |
| | | | VLDYREVNKVTPLVATQNCHSASILNTLYRGPYKSTLDLANGFWAHPIKPEDYWITAFTWGGKTYCWTVLPQGFLNSPALFNADVVDILKDIPNVQVYVDDVYVSS |
| | | | ATEQEHLDILETIFNRLSTAGYIVSLKKSKLAKETVEFLGFSISQNGRGLTDSYKQKLMDLQPPTTLRQLQSILGKINFARNFLPNFAELVAPLYQLIPKAKGQCI |
| | | | PWTMDHTTQLKTIIQALNSTENLEERRPDVDLIMKVHISNTAGYIRFYNHGGQKPIAYNNALFTSTELKFTPTEKIMATIHKGLLKALDLSLGKEIHVYSAIASMT |
| | | | KLQKTPLSERKALSIRWLKWQTYFEDPRIKFHHDATLPDLQNLPVPQQDTGKEMTILPLLHYEAIFYTDGSAIRSPKPNKTHSAGMGIIQAKFEPDFRIVHLWSFP |
| | | | LGDHTAQYAEIAAFEFAIRRATGIRGPVLIVTDSNYVAKSYNEELPYWESNGFVNNKKKTLKHISKWKAIAECKNLKADIHVIHEPGHQPAEASPHAQGNALADKQ |
| | | | AVSGSYKVFSSGGSKRTADGSEFEKRTADGSEFESPKKKAKVE |
| BLV | 1 | 3723 | MAPKKKRKVGIHGVPAADKKYSIGLDIGTNSVGWAVITDEYKVPSKKFKVLGNTDRHSIKKNLIGALLFDSGETAEATRLKRTARRRYTRRKNRICYLQEIFSNEM |
| | | | AKVDDSFFHRLEESFLVEEDKKHERHPIFGNIVDEVAYHEKYPTIYHLRKKLVDSTDKADLRLIYLALAHMIKFRGHFLIEGDLNPDNSDVDKLFIQLVQTYNQLF |
| | | | EENPINASGVDAKAILSARLSKSRRLENLIAQLPGEKKNGLFGNLIALSLGLTPNFKSNFDLAEDAKLQLSKDTYDDDLDNLLAQIGDQYADLFLAAKNLSDAILL |
| | | | SDILRVNTEITKAPLSASMIKRYDEHHQDLTLLKALVRQQLPEKYKEIFFDQSKNGYAGYIDGGASQEEFYKFIKPILEKMDGTEELLVKLNREDLLRKQRTFDNG |
| | | | SIPHQIHLGELHAILRRQEDFYPFLKDNREKIEKILTFRIPYYVGPLARGNSRFAWMTRKSEETITPWNFEEVVDKGASAQSFIERMTNFDKNLPNEKVLPKHSLL |
| | | | YEYFTVYNELTKVKYVTEGMRKPAFLSGEQKKAIVDLLFKTNRKVTVKQLKEDYFKKIECFDSVEISGVEDRFNASLGTYHDLLKIIKDKDFLDNEENEDILEDIV |
| | | | LTLTLFEDREMIEERLKTYAHLFDDKVMKQLKRRRYTGWGRLSRKLINGIRDKQSGKTILDFLKSDGFANRNFMQLIHDDSLTFKEDIQKAQVSGQGDSLHEHIAN |
| | | | LAGSPAIKKGILQTVKVVDELVKVMGRHKPENIVIEMARENQTTQKGQKNSRERMKRIEEGIKELGSQILKEHPVENTQLQNEKLYLYYLQNGRDMYVDQELDINR |
| | | | LSDYDVDHIVPQSFLKDDSIDNKVLTRSDKARGKSDNVPSEEVVKKMKNYWRQLLNAKLITQRKFDNLTKAERGGLSELDKAGFIKRQLVETRQITKHVAQILDSR |
| | | | MNTKYDENDKLIREVKVITLKSKLVSDFRKDFQFYKVREINNYHHAHDAYLNAVVGTALIKKYPKLESEFVYGDYKVYDVRKMIAKSEQEIGKATAKYFFYSNIMN |
| | | | FFKTEITLANGEIRKRPLIETNGETGEIVWDKGRDFATVRKVLSMPQVNIVKKTEVQTGGFSKESILPKRNSDKLIARKKDWDPKKYGGFDSPTVAYSVLVVAKVE |
| | | | KGKSKKLKSVKELLGITIMERSSFEKNPIDFLEAKGYKEVKKDLIIKLPKYSLFELENGRKRMLASAGELQKGNELALPSKYVNFLYLASHYEKLKGSPEDNEQKQ |
| | | | LFVEQHKHYLDEIIEQISEFSKRVILADANLDKVLSAYNKHRDKPIREQAENIIHLFTLTNLGAPAAFKYFDTTIDRKRYTSTKEVLDATLIHQSITGLYETRIDL |
| | | | SQLGGDSGGSSGGSSGSETPGTSESATPESSGGSSGGSSVLDTPPSHIGLEHLPPPPEVPQFPLNLERLQALQDLVHRSLEAGYISPWDGPGNNPVFPVRKPNGAW |
| | | | RFVHDLRATNALTKPIPALSPGPPDLTAIPTHPPHIICLDLKDAFFQIPVEDRFRFYLSFTLPSPGGLQPHRRFAWRVLPQGFINSPALFERALQEPLRQVSAAFS |
| | | | QSLLVSYMDDILYASPTEEQRSQCYQALAARLRDLGFQVASEKTSQTPSPVPFLGQMVHEQIVTYQSLPTLQISSPISLHQLQAVLGDLQWVSRGTPTTRRPLQLL |
| | | | YSSLKRHHDPRAIIQLSPEQLQGIAELRQALSHNARSRYNEQEPLLAYVHLTRAGSTLVLFQKGAQFPLAYFQTPLTDNQASPWGLLLLLGCQYLQTQALSSYAKP |
| | | | ILKYYHNLPKTSLDNWIQSSEDPRVQELLQLWPQISSQGIQPPGPWKTLITRAEVFLTPQFSPDPIPAALCLFSDGATGRGAYCLWKDHLLDFQAVPAPESAQKGE |
| | | | LAGLLAGLAAAPPEPVNIWVDSKYLYSLLRTLVLGAWLQPDPVPSYALLYKSLLRHPAIVVGHVRSHSSASHPIASLNNYVDQLL |
| BLV | 2 | 3724 | MKRTADGSEFESPKKKRKVDKKYSIGLDIGTNSVGWAVITDEYKVPSKKFKVLGNTDRHSIKKNLIGALLFDSGETAEATRLKRTARRRYTRRKNRICYLQEIFSN |
| | | | EMAKVDDSFFHRLEESFLVEEDKKHERHPIFGNIVDEVAYHEKYPTIYHLRKKLVDSTDKADLRLIYLALAHMIKFRGHFLIEGDLNPDNSDVDKLFIQLVQTYNQ |
| | | | LFEENPINASGVDAKAILSARLSKSRRLENLIAQLPGEKKNGLFGNLIALSLGLTPNFKSNFDLAEDAKLQLSKDTYDDDLDNLLAQIGDQYADLFLAAKNLSDAI |
| | | | LLSDILRVNTEITKAPLSASMIKRYDEHHQDLTLLKALVRQQLPEKYKEIFFDQSKNGYAGYIDGGASQEEFYKFIKPILEKMDGTEELLVKLNREDLLRKQRTFD |
| | | | NGSIPHQIHLGELHAILRRQEDFYPFLKDNREKIEKILTFRIPYYVGPLARGNSRFAWMTRKSEETITPWNFEEVVDKGASAQSFIERMTNFDKNLPNEKVLPKHS |
| | | | LLYEYFTVYNELTKVKYVTEGMRKPAFLSGEQKKAIVDLLFKTNRKVTVKQLKEDYFKKIECFDSVEISGVEDRFNASLGTYHDLLKIIKDKDFLDNEENEDILED |
| | | | IVLTLTLFEDREMIEERLKTYAHLFDDKVMKQLKRRRYTGWGRLSRKLINGIRDKQSGKTILDFLKSDGFANRNFMQLIHDDSLTFKEDIQKAQVSGQGDSLHEHI |
| | | | ANLAGSPAIKKGILQTVKVVDELVKVMGRHKPENIVIEMARENQTTQKGQKNSRERMKRIEEGIKELGSQILKEHPVENTQLQNEKLYLYYLQNGRDMYVDQELDI |
| | | | NRLSDYDVDHIVPQSFLKDDSIDNKVLTRSDKARGKSDNVPSEEVVKKMKNYWRQLLNAKLITQRKFDNLTKAERGGLSELDKAGFIKRQLVETRQITKHVAQILD |
| | | | SRMNTKYDENDKLIREVKVITLKSKLVSDFRKDFQFYKVREINNYHHAHDAYLNAVVGTALIKKYPKLESEFVYGDYKVYDVRKMIAKSEQEIGKATAKYFFYSNI |
| | | | MNFFKTEITLANGEIRKRPLIETNGETGEIVWDKGRDFATVRKVLSMPQVNIVKKTEVQTGGFSKESILPKRNSDKLIARKKDWDPKKYGGFDSPTVAYSVLVVAK |
| | | | VEKGKSKKLKSVKELLGITIMERSSFEKNPIDFLEAKGYKEVKKDLIIKLPKYSLFELENGRKRMLASAGELQKGNELALPSKYVNFLYLASHYEKLKGSPEDNEQ |
| | | | KQLFVEQHKHYLDEIIEQISEFSKRVILADANLDKVLSAYNKHRDKPIREQAENIIHLFTLTNLGAPAAFKYFDTTIDRKRYTSTKEVLDATLIHQSITGLYETRI |
| | | | DLSQLGGDSGGSSGGSSGSETPGTSESATPESSGGSSGGSSVLDTPPSHIGLEHLPPPPEVPQFPLNLERLQALQDLVHRSLEAGYISPWDGPGNNPVFPVRKPNG |
| | | | AWRFVHDLRATNALTKPIPALSPGPPDLTAIPTHPPHIICLDLKDAFFQIPVEDRFRFYLSFTLPSPGGLQPHRRFAWRVLPQGFINSPALFERALQEPLRQVSAA |
| | | | FSQSLLVSYMDDILYASPTEEQRSQCYQALAARLRDLGFQVASEKTSQTPSPVPFLGQMVHEQIVTYQSLPTLQISSPISLHQLQAVLGDLQWVSRGTPTTRRPLQ |
| | | | LLYSSLKRHHDPRAIIQLSPEQLQGIAELRQALSHNARSRYNEQEPLLAYVHLTRAGSTLVLFQKGAQFPLAYFQTPLTDNQASPWGLLLLLGCQYLQTQALSSYA |
| | | | KPILKYYHNLPKTSLDNWIQSSEDPRVQELLQLWPQISSQGIQPPGPWKTLITRAEVFLTPQFSPDPIPAALCLFSDGATGRGAYCLWKDHLLDFQAVPAPESAQK |
| | | | GELAGLLAGLAAAPPEPVNIWVDSKYLYSLLRTLVLGAWLQPDPVPSYALLYKSLLRHPAIVVGHVRSHSSASHPIASLNNYVDQLLSGGSKRTADGSEFEPKKKR |
| | | | KV |
| BLV | 3 | 3725 | MPAAKRVKLDGGDKKYSIGLDIGTNSVGWAVITDEYKVPSKKFKVLGNTDRHSIKKNLIGALLFDSGETAEATRLKRTARRRYTRRKNRICYLQEIFSNEMAKVDD |
| | | | SFFHRLEESFLVEEDKKHERHPIFGNIVDEVAYHEKYPTIYHLRKKLVDSTDKADLRLIYLALAHMIKFRGHFLIEGDLNPDNSDVDKLFIQLVQTYNQLFEENPI |
| | | | NASGVDAKAILSARLSKSRRLENLIAQLPGEKKNGLFGNLIALSLGLTPNFKSNFDLAEDAKLQLSKDTYDDDLDNLLAQIGDQYADLFLAAKNLSDAILLSDILR |
| | | | VNTEITKAPLSASMIKRYDEHHQDLTLLKALVRQQLPEKYKEIFFDQSKNGYAGYIDGGASQEEFYKFIKPILEKMDGTEELLVKLNREDLLRKQRTFDNGSIPHQ |
| | | | IHLGELHAILRRQEDFYPFLKDNREKIEKILTFRIPYYVGPLARGNSRFAWMTRKSEETITPWNFEEVVDKGASAQSFIERMTNFDKNLPNEKVLPKHSLLYEYFT |
| | | | VYNELTKVKYVTEGMRKPAFLSGEQKKAIVDLLFKTNRKVTVKQLKEDYFKKIECFDSVEISGVEDRFNASLGTYHDLLKIIKDKDFLDNEENEDILEDIVLTLTL |
| | | | FEDREMIEERLKTYAHLFDDKVMKQLKRRRYTGWGRLSRKLINGIRDKQSGKTILDFLKSDGFANRNFMQLIHDDSLTFKEDIQKAQVSGQGDSLHEHIANLAGSP |
| | | | AIKKGILQTVKVVDELVKVMGRHKPENIVIEMARENQTTQKGQKNSRERMKRIEEGIKELGSQILKEHPVENTQLQNEKLYLYYLQNGRDMYVDQELDINRLSDYD |
| | | | VDHIVPQSFLKDDSIDNKVLTRSDKARGKSDNVPSEEVVKKMKNYWRQLLNAKLITQRKFDNLTKAERGGLSELDKAGFIKRQLVETRQITKHVAQILDSRMNTKY |
| | | | DENDKLIREVKVITLKSKLVSDFRKDFQFYKVREINNYHHAHDAYLNAVVGTALIKKYPKLESEFVYGDYKVYDVRKMIAKSEQEIGKATAKYFFYSNIMNFFKTE |
| | | | ITLANGEIRKRPLIETNGETGEIVWDKGRDFATVRKVLSMPQVNIVKKTEVQTGGFSKESILPKRNSDKLIARKKDWDPKKYGGFDSPTVAYSVLVVAKVEKGKSK |
| | | | KLKSVKELLGITIMERSSFEKNPIDFLEAKGYKEVKKDLIIKLPKYSLFELENGRKRMLASAGELQKGNELALPSKYVNFLYLASHYEKLKGSPEDNEQKQLFVEQ |
| | | | HKHYLDEIIEQISEFSKRVILADANLDKVLSAYNKHRDKPIREQAENIIHLFTLTNLGAPAAFKYFDTTIDRKRYTSTKEVLDATLIHQSITGLYETRIDLSQLGG |
| | | | DSGGSSGGSSGSETPGTSESATPESSGGSSGGSSVLDTPPSHIGLEHLPPPPEVPQFPLNLERLQALQDLVHRSLEAGYISPWDGPGNNPVFPVRKPNGAWRFVHD |
| | | | LRATNALTKPIPALSPGPPDLTAIPTHPPHIICLDLKDAFFQIPVEDRFRFYLSFTLPSPGGLQPHRRFAWRVLPQGFINSPALFERALQEPLRQVSAAFSQSLLV |
| | | | SYMDDILYASPTEEQRSQCYQALAARLRDLGFQVASEKTSQTPSPVPFLGQMVHEQIVTYQSLPTLQISSPISLHQLQAVLGDLQWVSRGTPTTRRPLQLLYSSLK |
| | | | RHHDPRAIIQLSPEQLQGIAELRQALSHNARSRYNEQEPLLAYVHLTRAGSTLVLFQKGAQFPLAYFQTPLTDNQASPWGLLLLLGCQYLQTQALSSYAKPILKYY |
| | | | HNLPKTSLDNWIQSSEDPRVQELLQLWPQISSQGIQPPGPWKTLITRAEVFLTPQFSPDPIPAALCLFSDGATGRGAYCLWKDHLLDFQAVPAPESAQKGELAGLL |
| | | | AGLAAAPPEPVNIWVDSKYLYSLLRTLVLGAWLQPDPVPSYALLYKSLLRHPAIVVGHVRSHSSASHPIASLNNYVDQLLSGGSKRTADGSEFEKRTADGSEFESP |
| | | | KKKAKVE |
| BLV | 4 | 3726 | MPAAKRVKLDGGDKKYSIGLDIGTNSVGWAVITDEYKVPSKKFKVLGNTDRHSIKKNLIGALLFDSGETAEATRLKRTARRRYTRRKNRICYLQEIFSNEMAKVDD |
| | | | SFFHRLEESFLVEEDKKHERHPIFGNIVDEVAYHEKYPTIYHLRKKLVDSTDKADLRLIYLALAHMIKFRGHFLIEGDLNPDNSDVDKLFIQLVQTYNQLFEENPI |
| | | | NASGVDAKAILSARLSKSRRLENLIAQLPGEKKNGLFGNLIALSLGLTPNFKSNFDLAEDAKLQLSKDTYDDDLDNLLAQIGDQYADLFLAAKNLSDAILLSDILR |
| | | | VNTEITKAPLSASMIKRYDEHHQDLTLLKALVRQQLPEKYKEIFFDQSKNGYAGYIDGGASQEEFYKFIKPILEKMDGTEELLVKLNREDLLRKQRTFDNGSIPHQ |
| | | | IHLGELHAILRRQEDFYPFLKDNREKIEKILTFRIPYYVGPLARGNSRFAWMTRKSEETITPWNFEEVVDKGASAQSFIERMTNFDKNLPNEKVLPKHSLLYEYFT |
| | | | VYNELTKVKYVTEGMRKPAFLSGEQKKAIVDLLFKTNRKVTVKQLKEDYFKKIECFDSVEISGVEDRFNASLGTYHDLLKIIKDKDFLDNEENEDILEDIVLTLTL |
| | | | FEDREMIEERLKTYAHLFDDKVMKQLKRRRYTGWGRLSRKLINGIRDKQSGKTILDFLKSDGFANRNFMQLIHDDSLTFKEDIQKAQVSGQGDSLHEHIANLAGSP |
| | | | AIKKGILQTVKVVDELVKVMGRHKPENIVIEMARENQTTQKGQKNSRERMKRIEEGIKELGSQILKEHPVENTQLQNEKLYLYYLQNGRDMYVDQELDINRLSDYD |
| | | | VDHIVPQSFLKDDSIDNKVLTRSDKARGKSDNVPSEEVVKKMKNYWRQLLNAKLITQRKFDNLTKAERGGLSELDKAGFIKRQLVETRQITKHVAQILDSRMNTKY |
| | | | DENDKLIREVKVITLKSKLVSDFRKDFQFYKVREINNYHHAHDAYLNAVVGTALIKKYPKLESEFVYGDYKVYDVRKMIAKSEQEIGKATAKYFFYSNIMNFFKTE |
| | | | ITLANGEIRKRPLIETNGETGEIVWDKGRDFATVRKVLSMPQVNIVKKTEVQTGGFSKESILPKRNSDKLIARKKDWDPKKYGGFDSPTVAYSVLVVAKVEKGKSK |
| | | | KLKSVKELLGITIMERSSFEKNPIDFLEAKGYKEVKKDLIIKLPKYSLFELENGRKRMLASAGELQKGNELALPSKYVNFLYLASHYEKLKGSPEDNEQKQLFVEQ |
| | | | HKHYLDEIIEQISEFSKRVILADANLDKVLSAYNKHRDKPIREQAENIIHLFTLTNLGAPAAFKYFDTTIDRKRYTSTKEVLDATLIHQSITGLYETRIDLSQLGG |
| | | | DGGSGGSSGGSSGSETPGTSESATPESSGGSSGGSSGGGVLDTPPSHIGLEHLPPPPEVPQFPLNLERLQALQDLVHRSLEAGYISPWDGPGNNPVFPVRKPNGAW |
| | | | RFVHDLRATNALTKPIPALSPGPPDLTAIPTHPPHIICLDLKDAFFQIPVEDRFRFYLSFTLPSPGGLQPHRRFAWRVLPQGFINSPALFERALQEPLRQVSAAFS |
| | | | QSLLVSYMDDILYASPTEEQRSQCYQALAARLRDLGFQVASEKTSQTPSPVPFLGQMVHEQIVTYQSLPTLQISSPISLHQLQAVLGDLQWVSRGTPTTRRPLQLL |
| | | | YSSLKRHHDPRAIIQLSPEQLQGIAELRQALSHNARSRYNEQEPLLAYVHLTRAGSTLVLFQKGAQFPLAYFQTPLTDNQASPWGLLLLLGCQYLQTQALSSYAKP |
| | | | ILKYYHNLPKTSLDNWIQSSEDPRVQELLQLWPQISSQGIQPPGPWKTLITRAEVFLTPQFSPDPIPAALCLFSDGATGRGAYCLWKDHLLDFQAVPAPESAQKGE |
| | | | LAGLLAGLAAAPPEPVNIWVDSKYLYSLLRTLVLGAWLQPDPVPSYALLYKSLLRHPAIVVGHVRSHSSASHPIASLNNYVDQLAGKRTADGSEFEKRTADGSEFE |
| | | | SPKKKAKVEGSGEGRGSLLTCGDVEENPG |
| BLV | 5 | 3727 | MPAAKRVKLDGGDKKYSIGLDIGTNSVGWAVITDEYKVPSKKFKVLGNTDRHSIKKNLIGALLFDSGETAEATRLKRTARRRYTRRKNRICYLQEIFSNEMAKVDD |
| | | | SFFHRLEESFLVEEDKKHERHPIFGNIVDEVAYHEKYPTIYHLRKKLVDSTDKADLRLIYLALAHMIKFRGHFLIEGDLNPDNSDVDKLFIQLVQTYNQLFEENPI |
| | | | NASGVDAKAILSARLSKSRRLENLIAQLPGEKKNGLFGNLIALSLGLTPNFKSNFDLAEDAKLQLSKDTYDDDLDNLLAQIGDQYADLFLAAKNLSDAILLSDILR |
| | | | VNTEITKAPLSASMIKRYDEHHQDLTLLKALVRQQLPEKYKEIFFDQSKNGYAGYIDGGASQEEFYKFIKPILEKMDGTEELLVKLNREDLLRKQRTFDNGSIPHQ |
| | | | IHLGELHAILRRQEDFYPFLKDNREKIEKILTFRIPYYVGPLARGNSRFAWMTRKSEETITPWNFEEVVDKGASAQSFIERMTNFDKNLPNEKVLPKHSLLYEYFT |
| | | | VYNELTKVKYVTEGMRKPAFLSGEQKKAIVDLLFKTNRKVTVKQLKEDYFKKIECFDSVEISGVEDRFNASLGTYHDLLKIIKDKDFLDNEENEDILEDIVLTLTL |
| | | | FEDREMIEERLKTYAHLFDDKVMKQLKRRRYTGWGRLSRKLINGIRDKQSGKTILDFLKSDGFANRNFMQLIHDDSLTFKEDIQKAQVSGQGDSLHEHIANLAGSP |
| | | | AIKKGILQTVKVVDELVKVMGRHKPENIVIEMARENQTTQKGQKNSRERMKRIEEGIKELGSQILKEHPVENTQLQNEKLYLYYLQNGRDMYVDQELDINRLSDYD |
| | | | VDHIVPQSFLKDDSIDNKVLTRSDKARGKSDNVPSEEVVKKMKNYWRQLLNAKLITQRKFDNLTKAERGGLSELDKAGFIKRQLVETRQITKHVAQILDSRMNTKY |
| | | | DENDKLIREVKVITLKSKLVSDFRKDFQFYKVREINNYHHAHDAYLNAVVGTALIKKYPKLESEFVYGDYKVYDVRKMIAKSEQEIGKATAKYFFYSNIMNFFKTE |
| | | | ITLANGEIRKRPLIETNGETGEIVWDKGRDFATVRKVLSMPQVNIVKKTEVQTGGFSKESILPKRNSDKLIARKKDWDPKKYGGFDSPTVAYSVLVVAKVEKGKSK |
| | | | KLKSVKELLGITIMERSSFEKNPIDFLEAKGYKEVKKDLIIKLPKYSLFELENGRKRMLASAGELQKGNELALPSKYVNFLYLASHYEKLKGSPEDNEQKQLFVEQ |
| | | | HKHYLDEIIEQISEFSKRVILADANLDKVLSAYNKHRDKPIREQAENIIHLFTLTNLGAPAAFKYFDTTIDRKRYTSTKEVLDATLIHQSITGLYETRIDLSQLGG |
| | | | DGGGGGEAAAKPAPGGGVLDTPPSHIGLEHLPPPPEVPQFPLNLERLQALQDLVHRSLEAGYISPWDGPGNNPVFPVRKPNGAWRFVHDLRATNALTKPIPALSPG |
| | | | PPDLTAIPTHPPHIICLDLKDAFFQIPVEDRFRFYLSFTLPSPGGLQPHRRFAWRVLPQGFINSPALFERALQEPLRQVSAAFSQSLLVSYMDDILYASPTEEQRS |
| | | | QCYQALAARLRDLGFQVASEKTSQTPSPVPFLGQMVHEQIVTYQSLPTLQISSPISLHQLQAVLGDLQWVSRGTPTTRRPLQLLYSSLKRHHDPRAIIQLSPEQLQ |
| | | | GIAELRQALSHNARSRYNEQEPLLAYVHLTRAGSTLVLFQKGAQFPLAYFQTPLTDNQASPWGLLLLLGCQYLQTQALSSYAKPILKYYHNLPKTSLDNWIQSSED |
| | | | PRVQELLQLWPQISSQGIQPPGPWKTLITRAEVFLTPQFSPDPIPAALCLFSDGATGRGAYCLWKDHLLDFQAVPAPESAQKGELAGLLAGLAAAPPEPVNIWVDS |
| | | | KYLYSLLRTLVLGAWLQPDPVPSYALLYKSLLRHPAIVVGHVRSHSSASHPIASLNNYVDQLAGKRTADGSEFEKRTADGSEFESPKKKAKVEGSGEGRGSLLTCG |
| | | | DVEENPG |
| BLV | 6 | 3728 | MPAAKRVKLDGGDKKYSIGLDIGTNSVGWAVITDEYKVPSKKFKVLGNTDRHSIKKNLIGALLFDSGETAEATRLKRTARRRYTRRKNRICYLQEIFSNEMAKVDD |
| | | | SFFHRLEESFLVEEDKKHERHPIFGNIVDEVAYHEKYPTIYHLRKKLVDSTDKADLRLIYLALAHMIKFRGHFLIEGDLNPDNSDVDKLFIQLVQTYNQLFEENPI |
| | | | NASGVDAKAILSARLSKSRRLENLIAQLPGEKKNGLFGNLIALSLGLTPNFKSNFDLAEDAKLQLSKDTYDDDLDNLLAQIGDQYADLFLAAKNLSDAILLSDILR |
| | | | VNTEITKAPLSASMIKRYDEHHQDLTLLKALVRQQLPEKYKEIFFDQSKNGYAGYIDGGASQEEFYKFIKPILEKMDGTEELLVKLNREDLLRKQRTFDNGSIPHQ |
| | | | IHLGELHAILRRQEDFYPFLKDNREKIEKILTFRIPYYVGPLARGNSRFAWMTRKSEETITPWNFEEVVDKGASAQSFIERMTNFDKNLPNEKVLPKHSLLYEYFT |
| | | | VYNELTKVKYVTEGMRKPAFLSGEQKKAIVDLLFKTNRKVTVKQLKEDYFKKIECFDSVEISGVEDRFNASLGTYHDLLKIIKDKDFLDNEENEDILEDIVLTLTL |
| | | | FEDREMIEERLKTYAHLFDDKVMKQLKRRRYTGWGRLSRKLINGIRDKQSGKTILDFLKSDGFANRNFMQLIHDDSLTFKEDIQKAQVSGQGDSLHEHIANLAGSP |
| | | | AIKKGILQTVKVVDELVKVMGRHKPENIVIEMARENQTTQKGQKNSRERMKRIEEGIKELGSQILKEHPVENTQLQNEKLYLYYLQNGRDMYVDQELDINRLSDYD |
| | | | VDHIVPQSFLKDDSIDNKVLTRSDKARGKSDNVPSEEVVKKMKNYWRQLLNAKLITQRKFDNLTKAERGGLSELDKAGFIKRQLVETRQITKHVAQILDSRMNTKY |
| | | | DENDKLIREVKVITLKSKLVSDFRKDFQFYKVREINNYHHAHDAYLNAVVGTALIKKYPKLESEFVYGDYKVYDVRKMIAKSEQEIGKATAKYFFYSNIMNFFKTE |
| | | | ITLANGEIRKRPLIETNGETGEIVWDKGRDFATVRKVLSMPQVNIVKKTEVQTGGFSKESILPKRNSDKLIARKKDWDPKKYGGFDSPTVAYSVLVVAKVEKGKSK |
| | | | KLKSVKELLGITIMERSSFEKNPIDFLEAKGYKEVKKDLIIKLPKYSLFELENGRKRMLASAGELQKGNELALPSKYVNFLYLASHYEKLKGSPEDNEQKQLFVEQ |
| | | | HKHYLDEIIEQISEFSKRVILADANLDKVLSAYNKHRDKPIREQAENIIHLFTLTNLGAPAAFKYFDTTIDRKRYTSTKEVLDATLIHQSITGLYETRIDLSQLGG |
| | | | DGGGSSGGGVLDTPPSHIGLEHLPPPPEVPQFPLNLERLQALQDLVHRSLEAGYISPWDGPGNNPVFPVRKPNGAWRFVHDLRATNALTKPIPALSPGPPDLTAIP |
| | | | THPPHIICLDLKDAFFQIPVEDRFRFYLSFTLPSPGGLQPHRRFAWRVLPQGFINSPALFERALQEPLRQVSAAFSQSLLVSYMDDILYASPTEEQRSQCYQALAA |
| | | | RLRDLGFQVASEKTSQTPSPVPFLGQMVHEQIVTYQSLPTLQISSPISLHQLQAVLGDLQWVSRGTPTTRRPLQLLYSSLKRHHDPRAIIQLSPEQLQGIAELRQA |
| | | | LSHNARSRYNEQEPLLAYVHLTRAGSTLVLFQKGAQFPLAYFQTPLTDNQASPWGLLLLLGCQYLQTQALSSYAKPILKYYHNLPKTSLDNWIQSSEDPRVQELLQ |
| | | | LWPQISSQGIQPPGPWKTLITRAEVFLTPQFSPDPIPAALCLFSDGATGRGAYCLWKDHLLDFQAVPAPESAQKGELAGLLAGLAAAPPEPVNIWVDSKYLYSLLR |
| | | | TLVLGAWLQPDPVPSYALLYKSLLRHPAIVVGHVRSHSSASHPIASLNNYVDQLAGKRTADGSEFEKRTADGSEFESPKKKAKVEGSGEGRGSLLTCGDVEENPG |
| BLV | 7 | 3729 | MPAAKRVKLDGGDKKYSIGLDIGTNSVGWAVITDEYKVPSKKFKVLGNTDRHSIKKNLIGALLFDSGETAEATRLKRTARRRYTRRKNRICYLQEIFSNEMAKVDD |
| | | | SFFHRLEESFLVEEDKKHERHPIFGNIVDEVAYHEKYPTIYHLRKKLVDSTDKADLRLIYLALAHMIKFRGHFLIEGDLNPDNSDVDKLFIQLVQTYNQLFEENPI |
| | | | NASGVDAKAILSARLSKSRRLENLIAQLPGEKKNGLFGNLIALSLGLTPNFKSNFDLAEDAKLQLSKDTYDDDLDNLLAQIGDQYADLFLAAKNLSDAILLSDILR |
| | | | VNTEITKAPLSASMIKRYDEHHQDLTLLKALVRQQLPEKYKEIFFDQSKNGYAGYIDGGASQEEFYKFIKPILEKMDGTEELLVKLNREDLLRKQRTFDNGSIPHQ |
| | | | IHLGELHAILRRQEDFYPFLKDNREKIEKILTFRIPYYVGPLARGNSRFAWMTRKSEETITPWNFEEVVDKGASAQSFIERMTNFDKNLPNEKVLPKHSLLYEYFT |
| | | | VYNELTKVKYVTEGMRKPAFLSGEQKKAIVDLLFKTNRKVTVKQLKEDYFKKIECFDSVEISGVEDRFNASLGTYHDLLKIIKDKDFLDNEENEDILEDIVLTLTL |
| | | | FEDREMIEERLKTYAHLFDDKVMKQLKRRRYTGWGRLSRKLINGIRDKQSGKTILDFLKSDGFANRNFMQLIHDDSLTFKEDIQKAQVSGQGDSLHEHIANLAGSP |
| | | | AIKKGILQTVKVVDELVKVMGRHKPENIVIEMARENQTTQKGQKNSRERMKRIEEGIKELGSQILKEHPVENTQLQNEKLYLYYLQNGRDMYVDQELDINRLSDYD |
| | | | VDHIVPQSFLKDDSIDNKVLTRSDKARGKSDNVPSEEVVKKMKNYWRQLLNAKLITQRKFDNLTKAERGGLSELDKAGFIKRQLVETRQITKHVAQILDSRMNTKY |
| | | | DENDKLIREVKVITLKSKLVSDFRKDFQFYKVREINNYHHAHDAYLNAVVGTALIKKYPKLESEFVYGDYKVYDVRKMIAKSEQEIGKATAKYFFYSNIMNFFKTE |
| | | | ITLANGEIRKRPLIETNGETGEIVWDKGRDFATVRKVLSMPQVNIVKKTEVQTGGFSKESILPKRNSDKLIARKKDWDPKKYGGFDSPTVAYSVLVVAKVEKGKSK |
| | | | KLKSVKELLGITIMERSSFEKNPIDFLEAKGYKEVKKDLIIKLPKYSLFELENGRKRMLASAGELQKGNELALPSKYVNFLYLASHYEKLKGSPEDNEQKQLFVEQ |
| | | | HKHYLDEIIEQISEFSKRVILADANLDKVLSAYNKHRDKPIREQAENIIHLFTLTNLGAPAAFKYFDTTIDRKRYTSTKEVLDATLIHQSITGLYETRIDLSQLGG |
| | | | DGGGSSGGSGGGVLDTPPSHIGLEHLPPPPEVPQFPLNLERLQALQDLVHRSLEAGYISPWDGPGNNPVFPVRKPNGAWRFVHDLRATNALTKPIPALSPGPPDLT |
| | | | AIPTHPPHIICLDLKDAFFQIPVEDRFRFYLSFTLPSPGGLQPHRRFAWRVLPQGFINSPALFERALQEPLRQVSAAFSQSLLVSYMDDILYASPTEEQRSQCYQA |
| | | | LAARLRDLGFQVASEKTSQTPSPVPFLGQMVHEQIVTYQSLPTLQISSPISLHQLQAVLGDLQWVSRGTPTTRRPLQLLYSSLKRHHDPRAIIQLSPEQLQGIAEL |
| | | | RQALSHNARSRYNEQEPLLAYVHLTRAGSTLVLFQKGAQFPLAYFQTPLTDNQASPWGLLLLLGCQYLQTQALSSYAKPILKYYHNLPKTSLDNWIQSSEDPRVQE |
| | | | LLQLWPQISSQGIQPPGPWKTLITRAEVFLTPQFSPDPIPAALCLFSDGATGRGAYCLWKDHLLDFQAVPAPESAQKGELAGLLAGLAAAPPEPVNIWVDSKYLYS |
| | | | LLRTLVLGAWLQPDPVPSYALLYKSLLRHPAIVVGHVRSHSSASHPIASLNNYVDQLAGKRTADGSEFEKRTADGSEFESPKKKAKVEGSGEGRGSLLTCGDVEEN |
| | | | PG |
| BLV | 8 | 3730 | MPAAKRVKLDGGDKKYSIGLDIGTNSVGWAVITDEYKVPSKKFKVLGNTDRHSIKKNLIGALLFDSGETAEATRLKRTARRRYTRRKNRICYLQEIFSNEMAKVDD |
| | | | SFFHRLEESFLVEEDKKHERHPIFGNIVDEVAYHEKYPTIYHLRKKLVDSTDKADLRLIYLALAHMIKFRGHFLIEGDLNPDNSDVDKLFIQLVQTYNQLFEENPI |
| | | | NASGVDAKAILSARLSKSRRLENLIAQLPGEKKNGLFGNLIALSLGLTPNFKSNFDLAEDAKLQLSKDTYDDDLDNLLAQIGDQYADLFLAAKNLSDAILLSDILR |
| | | | VNTEITKAPLSASMIKRYDEHHQDLTLLKALVRQQLPEKYKEIFFDQSKNGYAGYIDGGASQEEFYKFIKPILEKMDGTEELLVKLNREDLLRKQRTFDNGSIPHQ |
| | | | IHLGELHAILRRQEDFYPFLKDNREKIEKILTFRIPYYVGPLARGNSRFAWMTRKSEETITPWNFEEVVDKGASAQSFIERMTNFDKNLPNEKVLPKHSLLYEYFT |
| | | | VYNELTKVKYVTEGMRKPAFLSGEQKKAIVDLLFKTNRKVTVKQLKEDYFKKIECFDSVEISGVEDRFNASLGTYHDLLKIIKDKDFLDNEENEDILEDIVLTLTL |
| | | | FEDREMIEERLKTYAHLFDDKVMKQLKRRRYTGWGRLSRKLINGIRDKQSGKTILDFLKSDGFANRNFMQLIHDDSLTFKEDIQKAQVSGQGDSLHEHIANLAGSP |
| | | | AIKKGILQTVKVVDELVKVMGRHKPENIVIEMARENQTTQKGQKNSRERMKRIEEGIKELGSQILKEHPVENTQLQNEKLYLYYLQNGRDMYVDQELDINRLSDYD |
| | | | VDHIVPQSFLKDDSIDNKVLTRSDKARGKSDNVPSEEVVKKMKNYWRQLLNAKLITQRKFDNLTKAERGGLSELDKAGFIKRQLVETRQITKHVAQILDSRMNTKY |
| | | | DENDKLIREVKVITLKSKLVSDFRKDFQFYKVREINNYHHAHDAYLNAVVGTALIKKYPKLESEFVYGDYKVYDVRKMIAKSEQEIGKATAKYFFYSNIMNFFKTE |
| | | | ITLANGEIRKRPLIETNGETGEIVWDKGRDFATVRKVLSMPQVNIVKKTEVQTGGFSKESILPKRNSDKLIARKKDWDPKKYGGFDSPTVAYSVLVVAKVEKGKSK |
| | | | KLKSVKELLGITIMERSSFEKNPIDFLEAKGYKEVKKDLIIKLPKYSLFELENGRKRMLASAGELQKGNELALPSKYVNFLYLASHYEKLKGSPEDNEQKQLFVEQ |
| | | | HKHYLDEIIEQISEFSKRVILADANLDKVLSAYNKHRDKPIREQAENIIHLFTLTNLGAPAAFKYFDTTIDRKRYTSTKEVLDATLIHQSITGLYETRIDLSQLGG |
| | | | DGGGGSGGGGSSGGGVLDTPPSHIGLEHLPPPPEVPQFPLNLERLQALQDLVHRSLEAGYISPWDGPGNNPVFPVRKPNGAWRFVHDLRATNALTKPIPALSPGPP |
| | | | DLTAIPTHPPHIICLDLKDAFFQIPVEDRFRFYLSFTLPSPGGLQPHRRFAWRVLPQGFINSPALFERALQEPLRQVSAAFSQSLLVSYMDDILYASPTEEQRSQC |
| | | | YQALAARLRDLGFQVASEKTSQTPSPVPFLGQMVHEQIVTYQSLPTLQISSPISLHQLQAVLGDLQWVSRGTPTTRRPLQLLYSSLKRHHDPRAIIQLSPEQLQGI |
| | | | AELRQALSHNARSRYNEQEPLLAYVHLTRAGSTLVLFQKGAQFPLAYFQTPLTDNQASPWGLLLLLGCQYLQTQALSSYAKPILKYYHNLPKTSLDNWIQSSEDPR |
| | | | VQELLQLWPQISSQGIQPPGPWKTLITRAEVFLTPQFSPDPIPAALCLFSDGATGRGAYCLWKDHLLDFQAVPAPESAQKGELAGLLAGLAAAPPEPVNIWVDSKY |
| | | | LYSLLRTLVLGAWLQPDPVPSYALLYKSLLRHPAIVVGHVRSHSSASHPIASLNNYVDQLAGKRTADGSEFEKRTADGSEFESPKKKAKVEGSGEGRGSLLTCGDV |
| | | | EENPG |
| BLV | 9 | 3731 | MPAAKRVKLDGGDKKYSIGLDIGTNSVGWAVITDEYKVPSKKFKVLGNTDRHSIKKNLIGALLFDSGETAEATRLKRTARRRYTRRKNRICYLQEIFSNEMAKVDD |
| | | | SFFHRLEESFLVEEDKKHERHPIFGNIVDEVAYHEKYPTIYHLRKKLVDSTDKADLRLIYLALAHMIKFRGHFLIEGDLNPDNSDVDKLFIQLVQTYNQLFEENPI |
| | | | NASGVDAKAILSARLSKSRRLENLIAQLPGEKKNGLFGNLIALSLGLTPNFKSNFDLAEDAKLQLSKDTYDDDLDNLLAQIGDQYADLFLAAKNLSDAILLSDILR |
| | | | VNTEITKAPLSASMIKRYDEHHQDLTLLKALVRQQLPEKYKEIFFDQSKNGYAGYIDGGASQEEFYKFIKPILEKMDGTEELLVKLNREDLLRKQRTFDNGSIPHQ |
| | | | IHLGELHAILRRQEDFYPFLKDNREKIEKILTFRIPYYVGPLARGNSRFAWMTRKSEETITPWNFEEVVDKGASAQSFIERMTNFDKNLPNEKVLPKHSLLYEYFT |
| | | | VYNELTKVKYVTEGMRKPAFLSGEQKKAIVDLLFKTNRKVTVKQLKEDYFKKIECFDSVEISGVEDRFNASLGTYHDLLKIIKDKDFLDNEENEDILEDIVLTLTL |
| | | | FEDREMIEERLKTYAHLFDDKVMKQLKRRRYTGWGRLSRKLINGIRDKQSGKTILDFLKSDGFANRNFMQLIHDDSLTFKEDIQKAQVSGQGDSLHEHIANLAGSP |
| | | | AIKKGILQTVKVVDELVKVMGRHKPENIVIEMARENQTTQKGQKNSRERMKRIEEGIKELGSQILKEHPVENTQLQNEKLYLYYLQNGRDMYVDQELDINRLSDYD |
| | | | VDHIVPQSFLKDDSIDNKVLTRSDKARGKSDNVPSEEVVKKMKNYWRQLLNAKLITQRKFDNLTKAERGGLSELDKAGFIKRQLVETRQITKHVAQILDSRMNTKY |
| | | | DENDKLIREVKVITLKSKLVSDFRKDFQFYKVREINNYHHAHDAYLNAVVGTALIKKYPKLESEFVYGDYKVYDVRKMIAKSEQEIGKATAKYFFYSNIMNFFKTE |
| | | | ITLANGEIRKRPLIETNGETGEIVWDKGRDFATVRKVLSMPQVNIVKKTEVQTGGFSKESILPKRNSDKLIARKKDWDPKKYGGFDSPTVAYSVLVVAKVEKGKSK |
| | | | KLKSVKELLGITIMERSSFEKNPIDFLEAKGYKEVKKDLIIKLPKYSLFELENGRKRMLASAGELQKGNELALPSKYVNFLYLASHYEKLKGSPEDNEQKQLFVEQ |
| | | | HKHYLDEIIEQISEFSKRVILADANLDKVLSAYNKHRDKPIREQAENIIHLFTLTNLGAPAAFKYFDTTIDRKRYTSTKEVLDATLIHQSITGLYETRIDLSQLGG |
| | | | DGGGSSGGSEAAAKGGGVLDTPPSHIGLEHLPPPPEVPQFPLNLERLQALQDLVHRSLEAGYISPWDGPGNNPVFPVRKPNGAWRFVHDLRATNALTKPIPALSPG |
| | | | PPDLTAIPTHPPHIICLDLKDAFFQIPVEDRFRFYLSFTLPSPGGLQPHRRFAWRVLPQGFINSPALFERALQEPLRQVSAAFSQSLLVSYMDDILYASPTEEQRS |
| | | | QCYQALAARLRDLGFQVASEKTSQTPSPVPFLGQMVHEQIVTYQSLPTLQISSPISLHQLQAVLGDLQWVSRGTPTTRRPLQLLYSSLKRHHDPRAIIQLSPEQLQ |
| | | | GIAELRQALSHNARSRYNEQEPLLAYVHLTRAGSTLVLFQKGAQFPLAYFQTPLTDNQASPWGLLLLLGCQYLQTQALSSYAKPILKYYHNLPKTSLDNWIQSSED |
| | | | PRVQELLQLWPQISSQGIQPPGPWKTLITRAEVFLTPQFSPDPIPAALCLFSDGATGRGAYCLWKDHLLDFQAVPAPESAQKGELAGLLAGLAAAPPEPVNIWVDS |
| | | | KYLYSLLRTLVLGAWLQPDPVPSYALLYKSLLRHPAIVVGHVRSHSSASHPIASLNNYVDQLAGKRTADGSEFEKRTADGSEFESPKKKAKVEGSGEGRGSLLTCG |
| | | | DVEENPG |
| BLV | 10 | 3732 | MPAAKRVKLDGGDKKYSIGLDIGTNSVGWAVITDEYKVPSKKFKVLGNTDRHSIKKNLIGALLFDSGETAEATRLKRTARRRYTRRKNRICYLQEIFSNEMAKVDD |
| | | | SFFHRLEESFLVEEDKKHERHPIFGNIVDEVAYHEKYPTIYHLRKKLVDSTDKADLRLIYLALAHMIKFRGHFLIEGDLNPDNSDVDKLFIQLVQTYNQLFEENPI |
| | | | NASGVDAKAILSARLSKSRRLENLIAQLPGEKKNGLFGNLIALSLGLTPNFKSNFDLAEDAKLQLSKDTYDDDLDNLLAQIGDQYADLFLAAKNLSDAILLSDILR |
| | | | VNTEITKAPLSASMIKRYDEHHQDLTLLKALVRQQLPEKYKEIFFDQSKNGYAGYIDGGASQEEFYKFIKPILEKMDGTEELLVKLNREDLLRKQRTFDNGSIPHQ |
| | | | IHLGELHAILRRQEDFYPFLKDNREKIEKILTFRIPYYVGPLARGNSRFAWMTRKSEETITPWNFEEVVDKGASAQSFIERMTNFDKNLPNEKVLPKHSLLYEYFT |
| | | | VYNELTKVKYVTEGMRKPAFLSGEQKKAIVDLLFKTNRKVTVKQLKEDYFKKIECFDSVEISGVEDRFNASLGTYHDLLKIIKDKDFLDNEENEDILEDIVLTLTL |
| | | | FEDREMIEERLKTYAHLFDDKVMKQLKRRRYTGWGRLSRKLINGIRDKQSGKTILDFLKSDGFANRNFMQLIHDDSLTFKEDIQKAQVSGQGDSLHEHIANLAGSP |
| | | | AIKKGILQTVKVVDELVKVMGRHKPENIVIEMARENQTTQKGQKNSRERMKRIEEGIKELGSQILKEHPVENTQLQNEKLYLYYLQNGRDMYVDQELDINRLSDYD |
| | | | VDHIVPQSFLKDDSIDNKVLTRSDKARGKSDNVPSEEVVKKMKNYWRQLLNAKLITQRKFDNLTKAERGGLSELDKAGFIKRQLVETRQITKHVAQILDSRMNTKY |
| | | | DENDKLIREVKVITLKSKLVSDFRKDFQFYKVREINNYHHAHDAYLNAVVGTALIKKYPKLESEFVYGDYKVYDVRKMIAKSEQEIGKATAKYFFYSNIMNFFKTE |
| | | | ITLANGEIRKRPLIETNGETGEIVWDKGRDFATVRKVLSMPQVNIVKKTEVQTGGFSKESILPKRNSDKLIARKKDWDPKKYGGFDSPTVAYSVLVVAKVEKGKSK |
| | | | KLKSVKELLGITIMERSSFEKNPIDFLEAKGYKEVKKDLIIKLPKYSLFELENGRKRMLASAGELQKGNELALPSKYVNFLYLASHYEKLKGSPEDNEQKQLFVEQ |
| | | | HKHYLDEIIEQISEFSKRVILADANLDKVLSAYNKHRDKPIREQAENIIHLFTLTNLGAPAAFKYFDTTIDRKRYTSTKEVLDATLIHQSITGLYETRIDLSQLGG |
| | | | DGGGGSEAAAKPAPGGGVLDTPPSHIGLEHLPPPPEVPQFPLNLERLQALQDLVHRSLEAGYISPWDGPGNNPVFPVRKPNGAWRFVHDLRATNALTKPIPALSPG |
| | | | PPDLTAIPTHPPHIICLDLKDAFFQIPVEDRFRFYLSFTLPSPGGLQPHRRFAWRVLPQGFINSPALFERALQEPLRQVSAAFSQSLLVSYMDDILYASPTEEQRS |
| | | | QCYQALAARLRDLGFQVASEKTSQTPSPVPFLGQMVHEQIVTYQSLPTLQISSPISLHQLQAVLGDLQWVSRGTPTTRRPLQLLYSSLKRHHDPRAIIQLSPEQLQ |
| | | | GIAELRQALSHNARSRYNEQEPLLAYVHLTRAGSTLVLFQKGAQFPLAYFQTPLTDNQASPWGLLLLLGCQYLQTQALSSYAKPILKYYHNLPKTSLDNWIQSSED |
| | | | PRVQELLQLWPQISSQGIQPPGPWKTLITRAEVFLTPQFSPDPIPAALCLFSDGATGRGAYCLWKDHLLDFQAVPAPESAQKGELAGLLAGLAAAPPEPVNIWVDS |
| | | | KYLYSLLRTLVLGAWLQPDPVPSYALLYKSLLRHPAIVVGHVRSHSSASHPIASLNNYVDQLAGKRTADGSEFEKRTADGSEFESPKKKAKVEGSGEGRGSLLTCG |
| | | | DVEENPG |
| BLV | 11 | 3733 | MPAAKRVKLDGGDKKYSIGLDIGTNSVGWAVITDEYKVPSKKFKVLGNTDRHSIKKNLIGALLFDSGETAEATRLKRTARRRYTRRKNRICYLQEIFSNEMAKVDD |
| | | | SFFHRLEESFLVEEDKKHERHPIFGNIVDEVAYHEKYPTIYHLRKKLVDSTDKADLRLIYLALAHMIKFRGHFLIEGDLNPDNSDVDKLFIQLVQTYNQLFEENPI |
| | | | NASGVDAKAILSARLSKSRRLENLIAQLPGEKKNGLFGNLIALSLGLTPNFKSNFDLAEDAKLQLSKDTYDDDLDNLLAQIGDQYADLFLAAKNLSDAILLSDILR |
| | | | VNTEITKAPLSASMIKRYDEHHQDLTLLKALVRQQLPEKYKEIFFDQSKNGYAGYIDGGASQEEFYKFIKPILEKMDGTEELLVKLNREDLLRKQRTFDNGSIPHQ |
| | | | IHLGELHAILRRQEDFYPFLKDNREKIEKILTFRIPYYVGPLARGNSRFAWMTRKSEETITPWNFEEVVDKGASAQSFIERMTNFDKNLPNEKVLPKHSLLYEYFT |
| | | | VYNELTKVKYVTEGMRKPAFLSGEQKKAIVDLLFKTNRKVTVKQLKEDYFKKIECFDSVEISGVEDRFNASLGTYHDLLKIIKDKDFLDNEENEDILEDIVLTLTL |
| | | | FEDREMIEERLKTYAHLFDDKVMKQLKRRRYTGWGRLSRKLINGIRDKQSGKTILDFLKSDGFANRNFMQLIHDDSLTFKEDIQKAQVSGQGDSLHEHIANLAGSP |
| | | | AIKKGILQTVKVVDELVKVMGRHKPENIVIEMARENQTTQKGQKNSRERMKRIEEGIKELGSQILKEHPVENTQLQNEKLYLYYLQNGRDMYVDQELDINRLSDYD |
| | | | VDHIVPQSFLKDDSIDNKVLTRSDKARGKSDNVPSEEVVKKMKNYWRQLLNAKLITQRKFDNLTKAERGGLSELDKAGFIKRQLVETRQITKHVAQILDSRMNTKY |
| | | | DENDKLIREVKVITLKSKLVSDFRKDFQFYKVREINNYHHAHDAYLNAVVGTALIKKYPKLESEFVYGDYKVYDVRKMIAKSEQEIGKATAKYFFYSNIMNFFKTE |
| | | | ITLANGEIRKRPLIETNGETGEIVWDKGRDFATVRKVLSMPQVNIVKKTEVQTGGFSKESILPKRNSDKLIARKKDWDPKKYGGFDSPTVAYSVLVVAKVEKGKSK |
| | | | KLKSVKELLGITIMERSSFEKNPIDFLEAKGYKEVKKDLIIKLPKYSLFELENGRKRMLASAGELQKGNELALPSKYVNFLYLASHYEKLKGSPEDNEQKQLFVEQ |
| | | | HKHYLDEIIEQISEFSKRVILADANLDKVLSAYNKHRDKPIREQAENIIHLFTLTNLGAPAAFKYFDTTIDRKRYTSTKEVLDATLIHQSITGLYETRIDLSQLGG |
| | | | DGGAEAAAKEAAAKEAAAKEAAAKALEAEAAAKEAAAKEAAAKEAAAKAGGGVLDTPPSHIGLEHLPPPPEVPQFPLNLERLQALQDLVHRSLEAGYISPWDGPGN |
| | | | NPVFPVRKPNGAWRFVHDLRATNALTKPIPALSPGPPDLTAIPTHPPHIICLDLKDAFFQIPVEDRFRFYLSFTLPSPGGLQPHRRFAWRVLPQGFINSPALFERA |
| | | | LQEPLRQVSAAFSQSLLVSYMDDILYASPTEEQRSQCYQALAARLRDLGFQVASEKTSQTPSPVPFLGQMVHEQIVTYQSLPTLQISSPISLHQLQAVLGDLQWVS |
| | | | RGTPTTRRPLQLLYSSLKRHHDPRAIIQLSPEQLQGIAELRQALSHNARSRYNEQEPLLAYVHLTRAGSTLVLFQKGAQFPLAYFQTPLTDNQASPWGLLLLLGCQ |
| | | | YLQTQALSSYAKPILKYYHNLPKTSLDNWIQSSEDPRVQELLQLWPQISSQGIQPPGPWKTLITRAEVFLTPQFSPDPIPAALCLFSDGATGRGAYCLWKDHLLDF |
| | | | QAVPAPESAQKGELAGLLAGLAAAPPEPVNIWVDSKYLYSLLRTLVLGAWLQPDPVPSYALLYKSLLRHPAIVVGHVRSHSSASHPIASLNNYVDQLAGKRTADGS |
| | | | EFEKRTADGSEFESPKKKAKVEGSGEGRGSLLTCGDVEENPG |
| BLV | 12 | 3734 | MPAAKRVKLDGGDKKYSIGLDIGTNSVGWAVITDEYKVPSKKFKVLGNTDRHSIKKNLIGALLFDSGETAEATRLKRTARRRYTRRKNRICYLQEIFSNEMAKVDD |
| | | | SFFHRLEESFLVEEDKKHERHPIFGNIVDEVAYHEKYPTIYHLRKKLVDSTDKADLRLIYLALAHMIKFRGHFLIEGDLNPDNSDVDKLFIQLVQTYNQLFEENPI |
| | | | NASGVDAKAILSARLSKSRRLENLIAQLPGEKKNGLFGNLIALSLGLTPNFKSNFDLAEDAKLQLSKDTYDDDLDNLLAQIGDQYADLFLAAKNLSDAILLSDILR |
| | | | VNTEITKAPLSASMIKRYDEHHQDLTLLKALVRQQLPEKYKEIFFDQSKNGYAGYIDGGASQEEFYKFIKPILEKMDGTEELLVKLNREDLLRKQRTFDNGSIPHQ |
| | | | IHLGELHAILRRQEDFYPFLKDNREKIEKILTFRIPYYVGPLARGNSRFAWMTRKSEETITPWNFEEVVDKGASAQSFIERMTNFDKNLPNEKVLPKHSLLYEYFT |
| | | | VYNELTKVKYVTEGMRKPAFLSGEQKKAIVDLLFKTNRKVTVKQLKEDYFKKIECFDSVEISGVEDRFNASLGTYHDLLKIIKDKDFLDNEENEDILEDIVLTLTL |
| | | | FEDREMIEERLKTYAHLFDDKVMKQLKRRRYTGWGRLSRKLINGIRDKQSGKTILDFLKSDGFANRNFMQLIHDDSLTFKEDIQKAQVSGQGDSLHEHIANLAGSP |
| | | | AIKKGILQTVKVVDELVKVMGRHKPENIVIEMARENQTTQKGQKNSRERMKRIEEGIKELGSQILKEHPVENTQLQNEKLYLYYLQNGRDMYVDQELDINRLSDYD |
| | | | VDHIVPQSFLKDDSIDNKVLTRSDKARGKSDNVPSEEVVKKMKNYWRQLLNAKLITQRKFDNLTKAERGGLSELDKAGFIKRQLVETRQITKHVAQILDSRMNTKY |
| | | | DENDKLIREVKVITLKSKLVSDFRKDFQFYKVREINNYHHAHDAYLNAVVGTALIKKYPKLESEFVYGDYKVYDVRKMIAKSEQEIGKATAKYFFYSNIMNFFKTE |
| | | | ITLANGEIRKRPLIETNGETGEIVWDKGRDFATVRKVLSMPQVNIVKKTEVQTGGFSKESILPKRNSDKLIARKKDWDPKKYGGFDSPTVAYSVLVVAKVEKGKSK |
| | | | KLKSVKELLGITIMERSSFEKNPIDFLEAKGYKEVKKDLIIKLPKYSLFELENGRKRMLASAGELQKGNELALPSKYVNFLYLASHYEKLKGSPEDNEQKQLFVEQ |
| | | | HKHYLDEIIEQISEFSKRVILADANLDKVLSAYNKHRDKPIREQAENIIHLFTLTNLGAPAAFKYFDTTIDRKRYTSTKEVLDATLIHQSITGLYETRIDLSQLGG |
| | | | DGGSGGSSGGSSGSETPGTSESATPESSGGSSGGSSGGGVLDTPPSHIGLEHLPPPPEVPQFPLNLERLQALQDLVHRSLEAGYISPWDGPGNNPVFPVRKPNGAW |
| | | | RFVHDLRATNALTKPIPALSPGPPDLTAPPTHPPHIICLDLKDAFFQIPVEDRFRFYLSFTLPSPGGLQPHRRFAWRVLPQGFINSPALFQRALQEPLRQVSAAFS |
| | | | QSLLVSYMDDILYASPTEEQRSQCYQALAARLRDLGFQVASEKTSQTPSPVPFLGQMVHEQIVTYQSLPTLQISSPISLHQLQAVLGDLQWVSRGTPTTRRPLQLL |
| | | | YSSLKRHHDPRAIIQLSPEQLQGIAELRQALSHNARSRYNEQEPLLAYVHLTRAGSTLVLFQKGAQFPLAYFQTPLTDNQASPWGLLLLLGCQYLQTQALSSYAKP |
| | | | ILKYYHNLPKTSLDNWIQSSEDPRVQELLQLWPQISSQGIQPPGPWKTLITRAEVFLTPQFSPDPIPAALCLFSDGATGRGAYCLWKDHLLDFQAVPAPESAQKGE |
| | | | LAGLLAGLAAAPPEPVNIWVDSKYLYSLLRTWVLGAWLQPDPVPSYALLYKSLLRHPAIVVGHVRSHSSASHPIASLNNYVDQLAGKRTADGSEFEKRTADGSEFE |
| | | | SPKKKAKVEGSGEGRGSLLTCGDVEENPG |
| BLV | 13 | 3735 | MPAAKRVKLDGGDKKYSIGLDIGTNSVGWAVITDEYKVPSKKFKVLGNTDRHSIKKNLIGALLFDSGETAEATRLKRTARRRYTRRKNRICYLQEIFSNEMAKVDD |
| | | | SFFHRLEESFLVEEDKKHERHPIFGNIVDEVAYHEKYPTIYHLRKKLVDSTDKADLRLIYLALAHMIKFRGHFLIEGDLNPDNSDVDKLFIQLVQTYNQLFEENPI |
| | | | NASGVDAKAILSARLSKSRRLENLIAQLPGEKKNGLFGNLIALSLGLTPNFKSNFDLAEDAKLQLSKDTYDDDLDNLLAQIGDQYADLFLAAKNLSDAILLSDILR |
| | | | VNTEITKAPLSASMIKRYDEHHQDLTLLKALVRQQLPEKYKEIFFDQSKNGYAGYIDGGASQEEFYKFIKPILEKMDGTEELLVKLNREDLLRKQRTFDNGSIPHQ |
| | | | IHLGELHAILRRQEDFYPFLKDNREKIEKILTFRIPYYVGPLARGNSRFAWMTRKSEETITPWNFEEVVDKGASAQSFIERMTNFDKNLPNEKVLPKHSLLYEYFT |
| | | | VYNELTKVKYVTEGMRKPAFLSGEQKKAIVDLLFKTNRKVTVKQLKEDYFKKIECFDSVEISGVEDRFNASLGTYHDLLKIIKDKDFLDNEENEDILEDIVLTLTL |
| | | | FEDREMIEERLKTYAHLFDDKVMKQLKRRRYTGWGRLSRKLINGIRDKQSGKTILDFLKSDGFANRNFMQLIHDDSLTFKEDIQKAQVSGQGDSLHEHIANLAGSP |
| | | | AIKKGILQTVKVVDELVKVMGRHKPENIVIEMARENQTTQKGQKNSRERMKRIEEGIKELGSQILKEHPVENTQLQNEKLYLYYLQNGRDMYVDQELDINRLSDYD |
| | | | VDHIVPQSFLKDDSIDNKVLTRSDKARGKSDNVPSEEVVKKMKNYWRQLLNAKLITQRKFDNLTKAERGGLSELDKAGFIKRQLVETRQITKHVAQILDSRMNTKY |
| | | | DENDKLIREVKVITLKSKLVSDFRKDFQFYKVREINNYHHAHDAYLNAVVGTALIKKYPKLESEFVYGDYKVYDVRKMIAKSEQEIGKATAKYFFYSNIMNFFKTE |
| | | | ITLANGEIRKRPLIETNGETGEIVWDKGRDFATVRKVLSMPQVNIVKKTEVQTGGFSKESILPKRNSDKLIARKKDWDPKKYGGFDSPTVAYSVLVVAKVEKGKSK |
| | | | KLKSVKELLGITIMERSSFEKNPIDFLEAKGYKEVKKDLIIKLPKYSLFELENGRKRMLASAGELQKGNELALPSKYVNFLYLASHYEKLKGSPEDNEQKQLFVEQ |
| | | | HKHYLDEIIEQISEFSKRVILADANLDKVLSAYNKHRDKPIREQAENIIHLFTLTNLGAPAAFKYFDTTIDRKRYTSTKEVLDATLIHQSITGLYETRIDLSQLGG |
| | | | DGGPAPGGGGSSGGGVLDTPPSHIGLEHLPPPPEVPQFPLNLERLQALQDLVHRSLEAGYISPWDGPGNNPVFPVRKPNGAWRFVHDLRATNALTKPIPALSPGPP |
| | | | DLTAPPTHPPHIICLDLKDAFFQIPVEDRFRFYLSFTLPSPGGLQPHRRFAWRVLPQGFINSPALFQRALQEPLRQVSAAFSQSLLVSYMDDILYASPTEEQRSQC |
| | | | YQALAARLRDLGFQVASEKTSQTPSPVPFLGQMVHEQIVTYQSLPTLQISSPISLHQLQAVLGDLQWVSRGTPTTRRPLQLLYSSLKRHHDPRAIIQLSPEQLQGI |
| | | | AELRQALSHNARSRYNEQEPLLAYVHLTRAGSTLVLFQKGAQFPLAYFQTPLTDNQASPWGLLLLLGCQYLQTQALSSYAKPILKYYHNLPKTSLDNWIQSSEDPR |
| | | | VQELLQLWPQISSQGIQPPGPWKTLITRAEVFLTPQFSPDPIPAALCLFSDGATGRGAYCLWKDHLLDFQAVPAPESAQKGELAGLLAGLAAAPPEPVNIWVDSKY |
| | | | LYSLLRTWVLGAWLQPDPVPSYALLYKSLLRHPAIVVGHVRSHSSASHPIASLNNYVDQLAGKRTADGSEFEKRTADGSEFESPKKKAKVEGSGEGRGSLLTCGDV |
| | | | EENPG |
| BLV | 14 | 3736 | MPAAKRVKLDGGDKKYSIGLDIGTNSVGWAVITDEYKVPSKKFKVLGNTDRHSIKKNLIGALLFDSGETAEATRLKRTARRRYTRRKNRICYLQEIFSNEMAKVDD |
| | | | SFFHRLEESFLVEEDKKHERHPIFGNIVDEVAYHEKYPTIYHLRKKLVDSTDKADLRLIYLALAHMIKFRGHFLIEGDLNPDNSDVDKLFIQLVQTYNQLFEENPI |
| | | | NASGVDAKAILSARLSKSRRLENLIAQLPGEKKNGLFGNLIALSLGLTPNFKSNFDLAEDAKLQLSKDTYDDDLDNLLAQIGDQYADLFLAAKNLSDAILLSDILR |
| | | | VNTEITKAPLSASMIKRYDEHHQDLTLLKALVRQQLPEKYKEIFFDQSKNGYAGYIDGGASQEEFYKFIKPILEKMDGTEELLVKLNREDLLRKQRTFDNGSIPHQ |
| | | | IHLGELHAILRRQEDFYPFLKDNREKIEKILTFRIPYYVGPLARGNSRFAWMTRKSEETITPWNFEEVVDKGASAQSFIERMTNFDKNLPNEKVLPKHSLLYEYFT |
| | | | VYNELTKVKYVTEGMRKPAFLSGEQKKAIVDLLFKTNRKVTVKQLKEDYFKKIECFDSVEISGVEDRFNASLGTYHDLLKIIKDKDFLDNEENEDILEDIVLTLTL |
| | | | FEDREMIEERLKTYAHLFDDKVMKQLKRRRYTGWGRLSRKLINGIRDKQSGKTILDFLKSDGFANRNFMQLIHDDSLTFKEDIQKAQVSGQGDSLHEHIANLAGSP |
| | | | AIKKGILQTVKVVDELVKVMGRHKPENIVIEMARENQTTQKGQKNSRERMKRIEEGIKELGSQILKEHPVENTQLQNEKLYLYYLQNGRDMYVDQELDINRLSDYD |
| | | | VDHIVPQSFLKDDSIDNKVLTRSDKARGKSDNVPSEEVVKKMKNYWRQLLNAKLITQRKFDNLTKAERGGLSELDKAGFIKRQLVETRQITKHVAQILDSRMNTKY |
| | | | DENDKLIREVKVITLKSKLVSDFRKDFQFYKVREINNYHHAHDAYLNAVVGTALIKKYPKLESEFVYGDYKVYDVRKMIAKSEQEIGKATAKYFFYSNIMNFFKTE |
| | | | ITLANGEIRKRPLIETNGETGEIVWDKGRDFATVRKVLSMPQVNIVKKTEVQTGGFSKESILPKRNSDKLIARKKDWDPKKYGGFDSPTVAYSVLVVAKVEKGKSK |
| | | | KLKSVKELLGITIMERSSFEKNPIDFLEAKGYKEVKKDLIIKLPKYSLFELENGRKRMLASAGELQKGNELALPSKYVNFLYLASHYEKLKGSPEDNEQKQLFVEQ |
| | | | HKHYLDEIIEQISEFSKRVILADANLDKVLSAYNKHRDKPIREQAENIIHLFTLTNLGAPAAFKYFDTTIDRKRYTSTKEVLDATLIHQSITGLYETRIDLSQLGG |
| | | | DGGGSAGSAAGSGEFGGGVLDTPPSHIGLEHLPPPPEVPQFPLNLERLQALQDLVHRSLEAGYISPWDGPGNNPVFPVRKPNGAWRFVHDLRATNALTKPIPALSP |
| | | | GPPDLTAPPTHPPHIICLDLKDAFFQIPVEDRFRFYLSFTLPSPGGLQPHRRFAWRVLPQGFINSPALFQRALQEPLRQVSAAFSQSLLVSYMDDILYASPTEEQR |
| | | | SQCYQALAARLRDLGFQVASEKTSQTPSPVPFLGQMVHEQIVTYQSLPTLQISSPISLHQLQAVLGDLQWVSRGTPTTRRPLQLLYSSLKRHHDPRAIIQLSPEQL |
| | | | QGIAELRQALSHNARSRYNEQEPLLAYVHLTRAGSTLVLFQKGAQFPLAYFQTPLTDNQASPWGLLLLLGCQYLQTQALSSYAKPILKYYHNLPKTSLDNWIQSSE |
| | | | DPRVQELLQLWPQISSQGIQPPGPWKTLITRAEVFLTPQFSPDPIPAALCLFSDGATGRGAYCLWKDHLLDFQAVPAPESAQKGELAGLLAGLAAAPPEPVNIWVD |
| | | | SKYLYSLLRTWVLGAWLQPDPVPSYALLYKSLLRHPAIVVGHVRSHSSASHPIASLNNYVDQLAGKRTADGSEFEKRTADGSEFESPKKKAKVEGSGEGRGSLLTC |
| | | | GDVEENPG |
| BLV | 15 | 3737 | MPAAKRVKLDGGDKKYSIGLDIGTNSVGWAVITDEYKVPSKKFKVLGNTDRHSIKKNLIGALLFDSGETAEATRLKRTARRRYTRRKNRICYLQEIFSNEMAKVDD |
| | | | SFFHRLEESFLVEEDKKHERHPIFGNIVDEVAYHEKYPTIYHLRKKLVDSTDKADLRLIYLALAHMIKFRGHFLIEGDLNPDNSDVDKLFIQLVQTYNQLFEENPI |
| | | | NASGVDAKAILSARLSKSRRLENLIAQLPGEKKNGLFGNLIALSLGLTPNFKSNFDLAEDAKLQLSKDTYDDDLDNLLAQIGDQYADLFLAAKNLSDAILLSDILR |
| | | | VNTEITKAPLSASMIKRYDEHHQDLTLLKALVRQQLPEKYKEIFFDQSKNGYAGYIDGGASQEEFYKFIKPILEKMDGTEELLVKLNREDLLRKQRTFDNGSIPHQ |
| | | | IHLGELHAILRRQEDFYPFLKDNREKIEKILTFRIPYYVGPLARGNSRFAWMTRKSEETITPWNFEEVVDKGASAQSFIERMTNFDKNLPNEKVLPKHSLLYEYFT |
| | | | VYNELTKVKYVTEGMRKPAFLSGEQKKAIVDLLFKTNRKVTVKQLKEDYFKKIECFDSVEISGVEDRFNASLGTYHDLLKIIKDKDFLDNEENEDILEDIVLTLTL |
| | | | FEDREMIEERLKTYAHLFDDKVMKQLKRRRYTGWGRLSRKLINGIRDKQSGKTILDFLKSDGFANRNFMQLIHDDSLTFKEDIQKAQVSGQGDSLHEHIANLAGSP |
| | | | AIKKGILQTVKVVDELVKVMGRHKPENIVIEMARENQTTQKGQKNSRERMKRIEEGIKELGSQILKEHPVENTQLQNEKLYLYYLQNGRDMYVDQELDINRLSDYD |
| | | | VDHIVPQSFLKDDSIDNKVLTRSDKARGKSDNVPSEEVVKKMKNYWRQLLNAKLITQRKFDNLTKAERGGLSELDKAGFIKRQLVETRQITKHVAQILDSRMNTKY |
| | | | DENDKLIREVKVITLKSKLVSDFRKDFQFYKVREINNYHHAHDAYLNAVVGTALIKKYPKLESEFVYGDYKVYDVRKMIAKSEQEIGKATAKYFFYSNIMNFFKTE |
| | | | ITLANGEIRKRPLIETNGETGEIVWDKGRDFATVRKVLSMPQVNIVKKTEVQTGGFSKESILPKRNSDKLIARKKDWDPKKYGGFDSPTVAYSVLVVAKVEKGKSK |
| | | | KLKSVKELLGITIMERSSFEKNPIDFLEAKGYKEVKKDLIIKLPKYSLFELENGRKRMLASAGELQKGNELALPSKYVNFLYLASHYEKLKGSPEDNEQKQLFVEQ |
| | | | HKHYLDEIIEQISEFSKRVILADANLDKVLSAYNKHRDKPIREQAENIIHLFTLTNLGAPAAFKYFDTTIDRKRYTSTKEVLDATLIHQSITGLYETRIDLSQLGG |
| | | | DGGGGGGGGVLDTPPSHIGLEHLPPPPEVPQFPLNLERLQALQDLVHRSLEAGYISPWDGPGNNPVFPVRKPNGAWRFVHDLRATNALTKPIPALSPGPPDLTAPP |
| | | | THPPHIICLDLKDAFFQIPVEDRFRFYLSFTLPSPGGLQPHRRFAWRVLPQGFINSPALFQRALQEPLRQVSAAFSQSLLVSYMDDILYASPTEEQRSQCYQALAA |
| | | | RLRDLGFQVASEKTSQTPSPVPFLGQMVHEQIVTYQSLPTLQISSPISLHQLQAVLGDLQWVSRGTPTTRRPLQLLYSSLKRHHDPRAIIQLSPEQLQGIAELRQA |
| | | | LSHNARSRYNEQEPLLAYVHLTRAGSTLVLFQKGAQFPLAYFQTPLTDNQASPWGLLLLLGCQYLQTQALSSYAKPILKYYHNLPKTSLDNWIQSSEDPRVQELLQ |
| | | | LWPQISSQGIQPPGPWKTLITRAEVFLTPQFSPDPIPAALCLFSDGATGRGAYCLWKDHLLDFQAVPAPESAQKGELAGLLAGLAAAPPEPVNIWVDSKYLYSLLR |
| | | | TWVLGAWLQPDPVPSYALLYKSLLRHPAIVVGHVRSHSSASHPIASLNNYVDQLAGKRTADGSEFEKRTADGSEFESPKKKAKVEGSGEGRGSLLTCGDVEENPG |
| BLV | 16 | 3738 | MPAAKRVKLDGGDKKYSIGLDIGTNSVGWAVITDEYKVPSKKFKVLGNTDRHSIKKNLIGALLFDSGETAEATRLKRTARRRYTRRKNRICYLQEIFSNEMAKVDD |
| | | | SFFHRLEESFLVEEDKKHERHPIFGNIVDEVAYHEKYPTIYHLRKKLVDSTDKADLRLIYLALAHMIKFRGHFLIEGDLNPDNSDVDKLFIQLVQTYNQLFEENPI |
| | | | NASGVDAKAILSARLSKSRRLENLIAQLPGEKKNGLFGNLIALSLGLTPNFKSNFDLAEDAKLQLSKDTYDDDLDNLLAQIGDQYADLFLAAKNLSDAILLSDILR |
| | | | VNTEITKAPLSASMIKRYDEHHQDLTLLKALVRQQLPEKYKEIFFDQSKNGYAGYIDGGASQEEFYKFIKPILEKMDGTEELLVKLNREDLLRKQRTFDNGSIPHQ |
| | | | IHLGELHAILRRQEDFYPFLKDNREKIEKILTFRIPYYVGPLARGNSRFAWMTRKSEETITPWNFEEVVDKGASAQSFIERMTNFDKNLPNEKVLPKHSLLYEYFT |
| | | | VYNELTKVKYVTEGMRKPAFLSGEQKKAIVDLLFKTNRKVTVKQLKEDYFKKIECFDSVEISGVEDRFNASLGTYHDLLKIIKDKDFLDNEENEDILEDIVLTLTL |
| | | | FEDREMIEERLKTYAHLFDDKVMKQLKRRRYTGWGRLSRKLINGIRDKQSGKTILDFLKSDGFANRNFMQLIHDDSLTFKEDIQKAQVSGQGDSLHEHIANLAGSP |
| | | | AIKKGILQTVKVVDELVKVMGRHKPENIVIEMARENQTTQKGQKNSRERMKRIEEGIKELGSQILKEHPVENTQLQNEKLYLYYLQNGRDMYVDQELDINRLSDYD |
| | | | VDHIVPQSFLKDDSIDNKVLTRSDKARGKSDNVPSEEVVKKMKNYWRQLLNAKLITQRKFDNLTKAERGGLSELDKAGFIKRQLVETRQITKHVAQILDSRMNTKY |
| | | | DENDKLIREVKVITLKSKLVSDFRKDFQFYKVREINNYHHAHDAYLNAVVGTALIKKYPKLESEFVYGDYKVYDVRKMIAKSEQEIGKATAKYFFYSNIMNFFKTE |
| | | | ITLANGEIRKRPLIETNGETGEIVWDKGRDFATVRKVLSMPQVNIVKKTEVQTGGFSKESILPKRNSDKLIARKKDWDPKKYGGFDSPTVAYSVLVVAKVEKGKSK |
| | | | KLKSVKELLGITIMERSSFEKNPIDFLEAKGYKEVKKDLIIKLPKYSLFELENGRKRMLASAGELQKGNELALPSKYVNFLYLASHYEKLKGSPEDNEQKQLFVEQ |
| | | | HKHYLDEIIEQISEFSKRVILADANLDKVLSAYNKHRDKPIREQAENIIHLFTLTNLGAPAAFKYFDTTIDRKRYTSTKEVLDATLIHQSITGLYETRIDLSQLGG |
| | | | DGGGGGGGGGGGVLDTPPSHIGLEHLPPPPEVPQFPLNLERLQALQDLVHRSLEAGYISPWDGPGNNPVFPVRKPNGAWRFVHDLRATNALTKPIPALSPGPPDLT |
| | | | APPTHPPHIICLDLKDAFFQIPVEDRFRFYLSFTLPSPGGLQPHRRFAWRVLPQGFINSPALFQRALQEPLRQVSAAFSQSLLVSYMDDILYASPTEEQRSQCYQA |
| | | | LAARLRDLGFQVASEKTSQTPSPVPFLGQMVHEQIVTYQSLPTLQISSPISLHQLQAVLGDLQWVSRGTPTTRRPLQLLYSSLKRHHDPRAIIQLSPEQLQGIAEL |
| | | | RQALSHNARSRYNEQEPLLAYVHLTRAGSTLVLFQKGAQFPLAYFQTPLTDNQASPWGLLLLLGCQYLQTQALSSYAKPILKYYHNLPKTSLDNWIQSSEDPRVQE |
| | | | LLQLWPQISSQGIQPPGPWKTLITRAEVFLTPQFSPDPIPAALCLFSDGATGRGAYCLWKDHLLDFQAVPAPESAQKGELAGLLAGLAAAPPEPVNIWVDSKYLYS |
| | | | LLRTWVLGAWLQPDPVPSYALLYKSLLRHPAIVVGHVRSHSSASHPIASLNNYVDQLAGKRTADGSEFEKRTADGSEFESPKKKAKVEGSGEGRGSLLTCGDVEEN |
| | | | PG |
| BLV | 17 | 3739 | MPAAKRVKLDGGDKKYSIGLDIGTNSVGWAVITDEYKVPSKKFKVLGNTDRHSIKKNLIGALLFDSGETAEATRLKRTARRRYTRRKNRICYLQEIFSNEMAKVDD |
| | | | SFFHRLEESFLVEEDKKHERHPIFGNIVDEVAYHEKYPTIYHLRKKLVDSTDKADLRLIYLALAHMIKFRGHFLIEGDLNPDNSDVDKLFIQLVQTYNQLFEENPI |
| | | | NASGVDAKAILSARLSKSRRLENLIAQLPGEKKNGLFGNLIALSLGLTPNFKSNFDLAEDAKLQLSKDTYDDDLDNLLAQIGDQYADLFLAAKNLSDAILLSDILR |
| | | | VNTEITKAPLSASMIKRYDEHHQDLTLLKALVRQQLPEKYKEIFFDQSKNGYAGYIDGGASQEEFYKFIKPILEKMDGTEELLVKLNREDLLRKQRTFDNGSIPHQ |
| | | | IHLGELHAILRRQEDFYPFLKDNREKIEKILTFRIPYYVGPLARGNSRFAWMTRKSEETITPWNFEEVVDKGASAQSFIERMTNFDKNLPNEKVLPKHSLLYEYFT |
| | | | VYNELTKVKYVTEGMRKPAFLSGEQKKAIVDLLFKTNRKVTVKQLKEDYFKKIECFDSVEISGVEDRFNASLGTYHDLLKIIKDKDFLDNEENEDILEDIVLTLTL |
| | | | FEDREMIEERLKTYAHLFDDKVMKQLKRRRYTGWGRLSRKLINGIRDKQSGKTILDFLKSDGFANRNFMQLIHDDSLTFKEDIQKAQVSGQGDSLHEHIANLAGSP |
| | | | AIKKGILQTVKVVDELVKVMGRHKPENIVIEMARENQTTQKGQKNSRERMKRIEEGIKELGSQILKEHPVENTQLQNEKLYLYYLQNGRDMYVDQELDINRLSDYD |
| | | | VDHIVPQSFLKDDSIDNKVLTRSDKARGKSDNVPSEEVVKKMKNYWRQLLNAKLITQRKFDNLTKAERGGLSELDKAGFIKRQLVETRQITKHVAQILDSRMNTKY |
| | | | DENDKLIREVKVITLKSKLVSDFRKDFQFYKVREINNYHHAHDAYLNAVVGTALIKKYPKLESEFVYGDYKVYDVRKMIAKSEQEIGKATAKYFFYSNIMNFFKTE |
| | | | ITLANGEIRKRPLIETNGETGEIVWDKGRDFATVRKVLSMPQVNIVKKTEVQTGGFSKESILPKRNSDKLIARKKDWDPKKYGGFDSPTVAYSVLVVAKVEKGKSK |
| | | | KLKSVKELLGITIMERSSFEKNPIDFLEAKGYKEVKKDLIIKLPKYSLFELENGRKRMLASAGELQKGNELALPSKYVNFLYLASHYEKLKGSPEDNEQKQLFVEQ |
| | | | HKHYLDEIIEQISEFSKRVILADANLDKVLSAYNKHRDKPIREQAENIIHLFTLTNLGAPAAFKYFDTTIDRKRYTSTKEVLDATLIHQSITGLYETRIDLSQLGG |
| | | | DGGGGSGGSGGSGGSGGGVLDTPPSHIGLEHLPPPPEVPQFPLNLERLQALQDLVHRSLEAGYISPWDGPGNNPVFPVRKPNGAWRFVHDLRATNALTKPIPALSP |
| | | | GPPDLTAPPTHPPHIICLDLKDAFFQIPVEDRFRFYLSFTLPSPGGLQPHRRFAWRVLPQGFINSPALFQRALQEPLRQVSAAFSQSLLVSYMDDILYASPTEEQR |
| | | | SQCYQALAARLRDLGFQVASEKTSQTPSPVPFLGQMVHEQIVTYQSLPTLQISSPISLHQLQAVLGDLQWVSRGTPTTRRPLQLLYSSLKRHHDPRAIIQLSPEQL |
| | | | QGIAELRQALSHNARSRYNEQEPLLAYVHLTRAGSTLVLFQKGAQFPLAYFQTPLTDNQASPWGLLLLLGCQYLQTQALSSYAKPILKYYHNLPKTSLDNWIQSSE |
| | | | DPRVQELLQLWPQISSQGIQPPGPWKTLITRAEVFLTPQFSPDPIPAALCLFSDGATGRGAYCLWKDHLLDFQAVPAPESAQKGELAGLLAGLAAAPPEPVNIWVD |
| | | | SKYLYSLLRTWVLGAWLQPDPVPSYALLYKSLLRHPAIVVGHVRSHSSASHPIASLNNYVDQLAGKRTADGSEFEKRTADGSEFESPKKKAKVEGSGEGRGSLLTC |
| | | | GDVEENPG |
| BLV | 18 | 3740 | MPAAKRVKLDGGDKKYSIGLDIGTNSVGWAVITDEYKVPSKKFKVLGNTDRHSIKKNLIGALLFDSGETAEATRLKRTARRRYTRRKNRICYLQEIFSNEMAKVDD |
| | | | SFFHRLEESFLVEEDKKHERHPIFGNIVDEVAYHEKYPTIYHLRKKLVDSTDKADLRLIYLALAHMIKFRGHFLIEGDLNPDNSDVDKLFIQLVQTYNQLFEENPI |
| | | | NASGVDAKAILSARLSKSRRLENLIAQLPGEKKNGLFGNLIALSLGLTPNFKSNFDLAEDAKLQLSKDTYDDDLDNLLAQIGDQYADLFLAAKNLSDAILLSDILR |
| | | | VNTEITKAPLSASMIKRYDEHHQDLTLLKALVRQQLPEKYKEIFFDQSKNGYAGYIDGGASQEEFYKFIKPILEKMDGTEELLVKLNREDLLRKQRTFDNGSIPHQ |
| | | | IHLGELHAILRRQEDFYPFLKDNREKIEKILTFRIPYYVGPLARGNSRFAWMTRKSEETITPWNFEEVVDKGASAQSFIERMTNFDKNLPNEKVLPKHSLLYEYFT |
| | | | VYNELTKVKYVTEGMRKPAFLSGEQKKAIVDLLFKTNRKVTVKQLKEDYFKKIECFDSVEISGVEDRFNASLGTYHDLLKIIKDKDFLDNEENEDILEDIVLTLTL |
| | | | FEDREMIEERLKTYAHLFDDKVMKQLKRRRYTGWGRLSRKLINGIRDKQSGKTILDFLKSDGFANRNFMQLIHDDSLTFKEDIQKAQVSGQGDSLHEHIANLAGSP |
| | | | AIKKGILQTVKVVDELVKVMGRHKPENIVIEMARENQTTQKGQKNSRERMKRIEEGIKELGSQILKEHPVENTQLQNEKLYLYYLQNGRDMYVDQELDINRLSDYD |
| | | | VDHIVPQSFLKDDSIDNKVLTRSDKARGKSDNVPSEEVVKKMKNYWRQLLNAKLITQRKFDNLTKAERGGLSELDKAGFIKRQLVETRQITKHVAQILDSRMNTKY |
| | | | DENDKLIREVKVITLKSKLVSDFRKDFQFYKVREINNYHHAHDAYLNAVVGTALIKKYPKLESEFVYGDYKVYDVRKMIAKSEQEIGKATAKYFFYSNIMNFFKTE |
| | | | ITLANGEIRKRPLIETNGETGEIVWDKGRDFATVRKVLSMPQVNIVKKTEVQTGGFSKESILPKRNSDKLIARKKDWDPKKYGGFDSPTVAYSVLVVAKVEKGKSK |
| | | | KLKSVKELLGITIMERSSFEKNPIDFLEAKGYKEVKKDLIIKLPKYSLFELENGRKRMLASAGELQKGNELALPSKYVNFLYLASHYEKLKGSPEDNEQKQLFVEQ |
| | | | HKHYLDEIIEQISEFSKRVILADANLDKVLSAYNKHRDKPIREQAENIIHLFTLTNLGAPAAFKYFDTTIDRKRYTSTKEVLDATLIHQSITGLYETRIDLSQLGG |
| | | | DGGGGSPAPGGGGGGVLDTPPSHIGLEHLPPPPEVPQFPLNLERLQALQDLVHRSLEAGYISPWDGPGNNPVFPVRKPNGAWRFVHDLRATNALTKPIPALSPGPP |
| | | | DLTAPPTHPPHIICLDLKDAFFQIPVEDRFRFYLSFTLPSPGGLQPHRRFAWRVLPQGFINSPALFQRALQEPLRQVSAAFSQSLLVSYMDDILYASPTEEQRSQC |
| | | | YQALAARLRDLGFQVASEKTSQTPSPVPFLGQMVHEQIVTYQSLPTLQISSPISLHQLQAVLGDLQWVSRGTPTTRRPLQLLYSSLKRHHDPRAIIQLSPEQLQGI |
| | | | AELRQALSHNARSRYNEQEPLLAYVHLTRAGSTLVLFQKGAQFPLAYFQTPLTDNQASPWGLLLLLGCQYLQTQALSSYAKPILKYYHNLPKTSLDNWIQSSEDPR |
| | | | VQELLQLWPQISSQGIQPPGPWKTLITRAEVFLTPQFSPDPIPAALCLFSDGATGRGAYCLWKDHLLDFQAVPAPESAQKGELAGLLAGLAAAPPEPVNIWVDSKY |
| | | | LYSLLRTWVLGAWLQPDPVPSYALLYKSLLRHPAIVVGHVRSHSSASHPIASLNNYVDQLAGKRTADGSEFEKRTADGSEFESPKKKAKVEGSGEGRGSLLTCGDV |
| | | | EENPG |
| BLV | 19 | 3741 | MPAAKRVKLDGGDKKYSIGLDIGTNSVGWAVITDEYKVPSKKFKVLGNTDRHSIKKNLIGALLFDSGETAEATRLKRTARRRYTRRKNRICYLQEIFSNEMAKVDD |
| | | | SFFHRLEESFLVEEDKKHERHPIFGNIVDEVAYHEKYPTIYHLRKKLVDSTDKADLRLIYLALAHMIKFRGHFLIEGDLNPDNSDVDKLFIQLVQTYNQLFEENPI |
| | | | NASGVDAKAILSARLSKSRRLENLIAQLPGEKKNGLFGNLIALSLGLTPNFKSNFDLAEDAKLQLSKDTYDDDLDNLLAQIGDQYADLFLAAKNLSDAILLSDILR |
| | | | VNTEITKAPLSASMIKRYDEHHQDLTLLKALVRQQLPEKYKEIFFDQSKNGYAGYIDGGASQEEFYKFIKPILEKMDGTEELLVKLNREDLLRKQRTFDNGSIPHQ |
| | | | IHLGELHAILRRQEDFYPFLKDNREKIEKILTFRIPYYVGPLARGNSRFAWMTRKSEETITPWNFEEVVDKGASAQSFIERMTNFDKNLPNEKVLPKHSLLYEYFT |
| | | | VYNELTKVKYVTEGMRKPAFLSGEQKKAIVDLLFKTNRKVTVKQLKEDYFKKIECFDSVEISGVEDRFNASLGTYHDLLKIIKDKDFLDNEENEDILEDIVLTLTL |
| | | | FEDREMIEERLKTYAHLFDDKVMKQLKRRRYTGWGRLSRKLINGIRDKQSGKTILDFLKSDGFANRNFMQLIHDDSLTFKEDIQKAQVSGQGDSLHEHIANLAGSP |
| | | | AIKKGILQTVKVVDELVKVMGRHKPENIVIEMARENQTTQKGQKNSRERMKRIEEGIKELGSQILKEHPVENTQLQNEKLYLYYLQNGRDMYVDQELDINRLSDYD |
| | | | VDHIVPQSFLKDDSIDNKVLTRSDKARGKSDNVPSEEVVKKMKNYWRQLLNAKLITQRKFDNLTKAERGGLSELDKAGFIKRQLVETRQITKHVAQILDSRMNTKY |
| | | | DENDKLIREVKVITLKSKLVSDFRKDFQFYKVREINNYHHAHDAYLNAVVGTALIKKYPKLESEFVYGDYKVYDVRKMIAKSEQEIGKATAKYFFYSNIMNFFKTE |
| | | | ITLANGEIRKRPLIETNGETGEIVWDKGRDFATVRKVLSMPQVNIVKKTEVQTGGFSKESILPKRNSDKLIARKKDWDPKKYGGFDSPTVAYSVLVVAKVEKGKSK |
| | | | KLKSVKELLGITIMERSSFEKNPIDFLEAKGYKEVKKDLIIKLPKYSLFELENGRKRMLASAGELQKGNELALPSKYVNFLYLASHYEKLKGSPEDNEQKQLFVEQ |
| | | | HKHYLDEIIEQISEFSKRVILADANLDKVLSAYNKHRDKPIREQAENIIHLFTLTNLGAPAAFKYFDTTIDRKRYTSTKEVLDATLIHQSITGLYETRIDLSQLGG |
| | | | DGGAEAAAKEAAAKEAAAKEAAAKALEAEAAAKEAAAKEAAAKEAAAKAGGGVLDTPPSHIGLEHLPPPPEVPQFPLNLERLQALQDLVHRSLEAGYISPWDGPGN |
| | | | NPVFPVRKPNGAWRFVHDLRATNALTKPIPALSPGPPDLTAPPTHPPHIICLDLKDAFFQIPVEDRFRFYLSFTLPSPGGLQPHRRFAWRVLPQGFINSPALFQRA |
| | | | LQEPLRQVSAAFSQSLLVSYMDDILYASPTEEQRSQCYQALAARLRDLGFQVASEKTSQTPSPVPFLGQMVHEQIVTYQSLPTLQISSPISLHQLQAVLGDLQWVS |
| | | | RGTPTTRRPLQLLYSSLKRHHDPRAIIQLSPEQLQGIAELRQALSHNARSRYNEQEPLLAYVHLTRAGSTLVLFQKGAQFPLAYFQTPLTDNQASPWGLLLLLGCQ |
| | | | YLQTQALSSYAKPILKYYHNLPKTSLDNWIQSSEDPRVQELLQLWPQISSQGIQPPGPWKTLITRAEVFLTPQFSPDPIPAALCLFSDGATGRGAYCLWKDHLLDF |
| | | | QAVPAPESAQKGELAGLLAGLAAAPPEPVNIWVDSKYLYSLLRTWVLGAWLQPDPVPSYALLYKSLLRHPAIVVGHVRSHSSASHPIASLNNYVDQLAGKRTADGS |
| | | | EFEKRTADGSEFESPKKKAKVEGSGEGRGSLLTCGDVEENPG |
| FOAM | 1 | 3742 | MAPKKKRKVGIHGVPAADKKYSIGLDIGTNSVGWAVITDEYKVPSKKFKVLGNTDRHSIKKNLIGALLFDSGETAEATRLKRTARRRYTRRKNRICYLQEIFSNEM |
| V | | | AKVDDSFFHRLEESFLVEEDKKHERHPIFGNIVDEVAYHEKYPTIYHLRKKLVDSTDKADLRLIYLALAHMIKFRGHFLIEGDLNPDNSDVDKLFIQLVQTYNQLF |
| | | | EENPINASGVDAKAILSARLSKSRRLENLIAQLPGEKKNGLFGNLIALSLGLTPNFKSNFDLAEDAKLQLSKDTYDDDLDNLLAQIGDQYADLFLAAKNLSDAILL |
| | | | SDILRVNTEITKAPLSASMIKRYDEHHQDLTLLKALVRQQLPEKYKEIFFDQSKNGYAGYIDGGASQEEFYKFIKPILEKMDGTEELLVKLNREDLLRKQRTFDNG |
| | | | SIPHQIHLGELHAILRRQEDFYPFLKDNREKIEKILTFRIPYYVGPLARGNSRFAWMTRKSEETITPWNFEEVVDKGASAQSFIERMTNFDKNLPNEKVLPKHSLL |
| | | | YEYFTVYNELTKVKYVTEGMRKPAFLSGEQKKAIVDLLFKTNRKVTVKQLKEDYFKKIECFDSVEISGVEDRFNASLGTYHDLLKIIKDKDFLDNEENEDILEDIV |
| | | | LTLTLFEDREMIEERLKTYAHLFDDKVMKQLKRRRYTGWGRLSRKLINGIRDKQSGKTILDFLKSDGFANRNFMQLIHDDSLTFKEDIQKAQVSGQGDSLHEHIAN |
| | | | LAGSPAIKKGILQTVKVVDELVKVMGRHKPENIVIEMARENQTTQKGQKNSRERMKRIEEGIKELGSQILKEHPVENTQLQNEKLYLYYLQNGRDMYVDQELDINR |
| | | | LSDYDVDHIVPQSFLKDDSIDNKVLTRSDKARGKSDNVPSEEVVKKMKNYWRQLLNAKLITQRKFDNLTKAERGGLSELDKAGFIKRQLVETRQITKHVAQILDSR |
| | | | MNTKYDENDKLIREVKVITLKSKLVSDFRKDFQFYKVREINNYHHAHDAYLNAVVGTALIKKYPKLESEFVYGDYKVYDVRKMIAKSEQEIGKATAKYFFYSNIMN |
| | | | FFKTEITLANGEIRKRPLIETNGETGEIVWDKGRDFATVRKVLSMPQVNIVKKTEVQTGGFSKESILPKRNSDKLIARKKDWDPKKYGGFDSPTVAYSVLVVAKVE |
| | | | KGKSKKLKSVKELLGITIMERSSFEKNPIDFLEAKGYKEVKKDLIIKLPKYSLFELENGRKRMLASAGELQKGNELALPSKYVNFLYLASHYEKLKGSPEDNEQKQ |
| | | | LFVEQHKHYLDEIIEQISEFSKRVILADANLDKVLSAYNKHRDKPIREQAENIIHLFTLTNLGAPAAFKYFDTTIDRKRYTSTKEVLDATLIHQSITGLYETRIDL |
| | | | SQLGGDSGGSSGGSSGSETPGTSESATPESSGGSSGGSSNQVGHRKIRPHNIATGDYPPRPQKQYPINPKAKPSIQIVIDDLLKQGVLTPQNSTMNTPVYPVPKPD |
| | | | GRWRMVLDYREVNKTIPLTAAQNQHSAGILATIVRQKYKTTLDLANGFWAHPITPESYWLTAFTWQGKQYCWTRLPQGFLNSPALFNADVVDLLKEIPNVQVYVDD |
| | | | IYLSHDDPKEHVQQLEKVFQILLQAGYVVSLKKSEIGQKTVEFLGFNITKEGRGLTDTFKTKLLNITPPKDLKQLQSILGKLNFARNFIPNFAELVQPLYNLIASA |
| | | | KGKYIEWSEENTKQLNMVIEALNTASNLEERLPEQRLVIKVNTSPSAGYVRYYNETGKKPIMYLNYVFSKAELKFSMLEKLLTTMHKALIKAMDLAMGQEILVYSP |
| | | | IVSMTKIQKTPLPERKALPIRWITWMTYLEDPRIQFHYDKTLPELKHIPDVYTSSQSPVKHPSQYEGVFYTDGSAIKSPDPTKSNNAGMGIVHATYKPEYQVLNQW |
| | | | SIPLGNHTAQMAEIAAVEFACKKALKIPGPVLVITDSFYVAESANKELPYWKSNGFVNNKKKPLKHISKWKSIAECLSMKPDITIQHEKGISLQIPVFILKGNALA |
| | | | DKLATQGSYVVNC |
| FOAM | 1 | 2743 | MKRTADGSEFESPKKKRKVDKKYSIGLDIGTNSVGWAVITDEYKVPSKKFKVLGNTDRHSIKKNLIGALLFDSGETAEATRLKRTARRRYTRRKNRICYLQEIFSN |
| V | | | EMAKVDDSFFHRLEESFLVEEDKKHERHPIFGNIVDEVAYHEKYPTIYHLRKKLVDSTDKADLRLIYLALAHMIKFRGHFLIEGDLNPDNSDVDKLFIQLVQTYNQ |
| | | | LFEENPINASGVDAKAILSARLSKSRRLENLIAQLPGEKKNGLFGNLIALSLGLTPNFKSNFDLAEDAKLQLSKDTYDDDLDNLLAQIGDQYADLFLAAKNLSDAI |
| | | | LLSDILRVNTEITKAPLSASMIKRYDEHHQDLTLLKALVRQQLPEKYKEIFFDQSKNGYAGYIDGGASQEEFYKFIKPILEKMDGTEELLVKLNREDLLRKQRTFD |
| | | | NGSIPHQIHLGELHAILRRQEDFYPFLKDNREKIEKILTFRIPYYVGPLARGNSRFAWMTRKSEETITPWNFEEVVDKGASAQSFIERMTNFDKNLPNEKVLPKHS |
| | | | LLYEYFTVYNELTKVKYVTEGMRKPAFLSGEQKKAIVDLLFKTNRKVTVKQLKEDYFKKIECFDSVEISGVEDRFNASLGTYHDLLKIIKDKDFLDNEENEDILED |
| | | | IVLTLTLFEDREMIEERLKTYAHLFDDKVMKQLKRRRYTGWGRLSRKLINGIRDKQSGKTILDFLKSDGFANRNFMQLIHDDSLTFKEDIQKAQVSGQGDSLHEHI |
| | | | ANLAGSPAIKKGILQTVKVVDELVKVMGRHKPENIVIEMARENQTTQKGQKNSRERMKRIEEGIKELGSQILKEHPVENTQLQNEKLYLYYLQNGRDMYVDQELDI |
| | | | NRLSDYDVDHIVPQSFLKDDSIDNKVLTRSDKARGKSDNVPSEEVVKKMKNYWRQLLNAKLITQRKFDNLTKAERGGLSELDKAGFIKRQLVETRQITKHVAQILD |
| | | | SRMNTKYDENDKLIREVKVITLKSKLVSDFRKDFQFYKVREINNYHHAHDAYLNAVVGTALIKKYPKLESEFVYGDYKVYDVRKMIAKSEQEIGKATAKYFFYSNI |
| | | | MNFFKTEITLANGEIRKRPLIETNGETGEIVWDKGRDFATVRKVLSMPQVNIVKKTEVQTGGFSKESILPKRNSDKLIARKKDWDPKKYGGFDSPTVAYSVLVVAK |
| | | | VEKGKSKKLKSVKELLGITIMERSSFEKNPIDFLEAKGYKEVKKDLIIKLPKYSLFELENGRKRMLASAGELQKGNELALPSKYVNFLYLASHYEKLKGSPEDNEQ |
| | | | KQLFVEQHKHYLDEIIEQISEFSKRVILADANLDKVLSAYNKHRDKPIREQAENIIHLFTLTNLGAPAAFKYFDTTIDRKRYTSTKEVLDATLIHQSITGLYETRI |
| | | | DLSQLGGDSGGSSGGSSGSETPGTSESATPESSGGSSGGSSNQVGHRKIRPHNIATGDYPPRPQKQYPINPKAKPSIQIVIDDLLKQGVLTPQNSTMNTPVYPVPK |
| | | | PDGRWRMVLDYREVNKTIPLTAAQNQHSAGILATIVRQKYKTTLDLANGFWAHPITPESYWLTAFTWQGKQYCWTRLPQGFLNSPALFNADVVDLLKEIPNVQVYV |
| | | | DDIYLSHDDPKEHVQQLEKVFQILLQAGYVVSLKKSEIGQKTVEFLGFNITKEGRGLTDTFKTKLLNITPPKDLKQLQSILGKLNFARNFIPNFAELVQPLYNLIA |
| | | | SAKGKYIEWSEENTKQLNMVIEALNTASNLEERLPEQRLVIKVNTSPSAGYVRYYNETGKKPIMYLNYVFSKAELKFSMLEKLLTTMHKALIKAMDLAMGQEILVY |
| | | | SPIVSMTKIQKTPLPERKALPIRWITWMTYLEDPRIQFHYDKTLPELKHIPDVYTSSQSPVKHPSQYEGVFYTDGSAIKSPDPTKSNNAGMGIVHATYKPEYQVLN |
| | | | QWSIPLGNHTAQMAEIAAVEFACKKALKIPGPVLVITDSFYVAESANKELPYWKSNGFVNNKKKPLKHISKWKSIAECLSMKPDITIQHEKGISLQIPVFILKGNA |
| | | | LADKLATQGSYVVNCSGGSKRTADGSEFEPKKKRKV |
| FOAM | 3 | 3744 | MPAAKRVKLDGGDKKYSIGLDIGTNSVGWAVITDEYKVPSKKFKVLGNTDRHSIKKNLIGALLFDSGETAEATRLKRTARRRYTRRKNRICYLQEIFSNEMAKVDD |
| V | | | SFFHRLEESFLVEEDKKHERHPIFGNIVDEVAYHEKYPTIYHLRKKLVDSTDKADLRLIYLALAHMIKFRGHFLIEGDLNPDNSDVDKLFIQLVQTYNQLFEENPI |
| | | | NASGVDAKAILSARLSKSRRLENLIAQLPGEKKNGLFGNLIALSLGLTPNFKSNFDLAEDAKLQLSKDTYDDDLDNLLAQIGDQYADLFLAAKNLSDAILLSDILR |
| | | | VNTEITKAPLSASMIKRYDEHHQDLTLLKALVRQQLPEKYKEIFFDQSKNGYAGYIDGGASQEEFYKFIKPILEKMDGTEELLVKLNREDLLRKQRTFDNGSIPHQ |
| | | | IHLGELHAILRRQEDFYPFLKDNREKIEKILTFRIPYYVGPLARGNSRFAWMTRKSEETITPWNFEEVVDKGASAQSFIERMTNFDKNLPNEKVLPKHSLLYEYFT |
| | | | VYNELTKVKYVTEGMRKPAFLSGEQKKAIVDLLFKTNRKVTVKQLKEDYFKKIECFDSVEISGVEDRFNASLGTYHDLLKIIKDKDFLDNEENEDILEDIVLTLTL |
| | | | FEDREMIEERLKTYAHLFDDKVMKQLKRRRYTGWGRLSRKLINGIRDKQSGKTILDFLKSDGFANRNFMQLIHDDSLTFKEDIQKAQVSGQGDSLHEHIANLAGSP |
| | | | AIKKGILQTVKVVDELVKVMGRHKPENIVIEMARENQTTQKGQKNSRERMKRIEEGIKELGSQILKEHPVENTQLQNEKLYLYYLQNGRDMYVDQELDINRLSDYD |
| | | | VDHIVPQSFLKDDSIDNKVLTRSDKARGKSDNVPSEEVVKKMKNYWRQLLNAKLITQRKFDNLTKAERGGLSELDKAGFIKRQLVETRQITKHVAQILDSRMNTKY |
| | | | DENDKLIREVKVITLKSKLVSDFRKDFQFYKVREINNYHHAHDAYLNAVVGTALIKKYPKLESEFVYGDYKVYDVRKMIAKSEQEIGKATAKYFFYSNIMNFFKTE |
| | | | ITLANGEIRKRPLIETNGETGEIVWDKGRDFATVRKVLSMPQVNIVKKTEVQTGGFSKESILPKRNSDKLIARKKDWDPKKYGGFDSPTVAYSVLVVAKVEKGKSK |
| | | | KLKSVKELLGITIMERSSFEKNPIDFLEAKGYKEVKKDLIIKLPKYSLFELENGRKRMLASAGELQKGNELALPSKYVNFLYLASHYEKLKGSPEDNEQKQLFVEQ |
| | | | HKHYLDEIIEQISEFSKRVILADANLDKVLSAYNKHRDKPIREQAENIIHLFTLTNLGAPAAFKYFDTTIDRKRYTSTKEVLDATLIHQSITGLYETRIDLSQLGG |
| | | | DSGGSSGGSSGSETPGTSESATPESSGGSSGGSSNQVGHRKIRPHNIATGDYPPRPQKQYPINPKAKPSIQIVIDDLLKQGVLTPQNSTMNTPVYPVPKPDGRWRM |
| | | | VLDYREVNKTIPLTAAQNQHSAGILATIVRQKYKTTLDLANGFWAHPITPESYWLTAFTWQGKQYCWTRLPQGFLNSPALFNADVVDLLKEIPNVQVYVDDIYLSH |
| | | | DDPKEHVQQLEKVFQILLQAGYVVSLKKSEIGQKTVEFLGFNITKEGRGLTDTFKTKLLNITPPKDLKQLQSILGKLNFARNFIPNFAELVQPLYNLIASAKGKYI |
| | | | EWSEENTKQLNMVIEALNTASNLEERLPEQRLVIKVNTSPSAGYVRYYNETGKKPIMYLNYVFSKAELKFSMLEKLLTTMHKALIKAMDLAMGQEILVYSPIVSMT |
| | | | KIQKTPLPERKALPIRWITWMTYLEDPRIQFHYDKTLPELKHIPDVYTSSQSPVKHPSQYEGVFYTDGSAIKSPDPTKSNNAGMGIVHATYKPEYQVLNQWSIPLG |
| | | | NHTAQMAEIAAVEFACKKALKIPGPVLVITDSFYVAESANKELPYWKSNGFVNNKKKPLKHISKWKSIAECLSMKPDITIQHEKGISLQIPVFILKGNALADKLAT |
| | | | QGSYVVNCSGGSKRTADGSEFEKRTADGSEFESPKKKAKVE |
| FOAM | 4 | 3745 | MPAAKRVKLDGGDKKYSIGLDIGTNSVGWAVITDEYKVPSKKFKVLGNTDRHSIKKNLIGALLFDSGETAEATRLKRTARRRYTRRKNRICYLQEIFSNEMAKVDD |
| V | | | SFFHRLEESFLVEEDKKHERHPIFGNIVDEVAYHEKYPTIYHLRKKLVDSTDKADLRLIYLALAHMIKFRGHFLIEGDLNPDNSDVDKLFIQLVQTYNQLFEENPI |
| | | | NASGVDAKAILSARLSKSRRLENLIAQLPGEKKNGLFGNLIALSLGLTPNFKSNFDLAEDAKLQLSKDTYDDDLDNLLAQIGDQYADLFLAAKNLSDAILLSDILR |
| | | | VNTEITKAPLSASMIKRYDEHHQDLTLLKALVRQQLPEKYKEIFFDQSKNGYAGYIDGGASQEEFYKFIKPILEKMDGTEELLVKLNREDLLRKQRTFDNGSIPHQ |
| | | | IHLGELHAILRRQEDFYPFLKDNREKIEKILTFRIPYYVGPLARGNSRFAWMTRKSEETITPWNFEEVVDKGASAQSFIERMTNFDKNLPNEKVLPKHSLLYEYFT |
| | | | VYNELTKVKYVTEGMRKPAFLSGEQKKAIVDLLFKTNRKVTVKQLKEDYFKKIECFDSVEISGVEDRFNASLGTYHDLLKIIKDKDFLDNEENEDILEDIVLTLTL |
| | | | FEDREMIEERLKTYAHLFDDKVMKQLKRRRYTGWGRLSRKLINGIRDKQSGKTILDFLKSDGFANRNFMQLIHDDSLTFKEDIQKAQVSGQGDSLHEHIANLAGSP |
| | | | AIKKGILQTVKVVDELVKVMGRHKPENIVIEMARENQTTQKGQKNSRERMKRIEEGIKELGSQILKEHPVENTQLQNEKLYLYYLQNGRDMYVDQELDINRLSDYD |
| | | | VDHIVPQSFLKDDSIDNKVLTRSDKARGKSDNVPSEEVVKKMKNYWRQLLNAKLITQRKFDNLTKAERGGLSELDKAGFIKRQLVETRQITKHVAQILDSRMNTKY |
| | | | DENDKLIREVKVITLKSKLVSDFRKDFQFYKVREINNYHHAHDAYLNAVVGTALIKKYPKLESEFVYGDYKVYDVRKMIAKSEQEIGKATAKYFFYSNIMNFFKTE |
| | | | ITLANGEIRKRPLIETNGETGEIVWDKGRDFATVRKVLSMPQVNIVKKTEVQTGGFSKESILPKRNSDKLIARKKDWDPKKYGGFDSPTVAYSVLVVAKVEKGKSK |
| | | | KLKSVKELLGITIMERSSFEKNPIDFLEAKGYKEVKKDLIIKLPKYSLFELENGRKRMLASAGELQKGNELALPSKYVNFLYLASHYEKLKGSPEDNEQKQLFVEQ |
| | | | HKHYLDEIIEQISEFSKRVILADANLDKVLSAYNKHRDKPIREQAENIIHLFTLTNLGAPAAFKYFDTTIDRKRYTSTKEVLDATLIHQSITGLYETRIDLSQLGG |
| | | | DGGSGGSSGGSSGSETPGTSESATPESSGGSSGGSSGGVPWLTQQPLQLTILVPLQEYQEKILSKTALPEDQKQQLKTLFVKYDNLWQHWENQVGHRKIRPHNIAT |
| | | | GDYPPRPQKQYPINPKAKPSIQIVIDDLLKQGVLTPQNSTMNTPVYPVPKPDGRWRMVLDYREVNKTIPLTAAQNQHSAGILATIVRQKYKTTLDLANGFWAHPIT |
| | | | PESYWLTAFTWQGKQYCWTRLPQGFLNSPALFNADVVDLLKEIPNVQVYVDDIYLSHDDPKEHVQQLEKVFQILLQAGYVVSLKKSEIGQKTVEFLGFNITKEGRG |
| | | | LTDTFKTKLLNITPPKDLKQLQSILGKLNFARNFIPNFAELVQPLYNLIAPAKGKYIEWSEENTKQLNMVIEALNTASNLEERLPEQRLVIKVNTSPSAGYVRYYN |
| | | | ETGKKPIMYLNYVFSKAELKFSMLEKLLTTMHKALIKAMDLAMGQEILVYSPIVSMTKIQKTPLPERKALPIRWITWMTYLEDPRIQFHYDKTLPELKHIPDVYTS |
| | | | SQSPVKHPSQYEGVFYTDGSAIKSPDPTKSNNAGMGIVHATYKPEYQVLNQWSIPLGNHTAQMAEIAAVEFACKKALKIPGPVLVITDSFYVAESANKELPYWKSN |
| | | | GFVNNKKKPLKHISKWKSIAECLSMKPDITIQHEKGISLQIPVFILKGNALADKLATQGSYVVNAGKRTADGSEFEKRTADGSEFESPKKKAKVEGSGEGRGSLLT |
| | | | CGDVEENPG |
| FOAM | 5 | 3746 | MPAAKRVKLDGGDKKYSIGLDIGTNSVGWAVITDEYKVPSKKFKVLGNTDRHSIKKNLIGALLFDSGETAEATRLKRTARRRYTRRKNRICYLQEIFSNEMAKVDD |
| V | | | SFFHRLEESFLVEEDKKHERHPIFGNIVDEVAYHEKYPTIYHLRKKLVDSTDKADLRLIYLALAHMIKFRGHFLIEGDLNPDNSDVDKLFIQLVQTYNQLFEENPI |
| | | | NASGVDAKAILSARLSKSRRLENLIAQLPGEKKNGLFGNLIALSLGLTPNFKSNFDLAEDAKLQLSKDTYDDDLDNLLAQIGDQYADLFLAAKNLSDAILLSDILR |
| | | | VNTEITKAPLSASMIKRYDEHHQDLTLLKALVRQQLPEKYKEIFFDQSKNGYAGYIDGGASQEEFYKFIKPILEKMDGTEELLVKLNREDLLRKQRTFDNGSIPHQ |
| | | | IHLGELHAILRRQEDFYPFLKDNREKIEKILTFRIPYYVGPLARGNSRFAWMTRKSEETITPWNFEEVVDKGASAQSFIERMTNFDKNLPNEKVLPKHSLLYEYFT |
| | | | VYNELTKVKYVTECMRKPAFLSGEQKKAIVDLLFKTNRKVTVKQLKEDYFKKIECFDSVEISGVEDRFNASLGTYHDLLKIIKDKDFLDNEENEDILEDIVLTLTL |
| | | | FEDREMIEERLKTYAHLFDDKVMKQLKRRRYTGWGRLSRKLINGIRDKQSGKTILDFLKSDGFANRNFMQLIHDDSLTFKEDIQKAQVSGQGDSLHEHIANLAGSP |
| | | | AIKKGILQTVKVVDELVKVMGRHKPENIVIEMARENQTTQKGQKNSRERMKRIEEGIKELGSQILKEHPVENTQLQNEKLYLYYLQNGRDMYVDQELDINRLSDYD |
| | | | VDHIVPQSFLKDDSIDNKVLTRSDKARCKSDNVPSEEVVKKMKNYWRQLLNAKLITQRKFDNLTKAERCCLSELDKAGFIKRQLVETRQITKHVAQILDSRMNTKY |
| | | | DENDKLIREVKVITLKSKLVSDFRKDFQFYKVREINNYHHAHDAYLNAVVETALIKKYPKLESEFVYGDYKVYDVRKMIAKSEQEIGKATAKYFFYSNIMNFFKTE |
| | | | ITLANGEIRKRPLIETNGETGEIVWDKGRDFATVRKVLSMPQVNIVKKTEVQTGGFSKESILPKRNSDKLIARKKDWDPKKYGGFDSPTVAYSVLVVAKVEKCKSK |
| | | | KLKSVKELLGITIMERSSFEKNPIDFLEAKGYKEVKKDLIIKLPKYSLFELENGRKRMLASAGELQKGNELALPSKYVNFLYLASHYEKLKGSPEDNEQKQLFVEQ |
| | | | HKHYLDEIIEQISEFSKRVILADANLDKVLSAYNKHRDKPIREQAENIIHLFTLTNLGAPAAFKYFDTTIDRKRYTSTKEVLDATLIHQSITGLYETRIDLSQLGG |
| | | | DGGPAPGGGEAAAKGGVPWLTQQPLQLTILVPLQEYQEKILSKTALPEDQKQQLKTLFVKYDNLWQHWENQVGHRKIRPHNIATGDYPPRPQKQYPINPKAKPSIQ |
| | | | IVIDDLLKQGVLTPQNSTMNTPVYPVPKPDGRWRMVLDYREVNKTIPLTAAQNQHSAGILATIVRQKYKTTLDLANGFWAHPITPESYWLTAFTWQGKQYCWTRLP |
| | | | QGFLNSPALFNADVVDLLKEIPNVQVYVDDIYLSHDDPKEHVQQLEKVFQILLQAGYVVSLKKSEIGQKTVEFLGFNITKEGRGLTDTFKTKLLNITPPKDLKQLQ |
| | | | SILGKLNFARNFIPNFAELVQPLYNLIAPAKGKYIEWSEENTKQLNMVIEALNTASNLEERLPEQRLVIKVNTSPSAGYVRYYNETGKKPIMYLNYVFSKAELKFS |
| | | | MLEKLLTTMHKALIKAMDLAMGQEILVYSPIVSMTKIQKTPLPERKALPIRWITWMTYLEDPRIQFHYDKTLPELKHIPDVYTSSQSPVKHPSQYEGVFYTDGSAI |
| | | | KSPDPTKSNNAGMGIVHATYKPEYQVLNQWSIPLGNHTAQMAEIAAVEFACKKALKIPGPVLVITDSFYVAESANKELPYWKSNGFVNNKKKPLKHISKWKSIAEC |
| | | | LSMKPDITIQHEKGISLQIPVFILKGNALADKLATQGSYVVNAGKRTADGSEFEKRTADGSEFESPKKKAKVEGSGEGRGSLLTCGDVEENPG |
| FOAM | 6 | 3747 | MPAAKRVKLDGCDKKYSIGLDIGTNSVGWAVITDEYKVPSKKFKVLGNTDRHSIKKNLIGALLFDSGETAEATRLKRTARRRYTRRKNRICYLQEIFSNEMAKVDD |
| V | | | SFFHRLEESFLVEEDKKHERHPIFGNIVDEVAYHEKYPTIYHLRKKLVDSTDKADLRLIYLALAHMIKFRGHFLIEGDLNPDNSDVDKLFIQLVQTYNQLFEENPI |
| | | | NASGVDAKAILSARLSKSRRLENLIAQLPGEKKNGLFGNLIALSLGLTPNFKSNFDLAEDAKLQLSKDTYDDDLDNLLAQIGDQYADLFLAAKNLSDAILLSDILR |
| | | | VNTEITKAPLSASMIKRYDEHHQDLTLLKALVRQQLPEKYKEIFFDQSKNGYAGYIDGGASQEEFYKFIKPILEKMDGTEELLVKLNREDLLRKQRTFDNGSIPHQ |
| | | | IHLGELHAILRRQEDFYPFLKDNREKIEKILTFRIPYYVGPLARGNSRFAWMTRKSEETITPWNFEEVVDKGASAQSFIERMTNFDKNLPNEKVLPKHSLLYEYFT |
| | | | VYNELTKVKYVTECMRKPAFLSGEQKKAIVDLLFKTNRKVTVKQLKEDYFKKIECFDSVEISGVEDRFNASLGTYHDLLKIIKDKDFLDNEENEDILEDIVLTLTL |
| | | | FEDREMIEERLKTYAHLFDDKVMKQLKRRRYTGWGRLSRKLINGIRDKQSGKTILDFLKSDGFANRNFMQLIHDDSLTFKEDIQKAQVSGQGDSLHEHIANLAGSP |
| | | | AIKKGILQTVKVVDELVKVMGRHKPENIVIEMARENQTTQKGQKNSRERMKRIEEGIKELGSQILKEHPVENTQLQNEKLYLYYLQNGRDMYVDQELDINRLSDYD |
| | | | VDHIVPQSFLKDDSIDNKVLTRSDKARCKSDNVPSEEVVKKMKNYWRQLLNAKLITQRKFDNLTKAERGGLSELDKAGFIKRQLVETRQITKHVAQILDSRMNTKY |
| | | | DENDKLIREVKVITLKSKLVSDFRKDFQFYKVREINNYHHAHDAYLNAVVGTALIKKYPKLESEFVYGDYKVYDVRKMIAKSEQEIGKATAKYFFYSNIMNFFKTE |
| | | | ITLANGEIRKRPLIETNGETGEIVWDKGRDFATVRKVLSMPQVNIVKKTEVQTGGFSKESILPKRNSDKLIARKKDWDPKKYGGFDSPTVAYSVLVVAKVEKGKSK |
| | | | KLKSVKELLGITIMERSSFEKNPIDFLEAKGYKEVKKDLIIKLPKYSLFELENGRKRMLASAGELQKGNELALPSKYVNFLYLASHYEKLKGSPEDNEQKQLFVEQ |
| | | | HKHYLDEIIEQISEFSKRVILADANLDKVLSAYNKHRDKPIREQAENIIHLFTLTNLGAPAAFKYFDTTIDRKRYTSTKEVLDATLIHQSITGLYETRIDLSQLGG |
| | | | DGGGGGGSGGGGSGGGGSGGGGSGGVPWLTQQPLQLTILVPLQEYQEKILSKTALPEDQKQQLKTLFVKYDNLWQHWENQVGHRKIRPHNIATGDYPPRPQKQYPI |
| | | | NPKAKPSIQIVIDDLLKQGVLTPQNSTMNTPVYPVPKPDGRWRMVLDYREVNKTIPLTAAQNQHSAGILATIVRQKYKTTLDLANGFWAHPITPESYWLTAFTWQG |
| | | | KQYCWTRLPQGFLNSPALFNADVVDLLKEIPNVQVYVDDIYLSHDDPKEHVQQLEKVFQILLQAGYVVSLKKSEIGQKTVEFLGFNITKEGRGLTDTFKTKLLNIT |
| | | | PPKDLKQLQSILGKLNFARNFIPNFAELVQPLYNLIAPAKGKYIEWSEENTKQLNMVIEALNTASNLEERLPEQRLVIKVNTSPSAGYVRYYNETGKKPIMYLNYV |
| | | | FSKAELKFSMLEKLLTTMHKALIKAMDLAMGQEILVYSPIVSMTKIQKTPLPERKALPIRWITWMTYLEDPRIQFHYDKTLPELKHIPDVYTSSQSPVKHPSQYEG |
| | | | VFYTDESAIKSPDPTKSNNAGMEIVHATYKPEYQVLNQWSIPLGNHTAQMAEIAAVEFACKKALKIPGPVLVITDSFYVAESANKELPYWKSNGFVNNKKKPLKHI |
| | | | SKWKSIAECLSMKPDITIQHEKGISLQIPVFILKGNALADKLATQGSYVVNAGKRTADGSEFEKRTADGSEFESPKKKAKVEGSGEGRGSLLTCGDVEENPG |
| FOAM | 7 | 3748 | MPAAKRVKLDGGDKKYSIGLDIGTNSVGWAVITDEYKVPSKKFKVLGNTDRHSIKKNLIGALLFDSGETAEATRLKRTARRRYTRRKNRICYLQEIFSNEMAKVDD |
| V | | | SFFHRLEESFLVEEDKKHERHPIFGNIVDEVAYHEKYPTIYHLRKKLVDSTDKADLRLIYLALAHMIKFRGHFLIEGDLNPDNSDVDKLFIQLVQTYNQLFEENPI |
| | | | NASGVDAKAILSARLSKSRRLENLIAQLPGEKKNGLFGNLIALSLGLTPNFKSNFDLAEDAKLQLSKDTYDDDLDNLLAQIGDQYADLFLAAKNLSDAILLSDILR |
| | | | VNTEITKAPLSASMIKRYDEHHQDLTLLKALVRQQLPEKYKEIFFDQSKNGYAGYIDGGASQEEFYKFIKPILEKMDGTEELLVKLNREDLLRKQRTFDNGSIPHQ |
| | | | IHLGELHAILRRQEDFYPFLKDNREKIEKILTFRIPYYVGPLARGNSRFAWMTRKSEETITPWNFEEVVDKGASAQSFIERMTNFDKNLPNEKVLPKHSLLYEYFT |
| | | | VYNELTKVKYVTEGMRKPAFLSGEQKKAIVDLLFKTNRKVTVKQLKEDYFKKIECFDSVEISGVEDRFNASLGTYHDLLKIIKDKDFLDNEENEDILEDIVLTLTL |
| | | | FEDREMIEERLKTYAHLFDDKVMKQLKRRRYTGWGRLSRKLINGIRDKQSGKTILDFLKSDGFANRNFMQLIHDDSLTFKEDIQKAQVSGQGDSLHEHIANLAGSP |
| | | | AIKKGILQTVKVVDELVKVMGRHKPENIVIEMARENQTTQKGQKNSRERMKRIEEGIKELGSQILKEHPVENTQLQNEKLYLYYLQNGRDMYVDQELDINRLSDYD |
| | | | VDHIVPQSFLKDDSIDNKVLTRSDKARGKSDNVPSEEVVKKMKNYWRQLLNAKLITQRKFDNLTKAERGGLSELDKAGFIKRQLVETRQITKHVAQILDSRMNTKY |
| | | | DENDKLIREVKVITLKSKLVSDFRKDFQFYKVREINNYHHAHDAYLNAVVGTALIKKYPKLESEFVYGDYKVYDVRKMIAKSEQEIGKATAKYFFYSNIMNFFKTE |
| | | | ITLANGEIRKRPLIETNGETGEIVWDKGRDFATVRKVLSMPQVNIVKKTEVQTGGFSKESILPKRNSDKLIARKKDWDPKKYGGFDSPTVAYSVLVVAKVEKGKSK |
| | | | KLKSVKELLGITIMERSSFEKNPIDFLEAKGYKEVKKDLIIKLPKYSLFELENGRKRMLASAGELQKGNELALPSKYVNFLYLASHYEKLKGSPEDNEQKQLFVEQ |
| | | | HKHYLDEIIEQISEFSKRVILADANLDKVLSAYNKHRDKPIREQAENIIHLFTLTNLGAPAAFKYFDTTIDRKRYTSTKEVLDATLIHQSITGLYETRIDLSQLGG |
| | | | DGGGGGGSGGGGSGGGGSGGGGSGGGGSGGGGSGGVPWLTQQPLQLTILVPLQEYQEKILSKTALPEDQKQQLKTLFVKYDNLWQHWENQVGHRKIRPHNIATGDY |
| | | | PPRPQKQYPINPKAKPSIQIVIDDLLKQGVLTPQNSTMNTPVYPVPKPDGRWRMVLDYREVNKTIPLTAAQNQHSAGILATIVRQKYKTTLDLANGFWAHPITPES |
| | | | YWLTAFTWQGKQYCWTRLPQGFLNSPALFNADVVDLLKEIPNVQVYVDDIYLSHDDPKEHVQQLEKVFQILLQAGYVVSLKKSEIGQKTVEFLGFNITKEGRGLTD |
| | | | TFKTKLLNITPPKDLKQLQSILGKLNFARNFIPNFAELVQPLYNLIAPAKGKYIEWSEENTKQLNMVIEALNTASNLEERLPEQRLVIKVNTSPSAGYVRYYNETG |
| | | | KKPIMYLNYVFSKAELKFSMLEKLLTTMHKALIKAMDLAMGQEILVYSPIVSMTKIQKTPLPERKALPIRWITWMTYLEDPRIQFHYDKTLPELKHIPDVYTSSQS |
| | | | PVKHPSQYEGVFYTDGSAIKSPDPTKSNNAGMGIVHATYKPEYQVLNQWSIPLGNHTAQMAEIAAVEFACKKALKIPGPVLVITDSFYVAESANKELPYWKSNGFV |
| | | | NNKKKPLKHISKWKSIAECLSMKPDITIQHEKGISLQIPVFILKGNALADKLATQGSYVVNAGKRTADGSEFEKRTADGSEFESPKKKAKVEGSGEGRGSLLTCGD |
| | | | VEENPG |
| FOAM | 8 | 3749 | MPAAKRVKLDGGDKKYSIGLDIGTNSVGWAVITDEYKVPSKKFKVLGNTDRHSIKKNLIGALLFDSGETAEATRLKRTARRRYTRRKNRICYLQEIFSNEMAKVDD |
| V | | | SFFHRLEESFLVEEDKKHERHPIFGNIVDEVAYHEKYPTIYHLRKKLVDSTDKADLRLIYLALAHMIKFRGHFLIEGDLNPDNSDVDKLFIQLVQTYNQLFEENPI |
| | | | NASGVDAKAILSARLSKSRRLENLIAQLPGEKKNGLFGNLIALSLGLTPNFKSNFDLAEDAKLQLSKDTYDDDLDNLLAQIGDQYADLFLAAKNLSDAILLSDILR |
| | | | VNTEITKAPLSASMIKRYDEHHQDLTLLKALVRQQLPEKYKEIFFDQSKNGYAGYIDGGASQEEFYKFIKPILEKMDGTEELLVKLNREDLLRKQRTFDNGSIPHQ |
| | | | IHLGELHAILRRQEDFYPFLKDNREKIEKILTFRIPYYVGPLARGNSRFAWMTRKSEETITPWNFEEVVDKGASAQSFIERMTNFDKNLPNEKVLPKHSLLYEYFT |
| | | | VYNELTKVKYVTEGMRKPAFLSGEQKKAIVDLLFKTNRKVTVKQLKEDYFKKIECFDSVEISGVEDRFNASLGTYHDLLKIIKDKDFLDNEENEDILEDIVLTLTL |
| | | | FEDREMIEERLKTYAHLFDDKVMKQLKRRRYTGWGRLSRKLINGIRDKQSGKTILDFLKSDGFANRNFMQLIHDDSLTFKEDIQKAQVSGQGDSLHEHIANLAGSP |
| | | | AIKKGILQTVKVVDELVKVMGRHKPENIVIEMARENQTTQKGQKNSRERMKRIEEGIKELGSQILKEHPVENTQLQNEKLYLYYLQNGRDMYVDQELDINRLSDYD |
| | | | VDHIVPQSFLKDDSIDNKVLTRSDKARGKSDNVPSEEVVKKMKNYWRQLLNAKLITQRKFDNLTKAERGGLSELDKAGFIKRQLVETRQITKHVAQILDSRMNTKY |
| | | | DENDKLIREVKVITLKSKLVSDFRKDFQFYKVREINNYHHAHDAYLNAVVGTALIKKYPKLESEFVYGDYKVYDVRKMIAKSEQEIGKATAKYFFYSNIMNFFKTE |
| | | | ITLANGEIRKRPLIETNGETGEIVWDKGRDFATVRKVLSMPQVNIVKKTEVQTGGFSKESILPKRNSDKLIARKKDWDPKKYGGFDSPTVAYSVLVVAKVEKGKSK |
| | | | KLKSVKELLGITIMERSSFEKNPIDFLEAKGYKEVKKDLIIKLPKYSLFELENGRKRMLASAGELQKGNELALPSKYVNFLYLASHYEKLKGSPEDNEQKQLFVEQ |
| | | | HKHYLDEIIEQISEFSKRVILADANLDKVLSAYNKHRDKPIREQAENIIHLFTLTNLGAPAAFKYFDTTIDRKRYTSTKEVLDATLIHQSITGLYETRIDLSQLGG |
| | | | DGGEAAAKEAAAKEAAAKEAAAKGGVPWLTQQPLQLTILVPLQEYQEKILSKTALPEDQKQQLKTLFVKYDNLWQHWENQVGHRKIRPHNIATGDYPPRPQKQYPI |
| | | | NPKAKPSIQIVIDDLLKQGVLTPQNSTMNTPVYPVPKPDGRWRMVLDYREVNKTIPLTAAQNQHSAGILATIVRQKYKTTLDLANGFWAHPITPESYWLTAFTWQG |
| | | | KQYCWTRLPQGFLNSPALFNADVVDLLKEIPNVQVYVDDIYLSHDDPKEHVQQLEKVFQILLQAGYVVSLKKSEIGQKTVEFLGFNITKEGRGLTDTFKTKLLNIT |
| | | | PPKDLKQLQSILGKLNFARNFIPNFAELVQPLYNLIAPAKGKYIEWSEENTKQLNMVIEALNTASNLEERLPEQRLVIKVNTSPSAGYVRYYNETGKKPIMYLNYV |
| | | | FSKAELKFSMLEKLLTTMHKALIKAMDLAMGQEILVYSPIVSMTKIQKTPLPERKALPIRWITWMTYLEDPRIQFHYDKTLPELKHIPDVYTSSQSPVKHPSQYEG |
| | | | VFYTDGSAIKSPDPTKSNNAGMGIVHATYKPEYQVLNQWSIPLGNHTAQMAEIAAVEFACKKALKIPGPVLVITDSFYVAESANKELPYWKSNGFVNNKKKPLKHI |
| | | | SKWKSIAECLSMKPDITIQHEKGISLQIPVFILKGNALADKLATQGSYVVNAGKRTADGSEFEKRTADGSEFESPKKKAKVEGSGEGRGSLLTCGDVEENPG |
| FOAM | 9 | 3750 | MPAAKRVKLDGGDKKYSIGLDIGTNSVGWAVITDEYKVPSKKFKVLGNTDRHSIKKNLIGALLFDSGETAEATRLKRTARRRYTRRKNRICYLQEIFSNEMAKVDD |
| V | | | SFFHRLEESFLVEEDKKHERHPIFGNIVDEVAYHEKYPTIYHLRKKLVDSTDKADLRLIYLALAHMIKFRGHFLIEGDLNPDNSDVDKLFIQLVQTYNQLFEENPI |
| | | | NASGVDAKAILSARLSKSRRLENLIAQLPGEKKNGLFGNLIALSLGLTPNFKSNFDLAEDAKLQLSKDTYDDDLDNLLAQIGDQYADLFLAAKNLSDAILLSDILR |
| | | | VNTEITKAPLSASMIKRYDEHHQDLTLLKALVRQQLPEKYKEIFFDQSKNGYAGYIDGGASQEEFYKFIKPILEKMDGTEELLVKLNREDLLRKQRTFDNGSIPHQ |
| | | | IHLGELHAILRRQEDFYPFLKDNREKIEKILTFRIPYYVGPLARGNSRFAWMTRKSEETITPWNFEEVVDKGASAQSFIERMTNFDKNLPNEKVLPKHSLLYEYFT |
| | | | VYNELTKVKYVTEGMRKPAFLSGEQKKAIVDLLFKTNRKVTVKQLKEDYFKKIECFDSVEISGVEDRFNASLGTYHDLLKIIKDKDFLDNEENEDILEDIVLTLTL |
| | | | FEDREMIEERLKTYAHLFDDKVMKQLKRRRYTGWGRLSRKLINGIRDKQSGKTILDFLKSDGFANRNFMQLIHDDSLTFKEDIQKAQVSGQGDSLHEHIANLAGSP |
| | | | AIKKGILQTVKVVDELVKVMGRHKPENIVIEMARENQTTQKGQKNSRERMKRIEEGIKELGSQILKEHPVENTQLQNEKLYLYYLQNGRDMYVDQELDINRLSDYD |
| | | | VDHIVPQSFLKDDSIDNKVLTRSDKARGKSDNVPSEEVVKKMKNYWRQLLNAKLITQRKFDNLTKAERGGLSELDKAGFIKRQLVETRQITKHVAQILDSRMNTKY |
| | | | DENDKLIREVKVITLKSKLVSDFRKDFQFYKVREINNYHHAHDAYLNAVVGTALIKKYPKLESEFVYGDYKVYDVRKMIAKSEQEIGKATAKYFFYSNIMNFFKTE |
| | | | ITLANGEIRKRPLIETNGETGEIVWDKGRDFATVRKVLSMPQVNIVKKTEVQTGGFSKESILPKRNSDKLIARKKDWDPKKYGGFDSPTVAYSVLVVAKVEKGKSK |
| | | | KLKSVKELLGITIMERSSFEKNPIDFLEAKGYKEVKKDLIIKLPKYSLFELENGRKRMLASAGELQKGNELALPSKYVNFLYLASHYEKLKGSPEDNEQKQLFVEQ |
| | | | HKHYLDEIIEQISEFSKRVILADANLDKVLSAYNKHRDKPIREQAENIIHLFTLTNLGAPAAFKYFDTTIDRKRYTSTKEVLDATLIHQSITGLYETRIDLSQLGG |
| | | | DGGEAAAKEAAAKEAAAKEAAAKEAAAKGGVPWLTQQPLQLTILVPLQEYQEKILSKTALPEDQKQQLKTLFVKYDNLWQHWENQVGHRKIRPHNIATGDYPPRPQ |
| | | | KQYPINPKAKPSIQIVIDDLLKQGVLTPQNSTMNTPVYPVPKPDGRWRMVLDYREVNKTIPLTAAQNQHSAGILATIVRQKYKTTLDLANGFWAHPITPESYWLTA |
| | | | FTWQGKQYCWTRLPQGFLNSPALFNADVVDLLKEIPNVQVYVDDIYLSHDDPKEHVQQLEKVFQILLQAGYVVSLKKSEIGQKTVEFLGFNITKEGRGLTDTFKTK |
| | | | LLNITPPKDLKQLQSILGKLNFARNFIPNFAELVQPLYNLIAPAKGKYIEWSEENTKQLNMVIEALNTASNLEERLPEQRLVIKVNTSPSAGYVRYYNETGKKPIM |
| | | | YLNYVFSKAELKFSMLEKLLTTMHKALIKAMDLAMGQEILVYSPIVSMTKIQKTPLPERKALPIRWITWMTYLEDPRIQFHYDKTLPELKHIPDVYTSSQSPVKHP |
| | | | SQYEGVFYTDGSAIKSPDPTKSNNAGMGIVHATYKPEYQVLNQWSIPLGNHTAQMAEIAAVEFACKKALKIPGPVLVITDSFYVAESANKELPYWKSNGFVNNKKK |
| | | | PLKHISKWKSIAECLSMKPDITIQHEKGISLQIPVFILKGNALADKLATQGSYVVNAGKRTADGSEFEKRTADGSEFESPKKKAKVEGSGEGRGSLLTCGDVEENP |
| | | | G |
| FOAM | 10 | 3751 | MPAAKRVKLDGGDKKYSIGLDIGTNSVGWAVITDEYKVPSKKFKVLGNTDRHSIKKNLIGALLFDSGETAEATRLKRTARRRYTRRKNRICYLQEIFSNEMAKVDD |
| V | | | SFFHRLEESFLVEEDKKHERHPIFGNIVDEVAYHEKYPTIYHLRKKLVDSTDKADLRLIYLALAHMIKFRGHFLIEGDLNPDNSDVDKLFIQLVQTYNQLFEENPI |
| | | | NASGVDAKAILSARLSKSRRLENLIAQLPGEKKNGLFGNLIALSLGLTPNFKSNFDLAEDAKLQLSKDTYDDDLDNLLAQIGDQYADLFLAAKNLSDAILLSDILR |
| | | | VNTEITKAPLSASMIKRYDEHHQDLTLLKALVRQQLPEKYKEIFFDQSKNGYAGYIDGGASQEEFYKFIKPILEKMDGTEELLVKLNREDLLRKQRTFDNGSIPHQ |
| | | | IHLGELHAILRRQEDFYPFLKDNREKIEKILTFRIPYYVGPLARGNSRFAWMTRKSEETITPWNFEEVVDKGASAQSFIERMTNFDKNLPNEKVLPKHSLLYEYFT |
| | | | VYNELTKVKYVTEGMRKPAFLSGEQKKAIVDLLFKTNRKVTVKQLKEDYFKKIECFDSVEISGVEDRFNASLGTYHDLLKIIKDKDFLDNEENEDILEDIVLTLTL |
| | | | FEDREMIEERLKTYAHLFDDKVMKQLKRRRYTGWGRLSRKLINGIRDKQSGKTILDFLKSDGFANRNFMQLIHDDSLTFKEDIQKAQVSGQGDSLHEHIANLAGSP |
| | | | AIKKGILQTVKVVDELVKVMGRHKPENIVIEMARENQTTQKGQKNSRERMKRIEEGIKELGSQILKEHPVENTQLQNEKLYLYYLQNGRDMYVDQELDINRLSDYD |
| | | | VDHIVPQSFLKDDSIDNKVLTRSDKARGKSDNVPSEEVVKKMKNYWRQLLNAKLITQRKFDNLTKAERGGLSELDKAGFIKRQLVETRQITKHVAQILDSRMNTKY |
| | | | DENDKLIREVKVITLKSKLVSDFRKDFQFYKVREINNYHHAHDAYLNAVVGTALIKKYPKLESEFVYGDYKVYDVRKMIAKSEQEIGKATAKYFFYSNIMNFFKTE |
| | | | ITLANGEIRKRPLIETNGETGEIVWDKGRDFATVRKVLSMPQVNIVKKTEVQTGGFSKESILPKRNSDKLIARKKDWDPKKYGGFDSPTVAYSVLVVAKVEKGKSK |
| | | | KLKSVKELLGITIMERSSFEKNPIDFLEAKGYKEVKKDLIIKLPKYSLFELENGRKRMLASAGELQKGNELALPSKYVNFLYLASHYEKLKGSPEDNEQKQLFVEQ |
| | | | HKHYLDEIIEQISEFSKRVILADANLDKVLSAYNKHRDKPIREQAENIIHLFTLTNLGAPAAFKYFDTTIDRKRYTSTKEVLDATLIHQSITGLYETRIDLSQLGG |
| | | | DGGGGSPAPGSSGGVPWLTQQPLQLTILVPLQEYQEKILSKTALPEDQKQQLKTLFVKYDNLWQHWENQVGHRKIRPHNIATGDYPPRPQKQYPINPKAKPSIQIV |
| | | | IDDLLKQGVLTPQNSTMNTPVYPVPKPDGRWRMVLDYREVNKTIPLTAAQNQHSAGILATIVRQKYKTTLDLANGFWAHPITPESYWLTAFTWQGKQYCWTRLPQG |
| | | | FLNSPALFNADVVDLLKEIPNVQVYVDDIYLSHDDPKEHVQQLEKVFQILLQAGYVVSLKKSEIGQKTVEFLGFNITKEGRGLTDTFKTKLLNITPPKDLKQLQSI |
| | | | LGKLNFARNFIPNFAELVQPLYNLIAPAKGKYIEWSEENTKQLNMVIEALNTASNLEERLPEQRLVIKVNTSPSAGYVRYYNETGKKPIMYLNYVFSKAELKFSML |
| | | | EKLLTTMHKALIKAMDLAMGQEILVYSPIVSMTKIQKTPLPERKALPIRWITWMTYLEDPRIQFHYDKTLPELKHIPDVYTSSQSPVKHPSQYEGVFYTDGSAIKS |
| | | | PDPTKSNNAGMGIVHATYKPEYQVLNQWSIPLGNHTAQMAEIAAVEFACKKALKIPGPVLVITDSFYVAESANKELPYWKSNGFVNNKKKPLKHISKWKSIAECLS |
| | | | MKPDITIQHEKGISLQIPVFILKGNALADKLATQGSYVVNAGKRTADGSEFEKRTADGSEFESPKKKAKVEGSGEGRGSLLTCGDVEENPG |
| FOAM | 11 | 3752 | MPAAKRVKLDGGDKKYSIGLDIGTNSVGWAVITDEYKVPSKKFKVLGNTDRHSIKKNLIGALLFDSGETAEATRLKRTARRRYTRRKNRICYLQEIFSNEMAKVDD |
| V | | | SFFHRLEESFLVEEDKKHERHPIFGNIVDEVAYHEKYPTIYHLRKKLVDSTDKADLRLIYLALAHMIKFRGHFLIEGDLNPDNSDVDKLFIQLVQTYNQLFEENPI |
| | | | NASGVDAKAILSARLSKSRRLENLIAQLPGEKKNGLFGNLIALSLGLTPNFKSNFDLAEDAKLQLSKDTYDDDLDNLLAQIGDQYADLFLAAKNLSDAILLSDILR |
| | | | VNTEITKAPLSASMIKRYDEHHQDLTLLKALVRQQLPEKYKEIFFDQSKNGYAGYIDGGASQEEFYKFIKPILEKMDGTEELLVKLNREDLLRKQRTFDNGSIPHQ |
| | | | IHLGELHAILRRQEDFYPFLKDNREKIEKILTFRIPYYVGPLARGNSRFAWMTRKSEETITPWNFEEVVDKGASAQSFIERMTNFDKNLPNEKVLPKHSLLYEYFT |
| | | | VYNELTKVKYVTEGMRKPAFLSGEQKKAIVDLLFKTNRKVTVKQLKEDYFKKIECFDSVEISGVEDRFNASLGTYHDLLKIIKDKDFLDNEENEDILEDIVLTLTL |
| | | | FEDREMIEERLKTYAHLFDDKVMKQLKRRRYTGWGRLSRKLINGIRDKQSGKTILDFLKSDGFANRNFMQLIHDDSLTFKEDIQKAQVSGQGDSLHEHIANLAGSP |
| | | | AIKKGILQTVKVVDELVKVMGRHKPENIVIEMARENQTTQKGQKNSRERMKRIEEGIKELGSQILKEHPVENTQLQNEKLYLYYLQNGRDMYVDQELDINRLSDYD |
| | | | VDHIVPQSFLKDDSIDNKVLTRSDKARGKSDNVPSEEVVKKMKNYWRQLLNAKLITQRKFDNLTKAERGGLSELDKAGFIKRQLVETRQITKHVAQILDSRMNTKY |
| | | | DENDKLIREVKVITLKSKLVSDFRKDFQFYKVREINNYHHAHDAYLNAVVGTALIKKYPKLESEFVYGDYKVYDVRKMIAKSEQEIGKATAKYFFYSNIMNFFKTE |
| | | | ITLANGEIRKRPLIETNGETGEIVWDKGRDFATVRKVLSMPQVNIVKKTEVQTGGFSKESILPKRNSDKLIARKKDWDPKKYGGFDSPTVAYSVLVVAKVEKGKSK |
| | | | KLKSVKELLGITIMERSSFEKNPIDFLEAKGYKEVKKDLIIKLPKYSLFELENGRKRMLASAGELQKGNELALPSKYVNFLYLASHYEKLKGSPEDNEQKQLFVEQ |
| | | | HKHYLDEIIEQISEFSKRVILADANLDKVLSAYNKHRDKPIREQAENIIHLFTLTNLGAPAAFKYFDTTIDRKRYTSTKEVLDATLIHQSITGLYETRIDLSQLGG |
| | | | DGGAEAAAKEAAAKEAAAKEAAAKALEAEAAAKEAAAKEAAAKEAAAKAGGVPWLTQQPLQLTILVPLQEYQEKILSKTALPEDQKQQLKTLFVKYDNLWQHWENQ |
| | | | VGHRKIRPHNIATGDYPPRPQKQYPINPKAKPSIQIVIDDLLKQGVLTPQNSTMNTPVYPVPKPDGRWRMVLDYREVNKTIPLTAAQNQHSAGILATIVRQKYKTT |
| | | | LDLANGFWAHPITPESYWLTAFTWQGKQYCWTRLPQGFLNSPALFNADVVDLLKEIPNVQVYVDDIYLSHDDPKEHVQQLEKVFQILLQAGYVVSLKKSEIGQKTV |
| | | | EFLGFNITKEGRGLTDTFKTKLLNITPPKDLKQLQSILGKLNFARNFIPNFAELVQPLYNLIAPAKGKYIEWSEENTKQLNMVIEALNTASNLEERLPEQRLVIKV |
| | | | NTSPSAGYVRYYNETGKKPIMYLNYVFSKAELKFSMLEKLLTTMHKALIKAMDLAMGQEILVYSPIVSMTKIQKTPLPERKALPIRWITWMTYLEDPRIQFHYDKT |
| | | | LPELKHIPDVYTSSQSPVKHPSQYEGVFYTDGSAIKSPDPTKSNNAGMGIVHATYKPEYQVLNQWSIPLGNHTAQMAEIAAVEFACKKALKIPGPVLVITDSFYVA |
| | | | ESANKELPYWKSNGFVNNKKKPLKHISKWKSIAECLSMKPDITIQHEKGISLQIPVFILKGNALADKLATQGSYVVNAGKRTADGSEFEKRTADGSEFESPKKKAK |
| | | | VEGSGEGRGSLLTCGDVEENPG |
| HTLV | 1 | 3753 | MAPKKKRKVGIHGVPAADKKYSIGLDIGTNSVGWAVITDEYKVPSKKFKVLGNTDRHSIKKNLIGALLFDSGETAEATRLKRTARRRYTRRKNRICYLQEIFSNEM |
| | | | AKVDDSFFHRLEESFLVEEDKKHERHPIFGNIVDEVAYHEKYPTIYHLRKKLVDSTDKADLRLIYLALAHMIKFRGHFLIEGDLNPDNSDVDKLFIQLVQTYNQLF |
| | | | EENPINASGVDAKAILSARLSKSRRLENLIAQLPGEKKNGLFGNLIALSLGLTPNFKSNFDLAEDAKLQLSKDTYDDDLDNLLAQIGDQYADLFLAAKNLSDAILL |
| | | | SDILRVNTEITKAPLSASMIKRYDEHHQDLTLLKALVRQQLPEKYKEIFFDQSKNGYAGYIDGGASQEEFYKFIKPILEKMDGTEELLVKLNREDLLRKQRTFDNG |
| | | | SIPHQIHLGELHAILRRQEDFYPFLKDNREKIEKILTFRIPYYVGPLARCNSRFAWMTRKSEETITPWNFEEVVDKGASAQSFIERMTNFDKNLPNEKVLPKHSLL |
| | | | YEYFTVYNELTKVKYVTEGMRKPAFLSGEQKKAIVDLLFKTNRKVTVKQLKEDYFKKIECFDSVEISGVEDRFNASLGTYHDLLKIIKDKDFLDNEENEDILEDIV |
| | | | LTLTLFEDREMIEERLKTYAHLFDDKVMKQLKRRRYTGWGRLSRKLINGIRDKQSGKTILDFLKSDGFANRNFMQLIHDDSLTFKEDIQKAQVSGQGDSLHEKIAN |
| | | | LAGSPAIKKGILQTVKVVDELVKVMGRHKPENIVIEMARENQTTQKGQKNSRERMKRIEEGIKELGSQILKEKPVENTQLQNEKLYLYYLQNGRDMYVDQELDINR |
| | | | LSDYDVDHIVPQSFLKDDSIDNKVLTRSDKARGKSDNVPSEEVVKKMKNYWRQLLNAKLITQRKFDNLTKAERGGLSELDKAGFIKRQLVETRQITKHVAQILDSR |
| | | | MNTKYDENDKLIREVKVITLKSKLVSDFRKDFQFYKVREINNYHHAHDAYLNAVVGTALIKKYPKLESEFVYGDYKVYDVRKMIAKSEQEIGKATAKYFFYSNIMN |
| | | | FFKTEITLANGEIRKRPLIETNGETGEIVWDKGRDFATVRKVLSMPQVNIVKKTEVQTGGFSKESILPKRNSDKLLARKKDWDPKKYGGFDSPTVAYSVLVVAKVE |
| | | | KGKSKKLKSVKELLGITIMERSSFEKNPIDFLEAKGYKEVKKDLIIKLPKYSLFELENGRKRMLASAGELQKGNELALPSKYVNFLYLASHYEKLKGSPEDNEQKQ |
| | | | LFVEQHKHYLDEIIEQISEFSKRVILADANLDKVLSAYNKHRDKPIREQAENIIHLFTLTNLGAPAAFKYFDTTIDRKRYTSTKEVLDATLIHQSITGLYETRIDL |
| | | | SQLGGDSGCSSGGSSGSETPGTSESATPESSGGSSGGSSMEHLPRPPQISQFPLNPERLQALQHLVRKALEAGHIEPYTGPGNNPVFPVKKANGTWRFIHDLRATN |
| | | | SLTIDLSSSSPGPPDLSSLPTTLAHLQTIDLRDAFFQIPLPKQFQPYFAFTVPQQCNYGPGTRYAWKVLPQGFKNSPTLFEMQLAHILQPIRQAFPQCTILQYMDD |
| | | | ILLASPSHEDLLLLSEATMASLISHGLPVSENKTQQTPGTIKFLGQIISPNHLTYDAVPTVPIRSRWALPELQALLGEIQWVSKGTPTLRQPLHSLYCALQRHTDP |
| | | | RDQIYLNPSQVQSLVQLRQALSQNCRSRLVQTLPLLGAIMLTLTGTTTVVFQSKEQWPLVWLHAPLPHTSQCPWGQLLASAVLLLDKYTLQSYGLLCQTIHHNIST |
| | | | QTFNQFIQTSDHPSVPILLHHSHRFKNLGAQTGELWNTFLKTAAPLAPVKALMPVFTLSPVIINTAPCLFSDGSTSRAAYILWDKQILSQRSFPLPPPHKSAQRAE |
| | | | LLGLLHGLSSARSWRCLNIFLDSKYLYHYLRTLALGTFQGRSSQAPFQALLPRLLSRKVVYLHHVRSHTNLPDPISRLNALTDALLITPVLQLS |
| HTLV | 2 | 3754 | MKRTADGSEFESPKKKRKVDKKYSIGLDIGTNSVGWAVITDEYKVPSKKFKVLGNTDRHSIKKNLIGALLFDSGETAEATRLKRTARRRYTRRKNRICYLQEIFSN |
| | | | EMAKVDDSFFHRLEESFLVEEDKKHERHPIFGNIVDEVAYHEKYPTIYHLRKKLVDSTDKADLRLIYLALAHMIKFRGHFLIEGDLNPDNSDVDKLFIQLVQTYNQ |
| | | | LFEENPINASGVDAKAILSARLSKSRRLENLIAQLPGEKKNGLFGNLIALSLGLTPNFKSNFDLAEDAKLQLSKDTYDDDLDNLLAQIGDQYADLFLAAKNLSDAI |
| | | | LLSDILRVNTEITKAPLSASMIKRYDEHHQDLTLLKALVRQQLPEKYKEIFFDQSKNGYAGYIDGGASQEEFYKFIKPILEKMDGTEELLVKLNREDLLRKQRTFD |
| | | | NGSIPHQIHLGELHAILRRQEDFYPFLKDNREKIEKILTFRIPYYVGPLARGNSRFAWMTRKSEETITPWNFEEVVDKGASAQSFIERMTNFDKNLPNEKVLPKHS |
| | | | LLYEYFTVYNELTKVKYVTEGMRKPAFLSGEQKKAIVDLLFKTNRKVTVKQLKEDYFKKIECFDSVEISGVEDRFNASLGTYHDLLKIIKDKDFLDNEENEDILED |
| | | | IVLTLTLFEDREMIEERLKTYAHLFDDKVMKQLKRRRYTGWCRLSRKLINGIRDKQSGKTILDFLKSDGFANRNFMQLIHDDSLTFKEDIQKAQVSGQGDSLHEHI |
| | | | ANLAGSPAIKKGILQTVKVVDELVKVMGRHKPENIVIEMARENQTTQKGQKNSRERMKRIEEGIKELGSQILKEHPVENTQLQNEKLYLYYLQNGRDMYVDQELDI |
| | | | NRLSDYDVDHIVPQSFLKDDSIDNKVLTRSDKARGKSDNVPSEEVVKKMKNYWRQLLNAKLITQRKFDNLTKAERGGLSELDKAGFIKRQLVETRQITKHVAQILD |
| | | | SRMNTKYDENDKLIREVKVITLKSKLVSDFRKDFQFYKVREINNYHHAHDAYLNAVVGTALIKKYPKLESEFVYGDYKVYDVRKMIAKSEQEIGKATAKYFFYSNI |
| | | | MNFFKTEITLANGEIRKRPLIETNGETGEIVWDKGRDFATVRKVLSMPQVNIVKKTEVQTGGFSKESILPKRNSDKLLARKKDWDPKKYGGFDSPTVAYSVLVVAK |
| | | | VEKGKSKKLKSVKELLGITIMERSSFEKNPIDFLEAKGYKEVKKDLIIKLPKYSLFELENGRKRMLASAGELQKGNELALPSKYVNFLYLASHYEKLKGSPEDNEQ |
| | | | KQLFVEQHKHYLDEIIEQISEFSKRVILADANLDKVLSAYNKHRDKPIREQAENIIHLFTLTNLGAPAAFKYFDTTIDRKRYTSTKEVLDATLIHQSITGLYETRI |
| | | | DLSQLGGDSGGSSGGSSGSETPGTSESATPESSGGSSGGSSMEHLPRPPQISQFPLNPERLQALQHLVRKALEAGHIEPYTGPGNNPVFPVKKANGTWRFIHDLRA |
| | | | TNSLTIDLSSSSPGPPDLSSLPTTLAHLQTIDLRDAFFQIPLPKQFQPYFAFTVPQQCNYGPGTRYAWKVLPQGFKNSPTLFEMQLAHILQPIRQAFPQCTILQYM |
| | | | DDILLASPSHEDLLLLSEATMASLISHGLPVSENKTQQTPGTIKFLGQIISPNHLTYDAVPTVPIRSRWALPELQALLGEIQWVSKGTPTLRQPLHSLYCALQRHT |
| | | | DPRDQIYLNPSQVQSLVQLRQALSQNCRSRLVQTLPLLGAIMLTLTGTTTVVFQSKEQWPLVWLHAPLPHTSQCPWGQLLASAVLLLDKYTLQSYGLLCQTIHHNI |
| | | | STQTFNQFIQTSDHPSVPILLHHSHRFKNLGAQTGELWNTFLKTAAPLAPVKALMPVFTLSPVIINTAPCLFSDGSTSRAAYILWDKQILSQRSFPLPPPHKSAQR |
| | | | AELLCLLHGLSSARSWRCLNIFLDSKYLYHYLRTLALGTFQGRSSQAPFQALLPRLLSRKVVYLHHVRSHTNLPDPISRLNALTDALLITPVLQLSSGGSKRTADG |
| | | | SEFEPKKKRKV |
| HTLV | 3 | 3755 | MPAAKRVKLDGGDKKYSIGLDIGTNSVGWAVITDEYKVPSKKFKVLGNTDRHSIKKNLIGALLFDSGETAEATRLKRTARRRYTRRKNRICYLQEIFSNEMAKVDD |
| | | | SFFHRLEESFLVEEDKKHERHPIFGNIVDEVAYHEKYPTIYHLRKKLVDSTDKADLRLIYLALAHMIKFRGHFLIEGDLNPDNSDVDKLFIQLVQTYNQLFEENPI |
| | | | NASCVDAKAILSARLSKSRRLENLIAQLPGEKKNGLFGNLIALSLGLTPNFKSNFDLAEDAKLQLSKDTYDDDLDNLLAQIGDQYADLFLAAKNLSDAILLSDILR |
| | | | VNTEITKAPLSASMIKRYDEHHQDLTLLKALVRQQLPEKYKEIFFDQSKNGYAGYIDGGASQEEFYKFIKPILEKMDGTEELLVKLNREDLLRKQRTFDNGSIPHQ |
| | | | IHLGELHAILRRQEDFYPFLKDNREKIEKILTFRIPYYVCPLARGNSRFAWMTRKSEETITPWNFEEVVDKGASAQSFIERMTNFDKNLPNEKVLPKHSLLYEYFT |
| | | | VYNELTKVKYVTEGMRKPAFLSGEQKKAIVDLLFKTNRKVTVKQLKEDYFKKIECFDSVEISGVEDRFNASLGTYHDLLKIIKDKDFLDNEENEDILEDIVLTLTL |
| | | | FEDREMIEERLKTYAHLFDDKVMKQLKRRRYTGWGRLSRKLINGIRDKQSGKTILDFLKSDGFANRNFMQLIHDDSLTFKEDIQKAQVSGQGDSLHEHIANLAGSP |
| | | | AIKKGILQTVKVVDELVKVMGRHKPENIVIEMARENQTTQKGQKNSRERMKRIEEGIKELGSQILKEHPVENTQLQNEKLYLYYLQNGRDMYVDQELDINRLSDYD |
| | | | VDHIVPQSFLKDDSIDNKVLTRSDKARGKSDNVPSEEVVKKMKNYWRQLLNAKLITQRKFDNLTKAERGGLSELDKAGFIKRQLVETRQITKHVAQILDSRMNTKY |
| | | | DENDKLIREVKVITLKSKLVSDFRKDFQFYKVREINNYHHAHDAYLNAVVGTALIKKYPKLESEFVYGDYKVYDVRKMIAKSEQEIGKATAKYFFYSNIMNFFKTE |
| | | | ITLANGEIRKRPLIETNGETGEIVWDKGRDFATVRKVLSMPQVNIVKKTEVQTGGFSKESILPKRNSDKLIARKKDWDPKKYGGFDSPTVAYSVLVVAKVEKGKSK |
| | | | KLKSVKELLGITIMERSSFEKNPIDFLEAKGYKEVKKDLIIKLPKYSLFELENGRKRMLASAGELQKGNELALPSKYVNFLYLASHYEKLKGSPEDNEQKQLFVEQ |
| | | | HKHYLDEIIEQISEFSKRVILADANLDKVLSAYNKHRDKPIREQAENIIHLFTLTNLGAPAAFKYFDTTIDRKRYTSTKEVLDATLIHQSITGLYETRIDLSQLGG |
| | | | DSGGSSGGSSGSETPGTSESATPESSGGSSGGSSMEHLPRPPQISQFPLNPERLQALQHLVRKALEAGHIEPYTGPGNNPVFPVKKANGTWRFIHDLRATNSLTID |
| | | | LSSSSPGPPDLSSLPTTLAHLQTIDLRDAFFQIPLPKQFQPYFAFTVPQQCNYGPGTRYAWKVLPQGFKNSPTLFEMQLAHILQPIRQAFPQCTILQYMDDILLAS |
| | | | PSHEDLLLLSEATMASLISHGLPVSENKTQQTPGTIKFLGQIISPNHLTYDAVPTVPIRSRWALPELQALLGEIQWVSKGTPTLRQPLHSLYCALQRHTDPRDQIY |
| | | | LNPSQVQSLVQLRQALSQNCRSRLVQTLPLLGAIMLTLTGTTTVVFQSKEQWPLVWLHAPLPHTSQCPWGQLLASAVLLLDKYTLQSYGLLCQTIHHNISTQTFNQ |
| | | | FIQTSDHPSVPILLHHSHRFKNLGAQTGELWNTFLKTAAPLAPVKALMPVFTLSPVIINTAPCLFSDGSTSRAAYILWDKQILSQRSFPLPPPHKSAQRAELLGLL |
| | | | HGLSSARSWRCLNIFLDSKYLYHYLRTLALGTFQGRSSQAPFQALLPRLLSRKVVYLHHVRSHTNLPDPISRLNALTDALLITPVLQLSSGGSKRTADGSEFEKRT |
| | | | ADGSEFESPKKKAKVE |
| HTLV | 4 | 3756 | MPAAKRVKLDGGDKKYSIGLDIGTNSVGWAVITDEYKVPSKKFKVLGNTDRHSIKKNLIGALLFDSGETAEATRLKRTARRRYTRRKNRICYLQEIFSNEMAKVDD |
| | | | SFFHRLEESFLVEEDKKHERHPIFGNIVDEVAYHEKYPTIYHLRKKLVDSTDKADLRLIYLALAHMIKFRGHFLIEGDLNPDNSDVDKLFIQLVQTYNQLFEENPI |
| | | | NASGVDAKAILSARLSKSRRLENLIAQLPGEKKNGLFGNLIALSLGLTPNFKSNFDLAEDAKLQLSKDTYDDDLDNLLAQIGDQYADLFLAAKNLSDAILLSDILR |
| | | | VNTEITKAPLSASMIKRYDEHHQDLTLLKALVRQQLPEKYKEIFFDQSKNGYAGYIDGGASQEEFYKFIKPILEKMDGTEELLVKLNREDLLRKQRTFDNGSIPHQ |
| | | | IHLGELHAILRRQEDFYPFLKDNREKIEKILTFRIPYYVGPLARGNSRFAWMTRKSEETITPWNFEEVVDKGASAQSFIERMTNFDKNLPNEKVLPKHSLLYEYFT |
| | | | VYNELTKVKYVTEGMRKPAFLSGEQKKAIVDLLFKTNRKVTVKQLKEDYFKKIECFDSVEISGVEDRFNASLGTYHDLLKIIKDKDFLDNEENEDILEDIVLTLTL |
| | | | FEDREMIEERLKTYAHLFDDKVMKQLKRRRYTGWGRLSRKLINGIRDKQSGKTILDFLKSDGFANRNFMQLIHDDSLTFKEDIQKAQVSGQGDSLHEHIANLAGSP |
| | | | AIKKGILQTVKVVDELVKVMGRHKPENIVIEMARENQTTQKGQKNSRERMKRIEEGIKELGSQILKEHPVENTQLQNEKLYLYYLQNGRDMYVDQELDINRLSDYD |
| | | | VDHIVPQSFLKDDSIDNKVLTRSDKARGKSDNVPSEEVVKKMKNYWRQLLNAKLITQRKFDNLTKAERGGLSELDKAGFIKRQLVETRQITKHVAQILDSRMNTKY |
| | | | DENDKLIREVKVITLKSKLVSDFRKDFQFYKVREINNYHHAHDAYLNAVVGTALIKKYPKLESEFVYGDYKVYDVRKMIAKSEQEIGKATAKYFFYSNIMNFFKTE |
| | | | ITLANGEIRKRPLIETNGETGEIVWDKGRDFATVRKVLSMPQVNIVKKTEVQTGGFSKESILPKRNSDKLIARKKDWDPKKYGGFDSPTVAYSVLVVAKVEKGKSK |
| | | | KLKSVKELLGITIMERSSFEKNPIDFLEAKGYKEVKKDLIIKLPKYSLFELENGRKRMLASAGELQKGNELALPSKYVNFLYLASHYEKLKGSPEDNEQKQLFVEQ |
| | | | HKHYLDEIIEQISEFSKRVILADANLDKVLSAYNKHRDKPIREQAENIIHLFTLTNLGAPAAFKYFDTTIDRKRYTSTKEVLDATLIHQSITGLYETRIDLSQLGG |
| | | | DGGSGGSSGGSSGSETPGTSESATPESSGGSSGGSSGGAVLGLEHLPRPPQISQFPLNPERLQALQHLVRKALEAGHIEPYTGPGNNPVFPVKKANGTWRFIHDLR |
| | | | ATNSLTIDLSSSSPGPPDLSSLPTTLAHLQTIDLRDAFFQIPLPKQFQPYFAFTVPQQCNYGPGTRYAWKVLPQGFKNSPTLFEMQLAHILQPIRQAFPQCTILQY |
| | | | MDDILLASPSHEDLLLLSEATMASLISHGLPVSENKTQQTPGTIKFLGQIISPNHLTYDAVPTVPIRSRWALPELQALLGEIQWVSKGTPTLRQPLHSLYCALQRH |
| | | | TDPRDQIYLNPSQVQSLVQLRQALSQNCRSRLVQTLPLLGAIMLTLTGTTTVVFQSKEQWPLVWLHAPLPHTSQCPWGQLLASAVLLLDKYTLQSYGLLCQTIHHN |
| | | | ISTQTFNQFIQTSDHPSVPILLHHSHRFKNLGAQTGELWNTFLKTAAPLAPVKALMPVFTLSPVIINTAPCLFSDGSTSRAAYILWDKQILSQRSFPLPPPHKSAQ |
| | | | RAELLGLLHGLSSARSWRCLNIFLDSKYLYHYLRTLALGTFQGRSSQAPFQALLPRLLSRKVVYLHHVRSHTNLPDPISRLNALTDALLITPVLQLAGKRTADGSE |
| | | | FEKRTADGSEFESPKKKAKVEGSGEGRGSLLTCGDVEENPG |
| HTLV | 5 | 3757 | MPAAKRVKLDGGDKKYSIGLDIGTNSVGWAVITDEYKVPSKKFKVLGNTDRHSIKKNLIGALLFDSGETAEATRLKRTARRRYTRRKNRICYLQEIFSNEMAKVDD |
| | | | SFFHRLEESFLVEEDKKHERHPIFGNIVDEVAYHEKYPTIYHLRKKLVDSTDKADLRLIYLALAHMIKFRGHFLIEGDLNPDNSDVDKLFIQLVQTYNQLFEENPI |
| | | | NASGVDAKAILSARLSKSRRLENLIAQLPGEKKNGLFGNLIALSLGLTPNFKSNFDLAEDAKLQLSKDTYDDDLDNLLAQIGDQYADLFLAAKNLSDAILLSDILR |
| | | | VNTEITKAPLSASMIKRYDEHHQDLTLLKALVRQQLPEKYKEIFFDQSKNGYAGYIDGGASQEEFYKFIKPILEKMDGTEELLVKLNREDLLRKQRTFDNGSIPHQ |
| | | | IHLGELHAILRRQEDFYPFLKDNREKIEKILTFRIPYYVGPLARGNSRFAWMTRKSEETITPWNFEEVVDKGASAQSFIERMTNFDKNLPNEKVLPKHSLLYEYFT |
| | | | VYNELTKVKYVTEGMRKPAFLSGEQKKAIVDLLFKTNRKVTVKQLKEDYFKKIECFDSVEISGVEDRFNASLGTYHDLLKIIKDKDFLDNEENEDILEDIVLTLTL |
| | | | FEDREMIEERLKTYAHLFDDKVMKQLKRRRYTGWGRLSRKLINGIRDKQSGKTILDFLKSDGFANRNFMQLIHDDSLTFKEDIQKAQVSGQGDSLHEHIANLAGSP |
| | | | AIKKGILQTVKVVDELVKVMGRHKPENIVIEMARENQTTQKGQKNSRERMKRIEEGIKELGSQILKEHPVENTQLQNEKLYLYYLQNGRDMYVDQELDINRLSDYD |
| | | | VDHIVPQSFLKDDSIDNKVLTRSDKARGKSDNVPSEEVVKKMKNYWRQLLNAKLITQRKFDNLTKAERGGLSELDKAGFIKRQLVETRQITKHVAQILDSRMNTKY |
| | | | DENDKLIREVKVITLKSKLVSDFRKDFQFYKVREINNYHHAHDAYLNAVVGTALIKKYPKLESEFVYGDYKVYDVRKMIAKSEQEIGKATAKYFFYSNIMNFFKTE |
| | | | ITLANGEIRKRPLIETNGETGEIVWDKGRDFATVRKVLSMPQVNIVKKTEVQTGGFSKESILPKRNSDKLIARKKDWDPKKYGGFDSPTVAYSVLVVAKVEKGKSK |
| | | | KLKSVKELLGITIMERSSFEKNPIDFLEAKGYKEVKKDLIIKLPKYSLFELENGRKRMLASAGELQKGNELALPSKYVNFLYLASHYEKLKGSPEDNEQKQLFVEQ |
| | | | HKHYLDEIIEQISEFSKRVILADANLDKVLSAYNKHRDKPIREQAENIIHLFTLTNLGAPAAFKYFDTTIDRKRYTSTKEVLDATLIHQSITGLYETRIDLSQLGG |
| | | | DGGGGGGGGAVLGLEHLPRPPQISQFPLNPERLQALQHLVRKALEAGHIEPYTGPGNNPVFPVKKANGTWRFIHDLRATNSLTIDLSSSSPGPPDLSSLPTTLAHL |
| | | | QTIDLRDAFFQIPLPKQFQPYFAFTVPQQCNYGPGTRYAWKVLPQGFKNSPTLFEMQLAHILQPIRQAFPQCTILQYMDDILLASPSHEDLLLLSEATMASLISHG |
| | | | LPVSENKTQQTPGTIKFLGQIISPNHLTYDAVPTVPIRSRWALPELQALLGEIQWVSKGTPTLRQPLHSLYCALQRHTDPRDQIYLNPSQVQSLVQLRQALSQNCR |
| | | | SRLVQTLPLLGAIMLTLTGTTTVVFQSKEQWPLVWLHAPLPHTSQCPWGQLLASAVLLLDKYTLQSYGLLCQTIHHNISTQTFNQFIQTSDHPSVPILLHHSHRFK |
| | | | NLGAQTGELWNTFLKTAAPLAPVKALMPVFTLSPVIINTAPCLFSDGSTSRAAYILWDKQILSQRSFPLPPPHKSAQRAELLGLLHGLSSARSWRCLNIFLDSKYL |
| | | | YHYLRTLALGTFQGRSSQAPFQALLPRLLSRKVVYLHHVRSHTNLPDPISRLNALTDALLITPVLQLAGKRTADGSEFEKRTADGSEFESPKKKAKVEGSGEGRGS |
| | | | LLTCGDVEENPG |
| HTLV | 6 | 3758 | MPAAKRVKLDGGDKKYSIGLDIGTNSVGWAVITDEYKVPSKKFKVLGNTDRHSIKKNLIGALLFDSGETAEATRLKRTARRRYTRRKNRICYLQEIFSNEMAKVDD |
| | | | SFFHRLEESFLVEEDKKHERHPIFGNIVDEVAYHEKYPTIYHLRKKLVDSTDKADLRLIYLALAHMIKFRGHFLIEGDLNPDNSDVDKLFIQLVQTYNQLFEENPI |
| | | | NASGVDAKAILSARLSKSRRLENLIAQLPGEKKNGLFGNLIALSLGLTPNFKSNFDLAEDAKLQLSKDTYDDDLDNLLAQIGDQYADLFLAAKNLSDAILLSDILR |
| | | | VNTEITKAPLSASMIKRYDEHHQDLTLLKALVRQQLPEKYKEIFFDQSKNGYAGYIDGGASQEEFYKFIKPILEKMDGTEELLVKLNREDLLRKQRTFDNGSIPHQ |
| | | | IHLGELHAILRRQEDFYPFLKDNREKIEKILTFRIPYYVGPLARGNSRFAWMTRKSEETITPWNFEEVVDKGASAQSFIERMTNFDKNLPNEKVLPKHSLLYEYFT |
| | | | VYNELTKVKYVTEGMRKPAFLSGEQKKAIVDLLFKTNRKVTVKQLKEDYFKKIECFDSVEISGVEDRFNASLGTYHDLLKIIKDKDFLDNEENEDILEDIVLTLTL |
| | | | FEDREMIEERLKTYAHLFDDKVMKQLKRRRYTGWGRLSRKLINGIRDKQSGKTILDFLKSDGFANRNFMQLIHDDSLTFKEDIQKAQVSGQGDSLHEHIANLAGSP |
| | | | AIKKGILQTVKVVDELVKVMGRHKPENIVIEMARENQTTQKGQKNSRERMKRIEEGIKELGSQILKEHPVENTQLQNEKLYLYYLQNGRDMYVDQELDINRLSDYD |
| | | | VDHIVPQSFLKDDSIDNKVLTRSDKARGKSDNVPSEEVVKKMKNYWRQLLNAKLITQRKFDNLTKAERGGLSELDKAGFIKRQLVETRQITKHVAQILDSRMNTKY |
| | | | DENDKLIREVKVITLKSKLVSDFRKDFQFYKVREINNYHHAHDAYLNAVVGTALIKKYPKLESEFVYGDYKVYDVRKMIAKSEQEIGKATAKYFFYSNIMNFFKTE |
| | | | ITLANGEIRKRPLIETNGETGEIVWDKGRDFATVRKVLSMPQVNIVKKTEVQTGGFSKESILPKRNSDKLIARKKDWDPKKYGGFDSPTVAYSVLVVAKVEKGKSK |
| | | | KLKSVKELLGITIMERSSFEKNPIDFLEAKGYKEVKKDLIIKLPKYSLFELENGRKRMLASAGELQKGNELALPSKYVNFLYLASHYEKLKGSPEDNEQKQLFVEQ |
| | | | HKHYLDEIIEQISEFSKRVILADANLDKVLSAYNKHRDKPIREQAENIIHLFTLTNLGAPAAFKYFDTTIDRKRYTSTKEVLDATLIHQSITGLYETRIDLSQLGG |
| | | | DGGGGGGGGGGAVLGLEHLPRPPQISQFPLNPERLQALQHLVRKALEAGHIEPYTGPGNNPVFPVKKANGTWRFIHDLRATNSLTIDLSSSSPGPPDLSSLPTTLA |
| | | | HLQTIDLRDAFFQIPLPKQFQPYFAFTVPQQCNYGPGTRYAWKVLPQGFKNSPTLFEMQLAHILQPIRQAFPQCTILQYMDDILLASPSHEDLLLLSEATMASLIS |
| | | | HGLPVSENKTQQTPGTIKFLGQIISPNHLTYDAVPTVPIRSRWALPELQALLGEIQWVSKGTPTLRQPLHSLYCALQRHTDPRDQIYLNPSQVQSLVQLRQALSQN |
| | | | CRSRLVQTLPLLGAIMLTLTGTTTVVFQSKEQWPLVWLHAPLPHTSQCPWGQLLASAVLLLDKYTLQSYGLLCQTIHHNISTQTFNQFIQTSDHPSVPILLHHSHR |
| | | | FKNLGAQTGELWNTFLKTAAPLAPVKALMPVFTLSPVIINTAPCLFSDGSTSRAAYILWDKQILSQRSFPLPPPHKSAQRAELLGLLHGLSSARSWRCLNIFLDSK |
| | | | YLYHYLRTLALGTFQGRSSQAPFQALLPRLLSRKVVYLHHVRSHTNLPDPISRLNALTDALLITPVLQLAGKRTADGSEFEKRTADGSEFESPKKKAKVEGSGEGR |
| | | | GSLLTCGDVEENPG |
| HTLV | 7 | 3759 | MPAAKRVKLDGGDKKYSIGLDIGTNSVGWAVITDEYKVPSKKFKVLGNTDRHSIKKNLIGALLFDSGETAEATRLKRTARRRYTRRKNRICYLQEIFSNEMAKVDD |
| | | | SFFHRLEESFLVEEDKKHERHPIFGNIVDEVAYHEKYPTIYHLRKKLVDSTDKADLRLIYLALAHMIKFRGHFLIEGDLNPDNSDVDKLFIQLVQTYNQLFEENPI |
| | | | NASGVDAKAILSARLSKSRRLENLIAQLPGEKKNGLFGNLIALSLGLTPNFKSNFDLAEDAKLQLSKDTYDDDLDNLLAQIGDQYADLFLAAKNLSDAILLSDILR |
| | | | VNTEITKAPLSASMIKRYDEHHQDLTLLKALVRQQLPEKYKEIFFDQSKNGYAGYIDGGASQEEFYKFIKPILEKMDGTEELLVKLNREDLLRKQRTFDNGSIPHQ |
| | | | IHLGELHAILRRQEDFYPFLKDNREKIEKILTFRIPYYVGPLARGNSRFAWMTRKSEETITPWNFEEVVDKGASAQSFIERMTNFDKNLPNEKVLPKHSLLYEYFT |
| | | | VYNELTKVKYVTEGMRKPAFLSGEQKKAIVDLLFKTNRKVTVKQLKEDYFKKIECFDSVEISGVEDRFNASLGTYHDLLKIIKDKDFLDNEENEDILEDIVLTLTL |
| | | | FEDREMIEERLKTYAHLFDDKVMKQLKRRRYTGWGRLSRKLINGIRDKQSGKTILDFLKSDGFANRNFMQLIHDDSLTFKEDIQKAQVSGQGDSLHEHIANLAGSP |
| | | | AIKKGILQTVKVVDELVKVMGRHKPENIVIEMARENQTTQKGQKNSRERMKRIEEGIKELGSQILKEHPVENTQLQNEKLYLYYLQNGRDMYVDQELDINRLSDYD |
| | | | VDHIVPQSFLKDDSIDNKVLTRSDKARGKSDNVPSEEVVKKMKNYWRQLLNAKLITQRKFDNLTKAERGGLSELDKAGFIKRQLVETRQITKHVAQILDSRMNTKY |
| | | | DENDKLIREVKVITLKSKLVSDFRKDFQFYKVREINNYHHAHDAYLNAVVGTALIKKYPKLESEFVYGDYKVYDVRKMIAKSEQEIGKATAKYFFYSNIMNFFKTE |
| | | | ITLANGEIRKRPLIETNGETGEIVWDKGRDFATVRKVLSMPQVNIVKKTEVQTGGFSKESILPKRNSDKLIARKKDWDPKKYGGFDSPTVAYSVLVVAKVEKGKSK |
| | | | KLKSVKELLGITIMERSSFEKNPIDFLEAKGYKEVKKDLIIKLPKYSLFELENGRKRMLASAGELQKGNELALPSKYVNFLYLASHYEKLKGSPEDNEQKQLFVEQ |
| | | | HKHYLDEIIEQISEFSKRVILADANLDKVLSAYNKHRDKPIREQAENIIHLFTLTNLGAPAAFKYFDTTIDRKRYTSTKEVLDATLIHQSITGLYETRIDLSQLGG |
| | | | DGGGSSGGGGGAVLGLEHLPRPPQISQFPLNPERLQALQHLVRKALEAGHIEPYTGPGNNPVFPVKKANGTWRFIHDLRATNSLTIDLSSSSPGPPDLSSLPTTLA |
| | | | HLQTIDLRDAFFQIPLPKQFQPYFAFTVPQQCNYGPGTRYAWKVLPQGFKNSPTLFEMQLAHILQPIRQAFPQCTILQYMDDILLASPSHEDLLLLSEATMASLIS |
| | | | HGLPVSENKTQQTPGTIKFLGQIISPNHLTYDAVPTVPIRSRWALPELQALLGEIQWVSKGTPTLRQPLHSLYCALQRHTDPRDQIYLNPSQVQSLVQLRQALSQN |
| | | | CRSRLVQTLPLLGAIMLTLTGTTTVVFQSKEQWPLVWLHAPLPHTSQCPWGQLLASAVLLLDKYTLQSYGLLCQTIHHNISTQTFNQFIQTSDHPSVPILLHHSHR |
| | | | FKNLGAQTGELWNTFLKTAAPLAPVKALMPVFTLSPVIINTAPCLFSDGSTSRAAYILWDKQILSQRSFPLPPPHKSAQRAELLGLLHGLSSARSWRCLNIFLDSK |
| | | | YLYHYLRTLALGTFQGRSSQAPFQALLPRLLSRKVVYLHHVRSHTNLPDPISRLNALTDALLITPVLQLAGKRTADGSEFEKRTADGSEFESPKKKAKVEGSGEGR |
| | | | GSLLTCGDVEENPG |
| HTLV | 8 | 3760 | MPAAKRVKLDGGDKKYSIGLDIGTNSVGWAVITDEYKVPSKKFKVLGNTDRHSIKKNLIGALLFDSGETAEATRLKRTARRRYTRRKNRICYLQEIFSNEMAKVDD |
| | | | SFFHRLEESFLVEEDKKHERHPIFGNIVDEVAYHEKYPTIYHLRKKLVDSTDKADLRLIYLALAHMIKFRGHFLIEGDLNPDNSDVDKLFIQLVQTYNQLFEENPI |
| | | | NASGVDAKAILSARLSKSRRLENLIAQLPGEKKNGLFGNLIALSLGLTPNFKSNFDLAEDAKLQLSKDTYDDDLDNLLAQIGDQYADLFLAAKNLSDAILLSDILR |
| | | | VNTEITKAPLSASMIKRYDEHHQDLTLLKALVRQQLPEKYKEIFFDQSKNGYAGYIDGGASQEEFYKFIKPILEKMDGTEELLVKLNREDLLRKQRTFDNGSIPHQ |
| | | | IHLGELHAILRRQEDFYPFLKDNREKIEKILTFRIPYYVGPLARGNSRFAWMTRKSEETITPWNFEEVVDKGASAQSFIERMTNFDKNLPNEKVLPKHSLLYEYFT |
| | | | VYNELTKVKYVTEGMRKPAFLSGEQKKAIVDLLFKTNRKVTVKQLKEDYFKKIECFDSVEISGVEDRFNASLGTYHDLLKIIKDKDFLDNEENEDILEDIVLTLTL |
| | | | FEDREMIEERLKTYAHLFDDKVMKQLKRRRYTGWGRLSRKLINGIRDKQSGKTILDFLKSDGFANRNFMQLIHDDSLTFKEDIQKAQVSGQGDSLHEHIANLAGSP |
| | | | AIKKGILQTVKVVDELVKVMGRHKPENIVIEMARENQTTQKGQKNSRERMKRIEEGIKELGSQILKEHPVENTQLQNEKLYLYYLQNGRDMYVDQELDINRLSDYD |
| | | | VDHIVPQSFLKDDSIDNKVLTRSDKARGKSDNVPSEEVVKKMKNYWRQLLNAKLITQRKFDNLTKAERGGLSELDKAGFIKRQLVETRQITKHVAQILDSRMNTKY |
| | | | DENDKLIREVKVITLKSKLVSDFRKDFQFYKVREINNYHHAHDAYLNAVVGTALIKKYPKLESEFVYGDYKVYDVRKMIAKSEQEIGKATAKYFFYSNIMNFFKTE |
| | | | ITLANGEIRKRPLIETNGETGEIVWDKGRDFATVRKVLSMPQVNIVKKTEVQTGGFSKESILPKRNSDKLIARKKDWDPKKYGGFDSPTVAYSVLVVAKVEKGKSK |
| | | | KLKSVKELLGITIMERSSFEKNPIDFLEAKGYKEVKKDLIIKLPKYSLFELENGRKRMLASAGELQKGNELALPSKYVNFLYLASHYEKLKGSPEDNEQKQLFVEQ |
| | | | HKHYLDEIIEQISEFSKRVILADANLDKVLSAYNKHRDKPIREQAENIIHLFTLTNLGAPAAFKYFDTTIDRKRYTSTKEVLDATLIHQSITGLYETRIDLSQLGG |
| | | | DGGEAAAKGGSGGGGGAVLGLEHLPRPPQISQFPLNPERLQALQHLVRKALEAGHIEPYTGPGNNPVFPVKKANGTWRFIHDLRATNSLTIDLSSSSPGPPDLSSL |
| | | | PTTLAHLQTIDLRDAFFQIPLPKQFQPYFAFTVPQQCNYGPGTRYAWKVLPQGFKNSPTLFEMQLAHILQPIRQAFPQCTILQYMDDILLASPSHEDLLLLSEATM |
| | | | ASLISHGLPVSENKTQQTPGTIKFLGQIISPNHLTYDAVPTVPIRSRWALPELQALLGEIQWVSKGTPTLRQPLHSLYCALQRHTDPRDQIYLNPSQVQSLVQLRQ |
| | | | ALSQNCRSRLVQTLPLLGAIMLTLTGTTTVVFQSKEQWPLVWLHAPLPHTSQCPWGQLLASAVLLLDKYTLQSYGLLCQTIHHNISTQTFNQFIQTSDHPSVPILL |
| | | | HHSHRFKNLGAQTGELWNTFLKTAAPLAPVKALMPVFTLSPVIINTAPCLFSDGSTSRAAYILWDKQILSQRSFPLPPPHKSAQRAELLGLLHGLSSARSWRCLNI |
| | | | FLDSKYLYHYLRTLALGTFQGRSSQAPFQALLPRLLSRKVVYLHHVRSHTNLPDPISRLNALTDALLITPVLQLAGKRTADGSEFEKRTADGSEFESPKKKAKVEG |
| | | | SGEGRGSLLTCGDVEENPG |
| HTLV | 9 | 3761 | MPAAKRVKLDGGDKKYSIGLDIGTNSVGWAVITDEYKVPSKKFKVLGNTDRHSIKKNLIGALLFDSGETAEATRLKRTARRRYTRRKNRICYLQEIFSNEMAKVDD |
| | | | SFFHRLEESFLVEEDKKHERHPIFGNIVDEVAYHEKYPTIYHLRKKLVDSTDKADLRLIYLALAHMIKFRGHFLIEGDLNPDNSDVDKLFIQLVQTYNQLFEENPI |
| | | | NASGVDAKAILSARLSKSRRLENLIAQLPGEKKNGLFGNLIALSLGLTPNFKSNFDLAEDAKLQLSKDTYDDDLDNLLAQIGDQYADLFLAAKNLSDAILLSDILR |
| | | | VNTEITKAPLSASMIKRYDEHHQDLTLLKALVRQQLPEKYKEIFFDQSKNGYAGYIDGGASQEEFYKFIKPILEKMDGTEELLVKLNREDLLRKQRTFDNGSIPHQ |
| | | | IHLGELHAILRRQEDFYPFLKDNREKIEKILTFRIPYYVGPLARGNSRFAWMTRKSEETITPWNFEEVVDKGASAQSFIERMTNFDKNLPNEKVLPKHSLLYEYFT |
| | | | VYNELTKVKYVTEGMRKPAFLSGEQKKAIVDLLFKTNRKVTVKQLKEDYFKKIECFDSVEISGVEDRFNASLGTYHDLLKIIKDKDFLDNEENEDILEDIVLTLTL |
| | | | FEDREMIEERLKTYAHLFDDKVMKQLKRRRYTGWGRLSRKLINGIRDKQSGKTILDFLKSDGFANRNFMQLIHDDSLTFKEDIQKAQVSGQGDSLHEHIANLAGSP |
| | | | AIKKGILQTVKVVDELVKVMGRHKPENIVIEMARENQTTQKGQKNSRERMKRIEEGIKELGSQILKEHPVENTQLQNEKLYLYYLQNGRDMYVDQELDINRLSDYD |
| | | | VDHIVPQSFLKDDSIDNKVLTRSDKARGKSDNVPSEEVVKKMKNYWRQLLNAKLITQRKFDNLTKAERGGLSELDKAGFIKRQLVETRQITKHVAQILDSRMNTKY |
| | | | DENDKLIREVKVITLKSKLVSDFRKDFQFYKVREINNYHHAHDAYLNAVVGTALIKKYPKLESEFVYGDYKVYDVRKMIAKSEQEIGKATAKYFFYSNIMNFFKTE |
| | | | ITLANGEIRKRPLIETNGETGEIVWDKGRDFATVRKVLSMPQVNIVKKTEVQTGGFSKESILPKRNSDKLIARKKDWDPKKYGGFDSPTVAYSVLVVAKVEKGKSK |
| | | | KLKSVKELLGITIMERSSFEKNPIDFLEAKGYKEVKKDLIIKLPKYSLFELENGRKRMLASAGELQKGNELALPSKYVNFLYLASHYEKLKGSPEDNEQKQLFVEQ |
| | | | HKHYLDEIIEQISEFSKRVILADANLDKVLSAYNKHRDKPIREQAENIIHLFTLTNLGAPAAFKYFDTTIDRKRYTSTKEVLDATLIHQSITGLYETRIDLSQLGG |
| | | | DGGGGSPAPEAAAKGGAVLGLEHLPRPPQISQFPLNPERLQALQHLVRKALEAGHIEPYTGPGNNPVFPVKKANGTWRFIHDLRATNSLTIDLSSSSPGPPDLSSL |
| | | | PTTLAHLQTIDLRDAFFQIPLPKQFQPYFAFTVPQQCNYGPGTRYAWKVLPQGFKNSPTLFEMQLAHILQPIRQAFPQCTILQYMDDILLASPSHEDLLLLSEATM |
| | | | ASLISHGLPVSENKTQQTPGTIKFLGQIISPNHLTYDAVPTVPIRSRWALPELQALLGEIQWVSKGTPTLRQPLHSLYCALQRHTDPRDQIYLNPSQVQSLVQLRQ |
| | | | ALSQNCRSRLVQTLPLLGAIMLTLTGTTTVVFQSKEQWPLVWLHAPLPHTSQCPWGQLLASAVLLLDKYTLQSYGLLCQTIHHNISTQTFNQFIQTSDHPSVPILL |
| | | | HHSHRFKNLGAQTGELWNTFLKTAAPLAPVKALMPVFTLSPVIINTAPCLFSDGSTSRAAYILWDKQILSQRSFPLPPPHKSAQRAELLGLLHGLSSARSWRCLNI |
| | | | FLDSKYLYHYLRTLALGTFQGRSSQAPFQALLPRLLSRKVVYLHHVRSHTNLPDPISRLNALTDALLITPVLQLAGKRTADGSEFEKRTADGSEFESPKKKAKVEG |
| | | | SGEGRGSLLTCGDVEENPG |
| HTLV | 10 | 3762 | MPAAKRVKLDGGDKKYSIGLDIGTNSVGWAVITDEYKVPSKKFKVLGNTDRHSIKKNLIGALLFDSGETAEATRLKRTARRRYTRRKNRICYLQEIFSNEMAKVDD |
| | | | SFFHRLEESFLVEEDKKHERHPIFGNIVDEVAYHEKYPTIYHLRKKLVDSTDKADLRLIYLALAHMIKFRGHFLIEGDLNPDNSDVDKLFIQLVQTYNQLFEENPI |
| | | | NASGVDAKAILSARLSKSRRLENLIAQLPGEKKNGLFGNLIALSLGLTPNFKSNFDLAEDAKLQLSKDTYDDDLDNLLAQIGDQYADLFLAAKNLSDAILLSDILR |
| | | | VNTEITKAPLSASMIKRYDEHHQDLTLLKALVRQQLPEKYKEIFFDQSKNGYAGYIDGGASQEEFYKFIKPILEKMDGTEELLVKLNREDLLRKQRTFDNGSIPHQ |
| | | | IHLGELHAILRRQEDFYPFLKDNREKIEKILTFRIPYYVGPLARGNSRFAWMTRKSEETITPWNFEEVVDKGASAQSFIERMTNFDKNLPNEKVLPKHSLLYEYFT |
| | | | VYNELTKVKYVTEGMRKPAFLSGEQKKAIVDLLFKTNRKVTVKQLKEDYFKKIECFDSVEISGVEDRFNASLGTYHDLLKIIKDKDFLDNEENEDILEDIVLTLTL |
| | | | FEDREMIEERLKTYAHLFDDKVMKQLKRRRYTGWGRLSRKLINGIRDKQSGKTILDFLKSDGFANRNFMQLIHDDSLTFKEDIQKAQVSGQGDSLHEHIANLAGSP |
| | | | AIKKGILQTVKVVDELVKVMGRHKPENIVIEMARENQTTQKGQKNSRERMKRIEEGIKELGSQILKEHPVENTQLQNEKLYLYYLQNGRDMYVDQELDINRLSDYD |
| | | | VDHIVPQSFLKDDSIDNKVLTRSDKARGKSDNVPSEEVVKKMKNYWRQLLNAKLITQRKFDNLTKAERGGLSELDKAGFIKRQLVETRQITKHVAQILDSRMNTKY |
| | | | DENDKLIREVKVITLKSKLVSDFRKDFQFYKVREINNYHHAHDAYLNAVVGTALIKKYPKLESEFVYGDYKVYDVRKMIAKSEQEIGKATAKYFFYSNIMNFFKTE |
| | | | ITLANGEIRKRPLIETNGETGEIVWDKGRDFATVRKVLSMPQVNIVKKTEVQTGGFSKESILPKRNSDKLIARKKDWDPKKYGGFDSPTVAYSVLVVAKVEKGKSK |
| | | | KLKSVKELLGITIMERSSFEKNPIDFLEAKGYKEVKKDLIIKLPKYSLFELENGRKRMLASAGELQKGNELALPSKYVNFLYLASHYEKLKGSPEDNEQKQLFVEQ |
| | | | HKHYLDEIIEQISEFSKRVILADANLDKVLSAYNKHRDKPIREQAENIIHLFTLTNLGAPAAFKYFDTTIDRKRYTSTKEVLDATLIHQSITGLYETRIDLSQLGG |
| | | | DGGGGGEAAAKGSSGGAVLGLEHLPRPPQISQFPLNPERLQALQHLVRKALEAGHIEPYTGPGNNPVFPVKKANGTWRFIHDLRATNSLTIDLSSSSPGPPDLSSL |
| | | | PTTLAHLQTIDLRDAFFQIPLPKQFQPYFAFTVPQQCNYGPGTRYAWKVLPQGFKNSPTLFEMQLAHILQPIRQAFPQCTILQYMDDILLASPSHEDLLLLSEATM |
| | | | ASLISHGLPVSENKTQQTPGTIKFLGQIISPNHLTYDAVPTVPIRSRWALPELQALLGEIQWVSKGTPTLRQPLHSLYCALQRHTDPRDQIYLNPSQVQSLVQLRQ |
| | | | ALSQNCRSRLVQTLPLLGAIMLTLTGTTTVVFQSKEQWPLVWLHAPLPHTSQCPWGQLLASAVLLLDKYTLQSYGLLCQTIHHNISTQTFNQFIQTSDHPSVPILL |
| | | | HHSHRFKNLGAQTGELWNTFLKTAAPLAPVKALMPVFTLSPVIINTAPCLFSDGSTSRAAYILWDKQILSQRSFPLPPPHKSAQRAELLGLLHGLSSARSWRCLNI |
| | | | FLDSKYLYHYLRTLALGTFQGRSSQAPFQALLPRLLSRKVVYLHHVRSHTNLPDPISRLNALTDALLITPVLQLAGKRTADGSEFEKRTADGSEFESPKKKAKVEG |
| | | | SGEGRGSLLTCGDVEENPG |
| HTLV | 11 | 3763 | MPAAKRVKLDGGDKKYSIGLDIGTNSVGWAVITDEYKVPSKKFKVLGNTDRHSIKKNLIGALLFDSGETAEATRLKRTARRRYTRRKNRICYLQEIFSNEMAKVDD |
| | | | SFFHRLEESFLVEEDKKHERHPIFGNIVDEVAYHEKYPTIYHLRKKLVDSTDKADLRLIYLALAHMIKFRGHFLIEGDLNPDNSDVDKLFIQLVQTYNQLFEENPI |
| | | | NASGVDAKAILSARLSKSRRLENLIAQLPGEKKNGLFGNLIALSLGLTPNFKSNFDLAEDAKLQLSKDTYDDDLDNLLAQIGDQYADLFLAAKNLSDAILLSDILR |
| | | | VNTEITKAPLSASMIKRYDEHHQDLTLLKALVRQQLPEKYKEIFFDQSKNGYAGYIDGGASQEEFYKFIKPILEKMDGTEELLVKLNREDLLRKQRTFDNGSIPHQ |
| | | | IHLGELHAILRRQEDFYPFLKDNREKIEKILTFRIPYYVGPLARGNSRFAWMTRKSEETITPWNFEEVVDKGASAQSFIERMTNFDKNLPNEKVLPKHSLLYEYFT |
| | | | VYNELTKVKYVTEGMRKPAFLSGEQKKAIVDLLFKTNRKVTVKQLKEDYFKKIECFDSVEISGVEDRFNASLGTYHDLLKIIKDKDFLDNEENEDILEDIVLTLTL |
| | | | FEDREMIEERLKTYAHLFDDKVMKQLKRRRYTGWGRLSRKLINGIRDKQSGKTILDFLKSDGFANRNFMQLIHDDSLTFKEDIQKAQVSGQGDSLHEHIANLAGSP |
| | | | AIKKGILQTVKVVDELVKVMGRHKPENIVIEMARENQTTQKGQKNSRERMKRIEEGIKELGSQILKEHPVENTQLQNEKLYLYYLQNGRDMYVDQELDINRLSDYD |
| | | | VDHIVPQSFLKDDSIDNKVLTRSDKARGKSDNVPSEEVVKKMKNYWRQLLNAKLITQRKFDNLTKAERGGLSELDKAGFIKRQLVETRQITKHVAQILDSRMNTKY |
| | | | DENDKLIREVKVITLKSKLVSDFRKDFQFYKVREINNYHHAHDAYLNAVVGTALIKKYPKLESEFVYGDYKVYDVRKMIAKSEQEIGKATAKYFFYSNIMNFFKTE |
| | | | ITLANGEIRKRPLIETNGETGEIVWDKGRDFATVRKVLSMPQVNIVKKTEVQTGGFSKESILPKRNSDKLIARKKDWDPKKYGGFDSPTVAYSVLVVAKVEKGKSK |
| | | | KLKSVKELLGITIMERSSFEKNPIDFLEAKGYKEVKKDLIIKLPKYSLFELENGRKRMLASAGELQKGNELALPSKYVNFLYLASHYEKLKGSPEDNEQKQLFVEQ |
| | | | HKHYLDEIIEQISEFSKRVILADANLDKVLSAYNKHRDKPIREQAENIIHLFTLTNLGAPAAFKYFDTTIDRKRYTSTKEVLDATLIHQSITGLYETRIDLSQLGG |
| | | | DGGAEAAAKEAAAKEAAAKEAAAKALEAEAAAKEAAAKEAAAKEAAAKAGGAVLGLEHLPRPPQISQFPLNPERLQALQHLVRKALEAGHIEPYTGPGNNPVFPVK |
| | | | KANGTWRFIHDLRATNSLTIDLSSSSPGPPDLSSLPTTLAHLQTIDLRDAFFQIPLPKQFQPYFAFTVPQQCNYGPGTRYAWKVLPQGFKNSPTLFEMQLAHILQP |
| | | | IRQAFPQCTILQYMDDILLASPSHEDLLLLSEATMASLISHGLPVSENKTQQTPGTIKFLGQIISPNHLTYDAVPTVPIRSRWALPELQALLGEIQWVSKGTPTLR |
| | | | QPLHSLYCALQRHTDPRDQIYLNPSQVQSLVQLRQALSQNCRSRLVQTLPLLGAIMLTLTGTTTVVFQSKEQWPLVWLHAPLPHTSQCPWGQLLASAVLLLDKYTL |
| | | | QSYGLLCQTIHHNISTQTFNQFIQTSDHPSVPILLHHSHRFKNLGAQTGELWNTFLKTAAPLAPVKALMPVFTLSPVIINTAPCLFSDGSTSRAAYILWDKQILSQ |
| | | | RSFPLPPPHKSAQRAELLGLLHGLSSARSWRCLNIFLDSKYLYHYLRTLALGTFQGRSSQAPFQALLPRLLSRKVVYLHHVRSHTNLPDPISRLNALTDALLITPV |
| | | | LQLAGKRTADGSEFEKRTADGSEFESPKKKAKVEGSGEGRGSLLTCGDVEENPG |
| SFV | 1 | 3764 | MAPKKKRKVGIHGVPAADKKYSIGLDIGTNSVGWAVITDEYKVPSKKFKVLGNTDRHSIKKNLIGALLFDSGETAEATRLKRTARRRYTRRKNRICYLQEIFSNEM |
| | | | AKVDDSFFHRLEESFLVEEDKKHERHPIFGNIVDEVAYHEKYPTIYHLRKKLVDSTDKADLRLIYLALAHMIKFRGHFLIEGDLNPDNSDVDKLFIQLVQTYNQLF |
| | | | EENPINASGVDAKAILSARLSKSRRLENLIAQLPGEKKNGLFGNLIALSLGLTPNFKSNFDLAEDAKLQLSKDTYDDDLDNLLAQIGDQYADLFLAAKNLSDAILL |
| | | | SDILRVNTEITKAPLSASMIKRYDEHHQDLTLLKALVRQQLPEKYKEIFFDQSKNGYAGYIDGGASQEEFYKFIKPILEKMDGTEELLVKLNREDLLRKQRTFDNG |
| | | | SIPHQIHLGELHAILRRQEDFYPFLKDNREKIEKILTFRIPYYVGPLARGNSRFAWMTRKSEETITPWNFEEVVDKGASAQSFIERMTNFDKNLPNEKVLPKHSLL |
| | | | YEYFTVYNELTKVKYVTEGMRKPAFLSGEQKKAIVDLLFKTNRKVTVKQLKEDYFKKIECFDSVEISGVEDRFNASLGTYHDLLKIIKDKDFLDNEENEDILEDIV |
| | | | LTLTLFEDREMIEERLKTYAHLFDDKVMKQLKRRRYTGWGRLSRKLINGIRDKQSGKTILDFLKSDGFANRNFMQLIHDDSLTFKEDIQKAQVSGQGDSLHEHIAN |
| | | | LAGSPAIKKGILQTVKVVDELVKVMGRHKPENIVIEMARENQTTQKGQKNSRERMKRIEEGIKELGSQILKEHPVENTQLQNEKLYLYYLQNGRDMYVDQELDINR |
| | | | LSDYDVDHIVPQSFLKDDSIDNKVLTRSDKARGKSDNVPSEEVVKKMKNYWRQLLNAKLITQRKFDNLTKAERGGLSELDKAGFIKRQLVETRQITKHVAQILDSR |
| | | | MNTKYDENDKLIREVKVITLKSKLVSDFRKDFQFYKVREINNYHHAHDAYLNAVVGTALIKKYPKLESEFVYGDYKVYDVRKMIAKSEQEIGKATAKYFFYSNIMN |
| | | | FFKTEITLANGEIRKRPLIETNGETGEIVWDKGRDFATVRKVLSMPQVNIVKKTEVQTGGFSKESILPKRNSDKLIARKKDWDPKKYGGFDSPTVAYSVLVVAKVE |
| | | | KGKSKKLKSVKELLGITIMERSSFEKNPIDFLEAKGYKEVKKDLIIKLPKYSLFELENGRKRMLASAGELQKGNELALPSKYVNFLYLASHYEKLKGSPEDNEQKQ |
| | | | LFVEQHKHYLDEIIEQISEFSKRVILADANLDKVLSAYNKHRDKPIREQAENIIHLFTLTNLGAPAAFKYFDTTIDRKRYTSTKEVLDATLIHQSITGLYETRIDL |
| | | | SQLGGDSGGSSGGSSGSETPGTSESATPESSGGSSGGSSNQVGHRRIKPHNIATGTLAPRPQKQYPINPKAKPSIQIVIDDLLKQGVLIQQNSTMNTPVYPVPKPD |
| | | | GKWRMVLDYREVNKTIPLIAAQNQHSAGILSSIYRGKYKTTLDLTNGFWAHPITPESYWLTAFTWQGKQYCWTRLPQGFLNSPALFNADVVDLLKEIPNVQAYVDD |
| | | | IYISHDDPQEHLEQLEKIFSILLNAGYVVSLKKSEIAQREVEFLGFNITKEGRGLTDTFKQKLLNITPPKDLKQLQSILGKLNFARNFIPNYSELVKPLYTIVANA |
| | | | NGKFISWTEDNSNQLQHIISVLNQADNLEERNPETRLIIKVNSSPSAGYIRYYNEGSKRPIMYVNYIFSKAEAKFTQTEKLLTTMHKGLIKAMDLAMGQEILVYSP |
| | | | IVSMTKIQRTPLPERKALPVRWITWMTYLEDPRIQFHYDKSLPELQQIPNVTEDVIAKTKHPSEFAMVFYTDGSAIKHPDVNKSHSAGMGIAQVQFIPEYKIVHQW |
| | | | SIPLGDHTAQLAEIAAVEFACKKALKISGPVLIVTDSFYVAESANKELPYWKSNGFLNNKKKPLRHVSKWKSIAECLQLKPDIIIMHEKGHQQPMTTLHTEGNNLA |
| | | | DKLATQGSYVVHC |
| SFV | 2 | 3765 | MKRTADGSEFESPKKKRKVDKKYSIGLDIGTNSVGWAVITDEYKVPSKKFKVLGNTDRHSIKKNLIGALLFDSGETAEATRLKRTARRRYTRRKNRICYLQEIFSN |
| | | | EMAKVDDSFFHRLEESFLVEEDKKHERHPIFGNIVDEVAYHEKYPTIYHLRKKLVDSTDKADLRLIYLALAHMIKFRGHFLIEGDLNPDNSDVDKLFIQLVQTYNQ |
| | | | LFEENPINASGVDAKAILSARLSKSRRLENLIAQLPGEKKNGLFGNLIALSLGLTPNFKSNFDLAEDAKLQLSKDTYDDDLDNLLAQIGDQYADLFLAAKNLSDAI |
| | | | LLSDILRVNTEITKAPLSASMIKRYDEHHQDLTLLKALVRQQLPEKYKEIFFDQSKNGYAGYIDGGASQEEFYKFIKPILEKMDGTEELLVKLNREDLLRKQRTFD |
| | | | NGSIPHQIHLGELHAILRRQEDFYPFLKDNREKIEKILTFRIPYYVGPLARGNSRFAWMTRKSEETITPWNFEEVVDKGASAQSFIERMTNFDKNLPNEKVLPKHS |
| | | | LLYEYFTVYNELTKVKYVTEGMRKPAFLSGEQKKAIVDLLFKTNRKVTVKQLKEDYFKKIECFDSVEISGVEDRFNASLGTYHDLLKIIKDKDFLDNEENEDILED |
| | | | IVLTLTLFEDREMIEERLKTYAHLFDDKVMKQLKRRRYTGWGRLSRKLINGIRDKQSGKTILDFLKSDGFANRNFMQLIHDDSLTFKEDIQKAQVSGQGDSLHEHI |
| | | | ANLAGSPAIKKGILQTVKVVDELVKVMGRHKPENIVIEMARENQTTQKGQKNSRERMKRIEEGIKELGSQILKEHPVENTQLQNEKLYLYYLQNGRDMYVDQELDI |
| | | | NRLSDYDVDHIVPQSFLKDDSIDNKVLTRSDKARGKSDNVPSEEVVKKMKNYWRQLLNAKLITQRKFDNLTKAERGGLSELDKAGFIKRQLVETRQITKHVAQILD |
| | | | SRMNTKYDENDKLIREVKVITLKSKLVSDFRKDFQFYKVREINNYHHAHDAYLNAVVGTALIKKYPKLESEFVYGDYKVYDVRKMIAKSEQEIGKATAKYFFYSNI |
| | | | MNFFKTEITLANGEIRKRPLIETNGETGEIVWDKGRDFATVRKVLSMPQVNIVKKTEVQTGGFSKESILPKRNSDKLIARKKDWDPKKYGGFDSPTVAYSVLVVAK |
| | | | VEKGKSKKLKSVKELLGITIMERSSFEKNPIDFLEAKGYKEVKKDLIIKLPKYSLFELENGRKRMLASAGELQKGNELALPSKYVNFLYLASHYEKLKGSPEDNEQ |
| | | | KQLFVEQHKHYLDEIIEQISEFSKRVILADANLDKVLSAYNKHRDKPIREQAENIIHLFTLTNLGAPAAFKYFDTTIDRKRYTSTKEVLDATLIHQSITGLYETRI |
| | | | DLSQLGGDSGGSSGGSSGSETPGTSESATPESSGGSSGGSSNQVGHRRIKPHNIATGTLAPRPQKQYPINPKAKPSIQIVIDDLLKQGVLIQQNSTMNTPVYPVPK |
| | | | PDGKWRMVLDYREVNKTIPLIAAQNQHSAGILSSIYRGKYKTTLDLTNGFWAHPITPESYWLTAFTWQGKQYCWTRLPQGFLNSPALFNADVVDLLKEIPNVQAYV |
| | | | DDIYISHDDPQEHLEQLEKIFSILLNAGYVVSLKKSEIAQREVEFLGFNITKEGRGLTDTFKQKLLNITPPKDLKQLQSILGKLNFARNFIPNYSELVKPLYTIVA |
| | | | NANGKFISWTEDNSNQLQHIISVLNQADNLEERNPETRLIIKVNSSPSAGYIRYYNEGSKRPIMYVNYIFSKAEAKFTQTEKLLTTMHKGLIKAMDLAMGQEILVY |
| | | | SPIVSMTKIQRTPLPERKALPVRWITWMTYLEDPRIQFHYDKSLPELQQIPNVTEDVIAKTKHPSEFAMVFYTDGSAIKHPDVNKSHSAGMGIAQVQFIPEYKIVH |
| | | | QWSIPLGDHTAQLAEIAAVEFACKKALKISGPVLIVTDSFYVAESANKELPYWKSNGFLNNKKKPLRHVSKWKSIAECLQLKPDIIIMHEKGHQQPMTTLHTEGNN |
| | | | LADKLATQGSYVVHCSGGSKRTADGSEFEPKKKRKV |
| SFV | 3 | 3766 | MPAAKRVKLDGGDKKYSIGLDIGTNSVGWAVITDEYKVPSKKFKVLGNTDRHSIKKNLIGALLFDSGETAEATRLKRTARRRYTRRKNRICYLQEIFSNEMAKVDD |
| | | | SFFHRLEESFLVEEDKKHERHPIFGNIVDEVAYHEKYPTIYHLRKKLVDSTDKADLRLIYLALAHMIKFRGHFLIEGDLNPDNSDVDKLFIQLVQTYNQLFEENPI |
| | | | NASGVDAKAILSARLSKSRRLENLIAQLPGEKKNGLFGNLIALSLGLTPNFKSNFDLAEDAKLQLSKDTYDDDLDNLLAQIGDQYADLFLAAKNLSDAILLSDILR |
| | | | VNTEITKAPLSASMIKRYDEHHQDLTLLKALVRQQLPEKYKEIFFDQSKNGYAGYIDGGASQEEFYKFIKPILEKMDGTEELLVKLNREDLLRKQRTFDNGSIPHQ |
| | | | IHLGELHAILRRQEDFYPFLKDNREKIEKILTFRIPYYVGPLARGNSRFAWMTRKSEETITPWNFEEVVDKGASAQSFIERMTNFDKNLPNEKVLPKHSLLYEYFT |
| | | | VYNELTKVKYVTEGMRKPAFLSGEQKKAIVDLLFKTNRKVTVKQLKEDYFKKIECFDSVEISGVEDRFNASLGTYHDLLKIIKDKDFLDNEENEDILEDIVLTLTL |
| | | | FEDREMIEERLKTYAHLFDDKVMKQLKRRRYTGWGRLSRKLINGIRDKQSGKTILDFLKSDGFANRNFMQLIHDDSLTFKEDIQKAQVSGQGDSLHEHIANLAGSP |
| | | | AIKKGILQTVKVVDELVKVMGRHKPENIVIEMARENQTTQKGQKNSRERMKRIEEGIKELGSQILKEHPVENTQLQNEKLYLYYLQNGRDMYVDQELDINRLSDYD |
| | | | VDHIVPQSFLKDDSIDNKVLTRSDKARGKSDNVPSEEVVKKMKNYWRQLLNAKLITQRKFDNLTKAERGGLSELDKAGFIKRQLVETRQITKHVAQILDSRMNTKY |
| | | | DENDKLIREVKVITLKSKLVSDFRKDFQFYKVREINNYHHAHDAYLNAVVGTALIKKYPKLESEFVYGDYKVYDVRKMIAKSEQEIGKATAKYFFYSNIMNFFKTE |
| | | | ITLANGEIRKRPLIETNGETGEIVWDKGRDFATVRKVLSMPQVNIVKKTEVQTGGFSKESILPKRNSDKLIARKKDWDPKKYGGFDSPTVAYSVLVVAKVEKGKSK |
| | | | KLKSVKELLGITIMERSSFEKNPIDFLEAKGYKEVKKDLIIKLPKYSLFELENGRKRMLASAGELQKGNELALPSKYVNFLYLASHYEKLKGSPEDNEQKQLFVEQ |
| | | | HKHYLDEIIEQISEFSKRVILADANLDKVLSAYNKHRDKPIREQAENIIHLFTLTNLGAPAAFKYFDTTIDRKRYTSTKEVLDATLIHQSITGLYETRIDLSQLGG |
| | | | DSGGSSGGSSGSETPGTSESATPESSGGSSGGSSNQVGHRRIKPHNIATGTLAPRPQKQYPINPKAKPSIQIVIDDLLKQGVLIQQNSTMNTPVYPVPKPDGKWRM |
| | | | VLDYREVNKTIPLIAAQNQHSAGILSSIYRGKYKTTLDLTNGFWAHPITPESYWLTAFTWQGKQYCWTRLPQGFLNSPALFNADVVDLLKEIPNVQAYVDDIYISH |
| | | | DDPQEHLEQLEKIFSILLNAGYVVSLKKSEIAQREVEFLGFNITKEGRGLTDTFKQKLLNITPPKDLKQLQSILGKLNFARNFIPNYSELVKPLYTIVANANGKFI |
| | | | SWTEDNSNQLQHIISVLNQADNLEERNPETRLIIKVNSSPSAGYIRYYNEGSKRPIMYVNYIFSKAEAKFTQTEKLLTTMHKGLIKAMDLAMGQEILVYSPIVSMT |
| | | | KIQRTPLPERKALPVRWITWMTYLEDPRIQFHYDKSLPELQQIPNVTEDVIAKTKHPSEFAMVFYTDGSAIKHPDVNKSHSAGMGIAQVQFIPEYKIVHQWSIPLG |
| | | | DHTAQLAEIAAVEFACKKALKISGPVLIVTDSFYVAESANKELPYWKSNGFLNNKKKPLRHVSKWKSIAECLQLKPDIIIMHEKGHQQPMTTLHTEGNNLADKLAT |
| | | | QGSYVVHCSGGSKRTADGSEFEKRTADGSEFESPKKKAKVE |
| SFV | 4 | 3767 | MPAAKRVKLDGGDKKYSIGLDIGTNSVGWAVITDEYKVPSKKFKVLGNTDRHSIKKNLIGALLFDSGETAEATRLKRTARRRYTRRKNRICYLQEIFSNEMAKVDD |
| | | | SFFHRLEESFLVEEDKKHERHPIFGNIVDEVAYHEKYPTIYHLRKKLVDSTDKADLRLIYLALAHMIKFRGHFLIEGDLNPDNSDVDKLFIQLVQTYNQLFEENPI |
| | | | NASGVDAKAILSARLSKSRRLENLIAQLPGEKKNGLFGNLIALSLGLTPNFKSNFDLAEDAKLQLSKDTYDDDLDNLLAQIGDQYADLFLAAKNLSDAILLSDILR |
| | | | VNTEITKAPLSASMIKRYDEHHQDLTLLKALVRQQLPEKYKEIFFDQSKNGYAGYIDGGASQEEFYKFIKPILEKMDGTEELLVKLNREDLLRKQRTFDNGSIPHQ |
| | | | IHLGELHAILRRQEDFYPFLKDNREKIEKILTFRIPYYVGPLARGNSRFAWMTRKSEETITPWNFEEVVDKGASAQSFIERMTNFDKNLPNEKVLPKHSLLYEYFT |
| | | | VYNELTKVKYVTEGMRKPAFLSGEQKKAIVDLLFKTNRKVTVKQLKEDYFKKIECFDSVEISGVEDRFNASLGTYHDLLKIIKDKDFLDNEENEDILEDIVLTLTL |
| | | | FEDREMIEERLKTYAHLFDDKVMKQLKRRRYTGWGRLSRKLINGIRDKQSGKTILDFLKSDGFANRNFMQLIHDDSLTFKEDIQKAQVSGQGDSLHEHIANLAGSP |
| | | | AIKKGILQTVKVVDELVKVMGRHKPENIVIEMARENQTTQKGQKNSRERMKRIEEGIKELGSQILKEHPVENTQLQNEKLYLYYLQNGRDMYVDQELDINRLSDYD |
| | | | VDHIVPQSFLKDDSIDNKVLTRSDKARGKSDNVPSEEVVKKMKNYWRQLLNAKLITQRKFDNLTKAERGGLSELDKAGFIKRQLVETRQITKHVAQILDSRMNTKY |
| | | | DENDKLIREVKVITLKSKLVSDFRKDFQFYKVREINNYHHAHDAYLNAVVGTALIKKYPKLESEFVYGDYKVYDVRKMIAKSEQEIGKATAKYFFYSNIMNFFKTE |
| | | | ITLANGEIRKRPLIETNGETGEIVWDKGRDFATVRKVLSMPQVNIVKKTEVQTGGFSKESILPKRNSDKLIARKKDWDPKKYGGFDSPTVAYSVLVVAKVEKGKSK |
| | | | KLKSVKELLGITIMERSSFEKNPIDFLEAKGYKEVKKDLIIKLPKYSLFELENGRKRMLASAGELQKGNELALPSKYVNFLYLASHYEKLKGSPEDNEQKQLFVEQ |
| | | | HKHYLDEIIEQISEFSKRVILADANLDKVLSAYNKHRDKPIREQAENIIHLFTLTNLGAPAAFKYFDTTIDRKRYTSTKEVLDATLIHQSITGLYETRIDLSQLGG |
| | | | DGGSGGSSGGSSGSETPGTSESATPESSGGSSGGSSGGVPWLMKKPLQLTVLVPLHEYQERLLQQTALPKEQKELLQKLFLKYDALWQHWENQVGHRRIKPHNIAT |
| | | | GTLAPRPQKQYPINPKAKPSIQIVIDDLLKQGVLIQQNSTMNTPVYPVPKPDGKWRMVLDYREVNKTIPLIAAQNQHSAGILSSIYRGKYKTTLDLTNGFWAHPIT |
| | | | PESYWLTAFTWQGKQYCWTRLPQGFLNSPALFNADVVDLLKEIPNVQAYVDDIYISHDDPQEHLEQLEKIFSILLNAGYVVSLKKSEIAQREVEFLGFNITKEGRG |
| | | | LTDTFKQKLLNITPPKDLKQLQSILGKLNFARNFIPNYSELVKPLYTIVAPANGKFISWTEDNSNQLQHIISVLNQADNLEERNPETRLIIKVNSSPSAGYIRYYN |
| | | | EGSKRPIMYVNYIFSKAEAKFTQTEKLLTTMHKGLIKAMDLAMGQEILVYSPIVSMTKIQRTPLPERKALPVRWITWMTYLEDPRIQFHYDKSLPELQQIPNVTED |
| | | | VIAKTKHPSEFAMVFYTDGSAIKHPDVNKSHSAGMGIAQVQFIPEYKIVHQWSIPLGDHTAQLAEIAAVEFACKKALKISGPVLIVTDSFYVAESANKELPYWKSN |
| | | | GFLNNKKKPLRHVSKWKSIAECLQLKPDIIIMHEKGHQQPMTTLHTEGNNLADKLATQGSYVVHAGKRTADGSEFEKRTADGSEFESPKKKAKVEGSGEGRGSLLT |
| | | | CGDVEENPG |
| SFV | 5 | 3768 | MPAAKRVKLDGGDKKYSIGLDIGTNSVGWAVITDEYKVPSKKFKVLGNTDRHSIKKNLIGALLFDSGETAEATRLKRTARRRYTRRKNRICYLQEIFSNEMAKVDD |
| | | | SFFHRLEESFLVEEDKKHERHPIFGNIVDEVAYHEKYPTIYHLRKKLVDSTDKADLRLIYLALAHMIKFRGHFLIEGDLNPDNSDVDKLFIQLVQTYNQLFEENPI |
| | | | NASGVDAKAILSARLSKSRRLENLIAQLPGEKKNGLFGNLIALSLGLTPNFKSNFDLAEDAKLQLSKDTYDDDLDNLLAQIGDQYADLFLAAKNLSDAILLSDILR |
| | | | VNTEITKAPLSASMIKRYDEHHQDLTLLKALVRQQLPEKYKEIFFDQSKNGYAGYIDGGASQEEFYKFIKPILEKMDGTEELLVKLNREDLLRKQRTFDNGSIPHQ |
| | | | IHLGELHAILRRQEDFYPFLKDNREKIEKILTFRIPYYVGPLARGNSRFAWMTRKSEETITPWNFEEVVDKGASAQSFIERMTNFDKNLPNEKVLPKHSLLYEYFT |
| | | | VYNELTKVKYVTEGMRKPAFLSGEQKKAIVDLLFKTNRKVTVKQLKEDYFKKIECFDSVEISGVEDRFNASLGTYHDLLKIIKDKDFLDNEENEDILEDIVLTLTL |
| | | | FEDREMIEERLKTYAHLFDDKVMKQLKRRRYTGWGRLSRKLINGIRDKQSGKTILDFLKSDGFANRNFMQLIHDDSLTFKEDIQKAQVSGQGDSLHEHIANLAGSP |
| | | | AIKKGILQTVKVVDELVKVMGRHKPENIVIEMARENQTTQKGQKNSRERMKRIEEGIKELGSQILKEHPVENTQLQNEKLYLYYLQNGRDMYVDQELDINRLSDYD |
| | | | VDHIVPQSFLKDDSIDNKVLTRSDKARGKSDNVPSEEVVKKMKNYWRQLLNAKLITQRKFDNLTKAERGGLSELDKAGFIKRQLVETRQITKHVAQILDSRMNTKY |
| | | | DENDKLIREVKVITLKSKLVSDFRKDFQFYKVREINNYHHAHDAYLNAVVGTALIKKYPKLESEFVYGDYKVYDVRKMIAKSEQEIGKATAKYFFYSNIMNFFKTE |
| | | | ITLANGEIRKRPLIETNGETGEIVWDKGRDFATVRKVLSMPQVNIVKKTEVQTGGFSKESILPKRNSDKLIARKKDWDPKKYGGFDSPTVAYSVLVVAKVEKGKSK |
| | | | KLKSVKELLGITIMERSSFEKNPIDFLEAKGYKEVKKDLIIKLPKYSLFELENGRKRMLASAGELQKGNELALPSKYVNFLYLASHYEKLKGSPEDNEQKQLFVEQ |
| | | | HKHYLDEIIEQISEFSKRVILADANLDKVLSAYNKHRDKPIREQAENIIHLFTLTNLGAPAAFKYFDTTIDRKRYTSTKEVLDATLIHQSITGLYETRIDLSQLGG |
| | | | DGGEAAAKEAAAKEAAAKEAAAKGGVPWLMKKPLQLTVLVPLHEYQERLLQQTALPKEQKELLQKLFLKYDALWQHWENQVGHRRIKPHNIATGTLAPRPQKQYPI |
| | | | NPKAKPSIQIVIDDLLKQGVLIQQNSTMNTPVYPVPKPDGKWRMVLDYREVNKTIPLIAAQNQHSAGILSSIYRGKYKTTLDLTNGFWAHPITPESYWLTAFTWQG |
| | | | KQYCWTRLPQGFLNSPALFNADVVDLLKEIPNVQAYVDDIYISHDDPQEHLEQLEKIFSILLNAGYVVSLKKSEIAQREVEFLGFNITKEGRGLTDTFKQKLLNIT |
| | | | PPKDLKQLQSILGKLNFARNFIPNYSELVKPLYTIVAPANGKFISWTEDNSNQLQHIISVLNQADNLEERNPETRLIIKVNSSPSAGYIRYYNEGSKRPIMYVNYI |
| | | | FSKAEAKFTQTEKLLTTMHKGLIKAMDLAMGQEILVYSPIVSMTKIQRTPLPERKALPVRWITWMTYLEDPRIQFHYDKSLPELQQIPNVTEDVIAKTKHPSEFAM |
| | | | VFYTDGSAIKHPDVNKSHSAGMGIAQVQFIPEYKIVHQWSIPLGDHTAQLAEIAAVEFACKKALKISGPVLIVTDSFYVAESANKELPYWKSNGFLNNKKKPLRHV |
| | | | SKWKSIAECLQLKPDIIIMHEKGHQQPMTTLHTEGNNLADKLATQGSYVVHAGKRTADGSEFEKRTADGSEFESPKKKAKVEGSGEGRGSLLTCGDVEENPG |
| SFV | 6 | 3769 | MPAAKRVKLDGGDKKYSIGLDIGTNSVGWAVITDEYKVPSKKFKVLGNTDRHSIKKNLIGALLFDSGETAEATRLKRTARRRYTRRKNRICYLQEIFSNEMAKVDD |
| | | | SFFHRLEESFLVEEDKKHERHPIFGNIVDEVAYHEKYPTIYHLRKKLVDSTDKADLRLIYLALAHMIKFRGHFLIEGDLNPDNSDVDKLFIQLVQTYNQLFEENPI |
| | | | NASGVDAKAILSARLSKSRRLENLIAQLPGEKKNGLFGNLIALSLGLTPNFKSNFDLAEDAKLQLSKDTYDDDLDNLLAQIGDQYADLFLAAKNLSDAILLSDILR |
| | | | VNTEITKAPLSASMIKRYDEHHQDLTLLKALVRQQLPEKYKEIFFDQSKNGYAGYIDGGASQEEFYKFIKPILEKMDGTEELLVKLNREDLLRKQRTFDNGSIPHQ |
| | | | IHLGELHAILRRQEDFYPFLKDNREKIEKILTFRIPYYVGPLARGNSRFAWMTRKSEETITPWNFEEVVDKGASAQSFIERMTNFDKNLPNEKVLPKHSLLYEYFT |
| | | | VYNELTKVKYVTEGMRKPAFLSGEQKKAIVDLLFKTNRKVTVKQLKEDYFKKIECFDSVEISGVEDRFNASLGTYHDLLKIIKDKDFLDNEENEDILEDIVLTLTL |
| | | | FEDREMIEERLKTYAHLFDDKVMKQLKRRRYTGWGRLSRKLINGIRDKQSGKTILDFLKSDGFANRNFMQLIHDDSLTFKEDIQKAQVSGQGDSLHEHIANLAGSP |
| | | | AIKKGILQTVKVVDELVKVMGRHKPENIVIEMARENQTTQKGQKNSRERMKRIEEGIKELGSQILKEHPVENTQLQNEKLYLYYLQNGRDMYVDQELDINRLSDYD |
| | | | VDHIVPQSFLKDDSIDNKVLTRSDKARGKSDNVPSEEVVKKMKNYWRQLLNAKLITQRKFDNLTKAERGGLSELDKAGFIKRQLVETRQITKHVAQILDSRMNTKY |
| | | | DENDKLIREVKVITLKSKLVSDFRKDFQFYKVREINNYHHAHDAYLNAVVGTALIKKYPKLESEFVYGDYKVYDVRKMIAKSEQEIGKATAKYFFYSNIMNFFKTE |
| | | | ITLANGEIRKRPLIETNGETGEIVWDKGRDFATVRKVLSMPQVNIVKKTEVQTGGFSKESILPKRNSDKLIARKKDWDPKKYGGFDSPTVAYSVLVVAKVEKGKSK |
| | | | KLKSVKELLGITIMERSSFEKNPIDFLEAKGYKEVKKDLIIKLPKYSLFELENGRKRMLASAGELQKGNELALPSKYVNFLYLASHYEKLKGSPEDNEQKQLFVEQ |
| | | | HKHYLDEIIEQISEFSKRVILADANLDKVLSAYNKHRDKPIREQAENIIHLFTLTNLGAPAAFKYFDTTIDRKRYTSTKEVLDATLIHQSITGLYETRIDLSQLGG |
| | | | DGGEAAAKEAAAKEAAAKEAAAKEAAAKEAAAKGGVPWLMKKPLQLTVLVPLHEYQERLLQQTALPKEQKELLQKLFLKYDALWQHWENQVGHRRIKPHNIATGTL |
| | | | APRPQKQYPINPKAKPSIQIVIDDLLKQGVLIQQNSTMNTPVYPVPKPDGKWRMVLDYREVNKTIPLIAAQNQHSAGILSSIYRGKYKTTLDLTNGFWAHPITPES |
| | | | YWLTAFTWQGKQYCWTRLPQGFLNSPALFNADVVDLLKEIPNVQAYVDDIYISHDDPQEHLEQLEKIFSILLNAGYVVSLKKSEIAQREVEFLGFNITKEGRGLTD |
| | | | TFKQKLLNITPPKDLKQLQSILGKLNFARNFIPNYSELVKPLYTIVAPANGKFISWTEDNSNQLQHIISVLNQADNLEERNPETRLIIKVNSSPSAGYIRYYNEGS |
| | | | KRPIMYVNYIFSKAEAKFTQTEKLLTTMHKGLIKAMDLAMGQEILVYSPIVSMTKIQRTPLPERKALPVRWITWMTYLEDPRIQFHYDKSLPELQQIPNVTEDVIA |
| | | | KTKHPSEFAMVFYTDGSAIKHPDVNKSHSAGMGIAQVQFIPEYKIVHQWSIPLGDHTAQLAEIAAVEFACKKALKISGPVLIVTDSFYVAESANKELPYWKSNGFL |
| | | | NNKKKPLRHVSKWKSIAECLQLKPDIIIMHEKGHQQPMTTLHTEGNNLADKLATQGSYVVHAGKRTADGSEFEKRTADGSEFESPKKKAKVEGSGEGRGSLLTCGD |
| | | | VEENPG |
| SFV | 7 | 3770 | MPAAKRVKLDGGDKKYSIGLDIGTNSVGWAVITDEYKVPSKKFKVLGNTDRHSIKKNLIGALLFDSGETAEATRLKRTARRRYTRRKNRICYLQEIFSNEMAKVDD |
| | | | SFFHRLEESFLVEEDKKHERHPIFGNIVDEVAYHEKYPTIYHLRKKLVDSTDKADLRLIYLALAHMIKFRGHFLIEGDLNPDNSDVDKLFIQLVQTYNQLFEENPI |
| | | | NASGVDAKAILSARLSKSRRLENLIAQLPGEKKNGLFGNLIALSLGLTPNFKSNFDLAEDAKLQLSKDTYDDDLDNLLAQIGDQYADLFLAAKNLSDAILLSDILR |
| | | | VNTEITKAPLSASMIKRYDEHHQDLTLLKALVRQQLPEKYKEIFFDQSKNGYAGYIDGGASQEEFYKFIKPILEKMDGTEELLVKLNREDLLRKQRTFDNGSIPHQ |
| | | | IHLGELHAILRRQEDFYPFLKDNREKIEKILTFRIPYYVGPLARGNSRFAWMTRKSEETITPWNFEEVVDKGASAQSFIERMTNFDKNLPNEKVLPKHSLLYEYFT |
| | | | VYNELTKVKYVTEGMRKPAFLSGEQKKAIVDLLFKTNRKVTVKQLKEDYFKKIECFDSVEISGVEDRFNASLGTYHDLLKIIKDKDFLDNEENEDILEDIVLTLTL |
| | | | FEDREMIEERLKTYAHLFDDKVMKQLKRRRYTGWGRLSRKLINGIRDKQSGKTILDFLKSDGFANRNFMQLIHDDSLTFKEDIQKAQVSGQGDSLHEHIANLAGSP |
| | | | AIKKGILQTVKVVDELVKVMGRHKPENIVIEMARENQTTQKGQKNSRERMKRIEEGIKELGSQILKEHPVENTQLQNEKLYLYYLQNGRDMYVDQELDINRLSDYD |
| | | | VDHIVPQSFLKDDSIDNKVLTRSDKARGKSDNVPSEEVVKKMKNYWRQLLNAKLITQRKFDNLTKAERGGLSELDKAGFIKRQLVETRQITKHVAQILDSRMNTKY |
| | | | DENDKLIREVKVITLKSKLVSDFRKDFQFYKVREINNYHHAHDAYLNAVVGTALIKKYPKLESEFVYGDYKVYDVRKMIAKSEQEIGKATAKYFFYSNIMNFFKTE |
| | | | ITLANGEIRKRPLIETNGETGEIVWDKGRDFATVRKVLSMPQVNIVKKTEVQTGGFSKESILPKRNSDKLIARKKDWDPKKYGGFDSPTVAYSVLVVAKVEKGKSK |
| | | | KLKSVKELLGITIMERSSFEKNPIDFLEAKGYKEVKKDLIIKLPKYSLFELENGRKRMLASAGELQKGNELALPSKYVNFLYLASHYEKLKGSPEDNEQKQLFVEQ |
| | | | HKHYLDEIIEQISEFSKRVILADANLDKVLSAYNKHRDKPIREQAENIIHLFTLTNLGAPAAFKYFDTTIDRKRYTSTKEVLDATLIHQSITGLYETRIDLSQLGG |
| | | | DGGGGGGGSGGVPWLMKKPLQLTVLVPLHEYQERLLQQTALPKEQKELLQKLFLKYDALWQHWENQVGHRRIKPHNIATGTLAPRPQKQYPINPKAKPSIQIVIDD |
| | | | LLKQGVLIQQNSTMNTPVYPVPKPDGKWRMVLDYREVNKTIPLIAAQNQHSAGILSSIYRGKYKTTLDLTNGFWAHPITPESYWLTAFTWQGKQYCWTRLPQGFLN |
| | | | SPALFNADVVDLLKEIPNVQAYVDDIYISHDDPQEHLEQLEKIFSILLNAGYVVSLKKSEIAQREVEFLGFNITKEGRGLTDTFKQKLLNITPPKDLKQLQSILGK |
| | | | LNFARNFIPNYSELVKPLYTIVAPANGKFISWTEDNSNQLQHIISVLNQADNLEERNPETRLIIKVNSSPSAGYIRYYNEGSKRPIMYVNYIFSKAEAKFTQTEKL |
| | | | LTTMHKGLIKAMDLAMGQEILVYSPIVSMTKIQRTPLPERKALPVRWITWMTYLEDPRIQFHYDKSLPELQQIPNVTEDVIAKTKHPSEFAMVFYTDGSAIKHPDV |
| | | | NKSHSAGMGIAQVQFIPEYKIVHQWSIPLGDHTAQLAEIAAVEFACKKALKISGPVLIVTDSFYVAESANKELPYWKSNGFLNNKKKPLRHVSKWKSIAECLQLKP |
| | | | DIIIMHEKGHQQPMTTLHTEGNNLADKLATQGSYVVHAGKRTADGSEFEKRTADGSEFESPKKKAKVEGSGEGRGSLLTCGDVEENPG |
| SFV | 8 | 3771 | MPAAKRVKLDGGDKKYSIGLDIGTNSVGWAVITDEYKVPSKKFKVLGNTDRHSIKKNLIGALLFDSGETAEATRLKRTARRRYTRRKNRICYLQEIFSNEMAKVDD |
| | | | SFFHRLEESFLVEEDKKHERHPIFGNIVDEVAYHEKYPTIYHLRKKLVDSTDKADLRLIYLALAHMIKFRGHFLIEGDLNPDNSDVDKLFIQLVQTYNQLFEENPI |
| | | | NASGVDAKAILSARLSKSRRLENLIAQLPGEKKNGLFGNLIALSLGLTPNFKSNFDLAEDAKLQLSKDTYDDDLDNLLAQIGDQYADLFLAAKNLSDAILLSDILR |
| | | | VNTEITKAPLSASMIKRYDEHHQDLTLLKALVRQQLPEKYKEIFFDQSKNGYAGYIDGGASQEEFYKFIKPILEKMDGTEELLVKLNREDLLRKQRTFDNGSIPHQ |
| | | | IHLGELHAILRRQEDFYPFLKDNREKIEKILTFRIPYYVGPLARGNSRFAWMTRKSEETITPWNFEEVVDKGASAQSFIERMTNFDKNLPNEKVLPKHSLLYEYFT |
| | | | VYNELTKVKYVTEGMRKPAFLSGEQKKAIVDLLFKTNRKVTVKQLKEDYFKKIECFDSVEISGVEDRFNASLGTYHDLLKIIKDKDFLDNEENEDILEDIVLTLTL |
| | | | FEDREMIEERLKTYAHLFDDKVMKQLKRRRYTGWGRLSRKLINGIRDKQSGKTILDFLKSDGFANRNFMQLIHDDSLTFKEDIQKAQVSGQGDSLHEHIANLAGSP |
| | | | AIKKGILQTVKVVDELVKVMGRHKPENIVIEMARENQTTQKGQKNSRERMKRIEEGIKELGSQILKEHPVENTQLQNEKLYLYYLQNGRDMYVDQELDINRLSDYD |
| | | | VDHIVPQSFLKDDSIDNKVLTRSDKARGKSDNVPSEEVVKKMKNYWRQLLNAKLITQRKFDNLTKAERGGLSELDKAGFIKRQLVETRQITKHVAQILDSRMNTKY |
| | | | DENDKLIREVKVITLKSKLVSDFRKDFQFYKVREINNYHHAHDAYLNAVVGTALIKKYPKLESEFVYGDYKVYDVRKMIAKSEQEIGKATAKYFFYSNIMNFFKTE |
| | | | ITLANGEIRKRPLIETNGETGEIVWDKGRDFATVRKVLSMPQVNIVKKTEVQTGGFSKESILPKRNSDKLIARKKDWDPKKYGGFDSPTVAYSVLVVAKVEKGKSK |
| | | | KLKSVKELLGITIMERSSFEKNPIDFLEAKGYKEVKKDLIIKLPKYSLFELENGRKRMLASAGELQKGNELALPSKYVNFLYLASHYEKLKGSPEDNEQKQLFVEQ |
| | | | HKHYLDEIIEQISEFSKRVILADANLDKVLSAYNKHRDKPIREQAENIIHLFTLTNLGAPAAFKYFDTTIDRKRYTSTKEVLDATLIHQSITGLYETRIDLSQLGG |
| | | | DGGGGGPAPGGSGGVPWLMKKPLQLTVLVPLHEYQERLLQQTALPKEQKELLQKLFLKYDALWQHWENQVGHRRIKPHNIATGTLAPRPQKQYPINPKAKPSIQIV |
| | | | IDDLLKQGVLIQQNSTMNTPVYPVPKPDGKWRMVLDYREVNKTIPLIAAQNQHSAGILSSIYRGKYKTTLDLTNGFWAHPITPESYWLTAFTWQGKQYCWTRLPQG |
| | | | FLNSPALFNADVVDLLKEIPNVQAYVDDIYISHDDPQEHLEQLEKIFSILLNAGYVVSLKKSEIAQREVEFLGFNITKEGRGLTDTFKQKLLNITPPKDLKQLQSI |
| | | | LGKLNFARNFIPNYSELVKPLYTIVAPANGKFISWTEDNSNQLQHIISVLNQADNLEERNPETRLIIKVNSSPSAGYIRYYNEGSKRPIMYVNYIFSKAEAKFTQT |
| | | | EKLLTTMHKGLIKAMDLAMGQEILVYSPIVSMTKIQRTPLPERKALPVRWITWMTYLEDPRIQFHYDKSLPELQQIPNVTEDVIAKTKHPSEFAMVFYTDGSAIKH |
| | | | PDVNKSHSAGMGIAQVQFIPEYKIVHQWSIPLGDHTAQLAEIAAVEFACKKALKISGPVLIVTDSFYVAESANKELPYWKSNGFLNNKKKPLRHVSKWKSIAECLQ |
| | | | LKPDIIIMHEKGHQQPMTTLHTEGNNLADKLATQGSYVVHAGKRTADGSEFEKRTADGSEFESPKKKAKVEGSGEGRGSLLTCGDVEENPG |
| SFV | 9 | 3772 | MPAAKRVKLDGGDKKYSIGLDIGTNSVGWAVITDEYKVPSKKFKVLGNTDRHSIKKNLIGALLFDSGETAEATRLKRTARRRYTRRKNRICYLQEIFSNEMAKVDD |
| | | | SFFHRLEESFLVEEDKKHERHPIFGNIVDEVAYHEKYPTIYHLRKKLVDSTDKADLRLIYLALAHMIKFRGHFLIEGDLNPDNSDVDKLFIQLVQTYNQLFEENPI |
| | | | NASGVDAKAILSARLSKSRRLENLIAQLPGEKKNGLFGNLIALSLGLTPNFKSNFDLAEDAKLQLSKDTYDDDLDNLLAQIGDQYADLFLAAKNLSDAILLSDILR |
| | | | VNTEITKAPLSASMIKRYDEHHQDLTLLKALVRQQLPEKYKEIFFDQSKNGYAGYIDGGASQEEFYKFIKPILEKMDGTEELLVKLNREDLLRKQRTFDNGSIPHQ |
| | | | IHLGELHAILRRQEDFYPFLKDNREKIEKILTFRIPYYVGPLARGNSRFAWMTRKSEETITPWNFEEVVDKGASAQSFIERMTNFDKNLPNEKVLPKHSLLYEYFT |
| | | | VYNELTKVKYVTEGMRKPAFLSGEQKKAIVDLLFKTNRKVTVKQLKEDYFKKIECFDSVEISGVEDRFNASLGTYHDLLKIIKDKDFLDNEENEDILEDIVLTLTL |
| | | | FEDREMIEERLKTYAHLFDDKVMKQLKRRRYTGWGRLSRKLINGIRDKQSGKTILDFLKSDGFANRNFMQLIHDDSLTFKEDIQKAQVSGQGDSLHEHIANLAGSP |
| | | | AIKKGILQTVKVVDELVKVMGRHKPENIVIEMARENQTTQKGQKNSRERMKRIEEGIKELGSQILKEHPVENTQLQNEKLYLYYLQNGRDMYVDQELDINRLSDYD |
| | | | VDHIVPQSFLKDDSIDNKVLTRSDKARGKSDNVPSEEVVKKMKNYWRQLLNAKLITQRKFDNLTKAERGGLSELDKAGFIKRQLVETRQITKHVAQILDSRMNTKY |
| | | | DENDKLIREVKVITLKSKLVSDFRKDFQFYKVREINNYHHAHDAYLNAVVGTALIKKYPKLESEFVYGDYKVYDVRKMIAKSEQEIGKATAKYFFYSNIMNFFKTE |
| | | | ITLANGEIRKRPLIETNGETGEIVWDKGRDFATVRKVLSMPQVNIVKKTEVQTGGFSKESILPKRNSDKLIARKKDWDPKKYGGFDSPTVAYSVLVVAKVEKGKSK |
| | | | KLKSVKELLGITIMERSSFEKNPIDFLEAKGYKEVKKDLIIKLPKYSLFELENGRKRMLASAGELQKGNELALPSKYVNFLYLASHYEKLKGSPEDNEQKQLFVEQ |
| | | | HKHYLDEIIEQISEFSKRVILADANLDKVLSAYNKHRDKPIREQAENIIHLFTLTNLGAPAAFKYFDTTIDRKRYTSTKEVLDATLIHQSITGLYETRIDLSQLGG |
| | | | DGGAEAAAKEAAAKEAAAKEAAAKALEAEAAAKEAAAKEAAAKEAAAKAGGVPWLMKKPLQLTVLVPLHEYQERLLQQTALPKEQKELLQKLFLKYDALWQHWENQ |
| | | | VGHRRIKPHNIATGTLAPRPQKQYPINPKAKPSIQIVIDDLLKQGVLIQQNSTMNTPVYPVPKPDGKWRMVLDYREVNKTIPLIAAQNQHSAGILSSIYRGKYKTT |
| | | | LDLTNGFWAHPITPESYWLTAFTWQGKQYCWTRLPQGFLNSPALFNADVVDLLKEIPNVQAYVDDIYISHDDPQEHLEQLEKIFSILLNAGYVVSLKKSEIAQREV |
| | | | EFLGFNITKEGRGLTDTFKQKLLNITPPKDLKQLQSILGKLNFARNFIPNYSELVKPLYTIVAPANGKFISWTEDNSNQLQHIISVLNQADNLEERNPETRLIIKV |
| | | | NSSPSAGYIRYYNEGSKRPIMYVNYIFSKAEAKFTQTEKLLTTMHKGLIKAMDLAMGQEILVYSPIVSMTKIQRTPLPERKALPVRWITWMTYLEDPRIQFHYDKS |
| | | | LPELQQIPNVTEDVIAKTKHPSEFAMVFYTDGSAIKHPDVNKSHSAGMGIAQVQFIPEYKIVHQWSIPLGDHTAQLAEIAAVEFACKKALKISGPVLIVTDSFYVA |
| | | | ESANKELPYWKSNGFLNNKKKPLRHVSKWKSIAECLQLKPDIIIMHEKGHQQPMTTLHTEGNNLADKLATQGSYVVHAGKRTADGSEFEKRTADGSEFESPKKKAK |
| | | | VEGSGEGRGSLLTCGDVEENPG |
| SFV | 10 | 3773 | MPAAKRVKLDGGDKKYSIGLDIGTNSVGWAVITDEYKVPSKKFKVLGNTDRHSIKKNLIGALLFDSGETAEATRLKRTARRRYTRRKNRICYLQEIFSNEMAKVDD |
| | | | SFFHRLEESFLVEEDKKHERHPIFGNIVDEVAYHEKYPTIYHLRKKLVDSTDKADLRLIYLALAHMIKFRGHFLIEGDLNPDNSDVDKLFIQLVQTYNQLFEENPI |
| | | | NASGVDAKAILSARLSKSRRLENLIAQLPGEKKNGLFGNLIALSLGLTPNFKSNFDLAEDAKLQLSKDTYDDDLDNLLAQIGDQYADLFLAAKNLSDAILLSDILR |
| | | | VNTEITKAPLSASMIKRYDEHHQDLTLLKALVRQQLPEKYKEIFFDQSKNGYAGYIDGGASQEEFYKFIKPILEKMDGTEELLVKLNREDLLRKQRTFDNGSIPHQ |
| | | | IHLGELHAILRRQEDFYPFLKDNREKIEKILTFRIPYYVGPLARGNSRFAWMTRKSEETITPWNFEEVVDKGASAQSFIERMTNFDKNLPNEKVLPKHSLLYEYFT |
| | | | VYNELTKVKYVTEGMRKPAFLSGEQKKAIVDLLFKTNRKVTVKQLKEDYFKKIECFDSVEISGVEDRFNASLGTYHDLLKIIKDKDFLDNEENEDILEDIVLTLTL |
| | | | FEDREMIEERLKTYAHLFDDKVMKQLKRRRYTGWGRLSRKLINGIRDKQSGKTILDFLKSDGFANRNFMQLIHDDSLTFKEDIQKAQVSGQGDSLHEHIANLAGSP |
| | | | AIKKGILQTVKVVDELVKVMGRHKPENIVIEMARENQTTQKGQKNSRERMKRIEEGIKELGSQILKEHPVENTQLQNEKLYLYYLQNGRDMYVDQELDINRLSDYD |
| | | | VDHIVPQSFLKDDSIDNKVLTRSDKARGKSDNVPSEEVVKKMKNYWRQLLNAKLITQRKFDNLTKAERGGLSELDKAGFIKRQLVETRQITKHVAQILDSRMNTKY |
| | | | DENDKLIREVKVITLKSKLVSDFRKDFQFYKVREINNYHHAHDAYLNAVVGTALIKKYPKLESEFVYGDYKVYDVRKMIAKSEQEIGKATAKYFFYSNIMNFFKTE |
| | | | ITLANGEIRKRPLIETNGETGEIVWDKGRDFATVRKVLSMPQVNIVKKTEVQTGGFSKESILPKRNSDKLIARKKDWDPKKYGGFDSPTVAYSVLVVAKVEKGKSK |
| | | | KLKSVKELLGITIMERSSFEKNPIDFLEAKGYKEVKKDLIIKLPKYSLFELENGRKRMLASAGELQKGNELALPSKYVNFLYLASHYEKLKGSPEDNEQKQLFVEQ |
| | | | HKHYLDEIIEQISEFSKRVILADANLDKVLSAYNKHRDKPIREQAENIIHLFTLTNLGAPAAFKYFDTTIDRKRYTSTKEVLDATLIHQSITGLYETRIDLSQLGG |
| | | | DGGSGGSSGGSSGSETPGTSESATPESSGGSSGGSSGGVPWLMKKPLQLTVLVPLHEYQERLLQQTALPKEQKELLQKLFLKYDALWQHWENQVGHRRIKPHNIAT |
| | | | GTLAPRPQKQYPINPKAKPSIQIVIDDLLKQGVLIQQNSTMNTPVYPVPKPDGKWRMVLDYREVNKTIPLIAAQNQHSAGILSSIYRGKYKTTLDLTNGFWAHPIT |
| | | | PESYWLTAFTWQGKQYCWTRLPQGFLNSPALFNADVVDLLKEIPNVQAYVDDIYISHDDPQEHLEQLEKIFSILLNAGYVVSLKKSEIAQREVEFLGFNITKEGRG |
| | | | LTDTFKQKLLNITPPKDLKQLQSILGLLNFARNFIPNYSELVKPLYTIVAPANGKFISWTEDNSNQLQHIISVLNQADNLEERNPETRLIIKVNSSPSAGYIRYYN |
| | | | EGSKRPIMYVNYIFSKAEAKFTQTEKLLTTMHKGLIKAMDLAMGQEILVYSPIVSMTKIQRTPLPERKALPVRWITWMTYLEDPRIQFHYDKSLPELQQIPNVTED |
| | | | VIAKTKHPSEFAMVFYTDGSAIKHPDVNKSHSAGMGIAQVQFIPEYKIVHQWSIPLGDHTAQLAEIAAVEFACKKALKISGPVLIVTDSFYVAESANKELPYWKSN |
| | | | GFLNNKKKPLRHVSKWKSIAECLQLKPDIIIMHEKGHQQPMTTLHTEGNNLADKLATQGSYVVHAGKRTADGSEFEKRTADGSEFESPKKKAKVEGSGEGRGSLLT |
| | | | CGDVEENPG |
| SFV | 11 | 3774 | MPAAKRVKLDGGDKKYSIGLDIGTNSVGWAVITDEYKVPSKKFKVLGNTDRHSIKKNLIGALLFDSGETAEATRLKRTARRRYTRRKNRICYLQEIFSNEMAKVDD |
| | | | SFFHRLEESFLVEEDKKHERHPIFGNIVDEVAYHEKYPTIYHLRKKLVDSTDKADLRLIYLALAHMIKFRGHFLIEGDLNPDNSDVDKLFIQLVQTYNQLFEENPI |
| | | | NASGVDAKAILSARLSKSRRLENLIAQLPGEKKNGLFGNLIALSLGLTPNFKSNFDLAEDAKLQLSKDTYDDDLDNLLAQIGDQYADLFLAAKNLSDAILLSDILR |
| | | | VNTEITKAPLSASMIKRYDEHHQDLTLLKALVRQQLPEKYKEIFFDQSKNGYAGYIDGGASQEEFYKFIKPILEKMDGTEELLVKLNREDLLRKQRTFDNGSIPHQ |
| | | | IHLGELHAILRRQEDFYPFLKDNREKIEKILTFRIPYYVGPLARGNSRFAWMTRKSEETITPWNFEEVVDKGASAQSFIERMTNFDKNLPNEKVLPKHSLLYEYFT |
| | | | VYNELTKVKYVTEGMRKPAFLSGEQKKAIVDLLFKTNRKVTVKQLKEDYFKKIECFDSVEISGVEDRFNASLGTYHDLLKIIKDKDFLDNEENEDILEDIVLTLTL |
| | | | FEDREMIEERLKTYAHLFDDKVMKQLKRRRYTGWGRLSRKLINGIRDKQSGKTILDFLKSDGFANRNFMQLIHDDSLTFKEDIQKAQVSGQGDSLHEHIANLAGSP |
| | | | AIKKGILQTVKVVDELVKVMGRHKPENIVIEMARENQTTQKGQKNSRERMKRIEEGIKELGSQILKEHPVENTQLQNEKLYLYYLQNGRDMYVDQELDINRLSDYD |
| | | | VDHIVPQSFLKDDSIDNKVLTRSDKARGKSDNVPSEEVVKKMKNYWRQLLNAKLITQRKFDNLTKAERGGLSELDKAGFIKRQLVETRQITKHVAQILDSRMNTKY |
| | | | DENDKLIREVKVITLKSKLVSDFRKDFQFYKVREINNYHHAHDAYLNAVVGTALIKKYPKLESEFVYGDYKVYDVRKMIAKSEQEIGKATAKYFFYSNIMNFFKTE |
| | | | ITLANGEIRKRPLIETNGETGEIVWDKGRDFATVRKVLSMPQVNIVKKTEVQTGGFSKESILPKRNSDKLIARKKDWDPKKYGGFDSPTVAYSVLVVAKVEKGKSK |
| | | | KLKSVKELLGITIMERSSFEKNPIDFLEAKGYKEVKKDLIIKLPKYSLFELENGRKRMLASAGELQKGNELALPSKYVNFLYLASHYEKLKGSPEDNEQKQLFVEQ |
| | | | HKHYLDEIIEQISEFSKRVILADANLDKVLSAYNKHRDKPIREQAENIIHLFTLTNLGAPAAFKYFDTTIDRKRYTSTKEVLDATLIHQSITGLYETRIDLSQLGG |
| | | | DGGGGGGSEAAAKGGGGSGGVPWLMKKPLQLTVLVPLHEYQERLLQQTALPKEQKELLQKLFLKYDALWQHWENQVGHRRIKPHNIATGTLAPRPQKQYPINPKAK |
| | | | PSIQIVIDDLLKQGVLIQQNSTMNTPVYPVPKPDGKWRMVLDYREVNKTIPLIAAQNQHSAGILSSIYRGKYKTTLDLTNGFWAHPITPESYWLTAFTWQGKQYCW |
| | | | TRLPQGFLNSPALFNADVVDLLKEIPNVQAYVDDIYISHDDPQEHLEQLEKIFSILLNAGYVVSLKKSEIAQREVEFLGFNITKEGRGLTDTFKQKLLNITPPKDL |
| | | | KQLQSILGLLNFARNFIPNYSELVKPLYTIVAPANGKFISWTEDNSNQLQHIISVLNQADNLEERNPETRLIIKVNSSPSAGYIRYYNEGSKRPIMYVNYIFSKAE |
| | | | AKFTQTEKLLTTMHKGLIKAMDLAMGQEILVYSPIVSMTKIQRTPLPERKALPVRWITWMTYLEDPRIQFHYDKSLPELQQIPNVTEDVIAKTKHPSEFAMVFYTD |
| | | | GSAIKHPDVNKSHSAGMGIAQVQFIPEYKIVHQWSIPLGDHTAQLAEIAAVEFACKKALKISGPVLIVTDSFYVAESANKELPYWKSNGFLNNKKKPLRHVSKWKS |
| | | | IAECLQLKPDIIIMHEKGHQQPMTTLHTEGNNLADKLATQGSYVVHAGKRTADGSEFEKRTADGSEFESPKKKAKVEGSGEGRGSLLTCGDVEENPG |
| SFV | 12 | 3775 | MPAAKRVKLDGGDKKYSIGLDIGTNSVGWAVITDEYKVPSKKFKVLGNTDRHSIKKNLIGALLFDSGETAEATRLKRTARRRYTRRKNRICYLQEIFSNEMAKVDD |
| | | | SFFHRLEESFLVEEDKKHERHPIFGNIVDEVAYHEKYPTIYHLRKKLVDSTDKADLRLIYLALAHMIKFRGHFLIEGDLNPDNSDVDKLFIQLVQTYNQLFEENPI |
| | | | NASGVDAKAILSARLSKSRRLENLIAQLPGEKKNGLFGNLIALSLGLTPNFKSNFDLAEDAKLQLSKDTYDDDLDNLLAQIGDQYADLFLAAKNLSDAILLSDILR |
| | | | VNTEITKAPLSASMIKRYDEHHQDLTLLKALVRQQLPEKYKEIFFDQSKNGYAGYIDGGASQEEFYKFIKPILEKMDGTEELLVKLNREDLLRKQRTFDNGSIPHQ |
| | | | IHLGELHAILRRQEDFYPFLKDNREKIEKILTFRIPYYVGPLARGNSRFAWMTRKSEETITPWNFEEVVDKGASAQSFIERMTNFDKNLPNEKVLPKHSLLYEYFT |
| | | | VYNELTKVKYVTEGMRKPAFLSGEQKKAIVDLLFKTNRKVTVKQLKEDYFKKIECFDSVEISGVEDRFNASLGTYHDLLKIIKDKDFLDNEENEDILEDIVLTLTL |
| | | | FEDREMIEERLKTYAHLFDDKVMKQLKRRRYTGWGRLSRKLINGIRDKQSGKTILDFLKSDGFANRNFMQLIHDDSLTFKEDIQKAQVSGQGDSLHEHIANLAGSP |
| | | | AIKKGILQTVKVVDELVKVMGRHKPENIVIEMARENQTTQKGQKNSRERMKRIEEGIKELGSQILKEHPVENTQLQNEKLYLYYLQNGRDMYVDQELDINRLSDYD |
| | | | VDHIVPQSFLKDDSIDNKVLTRSDKARGKSDNVPSEEVVKKMKNYWRQLLNAKLITQRKFDNLTKAERGGLSELDKAGFIKRQLVETRQITKHVAQILDSRMNTKY |
| | | | DENDKLIREVKVITLKSKLVSDFRKDFQFYKVREINNYHHAHDAYLNAVVGTALIKKYPKLESEFVYGDYKVYDVRKMIAKSEQEIGKATAKYFFYSNIMNFFKTE |
| | | | ITLANGEIRKRPLIETNGETGEIVWDKGRDFATVRKVLSMPQVNIVKKTEVQTGGFSKESILPKRNSDKLIARKKDWDPKKYGGFDSPTVAYSVLVVAKVEKGKSK |
| | | | KLKSVKELLGITIMERSSFEKNPIDFLEAKGYKEVKKDLIIKLPKYSLFELENGRKRMLASAGELQKGNELALPSKYVNFLYLASHYEKLKGSPEDNEQKQLFVEQ |
| | | | HKHYLDEIIEQISEFSKRVILADANLDKVLSAYNKHRDKPIREQAENIIHLFTLTNLGAPAAFKYFDTTIDRKRYTSTKEVLDATLIHQSITGLYETRIDLSQLGG |
| | | | DGGGSSGSSGSSGSSGSSGSSGGVPWLMKKPLQLTVLVPLHEYQERLLQQTALPKEQKELLQKLFLKYDALWQHWENQVGHRRIKPHNIATGTLAPRPQKQYPINP |
| | | | KAKPSIQIVIDDLLKQGVLIQQNSTMNTPVYPVPKPDGKWRMVLDYREVNKTIPLIAAQNQHSAGILSSIYRGKYKTTLDLTNGFWAHPITPESYWLTAFTWQGKQ |
| | | | YCWTRLPQGFLNSPALFNADVVDLLKEIPNVQAYVDDIYISHDDPQEHLEQLEKIFSILLNAGYVVSLKKSEIAQREVEFLGFNITKEGRGLTDTFKQKLLNITPP |
| | | | KDLKQLQSILGLLNFARNFIPNYSELVKPLYTIVAPANGKFISWTEDNSNQLQHIISVLNQADNLEERNPETRLIIKVNSSPSAGYIRYYNEGSKRPIMYVNYIFS |
| | | | KAEAKFTQTEKLLTTMHKGLIKAMDLAMGQEILVYSPIVSMTKIQRTPLPERKALPVRWITWMTYLEDPRIQFHYDKSLPELQQIPNVTEDVIAKTKHPSEFAMVF |
| | | | YTDGSAIKHPDVNKSHSAGMGIAQVQFIPEYKIVHQWSIPLGDHTAQLAEIAAVEFACKKALKISGPVLIVTDSFYVAESANKELPYWKSNGFLNNKKKPLRHVSK |
| | | | WKSIAECLQLKPDIIIMHEKGHQQPMTTLHTEGNNLADKLATQGSYVVHAGKRTADGSEFEKRTADGSEFESPKKKAKVEGSGEGRGSLLTCGDVEENPG |
| SFV | 13 | 3776 | MPAAKRVKLDGGDKKYSIGLDIGTNSVGWAVITDEYKVPSKKFKVLGNTDRHSIKKNLIGALLFDSGETAEATRLKRTARRRYTRRKNRICYLQEIFSNEMAKVDD |
| | | | SFFHRLEESFLVEEDKKHERHPIFGNIVDEVAYHEKYPTIYHLRKKLVDSTDKADLRLIYLALAHMIKFRGHFLIEGDLNPDNSDVDKLFIQLVQTYNQLFEENPI |
| | | | NASGVDAKAILSARLSKSRRLENLIAQLPGEKKNGLFGNLIALSLGLTPNFKSNFDLAEDAKLQLSKDTYDDDLDNLLAQIGDQYADLFLAAKNLSDAILLSDILR |
| | | | VNTEITKAPLSASMIKRYDEHHQDLTLLKALVRQQLPEKYKEIFFDQSKNGYAGYIDGGASQEEFYKFIKPILEKMDGTEELLVKLNREDLLRKQRTFDNGSIPHQ |
| | | | IHLGELHAILRRQEDFYPFLKDNREKIEKILTFRIPYYVGPLARGNSRFAWMTRKSEETITPWNFEEVVDKGASAQSFIERMTNFDKNLPNEKVLPKHSLLYEYFT |
| | | | VYNELTKVKYVTEGMRKPAFLSGEQKKAIVDLLFKTNRKVTVKQLKEDYFKKIECFDSVEISGVEDRFNASLGTYHDLLKIIKDKDFLDNEENEDILEDIVLTLTL |
| | | | FEDREMIEERLKTYAHLFDDKVMKQLKRRRYTGWGRLSRKLINGIRDKQSGKTILDFLKSDGFANRNFMQLIHDDSLTFKEDIQKAQVSGQGDSLHEHIANLAGSP |
| | | | AIKKGILQTVKVVDELVKVMGRHKPENIVIEMARENQTTQKGQKNSRERMKRIEEGIKELGSQILKEHPVENTQLQNEKLYLYYLQNGRDMYVDQELDINRLSDYD |
| | | | VDHIVPQSFLKDDSIDNKVLTRSDKARGKSDNVPSEEVVKKMKNYWRQLLNAKLITQRKFDNLTKAERGGLSELDKAGFIKRQLVETRQITKHVAQILDSRMNTKY |
| | | | DENDKLIREVKVITLKSKLVSDFRKDFQFYKVREINNYHHAHDAYLNAVVGTALIKKYPKLESEFVYGDYKVYDVRKMIAKSEQEIGKATAKYFFYSNIMNFFKTE |
| | | | ITLANGEIRKRPLIETNGETGEIVWDKGRDFATVRKVLSMPQVNIVKKTEVQTGGFSKESILPKRNSDKLIARKKDWDPKKYGGFDSPTVAYSVLVVAKVEKGKSK |
| | | | KLKSVKELLGITIMERSSFEKNPIDFLEAKGYKEVKKDLIIKLPKYSLFELENGRKRMLASAGELQKGNELALPSKYVNFLYLASHYEKLKGSPEDNEQKQLFVEQ |
| | | | HKHYLDEIIEQISEFSKRVILADANLDKVLSAYNKHRDKPIREQAENIIHLFTLTNLGAPAAFKYFDTTIDRKRYTSTKEVLDATLIHQSITGLYETRIDLSQLGG |
| | | | DGGGGSGGSGGVPWLMKKPLQLTVLVPLHEYQERLLQQTALPKEQKELLQKLFLKYDALWQHWENQVGHRRIKPHNIATGTLAPRPQKQYPINPKAKPSIQIVIDD |
| | | | LLKQGVLIQQNSTMNTPVYPVPKPDGKWRMVLDYREVNKTIPLIAAQNQHSAGILSSIYRGKYKTTLDLTNGFWAHPITPESYWLTAFTWQGKQYCWTRLPQGFLN |
| | | | SPALFNADVVDLLKEIPNVQAYVDDIYISHDDPQEHLEQLEKIFSILLNAGYVVSLKKSEIAQREVEFLGFNITKEGRGLTDTFKQKLLNITPPKDLKQLQSILGL |
| | | | LNFARNFIPNYSELVKPLYTIVAPANGKFISWTEDNSNQLQHIISVLNQADNLEERNPETRLIIKVNSSPSAGYIRYYNEGSKRPIMYVNYIFSKAEAKFTQTEKL |
| | | | LTTMHKGLIKAMDLAMGQEILVYSPIVSMTKIQRTPLPERKALPVRWITWMTYLEDPRIQFHYDKSLPELQQIPNVTEDVIAKTKHPSEFAMVFYTDGSAIKHPDV |
| | | | NKSHSAGMGIAQVQFIPEYKIVHQWSIPLGDHTAQLAEIAAVEFACKKALKISGPVLIVTDSFYVAESANKELPYWKSNGFLNNKKKPLRHVSKWKSIAECLQLKP |
| | | | DIIIMHEKGHQQPMTTLHTEGNNLADKLATQGSYVVHAGKRTADGSEFEKRTADGSEFESPKKKAKVEGSGEGRGSLLTCGDVEENPG |
| SFV | 14 | 3777 | MPAAKRVKLDGGDKKYSIGLDIGTNSVGWAVITDEYKVPSKKFKVLGNTDRHSIKKNLIGALLFDSGETAEATRLKRTARRRYTRRKNRICYLQEIFSNEMAKVDD |
| | | | SFFHRLEESFLVEEDKKHERHPIFGNIVDEVAYHEKYPTIYHLRKKLVDSTDKADLRLIYLALAHMIKFRGHFLIEGDLNPDNSDVDKLFIQLVQTYNQLFEENPI |
| | | | NASGVDAKAILSARLSKSRRLENLIAQLPGEKKNGLFGNLIALSLGLTPNFKSNFDLAEDAKLQLSKDTYDDDLDNLLAQIGDQYADLFLAAKNLSDAILLSDILR |
| | | | VNTEITKAPLSASMIKRYDEHHQDLTLLKALVRQQLPEKYKEIFFDQSKNGYAGYIDGGASQEEFYKFIKPILEKMDGTEELLVKLNREDLLRKQRTFDNGSIPHQ |
| | | | IHLGELHAILRRQEDFYPFLKDNREKIEKILTFRIPYYVGPLARGNSRFAWMTRKSEETITPWNFEEVVDKGASAQSFIERMTNFDKNLPNEKVLPKHSLLYEYFT |
| | | | VYNELTKVKYVTEGMRKPAFLSGEQKKAIVDLLFKTNRKVTVKQLKEDYFKKIECFDSVEISGVEDRFNASLGTYHDLLKIIKDKDFLDNEENEDILEDIVLTLTL |
| | | | FEDREMIEERLKTYAHLFDDKVMKQLKRRRYTGWGRLSRKLINGIRDKQSGKTILDFLKSDGFANRNFMQLIHDDSLTFKEDIQKAQVSGQGDSLHEHIANLAGSP |
| | | | AIKKGILQTVKVVDELVKVMGRHKPENIVIEMARENQTTQKGQKNSRERMKRIEEGIKELGSQILKEHPVENTQLQNEKLYLYYLQNGRDMYVDQELDINRLSDYD |
| | | | VDHIVPQSFLKDDSIDNKVLTRSDKARGKSDNVPSEEVVKKMKNYWRQLLNAKLITQRKFDNLTKAERGGLSELDKAGFIKRQLVETRQITKHVAQILDSRMNTKY |
| | | | DENDKLIREVKVITLKSKLVSDFRKDFQFYKVREINNYHHAHDAYLNAVVGTALIKKYPKLESEFVYGDYKVYDVRKMIAKSEQEIGKATAKYFFYSNIMNFFKTE |
| | | | ITLANGEIRKRPLIETNGETGEIVWDKGRDFATVRKVLSMPQVNIVKKTEVQTGGFSKESILPKRNSDKLIARKKDWDPKKYGGFDSPTVAYSVLVVAKVEKGKSK |
| | | | KLKSVKELLGITIMERSSFEKNPIDFLEAKGYKEVKKDLIIKLPKYSLFELENGRKRMLASAGELQKGNELALPSKYVNFLYLASHYEKLKGSPEDNEQKQLFVEQ |
| | | | HKHYLDEIIEQISEFSKRVILADANLDKVLSAYNKHRDKPIREQAENIIHLFTLTNLGAPAAFKYFDTTIDRKRYTSTKEVLDATLIHQSITGLYETRIDLSQLGG |
| | | | DGGGGSGSSEAAAKGGVPWLMKKPLQLTVLVPLHEYQERLLQQTALPKEQKELLQKLFLKYDALWQHWENQVGHRRIKPHNIATGTLAPRPQKQYPINPKAKPSIQ |
| | | | IVIDDLLKQGVLIQQNSTMNTPVYPVPKPDGKWRMVLDYREVNKTIPLIAAQNQHSAGILSSIYRGKYKTTLDLTNGFWAHPITPESYWLTAFTWQGKQYCWTRLP |
| | | | QGFLNSPALFNADVVDLLKEIPNVQAYVDDIYISHDDPQEHLEQLEKIFSILLNAGYVVSLKKSEIAQREVEFLGFNITKEGRGLTDTFKQKLLNITPPKDLKQLQ |
| | | | SILGLLNFARNFIPNYSELVKPLYTIVAPANGKFISWTEDNSNQLQHIISVLNQADNLEERNPETRLIIKVNSSPSAGYIRYYNEGSKRPIMYVNYIFSKAEAKFT |
| | | | QTEKLLTTMHKGLIKAMDLAMGQEILVYSPIVSMTKIQRTPLPERKALPVRWITWMTYLEDPRIQFHYDKSLPELQQIPNVTEDVIAKTKHPSEFAMVFYTDGSAI |
| | | | KHPDVNKSHSAGMGIAQVQFIPEYKIVHQWSIPLGDHTAQLAEIAAVEFACKKALKISGPVLIVTDSFYVAESANKELPYWKSNGFLNNKKKPLRHVSKWKSIAEC |
| | | | LQLKPDIIIMHEKGHQQPMTTLHTEGNNLADKLATQGSYVVHAGKRTADGSEFEKRTADGSEFESPKKKAKVEGSGEGRGSLLTCGDVEENPG |
| SFV | 15 | 3778 | MPAAKRVKLDGGDKKYSIGLDIGTNSVGWAVITDEYKVPSKKFKVLGNTDRHSIKKNLIGALLFDSGETAEATRLKRTARRRYTRRKNRICYLQEIFSNEMAKVDD |
| | | | SFFHRLEESFLVEEDKKHERHPIFGNIVDEVAYHEKYPTIYHLRKKLVDSTDKADLRLIYLALAHMIKFRGHFLIEGDLNPDNSDVDKLFIQLVQTYNQLFEENPI |
| | | | NASGVDAKAILSARLSKSRRLENLIAQLPGEKKNGLFGNLIALSLGLTPNFKSNFDLAEDAKLQLSKDTYDDDLDNLLAQIGDQYADLFLAAKNLSDAILLSDILR |
| | | | VNTEITKAPLSASMIKRYDEHHQDLTLLKALVRQQLPEKYKEIFFDQSKNGYAGYIDGGASQEEFYKFIKPILEKMDGTEELLVKLNREDLLRKQRTFDNGSIPHQ |
| | | | IHLGELHAILRRQEDFYPFLKDNREKIEKILTFRIPYYVGPLARGNSRFAWMTRKSEETITPWNFEEVVDKGASAQSFIERMTNFDKNLPNEKVLPKHSLLYEYFT |
| | | | VYNELTKVKYVTEGMRKPAFLSGEQKKAIVDLLFKTNRKVTVKQLKEDYFKKIECFDSVEISGVEDRFNASLGTYHDLLKIIKDKDFLDNEENEDILEDIVLTLTL |
| | | | FEDREMIEERLKTYAHLFDDKVMKQLKRRRYTGWGRLSRKLINGIRDKQSGKTILDFLKSDGFANRNFMQLIHDDSLTFKEDIQKAQVSGQGDSLHEHIANLAGSP |
| | | | AIKKGILQTVKVVDELVKVMGRHKPENIVIEMARENQTTQKGQKNSRERMKRIEEGIKELGSQILKEHPVENTQLQNEKLYLYYLQNGRDMYVDQELDINRLSDYD |
| | | | VDHIVPQSFLKDDSIDNKVLTRSDKARGKSDNVPSEEVVKKMKNYWRQLLNAKLITQRKFDNLTKAERGGLSELDKAGFIKRQLVETRQITKHVAQILDSRMNTKY |
| | | | DENDKLIREVKVITLKSKLVSDFRKDFQFYKVREINNYHHAHDAYLNAVVGTALIKKYPKLESEFVYGDYKVYDVRKMIAKSEQEIGKATAKYFFYSNIMNFFKTE |
| | | | ITLANGEIRKRPLIETNGETGEIVWDKGRDFATVRKVLSMPQVNIVKKTEVQTGGFSKESILPKRNSDKLIARKKDWDPKKYGGFDSPTVAYSVLVVAKVEKGKSK |
| | | | KLKSVKELLGITIMERSSFEKNPIDFLEAKGYKEVKKDLIIKLPKYSLFELENGRKRMLASAGELQKGNELALPSKYVNFLYLASHYEKLKGSPEDNEQKQLFVEQ |
| | | | HKHYLDEIIEQISEFSKRVILADANLDKVLSAYNKHRDKPIREQAENIIHLFTLTNLGAPAAFKYFDTTIDRKRYTSTKEVLDATLIHQSITGLYETRIDLSQLGG |
| | | | DGGGGSEAAAKGSSGGVPWLMKKPLQLTVLVPLHEYQERLLQQTALPKEQKELLQKLFLKYDALWQHWENQVGHRRIKPHNIATGTLAPRPQKQYPINPKAKPSIQ |
| | | | IVIDDLLKQGVLIQQNSTMNTPVYPVPKPDGKWRMVLDYREVNKTIPLIAAQNQHSAGILSSIYRGKYKTTLDLTNGFWAHPITPESYWLTAFTWQGKQYCWTRLP |
| | | | QGFLNSPALFNADVVDLLKEIPNVQAYVDDIYISHDDPQEHLEQLEKIFSILLNAGYVVSLKKSEIAQREVEFLGFNITKEGRGLTDTFKQKLLNITPPKDLKQLQ |
| | | | SILGLLNFARNFIPNYSELVKPLYTIVAPANGKFISWTEDNSNQLQHIISVLNQADNLEERNPETRLIIKVNSSPSAGYIRYYNEGSKRPIMYVNYIFSKAEAKFT |
| | | | QTEKLLTTMHKGLIKAMDLAMGQEILVYSPIVSMTKIQRTPLPERKALPVRWITWMTYLEDPRIQFHYDKSLPELQQIPNVTEDVIAKTKHPSEFAMVFYTDGSAI |
| | | | KHPDVNKSHSAGMGIAQVQFIPEYKIVHQWSIPLGDHTAQLAEIAAVEFACKKALKISGPVLIVTDSFYVAESANKELPYWKSNGFLNNKKKPLRHVSKWKSIAEC |
| | | | LQLKPDIIIMHEKGHQQPMTTLHTEGNNLADKLATQGSYVVHAGKRTADGSEFEKRTADGSEFESPKKKAKVEGSGEGRGSLLTCGDVEENPG |
| SFV | 16 | 3779 | MPAAKRVKLDGGDKKYSIGLDIGTNSVGWAVITDEYKVPSKKFKVLGNTDRHSIKKNLIGALLFDSGETAEATRLKRTARRRYTRRKNRICYLQEIFSNEMAKVDD |
| | | | SFFHRLEESFLVEEDKKHERHPIFGNIVDEVAYHEKYPTIYHLRKKLVDSTDKADLRLIYLALAHMIKFRGHFLIEGDLNPDNSDVDKLFIQLVQTYNQLFEENPI |
| | | | NASGVDAKAILSARLSKSRRLENLIAQLPGEKKNGLFGNLIALSLGLTPNFKSNFDLAEDAKLQLSKDTYDDDLDNLLAQIGDQYADLFLAAKNLSDAILLSDILR |
| | | | VNTEITKAPLSASMIKRYDEHHQDLTLLKALVRQQLPEKYKEIFFDQSKNGYAGYIDGGASQEEFYKFIKPILEKMDGTEELLVKLNREDLLRKQRTFDNGSIPHQ |
| | | | IHLGELHAILRRQEDFYPFLKDNREKIEKILTFRIPYYVGPLARGNSRFAWMTRKSEETITPWNFEEVVDKGASAQSFIERMTNFDKNLPNEKVLPKHSLLYEYFT |
| | | | VYNELTKVKYVTEGMRKPAFLSGEQKKAIVDLLFKTNRKVTVKQLKEDYFKKIECFDSVEISGVEDRFNASLGTYHDLLKIIKDKDFLDNEENEDILEDIVLTLTL |
| | | | FEDREMIEERLKTYAHLFDDKVMKQLKRRRYTGWGRLSRKLINGIRDKQSGKTILDFLKSDGFANRNFMQLIHDDSLTFKEDIQKAQVSGQGDSLHEHIANLAGSP |
| | | | AIKKGILQTVKVVDELVKVMGRHKPENIVIEMARENQTTQKGQKNSRERMKRIEEGIKELGSQILKEHPVENTQLQNEKLYLYYLQNGRDMYVDQELDINRLSDYD |
| | | | VDHIVPQSFLKDDSIDNKVLTRSDKARGKSDNVPSEEVVKKMKNYWRQLLNAKLITQRKFDNLTKAERGGLSELDKAGFIKRQLVETRQITKHVAQILDSRMNTKY |
| | | | DENDKLIREVKVITLKSKLVSDFRKDFQFYKVREINNYHHAHDAYLNAVVGTALIKKYPKLESEFVYGDYKVYDVRKMIAKSEQEIGKATAKYFFYSNIMNFFKTE |
| | | | ITLANGEIRKRPLIETNGETGEIVWDKGRDFATVRKVLSMPQVNIVKKTEVQTGGFSKESILPKRNSDKLIARKKDWDPKKYGGFDSPTVAYSVLVVAKVEKGKSK |
| | | | KLKSVKELLGITIMERSSFEKNPIDFLEAKGYKEVKKDLIIKLPKYSLFELENGRKRMLASAGELQKGNELALPSKYVNFLYLASHYEKLKGSPEDNEQKQLFVEQ |
| | | | HKHYLDEIIEQISEFSKRVILADANLDKVLSAYNKHRDKPIREQAENIIHLFTLTNLGAPAAFKYFDTTIDRKRYTSTKEVLDATLIHQSITGLYETRIDLSQLGG |
| | | | DGGGGSPAPEAAAKGGVPWLMKKPLQLTVLVPLHEYQERLLQQTALPKEQKELLQKLFLKYDALWQHWENQVGHRRIKPHNIATGTLAPRPQKQYPINPKAKPSIQ |
| | | | IVIDDLLKQGVLIQQNSTMNTPVYPVPKPDGKWRMVLDYREVNKTIPLIAAQNQHSAGILSSIYRGKYKTTLDLTNGFWAHPITPESYWLTAFTWQGKQYCWTRLP |
| | | | QGFLNSPALFNADVVDLLKEIPNVQAYVDDIYISHDDPQEHLEQLEKIFSILLNAGYVVSLKKSEIAQREVEFLGFNITKEGRGLTDTFKQKLLNITPPKDLKQLQ |
| | | | SILGLLNFARNFIPNYSELVKPLYTIVAPANGKFISWTEDNSNQLQHIISVLNQADNLEERNPETRLIIKVNSSPSAGYIRYYNEGSKRPIMYVNYIFSKAEAKFT |
| | | | QTEKLLTTMHKGLIKAMDLAMGQEILVYSPIVSMTKIQRTPLPERKALPVRWITWMTYLEDPRIQFHYDKSLPELQQIPNVTEDVIAKTKHPSEFAMVFYTDGSAI |
| | | | KHPDVNKSHSAGMGIAQVQFIPEYKIVHQWSIPLGDHTAQLAEIAAVEFACKKALKISGPVLIVTDSFYVAESANKELPYWKSNGFLNNKKKPLRHVSKWKSIAEC |
| | | | LQLKPDIIIMHEKGHQQPMTTLHTEGNNLADKLATQGSYVVHAGKRTADGSEFEKRTADGSEFESPKKKAKVEGSGEGRGSLLTCGDVEENPG |
| SFV | 17 | 3780 | MPAAKRVKLDGGDKKYSIGLDIGTNSVGWAVITDEYKVPSKKFKVLGNTDRHSIKKNLIGALLFDSGETAEATRLKRTARRRYTRRKNRICYLQEIFSNEMAKVDD |
| | | | SFFHRLEESFLVEEDKKHERHPIFGNIVDEVAYHEKYPTIYHLRKKLVDSTDKADLRLIYLALAHMIKFRGHFLIEGDLNPDNSDVDKLFIQLVQTYNQLFEENPI |
| | | | NASGVDAKAILSARLSKSRRLENLIAQLPGEKKNGLFGNLIALSLGLTPNFKSNFDLAEDAKLQLSKDTYDDDLDNLLAQIGDQYADLFLAAKNLSDAILLSDILR |
| | | | VNTEITKAPLSASMIKRYDEHHQDLTLLKALVRQQLPEKYKEIFFDQSKNGYAGYIDGGASQEEFYKFIKPILEKMDGTEELLVKLNREDLLRKQRTFDNGSIPHQ |
| | | | IHLGELHAILRRQEDFYPFLKDNREKIEKILTFRIPYYVGPLARGNSRFAWMTRKSEETITPWNFEEVVDKGASAQSFIERMTNFDKNLPNEKVLPKHSLLYEYFT |
| | | | VYNELTKVKYVTEGMRKPAFLSGEQKKAIVDLLFKTNRKVTVKQLKEDYFKKIECFDSVEISGVEDRFNASLGTYHDLLKIIKDKDFLDNEENEDILEDIVLTLTL |
| | | | FEDREMIEERLKTYAHLFDDKVMKQLKRRRYTGWGRLSRKLINGIRDKQSGKTILDFLKSDGFANRNFMQLIHDDSLTFKEDIQKAQVSGQGDSLHEHIANLAGSP |
| | | | AIKKGILQTVKVVDELVKVMGRHKPENIVIEMARENQTTQKGQKNSRERMKRIEEGIKELGSQILKEHPVENTQLQNEKLYLYYLQNGRDMYVDQELDINRLSDYD |
| | | | VDHIVPQSFLKDDSIDNKVLTRSDKARGKSDNVPSEEVVKKMKNYWRQLLNAKLITQRKFDNLTKAERGGLSELDKAGFIKRQLVETRQITKHVAQILDSRMNTKY |
| | | | DENDKLIREVKVITLKSKLVSDFRKDFQFYKVREINNYHHAHDAYLNAVVGTALIKKYPKLESEFVYGDYKVYDVRKMIAKSEQEIGKATAKYFFYSNIMNFFKTE |
| | | | ITLANGEIRKRPLIETNGETGEIVWDKGRDFATVRKVLSMPQVNIVKKTEVQTGGFSKESILPKRNSDKLIARKKDWDPKKYGGFDSPTVAYSVLVVAKVEKGKSK |
| | | | KLKSVKELLGITIMERSSFEKNPIDFLEAKGYKEVKKDLIIKLPKYSLFELENGRKRMLASAGELQKGNELALPSKYVNFLYLASHYEKLKGSPEDNEQKQLFVEQ |
| | | | HKHYLDEIIEQISEFSKRVILADANLDKVLSAYNKHRDKPIREQAENIIHLFTLTNLGAPAAFKYFDTTIDRKRYTSTKEVLDATLIHQSITGLYETRIDLSQLGG |
| | | | DGGAEAAAKEAAAKEAAAKEAAAKALEAEAAAKEAAAKEAAAKEAAAKAGGVPWLMKKPLQLTVLVPLHEYQERLLQQTALPKEQKELLQKLFLKYDALWQHWENQ |
| | | | VGHRRIKPHNIATGTLAPRPQKQYPINPKAKPSIQIVIDDLLKQGVLIQQNSTMNTPVYPVPKPDGKWRMVLDYREVNKTIPLIAAQNQHSAGILSSIYRGKYKTT |
| | | | LDLTNGFWAHPITPESYWLTAFTWQGKQYCWTRLPQGFLNSPALFNADVVDLLKEIPNVQAYVDDIYISHDDPQEHLEQLEKIFSILLNAGYVVSLKKSEIAQREV |
| | | | EFLGFNITKEGRGLTDTFKQKLLNITPPKDLKQLQSILGLLNFARNFIPNYSELVKPLYTIVAPANGKFISWTEDNSNQLQHIISVLNQADNLEERNPETRLIIKV |
| | | | NSSPSAGYIRYYNEGSKRPIMYVNYIFSKAEAKFTQTEKLLTTMHKGLIKAMDLAMGQEILVYSPIVSMTKIQRTPLPERKALPVRWITWMTYLEDPRIQFHYDKS |
| | | | LPELQQIPNVTEDVIAKTKHPSEFAMVFYTDGSAIKHPDVNKSHSAGMGIAQVQFIPEYKIVHQWSIPLGDHTAQLAEIAAVEFACKKALKISGPVLIVTDSFYVA |
| | | | ESANKELPYWKSNGFLNNKKKPLRHVSKWKSIAECLQLKPDIIIMHEKGHQQPMTTLHTEGNNLADKLATQGSYVVHAGKRTADGSEFEKRTADGSEFESPKKKAK |
| | | | VEGSGEGRGSLLTCGDVEENPG |

[1308] As shown in FIG. 37, several Cas-linker RT fusions comprising the linker domain (SGGSSGGSSGSETPGTSESATPESSGGSSGGSS; SEQ ID NO: 1589) showed appreciable genome editing activity (FIG. 37B). Further, by routinely extending screening to include variants of these Cas-linker-RT fusions described in Table 52 that comprise different linker domains (see Tables 38 and 42), different retroviral RT domains (see Table 44), and/or different NLS sequences (e.g., Table 39) as described herein, genome editing activity was generally detectable for at least one variant of a “parental” Cas-linker RT fusion (FIG. 37C). Within each subset of “parental” and variant RTs tested, the Cas-linker-RT fusions exhibited improved genome editing activity for at least one variant relative to the initial, parental fusion (FIG. 37D).

### Example 34: Multiplexing of a Gene Writer System to Simultaneously Edit Multiple Loci in a Human Cell

[1309] This example demonstrates the use of a Gene Writer system to edit multiple sites in the genome. In some applications, it may be of high value to be able to engineer multiple locations in the genome, e.g., to correct multiple genetic mutations or to optimize an engineered cell for cell therapy by performing multiple simultaneous modifications ex vivo or in vivo. In this example, a 3-plasmid system is utilized comprising: 1) a Gene Writer polypeptide expression plasmid, e.g., a plasmid encoding a Cas9 nickase fused to a reverse transcriptase (Cas-RT); 2) a Template plasmid, e.g., a plasmid encoding an expression cassette for a Template RNA that determines the genome site and the edit to instill at that site; and 3) a second-nick gRNA expression plasmid, e.g., a plasmid encoding an additional gRNA sequence to direct a second-strand nick for Cas9 at a location proximal to the target site.

[1310] In this example, two genome loci, the HBB gene and the human HEK3 locus, were targeted using gRNA comprising spacer sequences with identity to these sites to determine the ability to target multiple loci in parallel. To assess targeting of either locus separately or both simultaneously, cells were treated with different compositions of the Template plasmids to enable targeting of: 1) HEK3 alone, 2) HBB alone, or 3) both HBB and the HEK3 locus.

Specifically, 800 ng of plasmid encoding the Cas9-RT(MMLV) fusion (Table 46), 200 ng of plasmid encoding the HEK3-modifying Template (Template P2, Table 43) and/or plasmid encoding the HBB-modifying Template (Template P4, Table 43), and 83 ng of plasmid encoding the HEK3 second-nick gRNA (2gRNA P5, Table 43) and/or plasmid encoding the HBB second-nick gRNA (2gRNA P6, Table 43) were nucleofected using nucleofection program DS_150 into HEK293T cells. After nucleofection, cells were grown at 37° C., 5% CO₂ for 3 days prior to cell lysis and genomic DNA extraction. Primers specific to each locus were used to amplify the region and amplicons were sequenced using an Illumina MiSeq. Perfect correction and indel rates were analyzed using the CRISPResso2 pipeline (Clement et al Nat Biotechnol 37(3):224-226 (2019)) to determine Gene Writing efficacy. Table 51 lists the components of the Gene Writer System used in this example.

TABLE 51

| Name | Description | spacer | scaffold | RT + ins | PBS | Template RNA |
|---|---|---|---|---|---|---|
| Template | HEK3_8PBS_ | GGCCCA | GTTTTAGAGCT | TCTGC | CGTGCTC | GGCCCAGACTGAGCACGT |
| P1 | 10RT(CTTat1) | GACTGA | AGAAATAGCA | CATCA | A | GAGTTTTAGAGCTAGAAA |
| | | GCACGT | AGTTAAAATA | AAG | | TAGCAAGTTAAAATAAGG |
| | | GA (SEQ | AGGCTAGTCC | (SEQ | | CTAGTCCGTTATCAACTTG |
| | | ID NO: | GTTATCAACTT | ID NO: | | AAAAAGTGGCACCGAGTC |
| | | 3574) | GAAAAAGTGG | 3576) | | GGTGCTCTGCCATCAAAG |
| | | | CACCGAGTCG | | | CGTGCTCA (SEQ ID NO: |
| | | | GTGC (SEQ ID | | | 3577) |
| | | | NO: 3575) | | | |
| Template | HEK3_13PBS_ | GGCCCA | GTTTTAGAGCT | TCTGC | CGTGCTC | GGCCCAGACTGAGCACGT |
| P2 | 10RT(CTTat1) | GACTGA | AGAAATAGCA | CATCA | AGTCTG | GAGTTTTAGAGCTAGAAA |
| | | GCACGT | AGTTAAAATA | AAG | (SEQ ID | TAGCAAGTTAAAATAAGG |
| | | GA (SEQ | AGGCTAGTCC | (SEQ | NO: 3578) | CTAGTCCGTTATCAACTTG |
| | | ID NO: | GTTATCAACTT | ID NO: | | AAAAAGTGGCACCGAGTC |
| | | 3574) | GAAAAAGTGG | 3576) | | GGTGCTCTGCCATCAAAG |
| | | | CACCGAGTCG | | | CGTGCTCAGTCTG (SEQ ID |
| | | | GTGC (SEQ ID | | | NO: 3579) |
| | | | NO: 3575) | | | |
| Template | HEK3_17PBS_ | GGCCCA | GTTTTAGAGCT | TCTGC | CGTGCTC | GGCCCAGACTGAGCACGT |
| P3 | 10RT(CTTat1) | GACTGA | AGAAATAGCA | CATCA | AGTCTG | GAGTTTTAGAGCTAGAAA |
| | | GCACGT | AGTTAAAATA | AAG | GGCC | TAGCAAGTTAAAATAAGG |
| | | GA (SEQ | AGGCTAGTCC | (SEQ | (SEQ ID | CTAGTCCGTTATCAACTTG |
| | | ID NO: | GTTATCAACTT | ID NO: | NO: 3580) | AAAAAGTGGCACCGAGTC |
| | | 3574) | GAAAAAGTGG | 3576) | | GGTGCTCTGCCATCAAAG |
| | | | CACCGAGTCG | | | CGTGCTCAGTCTGGGCC |
| | | | GTGC (SEQ ID | | | (SEQ ID NO: 3581) |
| | | | NO: 3575) | | | |
| Template | HBB_13PBS_ | GCATGG | GTTTTAGAGCT | AGAC | GAGTCA | GCATGGTGCACCTGACTC |
| P4 | 1ORT(TtoAat4) | TGCACC | AGAAATAGCA | TTCTC | GGTGCA | CTGGTTTTAGAGCTAGAA |
| | | TGACTC | AGTTAAAATA | CACA | C (SEQ ID | ATAGCAAGTTAAAATAAG |
| | | CTG | AGGCTAGTCC | G (SEQ | NO: 3584) | GCTAGTCCGTTATCAACTT |
| | | (SEQ ID | GTTATCAACTT | ID NO: | | GAAAAAGTGGCACCGAGT |
| | | NO: 3582) | GAAAAAGTGG | 3583) | | CGGTGCAGACTTCTCCAC |
| | | | CACCGAGTCG | | | AGGAGTCAGGTGCAC |
| | | | GTGC (SEQ ID | | | (SEQ ID NO: 3585) |
| | | | NO: 3575) | | | |
| 2gRNA | HEK3_+90 | GTCAAC | GTTTTAGAGCT | NA | NA | NA |
| P5 | | CAGTAT | AGAAATAGCA | | | |
| | | CCCGGT | AGTTAAAATA | | | |
| | | GC (SEQ | AGGCTAGTCC | | | |
| | | ID NO: | GTTATCAACTT | | | |
| | | 1717) | GAAAAAGTGG | | | |
| | | | CACCGAGTCG | | | |
| | | | GTGC (SEQ ID | | | |
| | | | NO: 3575) | | | |
| 2gRNA | HBB_+72 | GCCTTG | GTTTTAGAGCT | NA | NA | NA |
| P6 | | ATACCA | AGAAATAGCA | | | |
| | | ACCTGC | AGTTAAAATA | | | |
| | | CCA | AGGCTAGTCC | | | |
| | | (SEQ ID | GTTATCAACTT | | | |
| | | NO: 3586) | GAAAAAGTGG | | | |
| | | | CACCGAGTCG | | | |
| | | | GTGC (SEQ ID | | | |
| | | | NO: 3575) | | | |
| gRNA | g19_AAVS1 | GTCCCC | GTTTTAGAGCT | NA | NA | NA |
| P7 | | TCCACC | AGAAATAGCA | | | |
| | | CCACAG | AGTTAAAATA | | | |
| | | TG (SEQ | AGGCTAGTCC | | | |
| | | ID NO: | GTTATCAACTT | | | |
| | | 3587) | GAAAAAGTGG | | | |
| | | | CACCGAGTCG | | | |
| | | | GTGC (SEQ ID | | | |
| | | | NO: 3575) | | | |

When tested independently, both targets saw a high degree of precise correction, with approximately 36% editing in HEK3 and 23% editing in HBB (FIG. 38). Further, when targeted at the same time, approximately 34% editing of HEK3 and 14% editing of HBB target sites was achieved with precise correction conferred by the respective Template RNAs. Additionally, insertions and deletions were observed with low frequency in all conditions, with indels for each locus reaching similar levels when tested alone or in combination. Though not the express intent of this example, the lack of increase in indels during simultaneous editing is a positive indicator for the potential to increase the number of loci targetable in parallel without compromising the precision of each individual edit.

### Example 35: Delivery of DNA-Free Gene Writer Systems Through Nucleofection of Human Cells

[1311] This example describes the application of a Gene Writer system to edit the genome in human cells via delivery of RNA components, e.g., mRNA encoding the Gene Writer polypeptide and an RNA template. Without wishing to be bound by theory, the ability to deliver only RNA components in the absence of DNA is expected to confer major advantages to this system, including a reduction in immunogenicity and cellular toxicity linked to the detection of DNA in the cytoplasm and the availability of lipid nanoparticles systems described herein, the majority of which are optimized for RNA delivery, that can circumvent issues associated with viral delivery of nucleic acid therapeutics (e.g., manufacturing challenges, pre-existing immunity, immunogenic response to viral proteins). The reduction in cellular toxicity through use of an RNA system may be especially important for the modification of more sensitive cell types, such as primary cells. Further, nucleofection may be an effective method of delivering these systems to a patient's cells, e.g., for ex vivo cell engineering. Thus, it is of significant value to demonstrate the capacity of a Gene Writing system to function appropriately when delivered as all RNA and in the absence of DNA. Specifically, this example demonstrates delivery of an all-RNA Gene Writing system to modify the genome of HEK293T cells. To demonstrate RNA-based Gene Writing is not limited to a single composition, two versions of a Cas-RT fusion polypeptide are employed that comprise an RT domain derived from either Moloney murine leukemia virus (Cas9-RT(MMLV)) or porcine endogenous retrovirus (Cas9-RT(PERV)) (Table 46).

[1312] Gene Writer polypeptide-encoding mRNAs (1) were generated using T7 polymerase-driven in vitro transcription. In general, plasmids encoding the mRNA constructs comprised a transcriptional cassette comprising the following components: T7 promoter, 5′UTR, Gene Writer coding sequence (Cas9 nickase fused with a reverse transcriptase by a peptide linker and further comprising a nuclear localization signal), 3′UTR, and an 80 nt polyA tail (SEQ ID NO: 3782). In this example, RNA molecules were prepared using unmodified nucleotides from linearized plasmid template. The mRNAs encoding Cas9-RT(MMLV) or Cas9-RT(PERV) (Table 47) were co-transcriptionally capped with CleanCap AG (TriLink BioTechnologies).

[1313] Gene Writer Template RNAs (2) encoding genomic edits were generated by chemical synthesis and purified by standard desalting. The first and last three bases of each Template RNA comprised 2′-O-methyl phosphorothioate modifications. Template RNAs of varying length were designed to introduce different mutations into the human HEK3 locus (Table 48).

[1314] Where indicated, second nick gRNAs (3) were generated by chemical synthesis and comprised the following sequence modifications:

(SEQ ID NO: 3588)
mG*mC*mA*rGrArArArUrArGrArCrUrArArUrUrGrCrArGrUr
UrUrUrArGrArGrCrUrArGrArArArUrArGrCrArArGrUrUrAr
ArArArUrArArGrGrCrUrArGrUrCrCrGrUrUrArUrCrArArCr
UrUrGrArArArArArGrUrGrGrCrArCrCrGrArGrUrCrGrGrUr
GrCmU*mU*mU*rU.

[1315] To assay the RNA Gene Writing systems described herein, HEK293T cells were plated 2 days before nucleofection to obtain 70-80% confluency on the day of nucleofection. RNAs were mixed according to the following combinations: i) Cas9-RT mRNA (1) only; ii) Cas9-RT mRNA (1), template RNA (2), and second nick gRNA (3); or iii) Cas9-RT mRNA (1) and template RNA (2). RNA mixes comprised 4.5 μg of the Cas9-RT mRNA (1), 5 μM final concentration of template RNA (2), and 1.3 μM final concentration of second nick gRNA (3). Mixes were nucleofected into approximately 200,000 cells using the Lonza Amaxa Nucleofector 96 Well Shuttle System, as according to manufacturer's protocols. Cells were then lysed and genomic DNA was collected 72 hours after nucleofection. Amplicon sequencing libraries were prepared using primers to amplify across the target site and Illumina sequencing was performed. Precise correction and indel rates were analyzed using the CRISPResso2 pipeline (Clement et al Nat Biotechnol 37(3):224-226 (2019)).

[1316] In these experiments, approximately 20% precise Writing activity was achieved with Cas9-RT(MMLV) using Template 1 (Table 48). A drop in activity was observed for templates that were longer than 120 nt in length; Template 4, which encoded the same edit as Template 1, but with an addition of 20 nt at the 3′ end of the RT template, showed an approximately 3.1-fold drop in precise Writing activity and an approximately 2.4-fold drop in the ratio of precise corrections to indels (FIG. 39). The use of Cas9-RT-encoding mRNAs with different UTRs and capping approaches produced similar levels of activity, though there was a slight increase with mRNA-5 (Table 49; FIG. 40). The all-RNA nucleofection of the Gene Writer Cas9-RT(PERV) with Template 1 and the second-nick gRNA further resulted in a precise Writing efficiency of approximately 7% (FIG. 41). Across the experiments of this example, the addition of the second-nick gRNA resulted in an increase in Writing activity.

[1317] Table 48 provides sequences of Template RNA molecules used in all-RNA Gene Writing Examples. The spacer sequence of each Template RNA described here was kept constant and comprised 20 nt (5′-GGCCCAGACTGAGCACGTGA-3′ (SEQ ID NO: 3574)) of 100% identity to a target site in the human HEK3 locus (also known as LINC01509) (sequence maps to NC_000009.12:107422339 . . . 107422358, assembly GRCh38.p13). A Template RNA will typically comprise the components shown in the table, such that spacer+scaffold+RT+edit+PBS+Tail can yield the complete molecule.

TABLE 48
Template RNAs used in various Examples disclosed herein

| | | | | | | | TemplateRNA | RNA | |
|---|---|---|---|---|---|---|---|---|---|
| Name | Description | spacer | scaffold | RT + edit | PBS | Tail | Combined | Sequence | Length |
| Tem- | HEK3_13PBS_ | GGCC | GTTT | TCTG | CGT | TTTT | GGCC | mG*mG*mC*r | 126 |
| plate | 10RT(CTTat1) | CAGA | TAGA | CCAT | GCT | | CAGA | CrCrArGrAr | |
| 1 | | CTGA | GCTA | CAAA | CA | | CTGA | CrUrGrArGr | |
| | | GCAC | GAAA | G | GTC | | GCAC | CrArCrGrUr | |
| | | GTGA | TAGC | (SEQ ID | TG | | GTGA | GrArGrUrUr | |
| | | (SEQ | AAGT | NO: 3576) | (SEQ | | GTTT | UrUrArGrAr | |
| | | ID | TAAA | | ID | | TAGA | GrCrUrArGr | |
| | | NO: | ATAA | | NO: | | GCTA | ArArArUrAr | |
| | | 3574) | GGCT | | 3578) | | GAAA | GrCrArArGr | |
| | | | AGTC | | | | TAGC | UrUrArArAr | |
| | | | CGTT | | | | AAGT | ÅrUrArArGr | |
| | | | ATCA | | | | TAAA | GrCrUrArGr | |
| | | | ACTT | | | | ATAA | UrCrCrGrUr | |
| | | | GAAA | | | | GGCT | UrArUrCrAr | |
| | | | AAGT | | | | AGTC | ArCrUrUrGr | |
| | | | GGCA | | | | CGTT | ArArArArAr | |
| | | | CCGA | | | | ATCA | GrUrGrGrCr | |
| | | | GTCG | | | | ACTT | ArCrCrGrAr | |
| | | | GTGC | | | | GAAA | GrUrCrGrGr | |
| | | | (SEQ ID | | | | AAGT | UrGrCrUrCr | |
| | | | NO: 3575) | | | | GGCA | UrGrCrCrAr | |
| | | | | | | | CCGA | UrCrArArAr | |
| | | | | | | | GTCG | GrCrGrUrGr | |
| | | | | | | | GTGC | CrUrCrArGr | |
| | | | | | | | TCTG | UrCrUrGrU* | |
| | | | | | | | CCAT | mU*mU*mU | |
| | | | | | | | CAAA | (SEQ ID | |
| | | | | | | | GCGT | NO: 3590) | |
| | | | | | | | GCTC | | |
| | | | | | | | AGTC | | |
| | | | | | | | TGTT | | |
| | | | | | | | TT | | |
| | | | | | | | (SEQ | | |
| | | | | | | | ID | | |
| | | | | | | | NO: | | |
| | | | | | | | 3589) | | |
| Tem- | HEK3_13PBS_ | GGCC | GTTT | TCTG | CGT | TTTT | GGCC | mG*mG*mC*r | 133 |
| plate | 10RT | CAGA | TAGA | CCAT | GCT | | CAGA | CrCrArGrAr | |
| 2 | (10nts at1) | CTGA | GCTA | CACA | CA | | CTGA | CrUrGrArGr | |
| | | GCAC | GAAA | TGTA | GTC | | GCAC | CrArCrGrUr | |
| | | GTGA | TAGC | GTTG | TG | | GTGA | GrArGrUrUr | |
| | | (SEQ | AAGT | (SEQ ID | (SEQ | | GTTT | UrUrArGrAr | |
| | | ID | TAAA | NO: 3591) | ID | | TAGA | GrCrUrArGr | |
| | | NO: | ATAA | | NO: | | GCTA | ArArArUrAr | |
| | | 3574) | GGCT | | 3578) | | GAAA | GrCrArArGr | |
| | | | AGTC | | | | TAGC | UrUrArArAr | |
| | | | CGTT | | | | AAGT | ArUrArArGr | |
| | | | ATCA | | | | TAAA | GrCrUrArGr | |
| | | | ACTT | | | | ATAA | UrCrCrGrUr | |
| | | | GAAA | | | | GGCT | UrArUrCrAr | |
| | | | AAGT | | | | AGTC | ArCrUrUrGr | |
| | | | GGCA | | | | CGTT | ArArArArAr | |
| | | | CCGA | | | | ATCA | GrUrGrGrCr | |
| | | | GTCG | | | | ACTT | ArCrCrGrAr | |
| | | | GTGC | | | | GAAA | GrUrCrGrGr | |
| | | | (SEQ ID | | | | AAGT | UrGrCrUrCr | |
| | | | NO: 3575) | | | | GGCA | UrGrCrCrAr | |
| | | | | | | | CCGA | UrCrArCrAr | |
| | | | | | | | GTCG | UrGrUrArGr | |
| | | | | | | | GTGC | UrUrGrCrGr | |
| | | | | | | | TCTG | UrGrCrUrCr | |
| | | | | | | | CCAT | ArGrUrCrUr | |
| | | | | | | | CACA | GrU*mU*mU* | |
| | | | | | | | TGTA | mU (SEQ ID | |
| | | | | | | | GTTG | NO: 3593) | |
| | | | | | | | CGTG | | |
| | | | | | | | CTCA | | |
| | | | | | | | GTCT | | |
| | | | | | | | GTTT | | |
| | | | | | | | T | | |
| | | | | | | | (SEQ | | |
| | | | | | | | ID | | |
| | | | | | | | NO: | | |
| | | | | | | | 3592) | | |
| Tem- | HEK3_13PBS_ | GGCC | GTTT | TCTG | CGT | TTTT | GGCC | mG*mG*mC*r | 143 |
| plate | 10RT | CAGA | TAGA | CCAT | GCT | | CAGA | CrCr | |
| 3 | (20nts at1) | CTGA | GCTA | CACA | CA | | CTGA | ArGrArCrUr | |
| | | GCAC | GAAA | TGTA | GTC | | GCAC | GrArGrCrAr | |
| | | GTGA | TAGC | GTTG | TG | | GTGA | CrGrUrGrAr | |
| | | (SEQ | AAGT | AGGT | (SEQ | | GTTT | GrUrUrUrUr | |
| | | NO: | TAAA | CAAT | ID | | TAGA | ArGrArGrCr | |
| | | 3574) | ATAA | GA | NO: | | GCTA | UrArGrArAr | |
| | | | GGCT | (SEQ ID | 3578) | | GAAA | ArUrArGrCr | |
| | | | AGTC | NO:3594) | | | TAGC | ArArGrUrUr | |
| | | | CGTT | | | | AAGT | ArArArArUr | |
| | | | ATCA | | | | TAAA | ArArGrGrCr | |
| | | | ACTT | | | | ATAA | UrArGrUrCr | |
| | | | GAAA | | | | GGCT | CrGrUrUrAr | |
| | | | AAGT | | | | AGTC | UrCrArArCr | |
| | | | GGCA | | | | CGTT | UrUrGrArAr | |
| | | | CCGA | | | | ATCA | ArArArGrUr | |
| | | | GTCG | | | | ACTT | GrGrCrArCr | |
| | | | GTGC | | | | GAAA | CrGrArGrUr | |
| | | | (SEQ ID | | | | AAGT | CrGrGrUrGr | |
| | | | NO: 3575) | | | | GGCA | CrUrCrUrGr | |
| | | | | | | | CCGA | CrCrArUrCr | |
| | | | | | | | GTCG | ArCrArUrGr | |
| | | | | | | | GTGC | UrArGrUrUr | |
| | | | | | | | TCTG | GrArGrGrUr | |
| | | | | | | | CCAT | CrArArUrGr | |
| | | | | | | | CACA | ArCrGrUrGr | |
| | | | | | | | TGTA | CrUrCrArGr | |
| | | | | | | | GTTG | UrCrUrGrU | |
| | | | | | | | AGGT | *mU*mU*mU | |
| | | | | | | | CAAT | (SEQ | |
| | | | | | | | GACG | ID NO: | |
| | | | | | | | TGCT | 3596) | |
| | | | | | | | CAGT | | |
| | | | | | | | CTGT | | |
| | | | | | | | TTT | | |
| | | | | | | | (SEQ | | |
| | | | | | | | ID | | |
| | | | | | | | NO: | | |
| | | | | | | | 3595) | | |
| Tem- | HEK3_13PBS_ | GGCC | GTTT | GGAA | CGT | TTTT | GGCC | mG*mG*mC*r | 146 |
| plate | 30RT | CAGA | TAGA | GCAG | GCT | | CAGA | CrCrArGrAr | |
| 4 | (CTTat1) | CTGA | GCTA | GGCT | CA | | CTGA | CrUrGrArGr | |
| | | GCAC | GAAA | TCCT | GTC | | GCAC | CrArCrGrUr | |
| | | GTGA | TAGC | TTCC | TG | | GTGA | GrArGrUrUr | |
| | | (SEQ | AAGT | TCTG | (SEQ | | GTTT | UrUrArGrAr | |
| | | ID | TAAA | CCAT | ID | | TAGA | GrCrUrArGr | |
| | | NO: | ATAA | CAAA | NO: | | GCTA | ArArArUrAr | |
| | | 3574) | GGCT | G | 3578) | | GAAA | GrCrArArGr | |
| | | | AGTC | (SEQ ID | | | TAGC | UrUrArArAr | |
| | | | CGTT | NO: 3597) | | | AAGT | ÅrUrArArGr | |
| | | | ATCA | | | | TAAA | GrCrUrArGr | |
| | | | ACTT | | | | ATAA | UrCrCrGrUr | |
| | | | GAAA | | | | GGCT | UrArUrCrAr | |
| | | | AAGT | | | | AGTC | ArCrUrUrGr | |
| | | | GGCA | | | | CGTT | ArArArArAr | |
| | | | CCGA | | | | ATCA | GrUrGrGrCr | |
| | | | GTCG | | | | ACTT | ArCrCrGrAr | |
| | | | GTGC | | | | GAAA | GrUrCrGrGr | |
| | | | (SEQ ID | | | | AAGT | UrGrCrGrGr | |
| | | | NO: 3575) | | | | GGCA | ArArGrCrAr | |
| | | | | | | | CCGA | GrGrGrCrUr | |
| | | | | | | | GTCG | UrCrCrUrUr | |
| | | | | | | | GTGC | UrCrCrUrCr | |
| | | | | | | | GGAA | UrGrCrCrAr | |
| | | | | | | | GCAG | UrCrArArAr | |
| | | | | | | | GGCT | GrCrGrUrGr | |
| | | | | | | | TCCT | CrUrCrArGr | |
| | | | | | | | TTCC | UrCrUtGrU* | |
| | | | | | | | TCTG | mU*mU*mU | |
| | | | | | | | CCAT | (SEQ ID NO: | |
| | | | | | | | CAAA | 3599) | |
| | | | | | | | GCGT | | |
| | | | | | | | GCTC | | |
| | | | | | | | AGTC | | |
| | | | | | | | TGTT | | |
| | | | | | | | TT | | |
| | | | | | | | (SEQ | | |
| | | | | | | | ID | | |
| | | | | | | | NO: | | |
| | | | | | | | 3598) | | |
| Tem- | HEK3_13PBS_ | GGCC | GTTT | GGAA | CGT | TTTT | GGCC | mG*mG*mC*r | 153 |
| plate | 30RT | CAGA | TAGA | GCAG | GCT | | CAGA | CrCrArGrAr | |
| 5 | (10nts at1) | CTGA | GCTA | GGCT | CA | | CTGA | CrUrGrArGr | |
| | | GCAC | GAAA | TCCT | GTC | | GCAC | CrArCrGrUr | |
| | | GTGA | TAGC | TTCC | TG | | GTGA | GrArGrUrUr | |
| | | (SEQ | AAGT | TCTG | (SEQ | | GTTT | UrUrArGrAr | |
| | | ID | TAAA | CCAT | ID | | TAGA | GrCrUrArGr | |
| | | NO: | ATAA | CACA | NO: | | GCTA | ArArArUrAr | |
| | | 3574) | GGCT | TGTA | 3578) | | GAAA | GrCrArArGr | |
| | | | AGTC | GTTG | | | TAGC | UrUrArArAr | |
| | | | CGTT | (SEQ ID | | | AAGT | ArUrArArGr | |
| | | | ATCA | NO: 3600) | | | TAAA | GrCrUrArGr | |
| | | | ACTT | | | | ATAA | UrCrCrGrUr | |
| | | | GAAA | | | | GGCT | UrArUrCrAr | |
| | | | AAGT | | | | AGTC | ArCrUrUrGr | |
| | | | GGCA | | | | CGTT | ArArArArAr | |
| | | | CCGA | | | | ATCA | GrUrGrGrCr | |
| | | | GTCG | | | | ACTT | ArCrCrGrAr | |
| | | | GTGC | | | | GAAA | GrUrCrGrGr | |
| | | | (SEQ ID | | | | AAGT | UrGrCrGrGr | |
| | | | NO: 3575) | | | | GGCA | ArArGrCrAr | |
| | | | | | | | CCGA | GrGrGrCrUr | |
| | | | | | | | GTCG | UrCrCrUrUr | |
| | | | | | | | GTGC | UrCrCrUrCr | |
| | | | | | | | GGAA | UrGrCrCrAr | |
| | | | | | | | GCAG | UrCrArCrAr | |
| | | | | | | | GGCT | UrGrUrArGr | |
| | | | | | | | TCCT | UrUrGrCrGr | |
| | | | | | | | TTCC | UrGrCrUrCr | |
| | | | | | | | TCTG | ArGrUrCrUr | |
| | | | | | | | CCAT | GrU*mU*mU* | |
| | | | | | | | CACA | mU (SEQ ID | |
| | | | | | | | TGTA | NO: 3602) | |
| | | | | | | | GTTG | | |
| | | | | | | | CGTG | | |
| | | | | | | | CTCA | | |
| | | | | | | | GTCT | | |
| | | | | | | | GTTT | | |
| | | | | | | | T | | |
| | | | | | | | (SEQ | | |
| | | | | | | | ID | | |
| | | | | | | | NO: | | |
| | | | | | | | 3601) | | |
| Tem- | HEK3_13PBS_ | GGCC | GTTT | GGAA | CGT | TTTT | GGCC | mG*mG*mC*r | 163 |
| plate | 30RT | CAGA | TAGA | GCAG | GCT | | CAGA | CrCrArGrAr | |
| 6 | (20nts at1) | CTGA | GCTA | GGCT | CA | | CTGA | CrUrGrArGr | |
| | | GCAC | GAAA | TCCT | GTC | | GCAC | CrArCrGrUr | |
| | | GTGA | TAGC | TTCC | TG | | GTGA | GrArGrUrUr | |
| | | (SEQ | AAGT | TCTG | (SEQ | | GTTT | UrUrArGrAr | |
| | | ID | TAAA | CCAT | ID | | TAGA | GrCrUrArGr | |
| | | NO: | ATAA | CACA | NO: | | GCTA | ArArArUrAr | |
| | | 3574) | GGCT | TGTA | 3578) | | GAAA | GrCrArArGr | |
| | | | AGTC | GTTG | | | TAGC | UrUrArArAr | |
| | | | CGTT | AGGT | | | AAGT | ArUrArArGr | |
| | | | ATCA | CAAT | | | TAAA | GrCrUrArGr | |
| | | | ACTT | GA | | | ATAA | UrCrCrGrUr | |
| | | | GAAA | (SEQ ID | | | GGCT | UrArUrCrAr | |
| | | | AAGT | NO: 3603) | | | AGTC | ArCrUrUrGr | |
| | | | GGCA | | | | CGTT | ArArArArAr | |
| | | | CCGA | | | | ATCA | GrUrGrGrCr | |
| | | | GTCG | | | | ACTT | ArCrCrGrAr | |
| | | | GTGC | | | | GAAA | GrUrCrGrGr | |
| | | | (SEQ ID | | | | AAGT | UrGrCrGrGr | |
| | | | NO: 3575) | | | | GGCA | ArArGrCrAr | |
| | | | | | | | CCGA | GrGrGrCrUr | |
| | | | | | | | GTCG | UrCrCrUrUr | |
| | | | | | | | GTGC | UrCrCrUrCr | |
| | | | | | | | GGAA | UrGrCrCrAr | |
| | | | | | | | GCAG | UrCrArCrAr | |
| | | | | | | | GGCT | UrGrUrArGr | |
| | | | | | | | TCCT | UrUrGrArGr | |
| | | | | | | | TTCC | GrUrCrArAr | |
| | | | | | | | TCTG | UrGrArCrGr | |
| | | | | | | | CCAT | UrGrCrUrCr | |
| | | | | | | | CACA | ArGrUrCrUr | |
| | | | | | | | TGTA | GrU*mU*mU* | |
| | | | | | | | GTTG | mU(SEQ ID | |
| | | | | | | | AGGT | NO: 3605) | |
| | | | | | | | CAAT | | |
| | | | | | | | GACG | | |
| | | | | | | | TGCT | | |
| | | | | | | | CAGT | | |
| | | | | | | | CTGT | | |
| | | | | | | | TTT | | |
| | | | | | | | (SEQ | | |
| | | | | | | | ID | | |
| | | | | | | | NO: | | |
| | | | | | | | 3604) | | |

TABLE 49
Different production and compositions of Gene Writer
polypeptide mRNAs used in various Examples

| | | | | | | SEQ | | SEQ |
|---|---|---|---|---|---|---|---|---|
| | Transcription | | | Modified | | ID | | ID |
| Name | template | Capping | Poly A | NTPs | 5′ UTR | NO: | 3′ UTR | NO: |
| mRNA-1 | PCR | CleanCap | Added | None | AGGAAA | 3606 | GCTGGAGCCTCG | 3607 |
| | amplicon | (AG); co- | during | | TAAGAG | | GTGGCCATGCTTC | |
| | | transcrip- | amplifi- | | AGAAAA | | TTGCCCCTTGGGC | |
| | | tional | cation | | GAAGAG | | CTCCCCCCAGCCC | |
| | | | | | TAAGAA | | CTCCTCCCCTTCC | |
| | | | | | GAAATA | | TGCACCCGTACCC | |
| | | | | | TAAGAG | | CCGTGGTCTTTGA | |
| | | | | | CCACC | | ATAAAGTCTGA | |
| mRNA-2 | PCR | CleanCap | Added | 5moU | AGGAAA | 3606 | GCTGGAGCCTCG | 3607 |
| | amplicon | (AG); co- | during | | TAAGAG | | GTGGCCATGCTTC | |
| | | transcrip- | amplifi- | | AGAAAA | | TTGCCCCTTGGGC | |
| | | tional | cation | | GAAGAG | | CTCCCCCCAGCCC | |
| | | | | | TAAGAA | | CTCCTCCCCTTCC | |
| | | | | | GAAATA | | TGCACCCGTACCC | |
| | | | | | TAAGAG | | CCGTGGTCTTTGA | |
| | | | | | CCACC | | ATAAAGTCTGA | |
| mRNA-3 | PCR | Enzymatic, | Added | None | GGGAAA | 3608 | GCTGGAGCCTCG | 3607 |
| | amplicon | 2′O | during | | TAAGAG | | GTGGCCATGCTTC | |
| | | Methylated | amplifi- | | AGAAAA | | TTGCCCCTTGGGC | |
| | | (Cap1); | cation | | GAAGAG | | CTCCCCCCAGCCC | |
| | | post- | | | TAAGAA | | CTCCTCCCCTTCC | |
| | | transcrip- | | | GAAATA | | TGCACCCGTACCC | |
| | | tional | | | TAAGAG | | CCGTGGTCTTTGA | |
| | | | | | CCACC | | ATAAAGTCTGA | |
| mRNA-4 | PCR | Enzymatic, | Added | 5moU | GGGAAA | 3608 | GCTGGAGCCTCG | 3607 |
| | amplicon | 2′O | during | | TAAGAG | | GTGGCCATGCTTC | |
| | | Methylated | amplifi- | | AGAAAA | | TTGCCCCTTGGGC | |
| | | (Cap1); | cation | | GAAGAG | | CTCCCCCCAGCCC | |
| | | post- | | | TAAGAA | | CTCCTCCCCTTCC | |
| | | transcrip- | | | GAAATA | | TGCACCCGTACCC | |
| | | tional | | | TAAGAG | | CCGTGGTCTTTGA | |
| | | | | | CCACC | | ATAAAGTCTGA | |
| mRNA-5 | Linearized | CleanCap | Plasmid - | None | AGGAAA | 3606 | GCTGCCTTCTGCG | 3609 |
| | plasmid | (AG); co- | encoded | | TAAGAG | | GGGCTTGCCTTCT | |
| | | transcrip- | | | AGAAAA | | GGCCATGCCCTTC | |
| | | tional | | | GAAGAG | | TTCTCTCCCTTGC | |
| | | | | | TAAGAA | | ACCTGTACCTCTT | |
| | | | | | GAAATA | | GGTCTTTGAATAA | |
| | | | | | TAAGAG | | AGCCTGAGTAGG | |
| | | | | | CCACC | | AAGTCTA | |

### Example 36: Use of Modified Nucleotides in an All-RNA Gene Writer System

[1318] This example describes the application of a Gene Writer system to edit the genome in human cells via delivery of RNA components, e.g., mRNA encoding the Gene Writer polypeptide and an RNA template. Further to the demonstration of the DNA-free system in Example 35, this example describes the incorporation of modified nucleotides, e.g., 5-methoxyuridine, into the mRNA encoding the Gene Writer polypeptide, and the incorporation of modified nucleotides, e.g. 2′-O-methyl phosphorothioate, into the Gene Writer template RNA.

[1319] Gene Writer polypeptide-encoding mRNAs (1) were generated using T7 polymerase-driven in vitro transcription of an amplicon generated from a plasmid by PCR. The plasmid encoding the mRNA construct comprised a transcriptional cassette comprising the following components: T7 promoter, 5′UTR, Gene Writer coding sequence (Cas9 nickase fused with a reverse transcriptase by a peptide linker and further comprising a bipartite SV40 NLS), and a 3′UTR. A poly A tail component was added such that it was encoded in the amplicon serving as the template for RNA transcription. In this example, mRNA molecules were prepared by incorporating one modified nucleotide, 5-methoxyuridine (5moU), into the transcription reaction. The mRNA encoding Cas9-RT(MMLV) (Table 47) was capped either co-transcriptionally with CleanCap AG (TriLink BioTechnologies) or post-transcriptionally via enzymatic capping (2′O methylated, Cap1) (Table 49).

[1320] Gene Writer Template RNAs (2) encoding genomic edits were generated by chemical synthesis and purified by standard desalting. The first and last three bases of each Template RNA comprised 2′-O-methyl phosphorothioate modifications. Here, Template 1 was used to introduce a CTT insertion into the human HEK3 locus (Table 48).

[1321] Where indicated, second nick gRNAs (3) were generated by chemical synthesis and comprised the following sequence modifications:

(SEQ ID NO: 3588)
mG*mC*mA*rGrArArArUrArGrArCrUrArArUrUrGrCrArGrUr
UrUrUrArGrArGrCrUrArGrArArArUrArGrCrArArGrUrUrAr
ArArArUrArArGrGrCrUrArGrUrCrCrGrUrUrArUrCrArArCr
UrUrGrArArArArArGrUrGrGrCrArCrCrGrArGrUrCrGrGrUr
GrCmU*mU*mU*rU.

[1322] To assay the RNA Gene Writing systems described herein, HEK293T cells were plated 2 days before nucleofection to obtain 70-80% confluency on the day of nucleofection. RNAs were mixed according to the following combinations: i) Cas9-RT mRNA (1) only; ii) Cas9-RT mRNA (1), template RNA (2), and second nick gRNA (3); or iii) Cas9-RT mRNA (1) and template RNA (2). RNA mixes comprised 4.5 μg of the Cas9-RT mRNA (1), 5 μM final concentration of template RNA (2), and 1.3 μM final concentration of second nick gRNA (3). Mixes were nucleofected into approximately 200,000 cells using the Lonza Amaxa Nucleofector 96 Well Shuttle System, as according to manufacturer's protocols. Cells were then lysed and genomic DNA was collected 72 hours after nucleofection. Amplicon sequencing libraries were prepared using primers to amplify across the target site and Illumina sequencing was performed. Precise correction and indel rates were analyzed using the CRISPResso2 pipeline (Clement et al Nat Biotechnol 37(3):224-226 (2019)).

[1323] In these experiments, approximately 20% precise Writing activity was achieved using an all RNA Gene Writing system that incorporated modified nucleotides (5moU) in the mRNA encoding the Gene Writer polypeptide (FIG. 42). Notably, the incorporation of the modified nucleotide 5moU did not result in an observable inhibitory effect on Writing efficiency. Similar efficiencies resulted from the mRNA capping methods assayed here (see Table 49). A slight decrease in efficiency was observed in the absence of a second nick gRNA (FIG. 42).

### Example 37: Delivery of DNA-Free Gene Writer Systems Through Lipid-Based Transfection of Human Cells

[1324] This example describes the application of a Gene Writer system to edit the genome in human cells via delivery of RNA components, e.g., mRNA encoding the Gene Writer polypeptide and an RNA template. Without wishing to be bound by theory, the ability to deliver only RNA components in the absence of DNA is expected to confer major advantages to this system, including a reduction in immunogenicity and cellular toxicity linked to the detection of DNA in the cytoplasm and the availability of lipid nanoparticles systems described herein, the majority of which are optimized for RNA delivery, that can circumvent issues associated with viral delivery of nucleic acid therapeutics (e.g., manufacturing challenges, pre-existing immunity, immunogenic response to viral proteins). The reduction in cellular toxicity through use of an RNA system may be especially important for the modification of more sensitive cell types, such as primary cells. Lipid transfection reagents may be utilized directly for ex vivo cell engineering and lipid-based nanoparticles are suitable for in vivo RNA delivery to a patient's cells. Thus, it is of significant value to demonstrate the capacity of a Gene Writing system to function appropriately when delivered as all RNA and in the absence of DNA. Specifically, this example demonstrates delivery of an all RNA Gene Writing system to modify the genome of HEK293T cells using the lipid-based transfection reagents Lipofectamine 3000 and MessengerMAX (Invitrogen). To demonstrate RNA-based Gene Writing is not limited to a single composition, two versions of a Cas-RT fusion polypeptide are employed that comprise an RT domain derived from either Moloney murine leukemia virus (Cas9-RT(MMLV)) or porcine endogenous retrovirus (Cas9-RT(PERV)) (Table 46).

[1325] Gene Writer polypeptide-encoding mRNAs (1) were generated using T7 polymerase-driven in vitro transcription. In general, plasmids encoding the mRNA constructs comprised a transcriptional cassette comprising the following components: T7 promoter, 5′UTR, Gene Writer coding sequence (Cas9 nickase fused with a reverse transcriptase by a peptide linker and further comprising a nuclear localization signal), 3′UTR, and an 80 nt polyA tail (SEQ ID NO: 3782). In this example, RNA molecules were prepared using unmodified nucleotides from either linearized plasmid template or using a PCR amplicon of the transcriptional cassette described above. The mRNA encoding Cas9-RT(MMLV) was capped either co-transcriptionally with CleanCap AG (TriLink BioTechnologies) or post-transcriptionally via enzymatic capping (2′O methylated, Cap1) (Table 49). The mRNA encoding Cas9-RT(PERV) was generated from plasmid template and co-transcriptionally capped with CleanCap AG (TriLink BioTechnologies) (Table 47).

[1326] Gene Writer Template RNAs (2) encoding genomic edits were generated by chemical synthesis and purified by standard desalting. The first and last three bases of each Template RNA comprised 2′-O-methyl phosphorothioate modifications. Here, Template 1 was used to introduce a CTT insertion into the human HEK3 locus (Table 48).

[1327] Where indicated, second nick gRNAs (3) were generated by chemical synthesis and comprised the following sequence modifications:

(SEQ ID NO: 3588)
mG*mC*mA*rGrArArArUrArGrArCrUrArArUrUrGrCrArGrUr
UrUrUrArGrArGrCrUrArGrArArArUrArGrCrArArGrUrUrAr
ArArArUrArArGrGrCrUrArGrUrCrCrGrUrUrArUrCrArArCr
UrUrGrArArArArArGrUrGrGrCrArCrCrGrArGrUrCrGrGrUr
GrCmU*mU*mU*rU.

[1328] To assay the RNA Gene Writing systems described herein, approximately 50,000 HEK293T cells were plated in 24-well plates 1 day before lipofection. RNAs were mixed according to the following combinations: i) Cas9-RT mRNA (1) only; ii) Cas9-RT mRNA (1), template RNA (2), and second nick gRNA (3); or iii) Cas9-RT mRNA (1) and template RNA (2). RNA mixes comprised 0.45 μg of the Cas9-RT mRNA (1), 2.5 pM final concentration of template RNA (2), and 1.0 pM final concentration of second nick gRNA (3). RNAs were mixed with Opti-MEM media (Gibco) and Lipofectamine 3000 or MessengerMAX reagent (Invitrogen) and added to cells. Cells were then lysed and genomic DNA was collected 72 hours after nucleofection. Amplicon sequencing libraries were prepared using primers to amplify across the target site and Illumina sequencing was performed. Precise correction and indel rates were analyzed using the CRISPResso2 pipeline (Clement et al Nat Biotechnol 37(3):224-226 (2019)).

[1329] In these experiments, up to approximately 17% precise Writing activity was achieved using an all RNA Gene Writing system delivered by lipid-based transfection, approaching efficiencies similar to nucleofection (FIG. 43 B; see Example 35 for nucleofection). Lipofectamine 3000 was also used (FIG. 43 A). In contrast to nucleofection (Example 35), there was not an observable reduction when utilizing the 20 nt longer Template 4 as compared to Template 1 (Table 48; FIG. 43 C). Further, the all-RNA lipofection of the Gene Writer Cas9-RT(PERV) with Template 1 resulted in precise Writing of the desired edit with an efficiency of approximately 3.5% (FIG. 44).

### Example 38: RNA Gene Writing Enables DNA-Free Precise Editing of Primary T Cells

[1330] This example describes the use of a Cas9-RT fusion polypeptide-based Gene Writer system for the genomic editing of target DNA sequences. More specifically, this example describes nucleofection of an all-RNA system into primary CD4+ T cells for Gene Rewriting in primary human cells, e.g., as a means of demonstrating the Gene Rewriter system for ex vivo application.

[1331] The all RNA system described here comprised: 1) Gene Writer polypeptide-encoding mRNA, e.g., an RNA encoding the Cas9-RT fusion polypeptide as a driver for programmed gene editing through a targeted nicking and reverse transcription process as described in this invention; 2) a template RNA molecule, e.g., an RNA comprising (i) a gRNA spacer sequence for guiding the driver to the targeted region, e.g., a sequence complementary to a 20-nucleotide sequence in the HEK3 locus; (ii) a primer-binding sequence capable of complementary base pairing with a single strand of the nicked DNA for target-primed reverse transcription; (iii) a heterologous object sequence providing a template for reverse transcription that further comprises the intended final target sequence; and (iv) a gRNA scaffold sequence to associate with the Cas9 domain of the Cas9-RT polypeptide fusion; and 3) an optional additional gRNA to promote second-strand nicking near the target site, e.g., an RNA comprising (i) a spacer sequence for targeting the driver to induce a second nick, on the opposite strand of the first nick guided by the template RNA, at a site proximal to the target site (e.g., within 50-150 nt from the first nick); and (ii) a gRNA scaffold sequence mediating an association with the Cas9 domain of the driver. In this example, the Cas-RT fusion polypeptide (1) (Table 46) comprises a Cas9(N863A) nickase fused to an MMLV reverse transcriptase domain. The template RNAs (2) employed here specifically follow the 5′ to 3′ orientation (i), (iv), (iii), (ii), as listed in the description thereof and are detailed in Table 48 and Example 35.

[1332] To deliver the RNA Gene Writer system into primary human CD4+ T cells and validate protein expression, 1,000,000 cells (Human Peripheral Blood CD4+ T Cells, Lonza catalog #2W-200) were stimulated by CD3/CD28 for two days and then nucleofected with 0, 2.5, 5, or 10 μg of mRNA encoding the Cas-RT polypeptide using a Nucleofector 96-well Shuttle System (Lonza) with the EO-115 nucleofection program, as according to manufacturer's protocols. One day post-nucleofection, the efficiency of delivery was assessed by immunoblotting with a Cas9 antibody (Cell Signaling) to measure protein expression of the Gene Writer polypeptide from the nucleofected mRNA (FIG. 45 A).

[1333] Subsequently, primary human CD4+ T cells were nucleofected with either: (1) 5 μg Gene Writer polypeptide mRNA (Writer only control); (2) 5 μg Gene Writer polypeptide mRNA and 5 μM template RNA, e.g., one of six template RNAs from Table 48 that target the same site of the HEK3 locus, but differ in editing result or design; or (3) 5 μg Gene Writer polypeptide mRNA, 5 μM template RNA, e.g., one of six template RNAs from Table 48, and 2.075 μM of an additional gRNA for generating a second-strand nick, e.g., the second-nick gRNA targeting a sequence 108 nt upstream of the HEK3 target site described in Example 35. Three days post-nucleofection, cells were harvested to examine 1) cell viability after RNA delivery of the Gene Writer system, and 2) editing efficiency on the target site of the genome. To assess the cell viability, the percentage of live cells was measured by flow cytometry after staining cells with a fluorescent live/dead dye (BioLegend). Cell viability was comparable in experimental conditions and in the absence of nucleofection (Untreated control) (FIG. 45 B). To evaluate efficiency of editing by the Gene Writing systems, genomic DNA was analyzed by PCR-based amplicon sequencing assay, as described in Example 35. The efficiency of the desired editing (Perfect Write) reached approximately 6.3% using Template 1 (Table 48) with the Gene Writer polypeptide mRNA (FIGS. 46 A and B). Here, the addition of a second-nick gRNA (FIG. 46 B) resulted in similar levels of editing. Thus, this example demonstrates the use of Gene Writing systems for highly specific editing in primary T cells and further shows the successful application of DNA-free, all-RNA Gene Writing in these cells.

### Example 39: Detection of Retrotransposase-Mediated Integration in Human Cells

[1334] This example describes the identification of retrotransposons demonstrating functionality in human cells. By assaying native or modified retrotransposons for integration activity, this example demonstrates a method for the selection of retrotransposases comprising protein domains that can be used to recreate retrotransposases in their native domain composition or as components of chimeric or synthetic Gene Writers for engineering the genome of human cells. For example, a retrotransposon successfully producing an integration signal is expected to comprise functional DNA binding, endonuclease, reverse transcriptase, and, optionally, second-strand synthesis activities. In some embodiments, a reverse transcriptase domain from a retrotransposon that has been shown to demonstrate activity as described in this example is used to provide the reverse transcriptase activity in a Gene Writer polypeptide, e.g., as the RT of a Cas-RT fusion polypeptide. The screen described here employs the nucleofection of a two-plasmid system comprising a retrotransposon polypeptide and an inactivated reporter template into human cells to characterize the RT-dependent retrotransposition efficiency of computationally selected retrotransposons.

[1335] In this example, a two-plasmid system was employed comprising: 1) a retrotransposon-encoded protein expression driver plasmid, e.g., a plasmid encoding a retrotransposase polypeptide from Table 50, comprising a human codon-optimized retrotransposase coding sequence fused with a HiBit tag for detection of protein expression and driven by the mammalian CMV promoter, and 2) a template plasmid, e.g., a plasmid comprising (i) a promoter for expression in mammalian cells to drive transcription of the RNA template molecule, e.g., a CMV promoter, with the template molecule further comprising (ii) a reporter cassette that is inactive in the context of plasmid-derived expression, e.g., an EGFP expression cassette with coding sequence disrupted by an intron encoded in the opposite orientation (GFPai) flanked by (iii) the untranslated regions (UTRs) of the native retrotransposon that naturally comprises the retrotransposase of (1) (see FIG. 48). Here, the GFP reporter is encoded in the absence of a promoter to drive its expression to avoid any loss of signal due to GFP toxicity (see FIG. 48).

[1336] To deliver the two-plasmid system into U2OS cells, ˜400,000 cells were nucleofected with 88.3 ng driver plasmid (1) and 161.7 ng template plasmid (2) using the Lonza SE Cell Line 96-well Nucleofector™ Kit as per manufacturer's instructions. Three days post-nucleofection, integration efficiency was measured using ddPCR to determine the copy number of integrations per genome. Reverse transcription-dependent retrotransposition activity was measured by using a ddPCR approach that utilized the antisense intron as described below. Expression of the driver protein was measured by HiBit-based bioluminescence assay.

[1337] When employing an antisense intron reporter containing intronic sequence within the reporter cassette of the template plasmid, e.g., the GFPai system described here, the intron is present in the plasmid but is spliced out during transcription, thus only reporter DNA derived from the transcript by reverse transcription would lack the intron sequence (FIG. 48). To limit detection to only events derived from reverse transcription, a ddPCR Taqman probe was designed to span the splicing junction to hybridize to DNA lacking the intron but not to plasmid DNA still containing the intact intron. The forward and reverse primers were designed upstream and downstream of the probe and within the GFP sequence. This design avoids the possible background from template plasmid directly recombined into the genome without a first transcription step, or from intact template plasmid contaminating the gDNA extraction samples.

[1338] Gene Writing systems derived from retrotransposases in Table 50 were assayed as following this example to determine activity in human cells. Analysis of the integration efficiency of 163 candidate retrotransposon systems by ddPCR is shown in FIG. 49. From the assay described in this example, 25 retrotransposase candidates demonstrated successful trans-integration of the retrotransposon UTR-flanked Template sequence at greater than 0.01 copies/genome on average.

### Example 40: Selection of Lipid Reagents with Reduced Aldehyde Content

[1339] In this example, lipids are selected for downstream use in lipid nanoparticle formulations containing Gene Writing component nucleic acid(s), and lipids are selected based at least in part on having an absence or low level of contaminating aldehydes. Reactive aldehyde groups in lipid reagents may cause chemical modifications to component nucleic acid(s), e.g., RNA, e.g., template RNA, during LNP formulation. Thus, in some embodiments, the aldehyde content of lipid reagents is minimized.

[1340] Liquid chromatography (LC) coupled with tandem mass spectrometry (MS/MS) can be used to separate, characterize, and quantify the aldehyde content of reagents, e.g., as described in Zurek et al. The Analyst 124(9):1291-1295 (1999), incorporated herein by reference. Here, each lipid reagent is subjected to LC-MS/MS analysis. The LC/MS-MS method first separates the lipid and one or more impurities with a C8 HPLC column and follows with the detection and structural determination of these molecules with the mass spectrometer. If an aldehyde is present in a lipid reagent, it is quantified using a staple-isotope labeled (SIL) standard that is structurally identical to the aldehyde, but is heavier due to C13 and N15 labeling. An appropriate amount of the SIL standard is spiked into the lipid reagent. The mixture is then subjected to LC-MS/MS analysis. The amount of contaminating aldehyde is determined by multiplying the amount of SIL standard and the peak ratio (unknown/SIL). Any identified aldehyde(s) in the lipid reagents is quantified as described. In some embodiments, lipid raw materials selected for LNP formulation are not found to contain any contaminating aldehyde content above a chosen level. In some embodiments, one or more, and optionally all, lipid reagents used for formulation comprise less than 3% total aldehyde content. In some embodiments, one or more, and optionally all, lipid reagents used for formulation comprise less than 0.3% of any single aldehyde species. In some embodiments, one or more, and optionally all, lipid reagents used in formulation comprise less than 0.3% of any single aldehyde species and less than 3% total aldehyde content.

### Example 41: Quantification of RNA Modification Caused by Aldehydes During Formulation

[1341] In this example, the RNA molecules are analyzed post-formulation to determine the extent of any modifications that may have happened during the formulation process, e.g., to detect chemical modifications caused by aldehyde contamination of the lipid reagents (see, e.g., Example 40).

[1342] RNA modifications can be detected by analysis of ribonucleosides, e.g., as according to the methods of Su et al. Nature Protocols 9:828-841 (2014), incorporated herein by reference in its entirety. In this process, RNA is digested to a mix of nucleosides, and then subjected to LC-MS/MS analysis. RNA post-formulation is contained in LNPs and must first be separated from lipids by coprecipitating with GlycoBlue in 80% isopropanol. After centrifugation, the pellets containing RNA are carefully transferred to a new Eppendorf tube, to which a cocktail of enzymes (benzonase, Phosphodiesterase type 1, phosphatase) is added to digest the RNA into nucleosides. The Eppendorf tube is placed on a preheated Thermomixer at 37° C. for 1 hour. The resulting nucleosides mix is directly analyzed by a LC-MS/MS method that first separates nucleosides and modified nucleosides with a C18 column and then detects them with mass spectrometry.

[1343] If aldehyde(s) in lipid reagents have caused chemical modification, data analysis will associate the modified nucleoside(s) with the aldehyde(s). A modified nucleoside can be quantified using a SIL standard which is structurally identical to the native nucleoside except heavier due to C13 and N15 labeling. An appropriate amount of the SIL standard is spiked into the nucleoside digest, which is then subjected to LC-MS/MS analysis. The amount of the modified nucleoside is obtained by multiplying the amount of SIL standard and the peak ratio (unknown/SIL). LC-MS/MS is capable of quantifying all the targeted molecules simultaneously.

In some embodiments, the use of lipid reagents with higher contaminating aldehyde content results in higher levels of RNA modification as compared to the use of higher purity lipid reagents as materials during the lipid nanoparticle formulation process. Thus, in preferred embodiments, higher purity lipid reagents are used that result in RNA modification below an acceptable level.

### Example 42: Gene Writer™ Enabling Large Insertion into Genomic DNA

[1344] This example describes the use of a Gene Writer™ gene editing system to alter a genomic sequence by insertion of a large string of nucleotides.

[1345] In this example, the Gene Writer™ polypeptide, gRNA, and writing template are provided as DNA transfected into HEK293T cells. The Gene Writer™ polypeptide uses a Cas9 nickase for both DNA-binding and endonuclease functions. The reverse transcriptase function is derived from the highly processive RT domain of an R2 retrotransposase. The writing template is designed to have homology to the target sequence, while incorporating the genetic payload at the desired position, such that reverse transcription of the template RNA results in the generation of a new DNA strand containing the desired insertion.

[1346] To create a large insertion in the human HEK293T cell DNA, the Gene Writer™ polypeptide is used in conjunction with a specific gRNA, which targets the Cas9-containing Gene Writer™ to the target locus, and a template RNA for reverse transcription, which contains an RT-binding motif (3′ UTR from an R2 element) for associating with the reverse transcriptase, a region of homology to the target site for priming reverse transcription, and a genetic payload (GFP expression unit). This complex nicks the target site and then performs TPRT on the template, initiating the reaction by using priming regions on the template that are complementary to the sequence immediately adjacent to the site of the nick and copying the GFP payload into the genomic DNA.

[1347] After transfection, cells are incubated for three days to allow for expression of the Gene Writing™ system and conversion of the genomic DNA target. After the incubation period, genomic DNA is extracted from cells. Genomic DNA is then subjected to PCR-based amplification using site-specific primers and amplicons are sequenced on an Illumina MiSeq according to manufacturer's protocols. Sequence analysis is then performed to determine the frequency of reads containing the desired edit.

### Example 43: Gene Writers can Integrate Genetic Cargo Independently of the Single-Stranded Template Repair Pathway

[1348] This example describes the use of a Gene Writer system in a human cell wherein the single-stranded template repair (SSTR) pathway is inhibited.

[1349] In this example, the SSTR pathway will be inhibited using siRNAs against the core components of the pathway: FANCA, FANCD2, FANCE, USP1. Control siRNAs of a non-target control will also be included. 200 k U2OS cells will be nucleofected with 30 pmols (1.5 μM) siRNAs, as well as R2Tg driver and transgene plasmids (trans configuration). Specifically, 250 ng of Plasmids expressing R2Tg, control R2Tg with a mutation in the RT domain, or control R2Tg with an endonuclease inactivating mutation) are used in conjunction with transgene at a 1:4 molar ratio (driver to transgene). Transfections of U2OS cells is performed in SE buffer using program DN100. After nucleofection, cells are grown in complete medium for 3 days. gDNA is harvested on day 3 and ddPCR is performed to assess integration at the rDNA site. Transgene integration at rDNA is detected in the absence of core SSTR pathway components.

### Example 44: Formulation of Lipid Nanoparticles Encapsulating Firefly Luciferase mRNA

[1350] In this example, a reporter mRNA encoding firefly luciferase was formulated into lipid nanoparticles comprising different ionizable lipids. Lipid nanoparticle (LNP) components (ionizable lipid, helper lipid, sterol, PEG) were dissolved in 100% ethanol with the lipid component. These were then prepared at molar ratios of 50:10:38.5:1.5 using ionizable lipid LIPIDV004 or LIPIDV005 (Table A1), DSPC, cholesterol, and DMG-PEG 2000, respectively. Firefly Luciferase mRNA-LNPs containing the ionizable lipid LIPIDV003 (Table A1) were prepared at a molar ratio of 45:9:44:2 using LIPIDV003, DSPC, cholesterol, and DMG-PEG 2000, respectively. Firefly luciferase mRNA used in these formulations was produced by in vitro transcription and encoded the Firefly Luciferase protein, further comprising a 5′ cap, 5′ and 3′ UTRs, and a polyA tail. The mRNA was synthesized under standard conditions for T7 RNA polymerase in vitro transcription with co-transcriptional capping, but with the nucleotide triphosphate UTP 100% substituted with N1-methyl-pseudouridine triphosphate in the reaction. Purified mRNA was dissolved in 25 mM sodium citrate, pH 4 to a concentration of 0.1 mg/mL.

[1351] Firefly Luciferase mRNA was formulated into LNPs with a lipid amine to RNA phosphate (N:P) molar ratio of 6. The LNPs were formed by microfluidic mixing of the lipid and RNA solutions using a Precision Nanosystems NanoAssemblr™ Benchtop Instrument, using the manufacturer's recommended settings. A 3:1 ratio of aqueous to organic solvent was maintained during mixing using differential flow rates. After mixing, the LNPs were collected and dialyzed in 15 mM Tris, 5% sucrose buffer at 4° C. overnight. The Firefly Luciferase mRNA-LNP formulation was concentrated by centrifugation with Amicon 10 kDa centrifugal filters (Millipore). The resulting mixture was then filtered using a 0.2 m sterile filter. The final LNP was stored at −80° C. until further use.

TABLE A1
Ionizable Lipids used in Example 44 (Formula (ix), (vii), and (iii))

| | | Molecular | |
|---|---|---|---|
| LIPID ID | Chemical Name | Weight | Structure |
| LIPIDV003 | (9Z,12Z)-3-((4,4- bis(octyloxy)butanoyl) oxy)-2-((((3-(diethylamino) propoxy)carbonyl)oxy) methyl)propyl octadeca-9,12-dienoate | 852.29 | [chemical structure] |
| LIPIDV004 | Heptadecan-9-yl 8-((2- hydroxyethyl)(8-(nonyloxy)-8- oxooctyl)amino)octanoate | 710.18 | [chemical structure] |
| LIPIDV005 | | 919.56 | [chemical structure] |

[1352] Prepared LNPs were analyzed for size, uniformity, and % RNA encapsulation. The size and uniformity measurements were performed by dynamic light scattering using a Malvern Zetasizer DLS instrument (Malvern Panalytical). LNPs were diluted in PBS prior to being measured by DLS to determine the average particle size (nanometers, nm) and polydispersity index (pdi). The particle sizes of the Firefly Luciferase mRNA-LNPs are shown in Table A2.

TABLE A2
LNP particle size and uniformity

| LNP ID | Ionizable Lipid | Particle Size (nm) | pdi |
|---|---|---|---|
| LNPV019-002 | LIPIDV005 | 77 | 0.04 |
| LNPV006-006 | LIPIDV004 | 71 | 0.08 |
| LNPV011-003 | LIPIDV003 | 87 | 0.08 |

[1353] The percent encapsulation of luciferase mRNA was measured by the fluorescence-based RNA quantification assay Ribogreen (ThermoFisher Scientific). LNP samples were diluted in 1×TE buffer and mixed with the Ribogreen reagent per manufacturer's recommendations and measured on a i3 SpectraMax spectrophotomer (Molecular Devices) using 644 nm excitation and 673 nm emission wavelengths. To determine the percent encapsulation, LNPs were measured using the Ribogreen assay with intact LNPs and disrupted LNPs, where the particles were incubated with 1×TE buffer containing 0.2% (w/w) Triton-X100 to disrupt particles to allow encapsulated RNA to interact with the Ribogreen reagent. The samples were again measured on the i3 SpectraMax spectrophotometer to determine the total amount of RNA present. Total RNA was subtracted from the amount of RNA detected when the LNPs were intact to determine the fraction encapsulated. Values were multiplied by 100 to determine the percent encapsulation. The Firefly Luciferase mRNA-LNPs that were measured by Ribogreen and the percent RNA encapsulation is reported in Table A3.

TABLE A3
RNA encapsulation after LNP formulation

| LNP ID | Ionizable Lipid | % mRNA encapsulation |
|---|---|---|
| LNPV019-002 | LIPIDV005 | 98 |
| LNPV006-006 | LIPIDV004 | 92 |
| LNPV011-003 | LIPIDV003 | 97 |

### Example 45: In Vitro Activity Testing of mRNA-LNPs in Primary Hepatocytes

[1354] In this example, LNPs comprising the luciferase reporter mRNA were used to deliver the RNA cargo into cells in culture. Primary mouse or primary human hepatocytes were thawed and plated in collagen-coated 96-well tissue culture plates at a density of 30,000 or 50,000 cells per well, respectively. The cells were plated in 1× William's Media E with no phenol red and incubated at 37° C. with 5% CO₂. After 4 hours, the medium was replaced with maintenance medium (1× William's Media E with no phenol containing Hepatocyte Maintenance Supplement Pack (ThermoFisher Scientific)) and cells were grown overnight at 37° C. with 5% CO₂. Firefly Luciferase mRNA-LNPs were thawed at 4° C. and gently mixed. The LNPs were diluted to the appropriate concentration in maintenance media containing 7.5% fetal bovine serum. The LNPs were incubated at 37° C. for 5 minutes prior to being added to the plated primary hepatocytes. To assess delivery of RNA cargo to cells, LNPs were incubated with primary hepatocytes for 24 hours and cells were then harvested and lysed for a Luciferase activity assay. Briefly, medium was aspirated from each well followed by a wash with 1×PBS. The PBS was aspirated from each well and 200 μL passive lysis buffer (PLB) (Promega) was added back to each well and then placed on a plate shaker for 10 minutes. The lysed cells in PLB were frozen and stored at −80° C. until luciferase activity assay was performed.

[1355] To perform the luciferase activity assay, cellular lysates in passive lysis buffer were thawed, transferred to a round bottom 96-well microtiter plate and spun down at 15,000 g at 4° C. for 3 min to remove cellular debris. The concentration of protein was measured for each sample using the Pierce™ BCA Protein Assay Kit (ThermoFisher Scientific) according to the manufacturer's instructions. Protein concentrations were used to normalize for cell numbers and determine appropriate dilutions of lysates for the luciferase assay. The luciferase activity assay was performed in white-walled 96-well microtiter plates using the luciferase assay reagent (Promega) according to manufacturer's instructions and luminescence was measured using an i3X SpectraMax plate reader (Molecular Devices). The results of the dose-response of Firefly luciferase activity mediated by the Firefly mRNA-LNPs are shown in FIGS. 50A and B and indicate successful LNP-mediated delivery of RNA into primary cells in culture. As shown in FIG. 50A, LNPs formulated as according to Example 44 were analyzed for delivery of cargo to primary human (A) and mouse (B) hepatocytes, as according to Example 45. The luciferase assay revealed dose-responsive luciferase activity from cell lysates, indicating successful delivery of RNA to the cells and expression of Firefly luciferase from the mRNA cargo.

### Example 46: LNP-Mediated Delivery of RNA to the Mouse Liver

[1356] To measure the effectiveness of LNP-mediated delivery of firefly luciferase containing particles to the liver, LNPs were formulated and characterized as described in Example 44 and tested in vitro prior (Example 45) to administration to mice. C57BL/6 male mice (Charles River Labs) at approximately 8 weeks of age were dosed with LNPs via intravenous (i.v.) route at 1 mg/kg. Vehicle control animals were dosed i.v. with 300 μL phosphate buffered saline. Mice were injected via intraperitoneal route with dexamethasone at 5 mg/kg 30 minutes prior to injection of LNPs. Tissues were collected at necropsy at or 6, 24, 48 hours after LNP administration with a group size of 5 mice per time point. Liver and other tissue samples were collected, snap-frozen in liquid nitrogen, and stored at −80° C. until analysis. Frozen liver samples were pulverized on dry ice and transferred to homogenization tubes containing lysing matrix D beads (MP Biomedical). Ice-cold 1× luciferase cell culture lysis reagent (CCLR) (Promega) was added to each tube and the samples were homogenized in a Fast Prep-24 5G Homogenizer (MP Biomedical) at 6 m/s for 40 seconds. The samples were transferred to a clean microcentrifuge tube and clarified by centrifugation. Prior to luciferase activity assay, the protein concentration of liver homogenates was determined for each sample using the Pierce™ BCA Protein Assay Kit (ThermoFisher Scientific) according to the manufacturer's instructions. Luciferase activity was measured with 200 μg (total protein) of liver homogenate using the luciferase assay reagent (Promega) according to manufacturer's instructions using an i3X SpectraMax plate reader (Molecular Devices). Liver samples revealed successful delivery of mRNA by all lipid formulations, with reporter activity following the ranking LIPIDV005>LIPIDV004>LIPIDV003 (FIG. 51). As shown in FIG. 51, Firefly luciferase mRNA-containing LNPs were formulated and delivered to mice by iv, and liver samples were harvested and assayed for luciferase activity at 6, 24, and 48 hours post administration. Reporter activity by the various formulations followed the ranking LIPIDV005>LIPIDV004>LIPIDV003. RNA expression was transient and enzyme levels returned near vehicle background by 48 hours. Post-administration. This assay validated the use of these ionizable lipids and their respective formulations for RNA systems for delivery to the liver.

Without wishing to be limited by example, the lipids and formulations described in this example are support the efficacy for the in vivo delivery of other RNA molecules beyond a reporter mRNA. All-RNA Gene Writing systems can be delivered by the formulations described herein. For example, all-RNA systems employing a Gene Writer polypeptide mRNA, Template RNA, and an optional second-nick gRNA are described for editing the genome in vitro by nucleofection, by using modified nucleotides, by lipofection), and editing cells, e.g., primary T cells. As described in this application, these all-RNA systems have many unique advantages in cellular immunogenicity and toxicity, which is of importance when dealing with more sensitive primary cells, especially immune cells, e.g., T cells, as opposed to immortalized cell culture cell lines. Further, it is contemplated that these all RNA systems could be targeted to alternate tissues and cell types using novel lipid delivery systems as referenced herein, e.g., for delivery to the liver, the lungs, muscle, immune cells, and others, given the function of Gene Writing systems has been validated in multiple cell types in vitro here, and the function of other RNA systems delivered with targeted LNPs is known in the art. The in vivo delivery of Gene Writing systems has potential for great impact in many therapeutic areas, e.g., correcting pathogenic mutations), instilling protective variants, and enhancing cells endogenous to the body, e.g., T cells. Given an appropriate formulation, all-RNA Gene Writing is conceived to enable the manufacture of cell-based therapies in situ in the patient.

LENGTHY TABLES
The patent application contains a lengthy table section. A copy of the table is available in electronic form from the USPTO web site (https://seqdata.uspto.gov/?pageRequest=docDetail&DocID=US20230348939A1). An electronic copy of the table will also be available from the USPTO upon request and payment of the fee set forth in 37 CFR 1.19(b)(3).

1-108. (canceled)

109. A template RNA comprising, from 5′ to 3′ (i) a sequence that binds a target site, (ii) a sequence that specifically binds an RT domain of a retroviral polypeptide, (iii) a heterologous object sequence, and (iv) a 3′ target homology domain.

110. The template RNA of claim 109, wherein the target site is a second strand of a site in a target genome.

111. The template RNA of claim 109, further comprising (v) a sequence that binds an endonuclease and/or a DNA-binding domain of a polypeptide.

112. The template RNA of claim 111, wherein the polypeptide bound by (v) is the same polypeptide that comprises the RT domain.

113. The template RNA of claim 109, wherein the RT domain comprises a sequence of Table 30 or a sequence that has at least 90% identity thereto.

114. The template RNA of claim 109, wherein the RT domain comprises a sequence of Table 30 or a sequence that has at least 95% identity thereto.

115. The template RNA of claim 109, wherein the RT domain comprises a sequence of Table 30.

116. The template RNA of claim 109, wherein the RT domain comprises a sequence of Table 44 or a sequence that has at least 90% identity thereto.

117. The template RNA of claim 109, wherein the RT domain comprises a sequence of Table 44 or a sequence that has at least 95% identity thereto.

118. The template RNA of claim 109, wherein the RT domain comprises a sequence of Table 44.

119. The template RNA of claim 109, wherein the sequence of (ii) specifically binds the RT domain.

120. A template RNA comprising from 5′ to 3′: (ii) a sequence that binds an endonuclease and/or a DNA-binding domain of a retroviral polypeptide, (i) a sequence that binds a target site, (iii) a heterologous object sequence, and (iv) a 3′ target homology domain.

121. The template RNA of claim 120, wherein the target site is a second strand of a site in a target genome.

122. A template RNA comprising from 5′ to 3′: (iii) a heterologous object sequence, (iv) a 3′ target homology domain, (i) a sequence that binds a target site, and (ii) a sequence that binds an endonuclease and/or a DNA-binding domain of a retroviral polypeptide.

123. The template RNA of claim 122, wherein the target site is a second strand of a site in a target genome.

124. A method for manufacturing a template RNA, comprising:
(a) providing a template RNA of claim 109, and
(b) assaying one or more of:
(i) the length of the template RNA;
(ii) the presence, absence, and/or length of a polyA tail on the template RNA;
(iii) the presence, absence, and/or type of a 5′ cap on the template RNA;
(iv) the presence, absence, and/or type of one or more modified nucleotides;
(v) the stability of the template RNA;
(vi) the potency of the template RNA in a system for modifying DNA; or
(vii) the presence, absence, and/or level of one or more of a pyrogen, virus, fungus, bacterial pathogen, or host cell protein.

125. A method for manufacturing a template RNA, comprising:
(a) providing a template RNA of claim 120, and
(b) assaying one or more of:
(i) the length of the template RNA;
(ii) the presence, absence, and/or length of a polyA tail on the template RNA;
(iii) the presence, absence, and/or type of a 5′ cap on the template RNA;
(iv) the presence, absence, and/or type of one or more modified nucleotides;
(v) the stability of the template RNA;
(vi) the potency of the template RNA in a system for modifying DNA; or
(vii) the presence, absence, and/or level of one or more of a pyrogen, virus, fungus, bacterial pathogen, or host cell protein.

126. A method for manufacturing a template RNA, comprising:
(a) providing a template RNA of claim 122, and
(b) assaying one or more of:
(i) the length of the template RNA;
(ii) the presence, absence, and/or length of a polyA tail on the template RNA;
(iii) the presence, absence, and/or type of a 5′ cap on the template RNA;
(iv) the presence, absence, and/or type of one or more modified nucleotides;
(v) the stability of the template RNA;
(vi) the potency of the template RNA in a system for modifying DNA; or
(vii) the presence, absence, and/or level of one or more of a pyrogen, virus, fungus, bacterial pathogen, or host cell protein.

The application's sequence listing, which the Patent Office published only in electronic form, follows.

SEQUENCE LISTING (3782 sequences)

SEQ ID NO: 1-1015 - skipped (1015 entries)

SEQ ID NO: 1016 - protein, 1390 aa, synthetic construct
  source 1..1390: note = Description of Artificial Sequence: Synthetic polypeptide
MASCPKPGPPVSAGAMSLESGLTTHSVLAIERGPNSLANSGSDFGGGGLGLPLRLLRVSVGTQTSRSDWVDLVSWSHPGPTSKSQQVDLVSLFPKHRVDLLSKNDQVDLVAQFLPSKFPPNLAENDLALLVNLEFYRSDLHVYECVHFAAHWEGLSGLPEVYEQLAPQPCVGETLHSSLPRDSELFVPEEGSSEKESEDAPKTSPPTPGKHGLEQTGEEKVMVTVPDKNPPCPCCGTRVNSVLNLIEHLKVSHGKRGVCFRCAKCGKENSNYHSVVCHFPKCRGPETEKAPAGEWICEVCNRDFTTKIGLGQHKRLAHPAVRNQERIVASQPKETSNRGAHKRCWTKEEEELLIRLEAQFEGNKNINKLIAEHITTKTAKQISDKRRLLSRKPAEEPREEPGTCHHTRRAAASLRTEPEMSHHAQAEDRDNGPGRRPLPGRAAAGGRTMDEIRRHPDKGNGQQRPTKQKSEEQLQAYYKKTLEERLSAGALNTFPRAFKQVMEGRDIKLVINQTAQDCFGCLESISQIRTATRDKKDTVTREKHPKKPFQKWMKDRAIKKGNYLRFQRLFYLDRGKLAKIILDDIECLSCDIPLSEIYSVFKTRWETTGSFKSLGDFKTYGKADNTAFRELITAKEIEKNVQEMSKGSAPGPDGITLGDVVKMDPEFSRTMEIFNLWLTTGKIPDMVRGCRTVLIPKSSKPDRLKDINNWRPITIGSILLRLFSRIVTARLSKACPLNPRQRGFIRAAGCSENLKLLQTIIWSAKREHRPLGVVFVDIAKAFDTVSHQHIIHALQQREVDPHIVGLVSNMYENISTYITTKRNTHTDKIQIRVGVKQGDPMSPLLFNLAMDPLLCKLEESGKGYHRGQSSITAMAFADDLVLLSDSWENMNTNISILETFCNLTGLKTQGQKCHGFYIKPTKDSYTINDCAAWTINGTPLNMIDPGESEKYLGLQFDPWIGIARSGLSTKLDFWLQRIDQAPLKPLQKTDILKTYTIPRLIYIADHSEVKTALLETLDQKIRTAVKEWLHLPPCTCDAILYSSTRDGGLGITKLAGLIPSVQARRLHRIAQSSDDTMKCFMEKEKMEQLHKKLWIQAGGDRENIPSIWEAPPSSEPPNNVSTNSEWEAPTQKDKFPKPCNWRKNEFKKWTKLASQGRGIVNFERDKISNHWIQYYRRIPHRKLLTALQLRANVYPTREFLARGRQDQYIKACRHCDADIESCAHIIGNCPVTQDARIKRHNYICELLLEEAKKKDWVVFKEPHIRDSNKELYKPDLIFVKDARALVVDVTVRYEAAKSSLEEAAAEKVRKYKHLETEVRHLTNAKDVTFVGFPLGARGKWHQDNFKLLTELGLSKSRQVKMAETFSTVALFSSVDIVHMFASRARKSMVM

SEQ ID NO: 1017-1022 - skipped (6 entries)

SEQ ID NO: 1023 - protein, 16 aa, synthetic construct
  source 1..16: note = Description of Artificial Sequence: Synthetic peptide
SGSETPGTSESATPES

SEQ ID NO: 1024 - protein, 4 aa, synthetic construct
  source 1..4: note = Description of Artificial Sequence: Synthetic peptide
GGGS

SEQ ID NO: 1025-1139 - skipped (115 entries)

SEQ ID NO: 1140 - DNA, 175 bp, Taeniopygia guttata
  source 1..175: mol_type = unassigned DNA
gtctagttacaactgggcatcgctgcagagatcgcacctcctcgtggtcccgctggtagcccttcgaagggtgactaagtcgatctctgccccaggtacggagccgttgggactcaccagtccaacgtaactcctgcctaaattcggtgaaacaaattcctcggtaaaaagcccc

SEQ ID NO: 1141 - DNA, 91 bp, Geospiza fortis
  source 1..91: mol_type = unassigned DNA
agacttaagtgagtttggttacaactgggcatagctgcagagaccgcgcctcctcgcggccccgctggtaagcccttaacagggtgactaa

SEQ ID NO: 1142 - DNA, 160 bp, Zonotrichia albicollis
  source 1..160: mol_type = unassigned DNA
cgacttgagaaggtctggttacaactgggcatagctgcagagatcgcgcctcctcgtggccccgctggtaagcccttaacagggtgactaagtcgatctctgccccagtccaggagccgctgggtttcaccagcccagcgattccttccaaattcggtga

SEQ ID NO: 1143 - DNA, 152 bp, Danio rerio
  source 1..152: mol_type = unassigned DNA
aatcccccctacccaatccccccgtcgtgacctccaggccaggaatcacgagcgtacgacagtggccatccggcaatgacaatagcgtgactaacgacaatgagtcagatccatgacccttggagtgggttaacctccgcctctttaaaaac

SEQ ID NO: 1144 - DNA, 500 bp, Gasterosteus aculeatus
  source 1..500: mol_type = unassigned DNA
catattggggtctcaggaggagacacagggtctgttgcggctccggtaaacggtaccggagtcggttaagcatcgtttgggcccgcctccacgtggtggtccgcggtaacaccaatagggtggctaagaggcccagtaatttccccgaattgtcttcccccccgcgcgggggggacccccctttagtgtcggagcggtcgcgcctccgcgtttggggtgtcgcaggcgtgagccttcgtccccttaagttcagacggtcccggcttcttgccgggccaacccccggtgcagcgttctcccatgttggatcggcacccagccccgggtgccatgcgagttcagacattttgtttatgtatcgtctgcgtggttgacttgctaagctcatttcctcctctcactgcgtccccccaggtgctgatcggttgaagaggattcgtcgttgacctcggcggtgaatttgggattgtattatacaggtaggtatagagggcgtgcgg

SEQ ID NO: 1145 - DNA, 595 bp, Bombyx mori
  source 1..595: mol_type = unassigned DNA
gggcgatacgcataattttaatttcccgattgaaatccagtcgtcttaatctggtgaccagtggcgcggtcaccagtatagtgcacaggacgtgaatggctccgaggctggcggagtcactcactataagtgtgagagacgatgtcctgtgccaagtatacgtccaaccctaacgggttaagtgaaattagttgctcataacagggacggtgtacctgtttgctcgtggctggctatcgaatggacgggaccaatacacccccctgttagtaatggggtaagagagagcggtctgaaactatggccgaaatcacgacgccccactcctacccataacctgcacgtggtaccgccgcacattgaccgatacgggaggaggggcagcacttgaatcacgtagtcttggtgtagccattgcgggactacagccctcgtaagtgccgccttagaacgcaacggggcaataggtgggccggggcgctagcgggggggagtaatctcccctgttggcgtgcaccgcactgctcccactgggggcagtgtcatccggaaacaggtgggccggggcgccaccaggggggagcaatccctcctg

SEQ ID NO: 1146 - DNA, 337 bp, Hydra vulgaris
  source 1..337: mol_type = unassigned DNA
ttcaagtggatgaagctgggaaggtaatctgtagttggttgagttggttgcagattactgctgtcgattttgctttctattgaaagcctgtctctacgggtcctgaagcttgaattttggtagctatagttttgtgggaggaaagtggaattttgtaccatcttttgtctctcgtatctactatagtaaatccggtcatgcagcctctacgcggcgcaactagaaacttggatcagtgatcaaggctaatgcatgccgggtctcctcagattaggagtataatacaaatctgacttcatcactaagaggctatggggctaacgatcctatagtctcg

SEQ ID NO: 1147 - DNA, 265 bp, Hydra vulgaris
  source 1..265: mol_type = unassigned DNA
cttggggtcactgacacatttttcggtagccatagttttttgagaggaagagtggaagtttttccatgagtcgtctctcgtataaactgtggtaaatccggccatccagcctctacgcggcgcaactagaaacttggatcagtgatcaaggctaatggatgacgggactccatggataaggagatataaagatcttatttgaacgcatcttaaggggttatggggctaacacccccttaattctggtgcacatttattgaccgtt

SEQ ID NO: 1148 - DNA, 569 bp, Adineta vaga
  source 1..569: mol_type = unassigned DNA
gaaatagtttgcaatggtaggtgtatggcgcctctgtgtctctctttcgctggatatagtttgacgattttgtaccaggtatctgtttcttgtgagttcagcaccagtttgaacaggcttagcgatagaccttcgaacttgaaacactgttgtgaagctggctgggcccctgcagattttctcgattagaacgtgagtgttacgtccagaatgacccaccagtggttagttctacgttgccctggaaaggagaaaagttgagctaaaatcgcacggcctagttgtttatcaaataggcacggtgaggaactcttctatgtaccctgactaaagtactcacttgtgcgctgggtttgctccccctcgcattgacttatctgatcgcactacccaccaaacgaaacataaacttagctcgtggtatcagtccacagcgtgtgcagtcggattcaggggagcgtgttagtgacaagcaggataatattaacatagttaatgttaaggcgttcaacattccttatccaattggaagagttgactgtgaagtttgtcatgaagacattggacaa

SEQ ID NO: 1149 - DNA, 265 bp, Oryzias latipes
  source 1..265: mol_type = unassigned DNA
cgcacaggggacacagagcctgcccaagtaccgctcccgagggagcgggaaacgggggggtgactatcccctggggtccggcgagagcgctggtctacggaccaggggtggctgtgggcaggctgctcctcaggccagttgattagttacgcatgggctgtacctccacgtggtcccgctggtaacgacttgtcggctaaatcagcccgcccaccatctgggatatggttgaccgtctaaccccagtactcaggtcacaaacaaa

SEQ ID NO: 1150 - DNA, 840 bp, Limulus polyphemus
  source 1..840: mol_type = unassigned DNA
tgggaggagacccaaactatcctaggatggggcggaaccgaccatatgagccatattaacattgcccacactatcctctggaggtacctcctcgtggtacggctggatataggtaaatcctgtaaccaaatcctccaacccgtgaaggagaacactaaaacccatatagtggcctcgccaaccactatatgtccaacggcaggagaagctatctcccggatgggaaggaaaaccctaaaccgtgatgggaacttaccggccccatcagctattgggtacccggtagggacttgcaaccctaccctgtatttgcattttatagggaaccggtcggccctatatcagagtagaccgtttattaaatatgggtgaaaatattaacagtaaaagctatggtttggcgtccgtgtggtgccagggcggcggccaaacccgagctacttggcaccaactggggatggtagcttccgagcgattccctggcgacgtgggaccgatcgacgatggagtccaaacatccggaatagaggaattgagaaatacctattccaccaccggctcacatacccaaggtgaacccggtgcaactagagtacaacctatctgtggcggtaggtgccgaaccactcaggtgacgggcttgtttattgatgtctccctacgagacacgaattgtgacaaatccactccggtggacaattacccgatctatgaacctgttaccgatattagacaagaaaataaagaactgacaacgcctagagcttcaggcagcatgtctgtaagtatccagtcatcgagcgtgactgagggcgaaattgataataactctgaaactga

SEQ ID NO: 1151 - DNA, 394 bp, Caenorhabditis elegans
  source 1..394: mol_type = unassigned DNA
gctcactttctatcgtgttaaccgtacgtttacactcccagtgagtgtaataaaggttattcgatagagggtgtctccctctttcttgggtaattcttcggcggtccggggtctctccctcgtcttttttttaaacttttctttctcatccactcttttgctcctttttactaactcttgtactctatagtcttttctcatcccccatccgccgttgggcaaagtttatttactttgttaaatccatattttatctctctcacccgtacagaaagcgtctccttctcaaacgcttttctgtactttttcttatattttcattaacatatttttcctgtttatactaacctaacctccattgtcaattactaactaacttgtacaacggatttcg

SEQ ID NO: 1152 - DNA, 69 bp, Cryptococcus neoformans
  source 1..69: mol_type = unassigned DNA
ccctcttaataccccataacacataacaaccccctaatcaacgttctctgcaccttaaacaccaccaac

SEQ ID NO: 1153 - DNA, 102 bp, Chondrus crispus
  source 1..102: mol_type = unassigned DNA
acgccccctatccatttctgccagcctcccatcggctcgccgtctccgcaacccctcttcctcggctgtaccagttccgctcccacaacctccctcgccaca

SEQ ID NO: 1154 - DNA, 74 bp, Chondrus crispus
  source 1..74: mol_type = unassigned DNA
  misc_difference 2: note = a, c, t, g, unknown or other
cnccagccamcgatcccgccgccactcgcmgcccggccgtctcgaccgccacctccccgasgccccagcccatc

SEQ ID NO: 1155 - DNA, 714 bp, Acanthamoeba castellanii
  source 1..714: mol_type = unassigned DNA
taaccctaaccctctccctcggcccctctaccctaaagcgccctaatcgaccggcgacgccctaatcgctaccctctacgccctaatcgactttggcgccaaagcgactttccccggccgattttcttcctgcctttttcttttctctccaagcgacgcgccttttactttgccgccgttctgttttttcttttctctttgcacttcgcttctacttcacacctcctcctcctccttctcgacccgcgcggcctcgagcgacttgctgcagcggctcccggcctcccccacgcggcctgctactcccgctttctagacgcccccggtcttgctctcagtctcccgcatcgaagcggtagtcggggtacgtgctcaagtgactcaagcctcttttcagcctcggcgctctctcaatccgcctcagtcttagcctttcaagttgctcgattacgctctcgaatcgctctctctctcagtctcagtctcagtctcaatctcgatcttgccttcgccttcgtctcgacgccttgctctcgwaatcgctgccactacgtgccagctttttcgtgccttgtcttcgtgtcgacccggaccgtttgcaagccctcgccttcgtaccccgctctcgtagccgttctcatcgctgaagcgttctacgcgctggcagcaagcctcggccctagcttgtagcgccgccggtggccgctcgccaac

SEQ ID NO: 1156 - DNA, 200 bp, Fragilariopsis cylindrus
  source 1..200: mol_type = unassigned DNA
atcaatctaatactgaaggcaataccaaactcaacccgaaatcaaaatcgttagaatcaatatacgacccccgctgctgtacatgtccagccggatctcgttgtaaagaagattgcagctgtaaaaaagttggacttctttgttcttcctgtgaagaagttgattgtggctgttcaaattcttttcataataaagaatta

SEQ ID NO: 1157 - DNA, 832 bp, Hydra vulgaris
  source 1..832: mol_type = unassigned DNA
tttctaatgttacgtgatatgatatggttagttcatggttagtttatgtttatgcttagtttatggaaaatcgtttatttatggcacaatattgtttgctgtttttaaatttatgtaacgtgtgcatttgatgtatattcttgaactttttaatctgaatttttacttggtttaatacgtttattatattcttcgattgagcaatttatcctatcaaagcaatttatccttcgattcgagcaatttatccttcgattcgagcaatttatccttcgattgagcaatttatcctatcaaaattagcatatatactgcaattttcaaataatctacgaaataagttcacttactgaaaatcattaagtaaaagaagaaaggaagaaaaaataaaaataaaaagtagtaaatcctttcataacaataatcattctattattaaatttaaaggaatattttggttttgtactaaatcatgcgttcatatttcaccgaagaagggggctgctatatttttgtttgaagttgtttatcttaaaactttaaacttgtgttcaaccaaccgtaaacattagttcgctgttcgctcaaattatctacaatataaaatttatcaatcttttttcgttacggtaaacaataaacaataaaataactatagttattttattgtttaccgcatattgtttaactatagttaaacaaagtatttgtttatggaacattaccagtatctcttgttaaggtaaacaacaaaacatagacggcatctctttttaaggtaattaagtatacggctaataataaaaatatacagctaataataaaatcttca

SEQ ID NO: 1158 - DNA, 258 bp, Lactuca sativa
  source 1..258: mol_type = unassigned DNA
acattaaattagagaggttgatgtttcaatggaagaagatgaaattccaagaagctatttttgttgcccaccaagtgtttgataaaatgtccaaactaatttttctcttgttgcagctttattgttcaagataatgtagtttgcttagtttgagcgttccttgtgcacaccaacagtgtgttggtgtgccatttcctttccttcctttttaactattgcttcatagcttaagcttcatctcgaggcttgttctcttgt

SEQ ID NO: 1159 - DNA, 122 bp, Monosiga brevicollis
  source 1..122: mol_type = unassigned DNA
catcttggcgtgaaccacgttgtcagacaaaatctgcaaccccgctctttgcggcccgcgttttggcggcgccctcgctcccaccgtgtccgctcgcttgctcgcttgcttgccccgcggac

SEQ ID NO: 1160 - DNA, 453 bp, Hydra vulgaris
  source 1..453: mol_type = unassigned DNA
aatttaaaaaaaaaaaatcgtttatttatggcataatactgtttgtaatttttgaaaattcgtgcaacaactgcagttaaattgaagagctgaaatttaagatctgagcttttcaatcagagttttttaccctaaaacattaaattttatcataacaaaaatcgttctaatattattaaacttaaagaaattcgttcttatatcaaatcttatttcagtgtttcacagacgaagggttttactagatttttattttttcaacttttgaatttgtttattataaaactgtaaactagtgtgcaaccaaccgtaaaaawtagttagctgttcacccaaaatattattcagtatgaaaatatttaatcttctttattcgcagtaaacaataaaatatctagttaaacaaaatatttcttaataataaaaaacaaaaactttttcttaacaagtaca

SEQ ID NO: 1161 - DNA, 1461 bp, Magnaporthe oryzae
  source 1..1461: mol_type = unassigned DNA
cccgaacccgaacccaaacccaaacccaaacccaaacccaaacccaaacccaaacccaaacccggagggttcccaagtcgcctaaacccgaagggtttaggatattatttcgtttattagaattggataattatttacccctgttggacaggggggttgcaggggttaaattaaggttttttattatttatgcgccgtttatttgtttacccccccaaatattataaaagcgcgttccatcctcttaggaaaagcgaagcttttccttgtaaaagtcgctagacttttactataaaagtcgctagacttttataccaatcttttaacaaaaagcgtagctttttgttgccaatctattaaaaaaagcggagctttttttaactttttcttttttttttttttttcttttttttttttttttttcttttttttttttttttttttttatatatattattattattattattagcggtggggctatttatgcgctttaatttgtgcggggctatttatgcgctttaatttgtgcggggctattaatgcgctttaactttacaaattttatttatgcgctttaattgctgcgggcctgttaatgcgctttaatttacaaatttcattaatgcgctttaacttttatatttactaatgcgttatttatataattgctattattatcgttgctattattattattgctattattatcgttattattattgcaattttattatataaaccctcgtttgtccctcgatttatcccgtttcttttccatcccatcgcgcgttttcgtaagctttggttttcgtaggatttgctttcgtaggctttgctttcgtaggctttcgtcagcttttacctgcttttattttttctttttctttttattccccccccttttttttacctggtttattagcggtttacctgcttttattacctggttcccctttacctgttttattagcggtttacctgcttttattacctggttcccctttacctactttataagcggtttacctgcttttattacctggttcccctttacctgttttattagcggtttacctgcttttattacctggttcccctttacctgttttattagcggtttaccagcttttattacctggttcccctttacctactttattagcggtttacccgtttctattagtgggcatttatttcccgtttttattagcagttaaatttacccttttaaggttatttacctgcttttattcacagggcacccctgtttttactagcagttaaatttacctttttaaggttatttacctgcttttattcacagggcacccctgtttttaccagcagttaaatttacctttttaaggttatttacctgcttttattaacaaccctttattttttcctattaacgggtatttatttacctgttttattggaattcacccgttggacggc

SEQ ID NO: 1162 - DNA, 278 bp, Branchiostoma floridae
  source 1..278: mol_type = unassigned DNA
ttttcagtctggctcagccagtgaccgccgggaaagtccggctgactaccacgaatagggtggtgacagctggatagacagacgacagctcggaaagacggcattggggcagtatgggttggcacccctaactgcatctcccctaggagagcatcccgcaacacgctacaaagaaccacaaagagcaatacccccagggatgcccgagagggggggaggatgagcatcccattcggacggtccaatcggtattgaccccagcaaacggagaatcgaca

SEQ ID NO: 1163 - DNA, 251 bp, Danio rerio
  source 1..251: mol_type = unassigned DNA
ttcaagcctggcgcagccagtgactcctaggaatagactaggtggcaaccaagaatagtttggtcgactactggagagacagttgacggcacggaaagacggcacttgggacagtatgggttagcaccccagcctgtgtctttcgtgagagagaacccaaacaagctacggaaagccccacagagatatacccccaggagatcccgagagggggggaggatgagatctccaatcggacggatcaaaggtta

SEQ ID NO: 1164 - DNA, 214 bp, Branchiostoma floridae
  source 1..214: mol_type = unassigned DNA
ctgaccagcagacgggaagcccgcgaccaactagtctccgcaaatattgcacacagggcgaccctatggagctgattcagtcaaatttcctctgagatataccgataactatctacagaaactgcacagttagtttggaaagagcttttctactgaaagacagcaaaatccgccactttagacgagcgtcaagactgccctccccataaccaat

SEQ ID NO: 1165 - DNA, 12 bp, Danio rerio
  source 1..12: mol_type = unassigned DNA
aaagcagtagag

SEQ ID NO: 1166 - DNA, 217 bp, Takifugu rubripes
  source 1..217: mol_type = unassigned DNA
agactaggtgacaaccaagaacagttwggtcgactactggaaagacagttggcagctcggaaagacggcacccgggacagtatgggttagcaccccagcctgtatctttcgcgagaaggaacccaaacaagctacggaaagccctacagagaaacacccccaggagatcccgagagggggggaggatgagatctccaatcggacggacctaacgtta

SEQ ID NO: 1167 - DNA, 247 bp, Tetraodon nigroviridis
  source 1..247: mol_type = unassigned DNA
agattggtctggctaagccagtgacgtccaggaacagactggctgacgaccacgaatagagtggtgacagcttggatagacagctgacagcagggaaagacggcaaccggggcaggaagggctagcaacccagcctgcatcttccgtgaggaagaacccaaaacttgctacgaagagcccgaagcaaagatacccccaggggagcccgagagggggggagaatgagctccccaaacggacggataac

SEQ ID NO: 1168 - DNA, 227 bp, Schmidtea mediterranea
  source 1..227: mol_type = unassigned DNA
aaacgacatcatgaacgcttggccgcaacaatccagttatccctgcggtaacattgtggaactcataagacaagtactaaaagaagaattagaaaaattagaagaaaaaattgaaaataatttatttataaaatttaaaaatttaaataaatttaaaaatttaaatttaaatttaaatgaagataaaaatttatttaatccaataaataatcaagaaaatcaagaaa

SEQ ID NO: 1169 - DNA, 74 bp, Caenorhabditis sp.
  source 1..74: mol_type = unassigned DNA
aaggacgctggtttaaggccgaattcgttcgttctttttctggcggtcttgctttgagcttggtttccgatcct

SEQ ID NO: 1170 - DNA, 815 bp, Caenorhabditis sp.
  source 1..815: mol_type = unassigned DNA
gcgccccgggttacattgtcggggccacctttctcttggagtagagtacagtctactaattttttgataagctagtcgggtccgaaccactagagtttgcttgaaaatgcgtcaaaccagcattttagaactcgcccaaaagttcggccccgacccccaaacaaatgggaccttcttgacgattttccctgaaaatcggaggatggaatggtcccctattcttgtaaatagkactgtgcaataccccttcgtcatctgtggggaacagatgacacgtgacgtcatccgtgtagacgtcacgttttcccgtgcctgcgggagcccccaatcgagcaatttttgctcttttgagtgtctggaacgcttgaaaccccagacaaatcaggcccagtcgtcggaaaatttctttttgaaattttttggcgcctgcgaaaaaaattttttaaccgccacaaacccccgggaggcgcggwtagggatatcgatgtcatcgactcgtcggtgatctttgattttctctctgcgtctcctattttggaacagtctcgaccaaaaaaccgggcctggcaacccaccgaatccggatgtcggagggatttggcaagaaatgttggaaataacgaaatttcgttattttcagcacaattgtcaaaccggcaagaaaactggatggacaagacacacaatttaccggaaattgtgcttgttacgtcgaatttcccaattttgaaaaaattcctcgttccactggtcgggacgcgaggtcagacgatctgcacgtctgaaacccaaaatcttcggattttatgcagtag

SEQ ID NO: 1171 - DNA, 14 bp, Caenorhabditis sp.
  source 1..14: mol_type = unassigned DNA
cgcgaaccagtcat

SEQ ID NO: 1172 - DNA, 19 bp, unidentified
  source 1..19: mol_type = unassigned DNA; note = Description of Unknown:Trichomonas vaginalis sequence
gggtgagtagtctagtggt

SEQ ID NO: 1173 - DNA, 389 bp, Caenorhabditis sp.
  source 1..389: mol_type = unassigned DNA
gactcgccttggggaaggtwtttcaggggksaattgccgmaggcaaggcagcccccsmmtagcttacaaagtaagtacmcattttcatttcttgtgaattctttaaacatatttttcttgttttttgatttcttttttctctaccttcccccaattcttcccctcatcttgtgtatacatccccctcctccaaccaatcaatacattgacctctctcttctgtcaaaaaatcaatactagtatattgtcccttgtatagtattatttgacgtcgtctttgtattaggagtaggtaacaawctgtgtatggcttcaaaaagcatgcacaaacwcctgtcaaaaagtawttcccatcmtgtgaatagctcaacgacwkgaagmccaatgat

SEQ ID NO: 1174 - DNA, 839 bp, Caenorhabditis sp.
  source 1..839: mol_type = unassigned DNA
ccaactctcatcgtattaacctacggtattcactcctagtgagtgtaataaaggttaattacgttttctcttgcmagagaaaaagaaaattcgaatcctttttgtgtaactcacaaactgacagagacctatcgaatttcctttgtttcgtatataggaatagtcactctggaccacgaagtggacagttgtcggcggacttccagagtggagagaaaaggtgtgaagagaggaggtctagaaacacttcggctgtctaggaccagttcctgagtggaaagaggaaggtctagaaacacttcggctgtctaggaccagttcgtgagatctctcgtggagagttgaaaacagtcagctgaggctactgtatttcttgatagccccgcccccaatccccctcccccccccctcgacagatttttctgtttgacctcctggaatttgcgaggagtgcgcgagaattttcgaattcttcgcgcgttttctcgaaattttccagaagattcgagcggagaatcttcgagaaagtgagctgaatttcgcgcgaattttccgcgattttcaaattatcgatttttgtcggaaaatttattttctggcaaaatttgattgagttcacgcgggagagaaggaattgttggaaaagggtattgatttttgtggcggaggaaactcccactgaatcaataactctcaaaggagaactcatcgaacaacctcgggtgacctgaatcttgggcgaaattttcgcattgacacaagataamacaaattactgtkgaaaataaatcagaacaaactgtcaaaaagagagacaaaaagtattgattaacaacatc

SEQ ID NO: 1175 - DNA, 320 bp, Caenorhabditis sp.
  source 1..320: mol_type = unassigned DNA
cccttttctatcgtattaactacgataaccgctcatttgagtgtaaaaaaggttcccccctcctcgcctgccttacccacgcatctctgcctctgggaaggcggagggtcaacttgcgggtctgtggatttcctttcctatccaccgcccatattctctgtcgaaagcctacctagatcagccgggagtttttcctatcccattcaggcgatcgctcaaggctgttttatcgacactccttcttgacaagtatttatttcttgacaaattctatttttccttttatcgattttctcttatttatcgattcttgtgaaaat

SEQ ID NO: 1176 - DNA, 992 bp, Schmidtea mediterranea
  source 1..992: mol_type = unassigned DNA
ttaaatcatttttaaatgtgtttgaatatcttaaattatcaaatcatattaatatcaatgctaaaaaaaaatcgtgckcatcaggcgcacgaaaataatggacacaactcgtcgacctgctgtcgactcacagagaacctcaatttggaagaatgggaagcctataatgctacaattccgccaacccctatttgaatgacagatagtcaaatatcaaaaaatatacaaactgctgtcaagcgtgactcacttccttccaatcgaaaaataggaakatgtaagaaacatgaaagtcaagctgaaaaaccaataatatgtcctaaaataaaacaatttgaaaatatgcaaaaaatacctataaaatcacagccgaataaattcccatccgttctaagcagaaaccgctacgaactactgcaagaatcggatcaagtatattaatttccccccmgggggaaattaatatacttgttakaaaattaattttttaataaaaataaataaatcgaataaatataaaataaaaataaatcaaattaaacttttattaacaataaaatcgcagtaagtaaatttccactgttattaaatttaaaacaaaattcctttaaaaatgcctctctttttcagtaataacaccttttcttgcttttattactatttcttgtgtactgtacaaatcgagcacagttattgcaaataggacatagaaattcctttttaagtaaatttaaatccatgagaaataaaataaaatccttttgattcaaagtttctatgttgctttctaatagaatggtgtaagcattaatgggtcttgatttttataaattaaatatatttaatctattaaattaatatgtttttattaattattaatttttatagtggggggaaattaatatacttgatcccaagaatcaactgatgatgaagaatatgttatttcaaaatacatacaagaagctggaaaaaacaaatcaatcgctaca

SEQ ID NO: 1177 - DNA, 1123 bp, Girardia tigrina
  source 1..1123: mol_type = unassigned DNA
gtaggtaactatgactgcaaaataataattctacacctattgttgataactcatctcgtgcgcaaacggagcatgttatttctaatcatttcgtcacacaggattcttctaattctgatagtaatattatagatagagataggaaccttgttgatttagatgcgtcaataacttctcctactattatacagccagaggatagtaagatatctgaggatgaggacttcatcttagtcaataggaaaaagagcaaaaataagaaaaaatctaagaaaacaactgaaaataaaaatgaaattcctattcaaaagagtaaagataagaaaaagaagtctaaaattaataccgaaaaactaactgaaaatattactacttctgaaataccacttgaaattgctccttccatacctttaccttcagcaagtacctcgggttctcaacaaccggccaatcctccagaagacgctactctaagtgatacggatctcttccttacacaggatgatcccgatagtcttattctttctggaagtactcaaccaacctttgttgacctcaacccttcacagcaatcggaacttccttcaaatactgacagccaaagatttgaggcgggtgaaacacccaaaatcataacttcttacagggatgaccttttctactctacagtccttcactacaactcagatacaggttacggtataagtgttgacaatggggagcagaggtttcgaattcttgctaggaatcttgtcaggaaaaccaaggataagttcccctctttatatgctggacaagtaattagacacacagtcttcttcaatcacttcaaccaggcatactacgccaataatataactgatagtaaaggtaatctaattgagttttctgatgataagccttttcaaagtataccgactgacccaaaaactgaactagagcaaattaggagagagagacaacatctagttgatagagctcttagacataatcagttacgggaaacttatattttaaataaacttaataataataatggggggggtggcgaacatttgaaaaggaaaaagatcaaagtcaatacggatgatgtctccagcaatgatggagacagaaaacatag

SEQ ID NO: 1178 - DNA, 43 bp, Chrysemys picta
  source 1..43: mol_type = unassigned DNA
gtttaattccttctgatggacatctgcaacacccgtcctgaag

SEQ ID NO: 1179 - DNA, 107 bp, Acanthamoeba castellanii
  source 1..107: mol_type = unassigned DNA
cccgtcaagggtgctccacgagatccctgtcgctagccgaccggttttaccaccccaccccgcccggacaaccacggaccctgctccgcagcaggaccccacgcacg

SEQ ID NO: 1180 - DNA, 188 bp, Acromyrmex echinatior
  source 1..188: mol_type = unassigned DNA
ggtgcacaacggatgcatcatacgtgtaccggagcatacgggctgtcacggcggctgcatgcgcgatctagctcggagattttatttatttatttattaatttatttatttattcatcgagtgtgagtgttcgcgttttgccgagaagcgattttcgttaagtgatacgcgccgcgttcataggttag

SEQ ID NO: 1181 - DNA, 1264 bp, Alligator mississippiensis
  source 1..1264: mol_type = unassigned DNA
tgctggaaagacggagaaccgcttcctttttccctgcgcctggcctggtattgcagtacctccaggattagcgccaactagtccggcagactgtcggaatacagcaatagaaagwgagctgactagcagcttgctttccttcctccggtgcagcatgggttctcgtcagtcmtgacgggctagggaaggcggtgctgccagtacgtccgaaagagtgccggttgcgcaagcgaccgcgccactcaggtgagtagccaagggtcttacagttcaccggacccgawaacgcgaaaaccccaactcgggctagtagccgaagacctgggtcccccccmggtcagagtaggcgaacgccwgkgctcagaggacggaacgcggaaaacacccccaggtcccaaggacgccctgatccactgacaagaacgctcgaggcacgccaggagacccccagctagggtggaccgccgactgcaggtccggaggaccctcccaggagggtggaccagcgaacccaagttggcgacgaaccctgacgcaccccccacgatgtcaggaccccgacaggcggcggtggaccactgaccatcgaccgacccccagaggcagagagactctcagagcccggaaccccggctgacgagagccgcctcccggcggaggaccccggagcctgaggatgccccccggatgacggcggagcgccccgagcgacagcggacccctccggacccccacggcccctcggtgacgatggcgggccccgaacgacgacgacccccggaccccggcggtcccgaggacgccccccccgagggtctccccacgctggtggaggagccccggacccccccgacaccggacccccccacggacgacccaggcgaaggcgtagacatgacagcactcacgttcctccccttccccctcccggcgaagctgttctgcccgacctgccacccgccaagacagtacaggtcgcacggcgacatgaacaagcacctacggcgcttccaccagctgcgcctagccttctactgcgccctctgcggcaccgagtacgaggccctgaagctcctgaagaaccaccagaagggatgcgagggccacggagccgagaggagacccggcacgctggtgaggtccgctgccccggcccgccggacccaggccgcggtgcgaaggcccgccagactggccaccccgccgacaaccccaccggaccagacctccagggaccacccgacggagagacctgccccagtga

SEQ ID NO: 1182 - DNA, 200 bp, Chelonia mydas
  source 1..200: mol_type = unassigned DNA
ctcttcttatgaatacttgcaacacctgcactgaagatggattctccggctgctatttttgaaaaactgatgctgctttgaaggtgtattctgctgctgctaccttggaaggaaattctctctctgctcctgagacatccccagctgcaccgtgtaccaccaccaccactgctgctgctccacagaaggtttctcggaca

SEQ ID NO: 1183 - DNA, 460 bp, Chrysemys picta
  source 1..460: mol_type = unassigned DNA
ttttttctgatgcttgactgcaaacacccatccagaagatggaatctcctgcagccatttttgaaaaaattgatgctgctttaaagatatactccattctcctwktttgkaagaaaactctttttcagcttcagctattctgtcatcggctgctgctgttcctgcttcccagaaagctcagcmaaaacctatcctgaagaccwcccttggtgcctcacggaagacccggascacctgcaagaaccaaaacattaggagctggctgaagaaaccccccgtggatacctcwgcagggagacctggstccagmaggacakctcttcgggacctcmcatcsaggagcaagaatatctcaacagctcttcaggagggggacccccggagaaccctgcccgcttcccagaaccaggatgctgatcgccgccccaccgggaaggatgccaccgcaggagccccccca

SEQ ID NO: 1184 - DNA, 380 bp, Drosophila sp.
  source 1..380: mol_type = unassigned DNA
aaagtgtagttcttttctgttttagtgtagtgggaagtctgtttctttttattatgttttttacgaaaaagtcctggtctttgaaattcattgtctaaattttaaataaaattataaaatttaaaaagaaaattaattaaagaagcgatgaaatatctctgaaattcaatcaatcaattaatcatggcgtctcagcgagtgcacgtatttgcctaccccttcgtgggaccattccggtgctccgtatgcatggatgcgtccgggatgcatcccactaggtcgctgggcgaatacggcacatacgctgcggcatatcagcacataacccggcgccacccacaagtggttattacataccgttgccgggtctgtggcgctga

SEQ ID NO: 1185 - DNA, 557 bp, Gavialis gangeticus
  source 1..557: mol_type = unassigned DNA
  misc_difference 325: note = a, c, t, g, unknown or other
  misc_difference 444: note = a, c, t, g, unknown or other
cgctggaaagacggagaaccgcttctttttcctgcgcccggcctggtattgcacttcctccaggaccagcgccaacctagtccggcagactgccggaataatagcctcagaaagagagctggctagcagccctcttttctttcctccggtgcagcgtgggttcttgtcagtcctgatgggctagggaaggcggtgccgccagtacgtccgaaagagcgccggttgcgcgagcgaccgcgccgctcaggcgagtagcccaagggtcttacggttcgccggacccgataacgcgaaagccccgactcgggccagtagccgaagaccntgggcctccctccccaggtcggagtaggcgaacgcccgtgctcggaggacggaacgtggacaaaacacccccaggtcccaatgacgccctgatccactgacaagaacgctcgaggcacnccaggagacccccagctagggcagaccgccgaccacgggtcgcggaggaccctcccaggagggtggaccagcgaacccgagtcggcgacgaaccccgacgcaccccccccgcg

SEQ ID NO: 1186 - DNA, 10 bp, Lytechinus variegatus
  source 1..10: mol_type = unassigned DNA
atctactatc

SEQ ID NO: 1187 - DNA, 102 bp, unidentified
  source 1..102: mol_type = unassigned DNA; note = Description of Unknown:Nasonia vitripennis sequence
ccattccttcgtacgggttttcgtgccggcatagccgggtgggagactcgcgcgggggaggtcatatctcaccaccatcctcgagctttttgctgcacctga

SEQ ID NO: 1188 - DNA, 1097 bp, Phytophthora capsici
  source 1..1097: mol_type = unassigned DNA
  misc_difference 169: note = a, c, t, g, unknown or other
  misc_difference 956: note = a, c, t, g, unknown or other
gcccgccggtggagtagccatgttggccaccaccgcccaagtctccgccgcagctgcgactgctgctgctcatcgagtcgcagtagtcgcagctgcacaagcaccacctcctgccggacgcgccgccgtggagcaccacgcgcgcgctgagccgtaccaagaccaaggnttccaggctcgcgcgcgcgtggmgctcccagccagcgacgcgttcagcagcagggtcggctgcggcagctcgacgctgcacggggacggcagcgacggcaggcaccaagaccacgacgaccaagccgtcgctgccgtccccatggacgtcgaccaaggtgctcggtggccgacagcggatcamcacccgctgtcgccgccaccggagctccgagtcggcggcaagcgccgccgcctgaacgacggcgacgacgaagacatccgcgagctggccgagcttctgctgcccgacgaggaggaggccgacgaccacaaaccagcgcccaggttacccgcgaccagcgctcatccggcctccgtcctcgctgtgtacgcgcacaacgcgcagcgcttcaactgcacgttgtgcgtgtacacggctgccagcttcgctgctcttacgcgacacagggactctcggcaccggcgcgtgaccttcctggacaggttctcggcgggttgcgcgtgcggcaaaccttttgcctcgaggctggccgcagcaagacacgcacaaacgtgcgccagcctcagcaccacactggtcgcggtttcgacgacaggaggagcatcaagccacactgtcgtcggagccaacaccaccgtcgccacggcggtcaccgccgaaccccccctgctccaccatcaagcctcggaactcactgtgcccccccccacgtgtgagttcccccgacgtcgatgtgcagctgcacagtccgccacaggaagatcagcacgaggacgccacccancacccggagagcacgcaacaccaacctcctgaggcaacccgctggggttcgccgctcgcgcccacgctcgttgcctccaggattgctcagcgactcggcgagctggaacctccacgctggggcccaccattaccccgcgcg

SEQ ID NO: 1189 - DNA, 378 bp, Phytophthora infestans
  source 1..378: mol_type = unassigned DNA
agctcggcctcgcggctgccttcccaggcgccgccgacttcgcgctctggcgcggcccacacgccgccgccgagcctccaagcgcgcccgttggctttcgcagacgcagggctcgcggcgacggccctcgccagcccccaagaccccccctacgatgtggcaccacccggcagggcggccggcaggctgcccgactcggtatcgccgggtgctacactctcagccgccacagctcgggccttggcggtccgccattggcccttggagctcgacagcgacagcagcgacgacgaggacgctcaagacccccacgccgccgccccagaacccccagaagacgtcgcgagtgtgcttgccccacccggcagggcaggcagc

SEQ ID NO: 1190 - DNA, 142 bp, Patiria miniata
  source 1..142: mol_type = unassigned DNA
ctgatgtggataccttggaattactcaaccgtgtcggagtcttttgtcttttgcgcccaacacctcatggataccatgcttgtcgctggagcgacgttacaagcgtgagggcgccctccatgccggacagctggtctgtgcc

SEQ ID NO: 1191 - DNA, 291 bp, Phytophthora sojae
  source 1..291: mol_type = unassigned DNA
agacgagcaacgcgctggggcccaagacctggcacgaacgacactgcccaggctgtgaacgacgagcacgctgctaacccggcagcgcaccggcctctgggctccgctgcaccggttaccggtgcaacacggtggggtccacgtcacggcgcgatcggggcagcggctgtagctcgcctgctcacaggcctacccacggcaccagcaccagctacgcgccggcctgcttcggctcggcgctgcccagacccgcccgctccccccgcggccacgacgacagcccccgatgcg

SEQ ID NO: 1192 - DNA, 698 bp, Pythium ultimum
  source 1..698: mol_type = unassigned DNA
gcggtgtacgcgcacaacgccgcgctcttcgagtgcacgttgtgcgcgcacaccgcgcgggatctcgccgcgctccagcagcatcggcgctccgcgcaccgcagcgtccgctttgtggatcacttccacagcggatgcgcgtgcggcgtgagcttccactcgcgtgcggcggcaaccaagcacgcgcgcgaatgtccagagagcgcgttctcggtcgccgccgccgcgcgcactgcagcggccaacaccgcaggtatgtctctcggcgccgacgaacgcgaccacctcgcgtccgtcggcgccttgcatgatgttgcatcccccgcttttggcaacattttgccggttgcgtttgcgaccgcggcagacgcatcaagcgccaccgtgatcgcagacgcagccatgcagcacagtgctgtgccctctgctgccgcccaatcccctcggcgtgcgcacgtcccccccgtgccgcgcgccaccacgacaccatccgcgctgcggattggtggcaaacgccgccgcctgaacgacgacggcgacaacgaaaacagcgacggccgcgacgccgacatcgagatgcgcgccgacgacaccgacgcaccagcgccgaccaaccccgcgaccagtgcggctgcaacgcccgcgcgcacagcaccagcaccaacggatgccgcgaccgcgcgccgccgccacacgcg

SEQ ID NO: 1193 - DNA, 485 bp, Strigamia maritima
  source 1..485: mol_type = unassigned DNA
ggagtgttcttttcggagacgccgcctactttagaggagagaatccccacgggcatcctcatttgatctgatccatcgagtatctgcgaatagtcggcgcactccttttgccatgatcccgggggtctcatggtaaaaaggtttgtggcacggcttagttgacgcccctcttccacgtcactcggcctgcatcgatcgactgctctctcctcttcctccctccctcctcttcacgctctcttcacgtgaccccttcccatcccgcccctcggcttttggcaaagatctgtgtgtcctccaaagcacccatctaccatttgctcgagttgcgattggtcgaagctgccacgccactcgtctactctgcctctctgaccccttcccccctctctccctctgccgccctcgcctctcgggtcccttcccatctccctcctcccatccacgtgctccctcctctcgtcacgtgatcgttgcggctcgac

SEQ ID NO: 1194 - DNA, 1328 bp, Strongylocentrotus purpuratus
  source 1..1328: mol_type = unassigned DNA
aaggctcaaaccaggctgccaaccaagctgccagcttaggcaccaaccaagctgccagtccaggctccaaccaggctgcccaccaatctgccagcttaggctccaaccaagctgcccacctagctgccagcttaggcaccaaccaagctgccagccgaggatccaaccaggctgcccacctagctgccagcttaggctccaaccaagccgccagcccaggctccaaccaggttgccacccgaaagtctgccagtttaggcaccaaccaagctgccagccgaggctccaaccaggctgccactcgaggctccaaccaggctttcacccgaagcattacccaggctgcccgtttaggcacaaaccaggctgccagccgaggctccaaccaagcaaccagcccaggttccaatcaagctgccagccgaggctccaagtaagctgccagccgaggctccaaccaggctgccactcgaggctccaaccaggctttcacccgaagcattacccaggctgcccgtttaggcacaaaccaagctgccagccgaggctccaaccaagcaaccagcccaggttccaatcaagctgccagccgaggctccaaccaagctgccagccgaggctccaaccaggctgcccaccaagctgccaacttaggctccaaccaagctgccagcccaggctccaaccaggttgccacccgaatctctgccagtttaggcaccaaccaagctgccagcctaggctccaaccaggctgccactcgaggctccaaccaggctttcacccgaagcatcacccaggctgcccttttaggcacaaatcaagctgccagccgaggctccaaccaagcaaccagcccaggttccaatgaagctaccagccgaggctccaaccaagctgtcagccgaggctccaaccaggctgcccaccaagctgccagcttaggtaccaaccaagctgccagcccaggctccaaccaggttgccacccgaaactctgccagtttaggcaccaaccaagctgccagccgaggctccaaccaggctgccactcgaggctccaaccaggctttcaccccaagcatcaaccaggctgcccgtttaggcacaaaccaagctgccagccgaggctccaaccaggcctccaaccaagctaccagccgaagctctgccagattaggcaccaaccaagctgccaccgttagaggcccagagcccaccaatcccataacgtgtgagatatgtgaagcttccttccacacctccgccggtctccgtcgccacacggccaggcttcatcgcaccactgctgaacacactgacgacagc

SEQ ID NO: 1195 - DNA, 232 bp, Trichinella spiralis
  source 1..232: mol_type = unassigned DNA
tttctggtatgaatcccaagcggattcgttacgaaatttgcataagtttttgaaaaaataggcatttggtcgagtgctcgcaccaccatttgtcgcgggtcgtcctgatattgcactacattcaggaacggcctattcccttcggggaattgtgttttaggaattggaatcggtttggttacgatcggtcgagtggttcgtgagatcgagtgacagccgggtggcagcgaca

SEQ ID NO: 1196 - DNA, 927 bp, Chelonia mydas
  source 1..927: mol_type = unassigned DNA
ggcagaaactgcacsttctagaagactcactgcctatcctgaggaagactaccgctttggagatggattctactgccgctgcttcaaaagaaaatcttcatgctgcttcggaggctccaggacagastgagaagatgatcgctccctcgccgattccacagaaaccttcaactgccgctcggaccgctgctgctccacggagcgcccatcggggaacagcctctaagagaccctcagcgcttccaggacatcgcagatgagcagcatcgattggaaaagcagcgcctccctgaagaaaacccgtggagatgctgctgcagggawatcttgcacctcgaggacggcctcccaggacatcgcagccaggacaaacatcatctcgcctgctcttcaggasaaggatgccmsaagaacttmtcccacctcctcmactgcccaggatcctsatgctggtcgtcgtcctgctgtgctggaagmkaccccaactggcgagacctcagaaaccacccagmwggacckcaacatctcactagatgcctgcccagccgaacctctccatgcwactctcccagagcaacsagaaccatccagmgaatccgctgatatgactgaagccmatccaacagagggagaaggaaaggagaatgactgcatctatctccagtatcccctccctacggacacgctcctctkccccttccgctatccgagggttccagtacattggcagtctcagcamacacctcaagagaatccatascaagcggatcaccttccggtgtgccctctscgacctgcctttcgagacgcagatgaaatgtaagtctcatcaagtcacctgcaaaggacatctcgaactggaagagtccaactttaccagtctatgttgccgccaccccatctctgctccgaaagcagaaacaccac

SEQ ID NO: 1197 - DNA, 840 bp, Phytophthora capsici
  source 1..840: mol_type = unassigned DNA
  misc_difference 125: note = a, c, t, g, unknown or other
  misc_difference 574: note = a, c, t, g, unknown or other
  misc_difference 588: note = a, c, t, g, unknown or other
  misc_difference 611: note = a, c, t, g, unknown or other
accgcccaagtctccaccgcagctgcgactgctgctgctcatcgagccgcagtagtcgcagctgtacaagcaccacctcctaccggacgcgccgtcgtggagcaccacgcgcgcgctgagccgcntcaagaccaagaattccaggctcgcgcgcgcgtggcgcttcaagatggcgacgcgaccagcaggagtggccgctctactgacggcggagacgaggccaagaccgaggacagcgacgcggacgcagccaagcgccaagccgctcaagcagcaccgagaccccatacccmggacaccgcgccgtacgacggccacagggactcggtgctggctgtgtacgcacacaacgcacctgcattcacctgcgcgttgtgtgtgtacacagcacgcaacttcgccgagctgaccaagcatcgccatgcagcgcatcgtcacacccgcttcgtggatcacttccacagcgggtgcacgtgtggcatcggcttccagtcgcgcgcggcagctacgcgacacgctcaagcctgtgcagacagcacacacgccaccgtagctgcctcgcgcgacccggcmnccastgcssccsgngccggmagcgasgaggaggaccncgcaccccccggtcctctsstcgcggcagcatctgcagctgcagcagccgcatcaagcgccactccagctgcagatactgccaccacgcagagcgccgtgcccatcgctactcctgggccccagtacgccccccacgtgctggagccacctccagagctccgagtttccggcaaacgccgmcgcctcaacacgccgatcgacctgcagccgctggacgtggacgcgctg

SEQ ID NO: 1198 - DNA, 377 bp, Phytophthora infestans
  source 1..377: mol_type = unassigned DNA
gctcggcctcgcggctgccttcccaggcgccgccgacttcgcgctctggcgcggcccacacgccgccgccgagcctccaagcgcgcccgttggcttccgcagacgcagggctcgcggcgacggccctcgccagcccccaagaccccccctacgatgtggcaccacccggcagggcggccggcaggctgcccgactcggtatcgccgggtgctacactctcagccgccacagctcgggccttggcggtccgccattggcccttggagctcgacagcgacagcagcgacgacgaggacgctcaagacccccacgccgccgccccaggaccccccgcagacgtcgcgagtgtgcttgccccacccggcaaggcaggcagc

SEQ ID NO: 1199 - DNA, 166 bp, Phytophthora ramorum
  source 1..166: mol_type = unassigned DNA
tcaagccccgccgccaagcccagctgcggctgttgccgcccctccagcagcagcagtcgcagctgaacctacagcccctcctgctgatcgcgccgccgtggagccccgcgcgcgcgccgagccgccccaagaacaagcacccccagctagcgcgcgcgtggagccc

SEQ ID NO: 1200 - DNA, 867 bp, Pythium ultimum
  source 1..867: mol_type = unassigned DNA
tgactggtgtttgatcacgatcaatgaggtgattaacatgagccggagcaggccccttacacgctggtgctgtaatggttcaggaatgctcttatgagtaactccacagtataatttttgttagcgggggtgagcgcgtgcgccgcccccacctttctcttttcgtttgtatttggttcctctggagcgacttccgtggcttttgtcgcgcgctatcgcgcccggcatgaggatcgtcgctcctgacgccatgtgcgccagtatatcggagccccgtgctccgcttgggtgtgtgttccgccacgacgccacgcgatttgcgtgcacggcatgcgctggcgacttccgctcagtgcgcgaactcgcggtgcatcgtcgacgtgcgcaccggtctctggccttccaggactggtatgagtcgtcgtgcgcgtgcagagcgctcttcaccgcccgtctcgacgcgttcgttcattcgagccgttgcgaccacaatgcgaaccaatcagcgaacgccgtcccctcgtccgccgcctcgacaacgagagcggacgcggatgcgacggccccccctcccgctatctctcttccgcggacgggcttcccccgcccctgtcctagttgcgccgctctccttctggatgcggcaacttggacgacccacgtgcacgcgtgcgctgccgccagtgcgacggcgttgatccagcgtcatctacacgccgttcctcccgtatcgacagcaaccgatctcaacggcgatgatagccaacctccagacccgcgtgccaacatccaacagcttccagccatccattcgacaacgacaacgacaacgacaacgacgacgacccgctgctcgacgacgtgctc

SEQ ID NO: 1201 - DNA, 56 bp, Phytophthora infestans
  source 1..56: mol_type = unassigned DNA
gtacggccgaatccctggcctctcagcctgtacgcggggctatacttggtctaagt

SEQ ID NO: 1202 - DNA, 568 bp, Phytophthora ramorum
  source 1..568: mol_type = unassigned DNA
tgcgcggcagaccaagacgcgcagccaacaacagaccgtgcagcgtgcgggtggaaagcgccgccgcctgaacgctggtgacgatgaagaccagcgagagctggccgagctcctgctcgtggacgaggacaaggctggcgccgaacaccccgcgctcaggctgcccacggccagcgctcatccggcctccgtcctctccgtgtacgcgcacgctgcaactcgcttcgactgcacgctgtgcacgtacacggctgccagcctcgcttcgctcaagcgccaccgctcgtctcggcaccgacgcacggccttcctcgacaagttcttggcgggctgcgcgtgcggcacgcccttcgcatcgaggttggccgcagccagacacgcgcaagcgtgcgccaacctctgcaccacctcggcgacgacttcgacggcagcaaaggcatcaagccccactgctgccggaggcagacccaccgtccgtgcagtggtcaccgccgcgcccgacctgccccgccagtatccctcggagctcgttgcgtcccccccgcagccgagctccaccaacgttgca

SEQ ID NO: 1203 - DNA, 378 bp, Phytophthora infestans
  source 1..378: mol_type = unassigned DNA
agctcggcctcgcggctgccttcccaggcgccgccgacttcgcgctctggcgcggcccacacgccgccgccgagcctccaagcgcgcccgttggctttcgcagacgcagggctcgcggcgacggccctcgccagcccccaagaccccccctacgatgtggcaccacccggcagggcggccggcaggctgcccgactcggtatcgccgggtgctacactctcagccgctacagctcgggccttggcggtccgctattggcccttggagctcgacggcgacagcagcgacgacgaggacgctcaagacccccacgccgccgccccagaacccccagaagacgtcgcgagtgtgcttgccccacccggcagggcaggcagc

SEQ ID NO: 1204 - DNA, 190 bp, Phytophthora ramorum
  source 1..190: mol_type = unassigned DNA
ccaggaatcacccccgccgcccccaagcgctccgccgccgagcccagctgcggctgctgccgccccactggtgacggcagtcgcagctgcccctgccacctctcctgttggccgcgccgccgtggagccccgcgcgcgcgccgagccgccccaagaacaagcacccccagctagcgcgcgcgtggagccc

SEQ ID NO: 1205 - DNA, 130 bp, Phytophthora infestans
  source 1..130: mol_type = unassigned DNA
ctcaagcctagcagcggctaccgcagctactccagctccggtagctgctactgctacaactgctcgcgctgctgctcgcgtcgccgtggagcaccacgcgcacgctgaaccgaaccaagaacatctaccg

SEQ ID NO: 1206 - DNA, 190 bp, Phytophthora ramorum
  source 1..190: mol_type = unassigned DNA
ccaggcatcacccccgccgcccccaagcgctccgccgccgagcgcagctgcggctgctgccgccccactggtgacggcagtcgcagctgcccctgccacctctcctgttggccgcgccgccgtggagccccgcgcgcgcgccgagccgccccaagaacaagcacccccagctagcgcgcgcgcggagccc

SEQ ID NO: 1207 - DNA, 1193 bp, Ciona intestinalis
  source 1..1193: mol_type = unassigned DNA
atcaacccactactacaccctctacaaagaacccactacagcaagatcttggcgaccaactacacctgcagcctcccgtcgactcttcaccacctgcgcacctccctccgactccaagcggcagacagtggcaccaccagcactccaagggtccacagccagaagagtgcaccccccactgctaggaagagctaggccattgcccgctgtgggccttgtgctggctgtctgccgctgattggcacgttagggagtgtgcgctgagcacgatagggaggctgctgaagccgaagaacccgcgccggggactttaggactttaactaaaatctgtaacactaaaattggaatactggattactattggattactactggacaataacctgatctacaacaaccaattggattacagaaccaaattacaatctcaactacaaacaaaaagtgagtccccggccgggtttctatattacccaattactgtttttacaattttaaaattttatagtattttactaatttttccgccccgctagcacttaaattggcaccccccccccccstccaaaaaaaaatagataaccctccaccacctaaaccccggtcaccccctcagaactaattggaacccggatcttttccctctatcaaatttccggttcagtttggcttaattacctaaaacccgtctttattttatccctttattgccccttaaaccaaattattcaaattgaaatccggccaaattgccttgctgaaccaccatttttgtttttcttataaaagtaaatttttcaacaacccaaaatcataaaattaaaactgttatctgattagtctaaattctgttattgacaaaaacctccataccaaccttaatcttatcattatcttcacccagactgctcaatctagttcttttttcaatcaataaggaggtgttttctttggtctgttgttttatagtttaccgttataatagtctgttgtcctatagttttccgtggtgtatttctggtctactatagttggtgcctctaaaacattattataccgaagagtgctagcgatttctattattaactcacccaccagtactgctgtgcatccacgcagcaccacgcctgccatcacgtacagtgcgcttgctgccttgtgttttgttttgcagacaccactggacgatag

SEQ ID NO: 1208 - DNA, 360 bp, Schistosoma mansoni
  source 1..360: mol_type = unassigned DNA
  misc_difference 137: note = a, c, t, g, unknown or other
atctcacgttttaatttatttttgaactactgcagtctgagtgcttctaacgacccgaaggctcagaaactacccacttcttgaactgctactttttgctgtttatccacaacaacagttgtgattctattctccanatattccttgtgcttttgtcaacattattctataccaactgtaccacctacttcttcatctcacgttttaattctggtcttattttctcatcattagtcacggagagggcctatgaacggtccgtgacgcgaaattctatccgcgatttcgacctctcctgctagtggtccccgaagtacggttcctctggcctgtcagttgtgttaaaactatataataacg

SEQ ID NO: 1209 - DNA, 332 bp, Bombus terrestris
  source 1..332: mol_type = unassigned DNA
tcaatagttactcgggggcaggcgggatattggtcttgccttgcccaagtcacactcctacctcctcgtggtaccgccggtaacacgcgcacgtccacatcagcgaggggcgtactcccccggatgtggcggcgcgtggctaaacggagtgtggcgacgaaggagcgaaagactaacaactataacggtcttccgtaacggctacttggagccgtgaataatggagcctatattaaaccctggaactcgttccttcgttctgttgacgactggaacggcaaaggacatgatttggataacaattggaaacttaatatcgaattcacaattaa

SEQ ID NO: 1210 - DNA, 422 bp, Crocodylus porosus
  source 1..422: mol_type = unassigned DNA
aggcgtctcctttaagggcaacggtctggttacgcggtcgcagcagkcttgckccaggtacctccwcgtggttcccgccgggtgccgmagmcccaggsctgtcggtagctcgatcctggcacagtamggccaggggagtkcttccttgctgcwggtgccccacaagcgtktggcagsmcmcctgcttcwtcgcaamaatmasagkgtsmtcagtagtcggccccgccgctagccaaaactgttcgccacscagttacagatggtgcctgtgctgacckgkkgccccgtgggctcggwggtgcaggggwggccggcccatggctgggccagacstgggccktggagcccgctcccamcccagagttccccctcaamgccgccaggkcagmamcakccggggagkgmcacggccccggccgtga

SEQ ID NO: 1211 - DNA, 149 bp, Drosophila willistoni
  source 1..149: mol_type = unassigned DNA
gaagctgggtcggatgagcgcagaaggggtgttctttggaacactgtaattcataagtcgtaagtctgatcaagtcgactcgaaacctcctcgtggtgtttcctgggtgctgttgagttcctagtctctaggttcttttcagtagctaa

SEQ ID NO: 1212 - DNA, 290 bp, Gavialis gangeticus
  source 1..290: mol_type = unassigned DNA
aggcatctccttkaagggtaatggtctggttacatggtcatagcaggtttgtgtcaggtacctcccagtggttcccgccgggtgscamagccccagggctgtcggtagctcgatcctggtacagtacggccaagggagttcttccttgctgtcgggtgcctcgcaagcacktggcagccccaatcgcttcattgcgaaaaacacaaacgtcctaaggggatgatcagctagtcagttctgccgctagccaaaactgtttgccacccagttacagatagcgtctgtgctga

SEQ ID NO: 1213 - DNA, 247 bp, Ixodes scapularis
  source 1..247: mol_type = unassigned DNA
gttccaaaggaaggcactcctttggttcgtgatgagatgttcatggtgcttgcctagctggagaaatccgactcacacctgcacgtggtccctgccgcctgccagtatgccgaggaaacgggtgcaacttaatccgtggatactggtagcaacgtgagcaacggtacggtccttcgcggaccaccctgggcgttcgggttgccagcccgttcgcccgaaatatcttggccctgaaactaaaagaaaa

SEQ ID NO: 1214 - DNA, 473 bp, Mnemiopsis leidyi
  source 1..473: mol_type = unassigned DNA
tgggggccccttggacttgctccctggggcaggacaccagtgaaaggagatcctcaagacaggacagagagacaggcacaccaacccttcgaacctgaggagacacccagatctggttaccccattcctgtaaccatggttgctctccgtgcgctgttaaggaaacccagcctagtaccctcggggaaaggttgcgtagtacttagcagtgtgcggatcaaacctctaccggtctctctagcgatgaaagtttctccgactggaacttgagggactggctagcccagctagcctgtagagcaatgcgtatacgatgccttggcgacaatggcgaccgctgcttagcagacggaggttagtgaaagggcgacttgctgttcatagtcacgtgagtcgtctagaaactgcaccgatgctgccctctgttccaggagaaggacagtggaggactaaatcgtagcgcgagcggtgtt

SEQ ID NO: 1215 - DNA, 1124 bp, Petromyzon marinus
  source 1..1124: mol_type = unassigned DNA
ctattaatgggatgaagaagggggacacgagtttgtgtgtgcatccagtttccatggtgcatgcaggagtggtggtttaaatggcgagactctacagggcttccatggctacacgggatgcaaggcatcagacattttggcacaggcaatccttttggtctctaccgcaatcatgtcttagacctcagtagcgaccactacaaccacagtggtgactgctgttgagtgaaggacgactgagcgctggataacaactttcttgcgtggcccaacatcgaagcaaccacttcggagctggcacaaggcaagagggcagcccaaggtgtgaatcatctcaacttcactgcaggaagaaatgctgtgcaaggatgagtgtgaacgacaccaacgggattgttgctgaccaggaggtgccaaccaaatttgaatggattgactttgggcctggtttctcctgcgtgtattgcacggaaaaacaagtggctacacgtgtggccgtcgtgtcctggggtttcgcaacacaactccacaagatcgacaactatgaggatgacaatgtacttaaagaacaaagagactgacgccaaaggggatttaaaccgccaaatcgtacattgggtctcactacaatttttttacgtgtatttattttcctaagtgtctgtacttgccattcttcgctgctttttctgcattaattgcatatcgtatgcaaataagcgaattaaccaccaccgtgcaactatatgcagatgttacagctgagccctctatcataccggtgtactaatctggtatggtgttggcatgctatgcttgcgtaacgacctttgctgattggttcagtcggctgatggtgggttcaggcgaaacatttgtatattggtttaatcaaaccgaaacactaaaattttgaacacagttttccattacaccagttgtattgctagaagtgcaaatcgaaggagtcaattttgaccgacgattagctgccgatgtgcggtgaaaaagctgatcacaatagcatacacttgggccgacaaccccgtgtgctataaacgtaagtcgcgaattataaagaaaacaaaccggacggactactcggtgacgaactaacatcgctc

SEQ ID NO: 1216 - DNA, 1090 bp, Schmidtea mediterranea
  source 1..1090: mol_type = unassigned DNA
cagtgctattcgaatgtcaatgtgaagaaattcaactaagctctggttaacggcgggagtaactatgactctcttaaggaattaagaatttacctgccktaktaaaartgaaatcmgttgttcatwgcaagtggtattgtacaccttcccgcggtgctagtcgtttaaaactaagttacaaaccacgaggggcgtcctgacggactgsaaaagcattgagrgtcmtgaagagaggctcttattgtacgaatctcttcaacgatcgaagtctggaccgatatgagaactaatacattagttgacaggtgaaaaatactgttgattacttagttctcagtcatgtggtatattgccagtcaattactacatwaatattagtgtggctctcaaaggaacacgattgrtcggcagtccaatgcgcgactggcgggcttgttgtttgcatttgttaccggctacttgaaaaggttatatatagcagacgcttaaagcgcgactgtaatttacatytcattgcccagtatttgtcttttgtcagatttagcaaaatttcatattttgttaattaccttaactggttaaacgatcccataattgcttgcaattattataaagtaattcaggtaaaaattacatatctggctgatcctgccagtagtcattttacttccgccgcgctataaaacagtttaaaaactgaataggaatcaaaaagaacatggcaagcgactatatgtaactgggcattcaacattccctattacatatggtggtgcctggggtctgttttatataatgggtacccgggaagtggatctgtatcaccagtcatggtgccatatctttkgataaagatacagtttaaaactgcgatgatactaatagagatcctcttagaccttcgtaaagaagtggggattgatgacattagcattggaagaattaaatctccaaggaaatggagtaacttcaatgaagtcccacaaccccgttgaagggctgggttcgagtatcgagagaaaactctaaattctcttcggttmtgtccaacggaggggacattactgtaaaatatcctctaaaaacaact

SEQ ID NO: 1217 - DNA, 743 bp, Strongylocentrotus purpuratus
  source 1..743: mol_type = unassigned DNA
tctcgcgacgcgttcttctgcctgatgaagtcacgtcaggtaatagacttagaaggttgatgagcgttcctctcctggaccgggggtgaggatgtgttctactgaatcatcgttccggttgtgaggtccgctgcaaataggccttggggtggtctacctccgggtcgctactccttttgagctagtcgatccaggtgagagtcggggaagcccacttaggtgggccagctaagcagatcacccccccagcacgacagtgcgctgtaatatagcctgttgagagtgcacccatttatactgttataaaagtataaatggttcttagctaacctatccaatgatttttattgttatgtataatactgaccactttagtctagtgtcatgtaaggatccgagacaatagcctatgtctctagtctagcaataacacaagagggataatccacctccctactccagccaccacctttacctttcttatcttccatatagatgccaaccagacgggtcgatgggcagtgagaaacaagaatggggataatttggaatttgacattctttcctaaagcagacctgaagggttaagagtcacaagcggagtccggactgtctttataaacagacaatattttcttattttaccacctatatggggatatttcccaactcgtaatatagggcccactgtcaagtggctggtataagttaccctgtgggtaacaaataaattcaaacaaaga

SEQ ID NO: 1218 - DNA, 1496 bp, Salmo salar
  source 1..1496: mol_type = unassigned DNA
aatctttaaccccggactcttggggttcttacgactctgtatgaggaacagtcgaagagagggcgctaccaatccaagtatatgtcccaagagggctgggacagggtggaagagtgcacctcgcgatctggggcagggaaggaatggagagaagtcgaagaaggcttgtagagaaggggctctcctagatcctaacctgtatgacgcccgtaaaacggtgaccccagtagcgaataaaggaggcaggtgacaatagagggcagggccgacttcccaggtttacattgttgtacttgtcaacataaagaggtgtctcaatagtttgaatcaacaagggagaggaataccgacctgctcccttggggcgggggtactggtcttagcccggttccccgcaagtttcctttgcctgggatgtgcctgactggctccatcccctttccccattaggcacggctagatgacgcaccgatgggcgggtgtgtaggtcgctaccgaaggggactgggggtgtccggtgaaccaggacttcccaaaatggtctcacatttttaagcggcttgagtatcgcccagtatcctcgcgcggcactgggaacccagtcaaccgctctgtgccccggcgcaggcgggggtttaatgtctccccggcttcaccggcgcttcggcgacgacgcagaggagcacccggaggcccccatgaacttaaaccaacctatcttgaaatatggcctctcgttcgggtgaagggcaggtgggaagagagggctgcctcacgataaacacctagtcaatagccagtcgggaaaaatgtggaatgttaggacagggaggtaagggaggcggctttttcgtaaggctccttcaacccctacctgtagtccacctattgcaggtgttgacaacatgcaagatgacctgcctcgttacgggtcgcgtatcattgctacaggtcgtgtgccgcttctaagaggatagtaaggagaggttatagggaggtcctgttagggcttcctcaacccctctctatgcgattccttacaggagtggatcgagaagtcccggacgtaatacaccctggaggtaagggagtggccttctagtagggctgcttcaacccctctgatgggagtgtaccgggaacctcgacttgtaagcacaggttagtatgggagcagaagggggagccgtaatgggcttctctttcacctgcttacataatacctgtggtgcatgtatctaggtcttggcgggagagtactgagagacaaggttgagaccccaagattgggtctccctagcctctatagctgcgactcttagcggggatatggagtaacatgtaccaagggagtgaataataaaggaattgacggggtacaagtgactgttggcccgaatcctagccacttgatgaccagggatatattacagactgagagcgaatctagagacgtgagaataaagtgagaattggttgagcgaatacagaggaag

SEQ ID NO: 1219 - DNA, 173 bp, Tribolium castaneum
  source 1..173: mol_type = unassigned DNA
agtcatagagccagaacctcctcgtggtcccgctgggcacagggattaatttttctgtggcaaatttgactggcttcagagagcgtttttcgaagtggwctgtgtgactgcgttccccccttagttgctatwtccgctkmgattaacatctcacctcgacgtwtaagatcatt

SEQ ID NO: 1220 - DNA, 305 bp, Tinamus guttatus
  source 1..305: mol_type = unassigned DNA
ctggggaccgtggttacaacccgggcttagctgcagagacagtacctccccgtggttcccgccggaccccgtaacatcgggtgactgaatctgtctctgccccgggagtagttcctccttgccctattgaccagcggtcgccggctgctcaatagtattctaggcgtgaaatatagcgatagtcctagtggttgtcttactgggccatagccccttgcttcaggggtcattcgcgaagtctctcaggagaactgggggtggtgttcttctgggtatagctaaaccccctagactgtgtccgatcc

SEQ ID NO: 1221 - DNA, 131 bp, Trichinella spiralis
  source 1..131: mol_type = unassigned DNA
ctcctgactaacctgatttcgtccgtgcggcggcgttttcttttcgctctccgctcgtcgaaatttgctgtagttgattcgcttttctttgcgttttcttctactttcgcagttttttctgcattgccacg

SEQ ID NO: 1222 - DNA, 481 bp, Tetranychus urticae
  source 1..481: mol_type = unassigned DNA
ctctcttattttaacatattcgatgtactcgtacattgaatatgcttttattttttttcaaagttttttgggtgcatacccctggaaaattctgagatgtataaatctcccatcagctttggctgaaacgttggctaagttttgtaggttgtttgccccctactacttagtcgcaaatggtatttgctaacagttgttaaattgttacatttacaagtcctatccagtgcctcctcgtggcgctacccggtaacacttagagtaatctgagtggctaaactggaagggcggaaaatgcaaacaggcggttggtagatgcttcggcattttgccaaaaatccacggctttttagcccaacaacatcagggtgatggacccgccagcttgtggtcaggatcccatccatgaataaagcatggctctgcttctggtgcatcctcaacgggatcggcttcggctggatgtaagtcttgcggaggc

SEQ ID NO: 1223 - DNA, 157 bp, Drosophila willistoni
  source 1..157: mol_type = unassigned DNA
gaagctgggaagctgggtcggatgagcgcagaaggggtgttcttcggagcactgtaattcataagtcgtaagtctgatcaagtcgactcggaacctcttcgtggtgtttcctgggtgctgttgagttcctagtctctaggttctctccagtagctaa

SEQ ID NO: 1224 - DNA, 153 bp, Petromyzon marinus
  source 1..153: mol_type = unassigned DNA
cggtgcgttcccttgggtaaggaacacgagtcttagtggccttgacctccacgtggtcccgctggtaacatcatctcttgatgatggctaacaaggctaatgcacccattccatctcctatctcgcatggaggccgctatgcgtgattactag

SEQ ID NO: 1225 - DNA, 364 bp, Schmidtea mediterranea
  source 1..364: mol_type = unassigned DNA
agtcatagggtgaactgcaattctgacacgatgaccgagctgtgtcagtttgcagctagtcgctaaagactcgatcagtccgccaagtgaggtggccgggtatctgcagcactagagccactggtatcaagagcagagatacgcgagtggaagttgagtacgactaccttcacggggtcctcctgataaccacagtggactgtgggaactaaatgtgtgctcagcgttccctactttctcgtagggtaaagggtatgataacccagagaatatcccatgggagatatccatggaaaaagcaccacgttagacaatccgatggtctaactcggctccgaggggctaactatcccaaagggcttaa

SEQ ID NO: 1226 - DNA, 661 bp, Tribolium castaneum
  source 1..661: mol_type = unassigned DNA
tggaagaccccgcccatgaggcttggagagtgtgatcctgatcacacttgaaaagttatgctgagtacgtcgtgagagtcggtaactgtcccaggatggtctgggataggctaaacctcagcaggggaaagttgtaggggcctgccacccctacacttttatagatatggcattcgatacctcaaatagagcctcggacttggaggagcatggttcccctcctcctcgtactagacctggaaccaacggtcttgacaaccccattggacctacgggagcggaccatgctcatggacatggattccgaagacgaagcgggggaacacggaccccccgccgataatgctcacttaacgtcaggcgaacccatcgaaatcatcttgatgttaccctttcaaagcaggtcatgcggcatatgtctcaatgccggaaagggtggctcccgggcgtaacggacatctatcgctgatggaasctagctcgctcttgaagaacggcggacggggacttggaatcgtggtgtggttctgatgtaagtcctgaaattatggcgtgatggcccgcccgcccgaccggagggacttagaacccccttccgcgagggtcctgtctgtaggtccwccatctccgtaaaacgagttggaggaaaccgcagacgggg

SEQ ID NO: 1227 - DNA, 26 bp, Megachile rotundata
  source 1..26: mol_type = unassigned DNA
tctagttagcaagcggccccctctaa

SEQ ID NO: 1228 - DNA, 1095 bp, Apis mellifera
  source 1..1095: mol_type = unassigned DNA
tggtaatcaaatgcctcgctattttagtagcggtagcgctccgcccgcgcaggaaccattgacgccgccgtagtgtgggtgattttatatccaaccaatcacgtcaactacgatcatttgtaatcaccgacggtacttggtaggggtaccacatgggcattcttgctcattccacaacgccgcctccatcatggcaacaatttaaaatatatataaattcttaaggtttgaccgtattcatatatatatatatatatttaatattacaaccataaatcttatatcgagccttctatttggtctcaaaagcaatacgttgtcagatcttgtagaacatcaggagtgagcggtgcgctgtggtatccgtgctttgtgccgcggcgacaaaccaatacgctgctgcctgtcgcaaagcaatacgctgctgattctcggatgcgggtgtcgacggtcacgcaaagcgatacgctggtggggtttcaaaacaatacggcgctggtgctaaaaagcattatgccgctaacggctggattgtcgatcgccgctgcgggggctagtggcgcacccagagaggtgcgacgcgcaagcattggttctgtgcgaagcggagttcttgagagtaatggttgctgggggcacaaagcgcaacatatagcctcttatgcctcaagtcgtagttcgtacctccacgtggtcccgctggaatgcctatcgactcctccccggaggatcatagagttcgaaaccggctacggcgaggcaagggcggtgaggtgcacaccgatggggagcagcgaccccacctacccttagctaagagagcaggcgatccgccaactgtcagcacgaaataaactaatcatatgtatacgagggagaatttacaacgggtaccttgtgcccgaaccgcctgtaggtatcacctacaggtgttaaaatgaatctgatagctggcggatcgtcgaccctctttgatggctctgcgccaacgactggaaagaataggaacggaagtctaatggaaggaaagtgtcgggagcactataaattcccaaagaagaaaagaaaagaaaaaaaataaaaaacccaaattaa

SEQ ID NO: 1229 - DNA, 655 bp, unidentified
  source 1..655: mol_type = unassigned DNA; note = Description of Unknown:Nasonia vitripennis sequence
gactagactatgggttcagtcagtcccaaatagccgatcctggcgcgtccggcagtaatgccacgtatgagtcggttacccatctctaaacgcgtagaggtggggagctaaaggccaggcggtttacccgacgtcgaatttctccaggtctgtgtcagtcgacggaataaaggtactacaacatctactatctatcgggatcggaagacgccttacagcgttttccgatttttgctctttgagcatttttcttcaaattgcgataaccgacccgatcacgcggggctttgacaaagcaatgcgtggtcggtaagatggttgcaatcttttccacctcgtttcttttacggaacgaaagcaatgcgtgtggggaacgttaaaaactcccttcatgcatcccaggatttatcctgcttactgcaaagcaatgcgtgtggagcgactttaccacgagtcgctccaccgcaaagcaatgcgtatcgcgcaaaagcaatgcgtgtgggggacttgtcaaagatcccccgccgcaaagcaatgcgtgtcggcaccacgtagagcaaagcgtgtaggcagactttgtcaaaagtagttctgccgcaaagcaatgcgtgtggagatcttcgccggtgaaagcaatacgtgtgggcgaacttag

SEQ ID NO: 1230 - DNA, 286 bp, Ciona intestinalis
  source 1..286: mol_type = unassigned DNA
cgacggtgaaccaccttgtcgcggtgtaagagctttagtgtctcgaacaagaaatagcttgtgtgctgtccttctgggcggtgcacatacttcttaacctcccgaggccatgccggcgggggctttagcccccggcaggttttaccatgccggacgggttcgagaggtagaggccaaactaagagttcaccagcagacttcgcacgcggctggccactggccgaagtttaaacaacagggccgcatcttcccaaactcaatatatggtgttaagtgaaccgtgccg

SEQ ID NO: 1231 - DNA, 189 bp, Nasonia giraulti
  source 1..189: mol_type = unassigned DNA
cgggttcccccgacttcggcttgccgtggtctggggctcactgctttttgtggagtcatggttacatggtgaccctggttcctcgcacccccgctggaaactatctggggaggccatgattgggtaacgataaaggtcctggtcgtgtcctcctgagataggctgaatgggtcactaagtggcacctaa

SEQ ID NO: 1232 - DNA, 165 bp, Lepidurus arcticus
  source 1..165: mol_type = unassigned DNA
ggggtagcaattgatcgattcccgcttcctcgtggcgctaccctgggtaatactatgaggaattgatcacaccgtagcgaacgtcatcagtcacagctgcacgaatccagatagaaatataacagacgagtaattcttttaaaagctcgtcagtaatcttcccag

SEQ ID NO: 1233 - DNA, 183 bp, Lepidurus couesii
  source 1..183: mol_type = unassigned DNA
tttggggtagcaattgatcgattcccgcctcctcgtggcgctaccccgggatagcctcaaagaaatttgacggtaaagcaaagaggaattgatcacccaaggcagtacatcggccttcctgcaggagctctgataaagatattagtgagttattctgttgaagctcgctatttcattcccctg

SEQ ID NO: 1234 - DNA, 192 bp, Lepidurus couesii
  source 1..192: mol_type = unassigned DNA
ttttggggtagcaattgatcgattcccgcctcctcgtggcgctaccctgggataacctcaaagaaatttgacggtaaagctaagaggaattgatcacaccgtgacgaatatcatcagtcacagctgcacgaatccagatagatatataacaggcgagtaattcttttcgaagctcgtcagtaatcttcccag

SEQ ID NO: 1235 - DNA, 184 bp, Nematostella vectensis
  source 1..184: mol_type = unassigned DNA
ggttggggccttctcgtggcggagtcgtgagtaaggggtataggggtaagggacaccacggaccgagaacggttaccgctcaaggcgagtggtggaaggcataaaatcgtaacgccgccctccgacctgctcctgaaactaatgccaaccaactgactgtggggctaacctccccagagtcagg

SEQ ID NO: 1236 - DNA, 340 bp, Schistosoma mansoni
  source 1..340: mol_type = unassigned DNA
atgttttaatttatttttgaactactactgtctgagtgcttcttacaacctgaaggctcagaaactacccactttttgctgtttatccacaacaacagttgtgaatctattctccaaatattccttgtgcttttgtcaacattattctataccaactgtaccacctacttcttcatctcacgttttaattctggtctaattttctcatcattagtcacggagagggcctatgaacggtccgtgacgcgaaattcaatccacgaattcgtcctcttctgctagtggtccccgaaatacggttcctctggcctgtcagttgtgttaaaactatataataacg

SEQ ID NO: 1237 - DNA, 176 bp, Triops cancriformis
  source 1..176: mol_type = unassigned DNA
tttttggtctggcatttgatcgtttccgcctcctcgtggcgccagactgggtaagctgatttatcagtgagctaagagaaacgatcaccgcaggagtccatctacctgcgctgcacgtgatttcattgtgcacttggcgagttatcccttgtggagctcgctcgttagcttttgag

SEQ ID NO: 1238 - DNA, 124 bp, Drosophila ananassae
  source 1..124: mol_type = unassigned DNA
agaatatggatttgattgtgcagagggggtgctataccgtaactcgtaagccatgcaatcagatcaagtcgactcaaaacctcctcgtggtattctctgggtgccagtatttactggtagctga

SEQ ID NO: 1239 - DNA, 285 bp, Drosophila melanogaster
  source 1..285: mol_type = unassigned DNA
ttggggatcatggggtatttgagagcagagggggagtattcttctgtaattcgtaagtcatatcatatgatgtgcggaaggggaattttactctgtaactcacaagtctctcctttactcaagtcgactcaaaacctcctcgtggtggtcccggtaatgctaaactcgtttagcagctaatttgagcggaaaaacttttccgatgggctggttccccagaggaaatttattcatattggaactacaagcacaaataacgagcctcggatacctttacacaatctg

SEQ ID NO: 1240 - DNA, 120 bp, Drosophila persimilis
  source 1..120: mol_type = unassigned DNA
aagatatggatctgaataatagcgtagaaggggagtcattccgtaattcgtaaatcgtaaaaatcagatcaagttgattcaagacctcctcgtggtatcttctggatgctattagactga

SEQ ID NO: 1241 - DNA, 128 bp, Drosophila pseudoobscura
  source 1..128: mol_type = unassigned DNA
caattggaaagatatgggtctgaataatagcgtagaaggggagtcattccgtaattcgtaaatcgtaaaaatcagatcaagttgattcaagacctcctcgtggtatcttctggatgctattagactga

SEQ ID NO: 1242 - DNA, 177 bp, Drosophila sechellia
  source 1..177: mol_type = unassigned DNA
gggatcaggggtaattgcgagcagagggggagtatttttctgtaattcgtaagtcatatcatatggtgtgcggaaggggaattttactctgtaactcacaagtctctcctttactcaagtcgactcaaaacctcctcgtggtggtccccggtaatgctaaacttgtttagcagctaa

SEQ ID NO: 1243 - DNA, 160 bp, Drosophila simulans
  source 1..160: mol_type = unassigned DNA
gggatctggggtaattgcgagcagagggggagtatttttctgtaattcgtaagtcatatcatatggtgtgcggaaggggaattttactctgtaactcacaagtctctcctttactcaagtcgactcaaaacctcctcgtggtggtccccggtaatgctaa

SEQ ID NO: 1244 - DNA, 135 bp, Drosophila sp.
  source 1..135: mol_type = unassigned DNA
gggaacatggggtaaaggtgagtagagggggagtattttttatactctgcaactcataagtcttgcctttactcaagtcgactcaaaacctcctcgtggtgtttcccggtaatgttaaacttgtttagcagctaa

SEQ ID NO: 1245 - DNA, 334 bp, Kalotermes flavicollis
  source 1..334: mol_type = unassigned DNA
gagaggtcactgttgctgatcagctggacacctagctgactgcgtgcatgcgtgcacgccgcgcgccgcctcctcgtggtaccgctggtaacgcagggtcactgagactacctgcggctaaaggcgcgcgcgagggattgtaagtccaccacctccacgtggttccccgcgggcaacggcatagttcatctgccggccaagcgtgccgttccctcgatcctcctctgattagggataggaggggggcggtggctcccgccgacgacctggcaaacaccttggacacgctaagataataggccgtcctccgggccggccgaatcataagcacaca

SEQ ID NO: 1246 - DNA, 1138 bp, Reticulitermes lucifugus
  source 1..1138: mol_type = unassigned DNA
ctcactgctgtcatgccattgttaatgcgttgggtgatggcgggtgatgggagacgagttacagcagagctggcttcacggggggggctgtagttgcccgaaccagtctgcttctgagtgcctccacgtggcctcgctggaaacgtcggagctgcttacggctaacccgtagacaactccggcggccaaactcagaaaacggccttactaccagggtcatccctcgcggcggcgctaagaccttactgtatgtactacggactacagttgagtagcgcgggagagcacttgatgtgagggtagcaacttgttgctacttcgactgtctccctgaagatttccgaaggggtgccgcaagtccatgggggcggtcctgctgtgggagttatcttgcacccgggaagccctcagtggataaatactccaaaatggcttagccacctcacgtggagagaggggaattaggggtttactcctaagggccgatgcctccaatcggatttccccgggcaacggctattatcagccggctaagttcggaccctcatctactgatgggatactctctctccccccgcctgcgtgattagttgggaatgcacgcgggcgggtgattctgacaagcccagcccaaaagttcttaccacgacgtacccgggggtgtcacccgaactaatatattttccgccgatcggttcgctgtggggggatgtcggggcctggtggccgggaaccgtcagccgctctttgagtgtcctgcgtaacccggaggcggtgacgtcgaagggctaggctagcacggtccagacccctgaacgcctggggagacgggcccaccacctgagtaggagtgggtcctttacctcatttgaggtgtctcctcgttcttgtagggggcgaaggacgaggaatgcatccgtccctccaggatgctggtggtttccgtctggtgggctcatgctgaaacgcgcaggtgccgatttgtcgaagaggacatatggggtaacccatagaacctaggcaggagtaatcccttagctgggggggtcagctggtgggtcctgtcaatttatcctcccctccatgccagagccggtccgaggttagagacggactcattttctcctttttatatgtc

SEQ ID NO: 1247 - DNA, 1137 bp, Reticulitermes urbis
  source 1..1137: mol_type = unassigned DNA
cacactgctgtcatgccattgttaattcgttgggtgatggcgggtgatgggagacgagttacagcagagctggcttcacgggggggctgtagtggcccgaaccagtctgcttctgagtgcccccaagtggcctcgctggaaacgtcggagctgcttacggttaacccgtagacaactccggcggccaaactcagaaaacggccttactaccagggccatcccttgcggttgcgctaagaccttactgtatgtactacggactacagttgagtagcgcgggagagcactcgatgtgagggtagcaacttgttgcttcttcgactgtctccctgaagagttccgaagaggtgccgcaagtccatgggggcgacccggctgtgggagttatcctgcacccgggaagccctcagtggataaatactccaaaatggcttagccacctcacgtggagagaggggaattaggggtttactcctaagggccgatgcctccaatcggatttcccagggcaacggctattatcagccggctaagttcggaccctcatctaccgatgggatactctctctccccccgcctgcgtgattaattgggaatgcacgagggcgggtgattctgacaagcccagcccaaaagttcttaccacgacgtacccgggggtgtcacccgaactaatatattttccaccgatcggttcgctgtggggggatgtcggggcctggtggccaggaaccgtcagccgctctttgagtgtcctgcgtaacccggaggcggtgacgtcgaagggctaggctagcacggtccagacccctgaacgcctggggagacgggcccaccacctgtgtaggagtgggtcctttacctcatttgaggtgtctcctcggtctagtagggggcgaaggacgagggatgcatccgtccctccaggatgctggtggtttccgtctggtgggctcatgctgaaacccgcaggtgccgatttgtcgaagaggacatatggggtaacccatagaacctaggcaggagtaatcccttagctgggggggtcagctggtgggtcctgtcaatttatcctcccctccatgccagagccggtccgaggttagagacggactcattttctcctttttatatgtc

SEQ ID NO: 1248 - DNA, 1379 bp, Rhynchosciara americana
  source 1..1379: mol_type = unassigned DNA
cagaacgtggagaaacggaataactacccagatccgttggttaaccggtggcaaagttaatcaaggttgccataggcttaataaccctatggaaatgtttccacacacctccacgtggtgcctgccggaaattgttctagggtgaacaagctaagttgtgagaaacgggctccaccacaatatggagcctgccagggcgcgagactcaggactctccatgtacaaagtggttagttgcaaaaagagtgcgcctagcatgactgataatttttcactgaaataacgttgaactttatctgtgtcatgtgcacaacactatggtgtctgatcaagcaccatcagtggtggacctgctaatgtattagtagaacgtgtccaggcgataatgcacacacggcctccgggcccatcgctttttttgagattccctagaaacttcagtgtgtgcgacaactgtataacccataagggatggacaaaggttatactagggggtaaaaaccctaatcggctaatggcaaatgggatgtagaaatgccaaagattactcgcaccgaataatggtggccgaaaagcgggtaatcgaatgaaatggtaatgctgtagcggaaacatgatcacattctgtgacagtaaaccattagacctagggggaactatgattaacaagataccagcttacatggaagcaatgaaatgtaagtcacagtagtgataagtggtgaagagtcttgtaatcaccgtaactaggccaggttctggggatgccatgaacttagggggagtatggttagcagatctaccagctaacactattactgataatatgtaagccgcagtagcgctaagtggtgtacagatttgcaaccaccgtaactaagttctgtttcgatggactagggggaatcatgattaacaagataccaacttacatggaagttatgaaatgtaagtcacagtagtgataagtggtgaagagtcttgtaatcaccgtaactaggccagatgtagtcaaagcacatgtttagggggaacaaggttaacattggtaaaagaccaatgcaacctccgtaactaaacgtgaaggcacaaaactaaaagtccagtggatgacaggtgaggtcatcactggacccaaatgttttaagctcatcataacaacacggtgaaaaatccagcatttatttgcctgattgagtagcttccacactattccaaagccgaacctatctgggtttttcttgaaaggccgtatagggcatatgtcgagaaataagtccaaggtgaggtagtgtggccctgtacccaggggtaaggtactatacggtcgagtggctcagtaggcctaactagccactgagtcactataatgactagtt

SEQ ID NO: 1249 - DNA, 979 bp, Ciona sp.
  source 1..979: mol_type = unassigned DNA
ccaaaattacttccagcacctccacagcagacgaacgaagaaagaagacttacgaaataagaataagcagtttaaagacgaagcagacgaacaccactccaccaacgacgctctgcagctacaccaccaccatctcgccgcaacaagaagaattttccgctgctctccactctgctccaacaccacctctcctgctctgtggactgctgccttgctgctggaccaacctctacccgaaggaacccttcgaacccagcagcaaggtacgtgtcaccacctctccacagagccaaggccagagtggatagagcagcggcctctacaaccaagttctccactccgacgacaaaacacctgcctcgtggccagagtcctgccgaagaagaatcttcgaccccaacaccgtctcggcagggctccaagcaacgacatcagccacgagtgcccaccggagtggacgcggcgaacccgaggaccgctgtcgccaagaacaataacatcaccgcctgcagcagctaccaaacaaaggttagtctcctacctcacctacaaactcgtctgaatagacgcccccgcgtgggagctaaccttggtagctagctgcagtgccctgcgacagcggcctcgaagagctgcagagcgtcagcctgcttcgacctcgcttgttctcatttcaacctactccgtcctgtggaatcaaaagagccccactaacaattacattcataaaatctagcaagaacgaagagaagcgaccaacttttaatccataacttttagatctttttatttattactgtttttaagccctaagcatattgcctttttttagatcttataattataaaaatagattcaaagttaacaccaccaggccgctacagagcattttatttaatcaatttgttaccgacctcctgctgcttctttttactttctccagactactacccggatacaacccttggaaacgagagga

SEQ ID NO: 1250 - DNA, 418 bp, Bombyx mori
  source 1..418: mol_type = unassigned DNA
gctagctccctaaaatcctaccttacgtccgaggcgaacatctgtccacgtggggagcggaaacgcgtactatcgaaacttacgcggctaacaaggtaaaggtaacccattaatatggagacaagactaaaaagaaaattgagagggccgcttcccgggggcgatcgccggggcacacctggagctggcgctgggtgttccagcataggatccgtcagcggcggagagttgagcaggcgggctctcgccggggatttacaacccgaaaatgctacagccgccaacagaaatcacgatgtagaaagtaggagcaatagcccatgtgaaccttacagcccgagtaccggttcatacaacccctcggtacaatcatcaccatcatcctcgggtcatagaggctcaccaacgtcgactatgg

SEQ ID NO: 1251 - DNA, 17 bp, Anopheles gambiae
  source 1..17: mol_type = unassigned DNA
gaaggctaaccacaata

SEQ ID NO: 1252 - DNA, 539 bp, Bursaphelenchus xylophilus
  source 1..539: mol_type = unassigned DNA
gggatcctgggttcctactacctcgctccacctcctcgcgatggatcctggggaagtctccggactgagctaagagagcgttaaagtagagggtgacggcgtaagtacctccaagttgcggtggagcggaacatctactcttcggagagaggggaagctctatggcggcgttagaaaggttggactacggcaacgccagggagatggggaaggttcatcaggtgatactagttcgctactgtcattcgatgtatccggaaccatactcgccaagttgtgaactatgtgaaagtctggatccaatccaagaccacggggcgcaattaaaaggtgtgaagcagcttgctggtgatcaccacggtggtacctacaccggcgggggaacatctttaatgccgagatgaccgcgcgaataatagggagccggcaaaagccgagcgtaagtggaaaggatacagaaatttgctcaaaagtataccaacccgccacttataaaagaccgagaaaagggtaccactagagctcattataaaacatct

SEQ ID NO: 1253 - DNA, 919 bp, Heterodera glycines
  source 1..919: mol_type = unassigned DNA
tggcgatactcggaacctccggggagcctggtaggagttggcctacaggtcgcgaaagtccctaggtgctgcacgggttgcgctaatccgagggcgctgggttaccttcccatcggccaaaaacgtctgggccttcttagccgcgggtccagtatttctgttgagcctgacagttcttcccggatatggcgaaagattacagggcggtatttcgtgaaacctaaaaawggtcgggccgaatggcacggacagactcacttcggagtgagctcgggggcatccgtgtgttaccccgctgcaccacgccgaagctgtcatagcgagcccgaaggggaatggccatggagactccagcctcaccctgtaactcgaacctaagtccaggcccctttctggtgttggctcgcactggttaggaacacgacagtctcgtgtaatcccacacgcaccgaaagccctagccctcgtaggcgaaggctgcgttgctggtttcagaactgtgagcwagtggggttcggatggccgagtgtaccaacctgcttgctaacaggtagcatagagtaatatgctagtaagcagggcacgagaaagggccgtaaaggctccggctatgaaggaccttgcgaccacgcgtgtgtctcccacgtgcggattcttgaagccagagtcttgcactgcgcgcaggatggagcctgtgcaactcctccctcgctgatcgcaggagtggaggatcaccactctttttaccttgctagcttggggtaccaccttgagctggggccggccttgctagcttggggtacgaccctttgagctggggctggccttactagcttggcgcgccacccttggagctggggtggcgcaagatcacttgtatacggtctaaccaatacatttgaaaagcgatcaaagcgaa

SEQ ID NO: 1254 - DNA, 488 bp, Parhyale hawaiensis
  source 1..488: mol_type = unassigned DNA
ccgaccgccagcgggataactggcaaaccctgtctcgaccaccggcccgtgaatccatcggggcgtatgagtctgacacaggggggtgtttaaggtgaccctgttgcgaggaaatgcgcagcaaaagccggatgagccttagaacatcgaaggccaacgacaacctgccgaaagactggcgactaatccagtcaacctcctgtaggtcaccggctggtcatgctgaatctcagcttaaccaggcgtacgaacttacagttggagggtcgagcacccctgatggctgaaaaggaccatcaaagtcgaaggtagccaacgagaagaccaacggctgattcaggcggaagagtcaactcgttgaatgcgttcgacagcttggggtagatggaactcctaagccctgaaaggcagtccatcttcgcagacgctaaggtgccccgccgcctgagggttatcaggccccgccgcctgagggttaccaggcaacc

SEQ ID NO: 1255 - DNA, 791 bp, Bursaphelenchus xylophilus
  source 1..791: mol_type = unassigned DNA
gaggatcctgggttcctactaccctgctccatctcctcgcgatggatccttggggaagtctccggactgagctaagagagcgttaaagtagagggtggcggcgtagtgacttccaagttgcgatggggcggaacatctactcttctgagagagggaaagccctatggcggcggtagaaaggttgggctacggcaacacttgccatgatcagattcgatcaaaattagcctctggggctggcaaccctacaacggattgtaaactgaactatgctatgcaaaatgaaaataaaaaatgggggctttacaatctaaggtgttggcagatcacgaaaactgcccgtcgatgagggtgagataacatcctacggaacagcccctgctggaccaaaccaaatcatccacaaattggagggttttcttggtagtttcccttggcacgtcttgtttcataagccagaataaaaacgataccatacagacatgaggctgggtacctgccagccgcgacacggaaaaccggtaggtgcaaccggagacagctaggggaaagaaaatagtaaagtgtcgaaaacaaaacaggtagcccctggctagagggaatgggacattgtccgattaggttgccttgacccaatgaaagccaaccgggtttacattatcggtctaccaagggcaatgaccagagaaactgcgactatgccgtaacccttcgcagattgccgatgagaaccatcgatcgtaagtcgaagccaagcggattgaccagtggagggttatcccgacaacagc

SEQ ID NO: 1256 - DNA, 1171 bp, Heterodera glycines
  source 1..1171: mol_type = unassigned DNA
tgtggcgatactcggaacctccggggagcctggtaggagttggcctacaggtcgcgaaagtccctaggtgctgcacgggttgcgctaatccgagccccttccggtgttggctagcactggaggggggggggtccaaagaatacgtgaagcggaccctgtgttttctctgacctcatacgggtatatcccgatgatatctatacagtgttcattttcatttcttaacctgctttttcctcaagagaaatatgaccacattcgtttgccatttcgaaggtgcgacttttgagggagttctcagggacatcaagctgttcatggacggcttgacggctcgtggcggcacgcagccgcgcgggccagttagggctggtgccaatgaggcagcgaagaagtctctgaaacgccaaaagcagcgggagaagagagagaaagcggggacgggttagagataatagcatgattgacggcgaagcaatactttgacttccaggtacggaggacggcggcaaaaagcaaaaaggggacgaaaccgatggcattgccaaaggggccgaaaccattgagctggacgctgatgggccgtctgccgcgcaaaaggaggggggagcccctccgtctgggaagaaggtgcggcgccattcgtccaacaaaccggaatagatcttgatgatctcagcaattgatcatattgatctctttttccagttgttgcgataaattatcgtgcattatttcttcgatttctccaaagcttaactcctttcctaatacctactcatgtatacgttagtaggcatgttttatgcaggtaaagatagacctggtgcccccgggcgacttgggatgtggatgatggttggcggagagttctgatgacgccgtagttccggaggaacagttcctactagtgccagcctgggctagtggagctggtctggcgagtgctttgctcgtcagataaggggtggttggggtggtacctctggaatgatgtgtcggataagcactctgccttataaagctgtcgttctgcccaggtttctcctaaccaggttgaacttgtaatgagcctttgggtatctggtcggggtctgcgcggagatagctcgtgaggagctgttattacattattggttgaacgcttttgggtcgtactgcacagataaat

SEQ ID NO: 1257 - DNA, 1414 bp, Strongyloides ratti
  source 1..1414: mol_type = unassigned DNA
cgtcagaagagcaggtgtttttcaaagcaaagacttattctacgaaggggaaagatgatcaaacatgcagatttggctgcaatgaaatagaatcaaactaccatgtggtgacatcttgcaaataccattcatacacaagaagacacgatatggttgtgtacaatatattaaaaagactaaaagaaaagtataagttagatggtgatttacaatatggtagatcagtatttaatgggaagaaggaaaaaattaggatcagatctggccataagtttttgactgaacaaccgttagtaaacaataaaccggatattgttataacgatgaaagaagggaaaaaaaagataacgtacatactagagatgtcgataccacatatctagaacttgaagatgcaagaaagaataaagtataaaaaatattgtgtgagctccatggtaaaaataacgaatgataatgttgattcgatagctcgtgattttaatctactaaatttaatggaaagaaaagaaaggtgtaagataaagtttggatcatttgtatttggctgttatggagaatatgtcttgactgaatctgctctaagaacacagaaaatcctgattgaattgggattctccaaaaaagagatggatagcttgatcaaagagtgttcttacagttaaatgaatgagacagcaagaattattatgaaacatctagaaggcgaaaagaatcaagatgaaatcagccattaataacttttatttacccaattatttattgcgttaacttgattatatgatatttattgtatatttattgtttaatttagtttcatagtacaaataaaagaatatactacgattctttacttttaagttctacgagaacgttgttttagaatattttaataatatttctactacaattaagtaattagaagaaatcaacgaaagcagctaaacttactcgcaaaattcgttgatcgaggctggaatggcaccaactaatatactaaccaacaatagaaaaaaaaagaagaacttcagtggacttcaaataaaataaaattattggtagaattgtatgataaaactgagaaaatttgactaaaacaaaaagattagagcaaatatgtcatcattttcctaatcatacaattaaagcgatgatgacgaaattgagagaatttgaaagagaaaaaagggaaaattgtgaaattaaaatgagggaaaatgaggaaaaacctgaggaaaaattaaattttgacaactatgaagaagcaaaattgaaaagaggaattaagtgtaaaaaagaagtaaaaccaattgttattgaaaacaaggattaggaatttttgaaaacggaaaaattatttctcaagtttgtcaacacaatcaattaccaaagaaagaagggtaaatcaaccaga

SEQ ID NO: 1258 - DNA, 722 bp, Bursaphelenchus xylophilus
  source 1..722: mol_type = unassigned DNA
gggtcctcggttcttactaccgtgctccacctcctcgcgatggaccctggggtaggcctccgggctgagctaagcagagcattaaagtaaagagtgacggcgcagttgcttccaagttgcggtggggcggaacatctactcttctgagagaggggaagccctatggcggcgttagaaaggttggactgcggcaacactagccatgatcagattcgatcaaaatagcctctggggctggcgaccctataacggattgtaaactgaactatgctaacctgtcagtaaagacagaacgggggctttgcaatctaaggtgttggcagaccactaaaactgccctttgatgagggtgagataacatcctacggaacagcccctgctgatccaaacaaaatcatccacaaatcggagggttttcttggtagtttcccttggcacgtcttgtttcaaaagccagaatataaaacaataccgaagtacagaatggctggaacctaacagccatggcacagaaaaccggtgggtgcacaccggagacagcaggggaaagattgcaaagtgccgtaaataaagatggtagctctctgacctgagggaatgggacactgtccgattaatgccttatcccgaagacggtcaaggttctatcttatcggtctccaaagggctctggccatagaagctgcgaggaagccgtaaccctacgcagattgccgccgtgc

SEQ ID NO: 1259 - DNA, 1793 bp, Bursaphelenchus xylophilus
  source 1..1793: mol_type = unassigned DNA
tgccagcggtgttgattaggtccaagttctttggccaaagatccgccctcggtttagcagtaccgaacgagtataccttcaagtggtggcactgaattagactgaatactctgaactgtagacttttgtgcaactgtgtatggtgtggaagacttgtttgtaccactatcagctttattggggctcgttactgtttcatacaggtagatgtcccctttagagatttccctgcagtttgcgctccaagtcgctagcctcttgcgtgtagtcaaaggaatacattcgccgtcggtgacagggctatacccggcgactacggacttgtttattacgtagtgcagcctcgtttaagacgaatgtgaaaagaaggtgtgattactaagcgttatgagtcgggttatctggaaactccgccccgccgcaatggcttcaagggtcaaactgctaacattttaaaccaatatttggcagcagcagactatgatgtcagagtgccgggggtctatcgatataagactgaaagcgatagacgtggagtgaaaggattccctttgttaagagaatcggtagaattcactttttacttattcaagaacttaacagcaacaagcactcgcgaggattaccgccccagattcggtcggcggtacttcacctgctttcttccactttcggaatctggcatcctggctttcagtgtggtgatggccggcttgagttttcttgagtcgtgcgagtgcctcatctgggacgtccggaccgattgatggagtctgcagtggacgaggacttgatggaccgtaaccatagtatatccctcatgcgtcttctcgactcgagggggtagcttgcactacccacccttctcttctccgattgggatttagacctagccctctggtgtgtctcgacccgcgatatcagattcctgaatcgactgtgagaaatgtctacgcgcaaagatcgacccattgccacccggctatgtggatcgggctcttgactgcttatctccggctttaatcgcttgaggaaaggggggtgtcgcccgaaagggttacgcgatcatccgattcctaccgtaaaaacgtagttgaagtaggattgaacctgagtaccaagtgaaaagagtggctataatgctccatggtataccctagggataaccgtgtcgagcgcactgctcaataccctgatttgttagtgtaggtatgtctagtggctgcctaggcagattcgcctattcactacgtaaaatctgggtgagtaccataagaacctcctgtagggccaggagtcaaactagtccaggttcggtatgcttcggtatactctctcacgggctagtcacctaagagttaagaaccgcctttttctgcactgtgaatagaaaaagaagggcgggagaatatacgggcgaggtaagcacgtcggaacggggtgtgcccaactcgtaccgtacgcccggacaaggaccatctttcgtaccccgttcacccggcacaagtccgattgtctctcccgagaggcgtcggcggaggttggctaacgccgtctctccaaccatcggtttgggtttaagtaacgccccagtggccggtagccaaactgatggaggcagaaatgccggtccgttgctaaatgcgggaacggaccaaaacgccggtgtggtggatacaggtggaagagtcttttggtctacgcaagaaaagaccaggctcaagtacgaatacgaccgtcttcgtgaacgacgccgtcgagacaaagttcgaaatcctacggtcgataaggcc

SEQ ID NO: 1260 - DNA, 450 bp, Ascaris lumbricoides
  source 1..450: mol_type = unassigned DNA
ggggccggtgggtttactcacttctgacccaccaccaacggaacgagggaaagcagagctggggccctcttccgattggcatggaaccgacctccacgtggtggccctgggcaacggaattcaagagaggatttaatcctctctatcatttgcaagatggatgagatcgaggtatccggcaaacaggttccaagtgagcacctttcccatagctgggaatatgggttaggcgtcctctgacatataagaggaatcagactcgttcgcgcccggtcattaacatcgatcagcgggagggccggactgaagtaaatttcctgttggcccgagtgcaggtggagctcggacccgaaaaacgatccctaagaggaccacaacccgaagggatggacgcagtcgccccggcacgtttggtgttggttatcctggagtgttgtgggacgaatagct

SEQ ID NO: 1261 - DNA, 100 bp, Heliconius melpomene
  source 1..100: mol_type = unassigned DNA
ataaataataataataataataataataagccccctaaaatccaaccatacgtccgagtcgaacatctgattctcgtggggggcggacacgtgaaaataa

SEQ ID NO: 1262 - DNA, 129 bp, Takifugu rubripes
  source 1..129: mol_type = unassigned DNA
ttctatgcgccttatgcgactggataggccagtggtttacgccgctgactttggtgcggaaggttgtcggttcgaatccaggcgagcccttaggcaaggctccttacgcatatatgcctacacctcggt

SEQ ID NO: 1263 - DNA, 325 bp, Taeniopygia guttata
  source 1..325: mol_type = unassigned DNA
ttcaggttatttagatgcttagtttttgtacctttcttgttttgtttaggattttgatagtgttagtatttttatatttttgtacgattgcataatgttcttttttatacagttctgttttaataaaatagacgatagctagagacgttagggcagccacaagccagttaggtagcggatagtaggtaggaacagacttttactatttcataacgcgtcaattaccacctgatttggaccaattcacgggatttgtccaaggtggacgggccacctttacttaacccggaaaaggaacatatataatttatgtgtgttcgataaa

SEQ ID NO: 1264 - DNA, 289 bp, Geospiza fortis
  source 1..289: mol_type = unassigned DNA
ggtagataatctttgtatagtggggggggatctcatgtaccgggtttcttttatttgattttcaataaaacagacggtagctaggttcgcaaggcagccacaagccaaagataggtagggtgctcatagtgagtagggacagtgccttttgattcacaacgcgtcaataccatctgacacggatacccttaccggacttgtcatgatctcccagacttgtccaaggtggacgggccacctttacttaacccggaaaaggaacatatattaattatatgtgttcggaaaa

SEQ ID NO: 1265 - DNA, 350 bp, Zonotrichia albicollis
  source 1..350: mol_type = unassigned DNA
gtagtcacattgcactttctgtaacttgcactgggtgtgggatgtgggcctggggtgtgggttatggggtatatatgtgggatattctggtgggaatgtccattcactgtatgcctatctttttaataaaaagacggtagctaggttcgcgaagcagccacaagccaatagccagttaggtagctcatagtgggtaggtgacaggaacctttgactcagaacgcgtccattaacatctagaacggaccaaacttcggacatgcaccgattaaccggatttgtccaaggtggacgggccacctttacttaacccggaaagggaacatatatagttatatgtgttcgtaata

SEQ ID NO: 1266 - DNA, 1449 bp, Danio rerio
  source 1..1449: mol_type = unassigned DNA
aaatcccagcgggatacagcaagaaggtatcggatctaataaggttgagcgaggagagggtggagatcctttggggggggtcgggctaagttcccctctcgggtcctcccacggtgacgctctacccctccctcctcgctcgtagaacccaacggtgaacacggttggcaggatgaagtgacgtgaggggtaagacatgcgtacgtgagcgcgcatttttgctgttctctggactgggtttcgtccccctcacaaccatcacttacactataggggcacagcggctcctacctccctccctatgacccccccttcccataccgatccatggctgttctagtctggaccgagggtcggacggggcatttgaaggtagctggaatcctccgctgctgcgagcctgaggtcgatggttagaggtgaaatacttgggaggagacacagcctccggagagcccctcccgggtggtcatcatggcaaccgggtgaaaccttacggtttcacttacgaaacagcaccataacagcgccgtaatagcgcaccggtgtgactactgtccagtgctgatattctcatctggagaatacaacacgggtaatggcagagtattcaaaacccaaatgtttacgatcgaccaacggagtcgttcccttgcatctaggccggacccgaaactgccgtaattgcccgtccccaaggtagcctcttagaaaaccgaagcccggtcggggcggtggttgcggcggcgctgcgggggcctgctgctcgggcggcgtcggtgtgccgcggtggttgcggtggtgcggcggggatctcggtccttgcggtgccgctgtgccgccgcggtcgcgtcggtggcgctggggtggtggcccgagtggcgtcggcgtgccactgcccatagtcgcccgcgggggcgaccgatctggaggggcgagggggctcgcgggactttaacgagaaacggaacgcaacttctcgcatcgctcccgggactttcccccctcgttcagccgagggatgccaaaaggcatgaaaggtaagtaccataccggtccgcaaaactctcttctgactcggttctctgttggttttctagagtaacaacgaggtggaggagagggacatggcagggactcccattcgtgccagcgggtggggacagatcgaaggaacggttcgagggcgtaacagacgagagggaatccggtcacacattgatgccatgcctaaataggcgaggtttgtatttctactttgtgggttcagtatagtcggagcatatggtcggttgtcccgttgttttcacggcgggcaagcgactatcatgataaagtagaatgggagacgggctccctgacaaacccggaaaggcgcccccccgtggttcgtagcagctgacggatcacgctcgaagaaaaatgagtgagaggggacgccgcaaccac

SEQ ID NO: 1267 - DNA, 1155 bp, Gasterosteus aculeatus
  source 1..1155: mol_type = unassigned DNA
ggaggggagtaggtctctactctgacccgaagggcccccccgtttcagacctgattctaggctacctgtgcctaattgggggggtcccaaagagatgttgtctgttgtagaagggtttgcgccactgactgcacggaagggtgggcctcgacaggtaggggttacatgactccgtgctgctcagcagacccgcgcctctgagaccgggtagggctacttgaacaagcgacgccctggtgtatgtccgtatcctaacctggtttgggaaagccgataccggcaatgcccgccacaggtgtcgcgcaccccacgggatgacgtatgggccccgggggacctcatggatactccactggacttgcacaatcctggtgtactggatgcagcgacgttggtgacataagcaatcgctaagtcggggtaggggaggtggggacctcggcacggctgtaggaacgggtgtatgggctccggcagccgtcgtcactcccatacaacacaggggctgcatcctggtggccggtgctagttggttctggaagcccgcccgggctggttcgcagaagcagggtgcgcccagggtaggtttggtatatctgggtccggtgcgatacctatcgatgggcagcgagggccgcctcgtgacgcgctgtgtggagctggagccggcctgggtatgaacagttcttgcggatgtggcgtagctagatagtacccgtggttgtgggcgtggtgtcgaccaaatgttgtcctgtgtgcacataggccaagggttacgtgggtggcagtcagaagcacccgcacctggaagtgattgccccgggatcccggctctctgtgaagagctaccttgaggaaaggtgttccgctggaactcaagaccctacagtaggggatatcaactggctttgaggtgctgtgattccggaaccagggcgagggcgagtacttagagcatgtccaaaagcccggggaacgttccgggggcctgcttgggtcgttggacccacatccgtaaaacgatggatctcgcgtcggcgctcgggagaacttcccgcatgaacgctgattgcatgtgagaacgcccccacggcggcggggcaggcgctccccctgggtgtaaggctcgggggggtcacggctccgctctaaaag

SEQ ID NO: 1268 - DNA, 245 bp, Bombyx mori
  source 1..245: mol_type = unassigned DNA
gccttgcacagtagtccagcggtaagggtgtagatcaggcccgtctgtttcttccccggagctcgctcccttggcttcccttatatttaacatcagaaacagacattaaacatctactgatccaatttcgccggcgtacggccacgatcgggagggtgggaatctcggggatcttccgatcctaatccatgatgattacgacctgagtcactaaagacgatggcatgatgatccggcgatgaaaa

SEQ ID NO: 1269 - DNA, 507 bp, Hydra vulgaris
  source 1..507: mol_type = unassigned DNA
taaatgccaaaagttgcttgggctaaatgatacgtacgctagaaaaagcgacttgctgcacggatgacggttcatcagagcccgatatgtgcatgtcaaggcggcagggagaatcactagtgtagctgttctttccattacgacttacgcggttaacgtggcacgatagatttacaccaggaaataatacgtgaagggttccaccatatactggagtttagatctatgagggaaacatttgtaataagtcagtctggtaacctggcgccgctgttgagtcaaattaactatgtcaatactcattaagttatcgactttgatatggcatggggtgattccgcgttatatcaaagtcaaacatgatgattgcaatgagaaactaccacgcttggtcacgtttgtgaggagaacatctcattcaagcctcccggatgtcggcacccgctgacatcttctggcttatgaaaattttcattaatttttgtaagtcatgggcggcttgaaagc

SEQ ID NO: 1270 - DNA, 523 bp, Hydra vulgaris
  source 1..523: mol_type = unassigned DNA
atgcccgaggtagttgggataatgatgcacaagctcgtaaggcgacttgctgcacgtatgccgctaaacgcttagctcgatgagtgcatgtcaagacggtcgggagtatgatcagtggagctgactttccagacaactcacgcggattcgcgtgcggtggatacaacacctggtataacatatgaagggttccatctagtacagggataacgatccatgggagcaaactaattagttggaggtaatccaacgccgctgttgagtcagtttttaaccgccagtcaactcttgtaggttatcggtcttcggcagaccttggaccgcctagcgccggccaacagtttgtcgtcgactaacatgatgatttgcgagagaaacccacgctttgtcacttatgtgaggataaaatctcttgtccatatgatcctttgaagggaacagcgctttgagcttgctcggcgttggcacctttagtctgtaatattttcttgatattatggacgaaaaaggtagtatggttgca

SEQ ID NO: 1271 - DNA, 303 bp, Adineta vaga
  source 1..303: mol_type = unassigned DNA
actagtctccttcttctattagtcagtctaattaatttttcttacattctacatctagttccattattaaattggtatgatcagtgctatctctgctacactcaatgcttaatcgtatgttattgacagtctgacacttgattactcttacgacatatgcactgtttgcttcagagaaaccactgttcatatagtgaagttcctcagttttctgttgatatattcttctttcattctcgcttctccttttctactgtgttctttttatcagttttttgtggaaaaattgagaataaataaagt

SEQ ID NO: 1272 - DNA, 108 bp, Oryzias latipes
  source 1..108: mol_type = unassigned DNA
gggggacagctgggagtctcggcatgattacaaatcttgcgctgcactcggatgtcgtccccgtgacggacacattaatccggaaagcgagtggtgactcgcctcaag

SEQ ID NO: 1273 - DNA, 148 bp, Limulus polyphemus
  source 1..148: mol_type = unassigned DNA
attttgtctctttccccaatgatgtctactagcacgctgccgaagctagatagattgaggaatctgcgtaatctgtaatgattacgcctcatgggcatctatcggtagcgtcgaccctgacgttaaattgggtaataagaaatatcga

SEQ ID NO: 1274 - DNA, 1570 bp, Caenorhabditis elegans
  source 1..1570: mol_type = unassigned DNA
cctccagggcacgccgcacgccaaaagtcctggcataactctgcaaataacatcaaacgtcaatcaactccacaaactctccactctcttcaagtcttctcggtgcttccaacaccacaatggtgaaagctccttcaccttttccctccaaaattcttcccatgtggggaagtcctgttcttgtaagctctccggaggctgcaagagcagaagaaattcttctttctgacaaggtcagaaggaagtcctgttcttgaggcgtccatcccgggcgtcataggagagatcagatgcaccttctagcaggagctagaagggctgccctgtcttgagatccccacgggggtcaatagacgggaggggctgctggctttctctttttaagaggaagcaccaatccggagatccttaggggtcaaaggattaaaaggcagcaggtccaattctcctcactgacttcggtcagagaggagtcccgccttggagacctccccggggaggttgctgaagaggcggaagctccttctagcaagagctagagggagttcccagtcctgaaacccttgcggttgatgatggaatggaagagtacttcggtactgctcgttgctctctctgcgttttactgccgagggccggatttgctcgaatcgcgaaaggtctcaatcgaccattcaagatgacggcttatctaaggtccgaaagcagttgggagagtaacgtgttctcctacctttcaagttgaatggtcgttttactgtttgggatagctgacttgatgctagtacgcttcatctgtggatgacgctccccaagcagtcaagtagacttgaaaggtgccctcgccctagttagctcttagaccttatgggtcgccatggttgtggacgggtatgcttgccggagccgagtcgtgtttcttagaaccaacctcgacgaggcgaaagcttgcacaagttagcacaattgtggtagggccgactagaaaatgagtcccttagggggttacgccttggcgaaagtgaggacaattggcattgacgggtgcttcggcactaggcaaaggcgccaccacactgtccaatctctaaaaagttcacattcatcgaagaactaccggaaccaaccacacatgtgttgaaacctacacggtggaagggaaaggaaagcttcgctggaacgaaaagaacggataggttccccttcttgatggctgtgaggcttaggatggacgggaaggccgtgaggcctcaggcgggtaactcggccagacgctagttgatcttcggatcacgacagccctggctaagaggaaccctggatggagtgtgaaggatgggcgggtagggggttaagcctgttgacagaccaccgactgcagtcacaaaatcagtgattatgcgggtggaccaatctgttggcgggtgtttccctctacctgaccccgcaatatggtatgtacgatcctcggatctaaaattcataatggcccaccacaaccataaacctccctagcagctggtggtcccgataattcgggttcttgccactactgcgacccaggctcgcc

SEQ ID NO: 1275 - DNA, 130 bp, Cryptococcus neoformans
  source 1..130: mol_type = unassigned DNA
tgaggaagaggaggttggattattttttcttttctttaataagttgtttatttaagtagtttctttcattcgggcaacccacacgacaacccaataaattaaacaacgaaaaatgcaacctctataaccc

SEQ ID NO: 1276 - DNA, 60 bp, Chondrus crispus
  source 1..60: mol_type = unassigned DNA
taagtccttgacgcctgccccgtgatacagcatcggtacccctagcatttgaataaaaaa

SEQ ID NO: 1277 - DNA, 69 bp, Chondrus crispus
  source 1..69: mol_type = unassigned DNA
taattcaccttcatatctgctagtgtctctgtaagcgcacccctcatgcattgataaaattacccccca

SEQ ID NO: 1278 - DNA, 348 bp, Acanthamoeba castellanii
  source 1..348: mol_type = unassigned DNA
taagccgcgcgacgaggacggccaggacgaccaggacgacggcgacggcgaccacctagcaccgcacgcgccacgacatattgtcgcgcgctgtacaggcggctaggtcgagcccagccgaccgttctgagcctcagtcggcttgagcccccggcttcccaaggcctaccggggcggctctttttcgccctggtttttgccggcctgttttttctctcccccttttccccccttttccatttgtacttagtttttccttcggccgcggcagcttgttgcccggcatagtgttaatatgtttaaaaaacgtgtaaataaataactgtttaaccctaaccctaaccctaa

SEQ ID NO: 1279 - DNA, 261 bp, Fragilariopsis cylindrus
  source 1..261: mol_type = unassigned DNA
tagcaccaccatctattcatatccacacactgaccacctccaccttcacaactccactctcaattcccctgactactaagaaatatttcatggtggttacattggaggtatcccaacaccaagcacaaaatgaacccactaaccctctcatcctatccacggggaccacctttgagcagaacaccattcatattacaacctttagctagattaagataattatttagtacatattttatactattaaaaaaaaaaaaaaaa

SEQ ID NO: 1280 - DNA, 32 bp, Hydra vulgaris
  source 1..32: mol_type = unassigned DNA
taacttgtatttttaaattgttttattagttt

SEQ ID NO: 1281 - DNA, 27 bp, Lactuca sativa
  source 1..27: mol_type = unassigned DNA
tgaactatattttatatattaaaaaaa

SEQ ID NO: 1282 - DNA, 528 bp, Monosiga brevicollis
  source 1..528: mol_type = unassigned DNA
taggtaggcaccgtctcgggggtccctctgtggggatccctgtgtgcacctgtcgctccctaggtggttcctcgttgtgtcttttgatggcttgacttgtatttttgttttaattttgctttaatttttgctgtatttgtgtggtatttttgctgaatttttgtaaggtcctttgtatgatgtctttgtcttctgtggtcggttgttttcctcaatccgacgttgtgtctcgttggatgtgagcgtgccgtggtgttctttgtgtttgtgctgtgatggcttgtagttgtgatgtgtgactgcctttttgggtgtcttgtgtttgaaatggccgtatctctggttatacttggtcgttttgtacgatttttgtttctatgtgcgtgattcttcgcgcttgtacttcttggcatgatagaagccaatgaatgtgtcttgttctcttgtgttgttttgcgtgccgtcgtgattttgatgtcggggttgcacagctttgctttcagctctgaggttcaaacacctaattta

SEQ ID NO: 1283 - DNA, 38 bp, Hydra vulgaris
  source 1..38: mol_type = unassigned DNA
tgagctcttataaatttatattatagcattttgtttta

SEQ ID NO: 1284 - DNA, 363 bp, Magnaporthe oryzae
  source 1..363: mol_type = unassigned DNA
taataggtaacgtccctatttttgtctttggttttgtttttatctttgtttttgtttttgttttcgtttttgtttttgttttcgtttttgtttttttttttgtttttgtttttgtttttgcctttgtttttgtttttatctttatttttgtttttgtttttactttgttttatttgttttatatttaccttttgattttttctatttttcccacccttattattataaccccaacctactaatattttttcttttttcttttttctttttacggttttattttcccgtttgttttttctattttatttgtacgacaaaacccttagcaaataagcttagaatataataaagcgcgaattaaaa

SEQ ID NO: 1285 - DNA, 85 bp, Branchiostoma floridae
  source 1..85: mol_type = unassigned DNA
tgattaaagacccgaaacacccaatgaccccgggttcatcactgatgatgtgtccctgttcgcactaccagagtgtattctagag

SEQ ID NO: 1286 - DNA, 127 bp, Danio rerio
  source 1..127: mol_type = unassigned DNA
tgatcaaccccggctgggtcacctgggtgagagtgtatgatgttgagagacccgaaacactcaatgatcccaggatacatcactgatgatgtgtcccaaatgcatccatgagatgtttcttgcataa

SEQ ID NO: 1287 - DNA, 270 bp, Branchiostoma floridae
  source 1..270: mol_type = unassigned DNA
tagaaacccacaaggctgagaaatgtagagcatctgtatggacaatattgatgattgaaatgttgtgattttagatcaaatttagaaatatgaaaaccgaactaaactaaatataatgttttttttaaagtaatgataagcaatacccacattgtgcaatactatctatgttatgtcctttgtcccccctgcatgtttggtcaataatgaccatcgtgtcctgggctccgtgtacctttctttactatgaataaagaatgattttactac

SEQ ID NO: 1288 - DNA, 154 bp, Danio rerio
  source 1..154: mol_type = unassigned DNA
tagcatgccacttggacacaggccggggtctgatcagcctcggtcgggtcgcctggaggagggtgtctgttgcaagacccgaaacaccctgtgagcccaggaaacaacactgatgatgtgtccaaggttgtgcatcaggagatgtttctgtaac

SEQ ID NO: 1289 - DNA, 123 bp, Takifugu rubripes
  source 1..123: mol_type = unassigned DNA
tgatcaccccggctgggtcgcctgggcgagggtgtatgatgtcgtgagacccgaaacaccctatgaacccaggatacatcctgacgatgtgtcccagtgcatccaggagatgtakctttaagt

SEQ ID NO: 1290 - DNA, 128 bp, Tetraodon nigroviridis
  source 1..128: mol_type = unassigned DNA
tgatcactcccagtcgggtcgcctgggtgagggggtctgatgttgaaagacccgaaacccccgatgaccccaggtactatcactgacgatgtgtccaagacatgcatcaataggtgtatttagaaatc

SEQ ID NO: 1291 - DNA, 508 bp, Schmidtea mediterranea
  source 1..508: mol_type = unassigned DNA
taaaatggcaaaaagatatttcaagatgaattgtggactcatctaaaaaatgaccaccttgagtccaaatatgcctagctatcatggttgctgatggaaacagtaaggcacctgatagctaacttttcactgtgaatatcttcagatattcacagtgacacgaaaggacaccactagtaaaaaccactagttttttctgacacctcttgctacaaactctgtaaaaatcaaaaggatcgataggccgcgctttcacggtctgtattcgtactgaaaatcaagatcaaggaagcttttccccttttagtcaacaccaggtttctgtcctagttgagcttcccttgggacatctgcgttaccatttgacagatgtaccgccccagtcaaactccccacctgacactgtcctcaaaacagttcaattgcatccgaagatcgcaattttttcactaaaataaattaacaaaagttaattatactgcttcattgagtaagtagaaaaacaatc

SEQ ID NO: 1292 - DNA, 659 bp, Caenorhabditis sp.
  source 1..659: mol_type = unassigned DNA
taaacccacacgagamctacgacgccataagatcaggcatgtacggatgtgaatgagactgatgaacggaatgagcacgtgcccataagatcgggtatkaaagawcagagacgatccctamcatcgggaaaacacgagttatactgcttcactgamctcgctaagctctcataatgaccgaacttgttcgcaactgcctcctaaccgggcgggtgtgagaagggaggtcgccttgaggcggacgcaatgagggatgtgtgcaggttccccctcttgagatccgaaagtctaaaagtactagaccgaaagatcgaggacggacgggatggccgcgaggcacacggcgggtaacacagccagataacctagtagatcttcggatctcgtcggcctggagatatgtggaaccctgggaaaggagaaagttgtttgttgggctggcaagagtgaagtttgaatgtgaaccaccgtcatgcaaccactaaaccagtggcgatgcgggtggagtcatcacaggaaaatgtttctgttgcttgacttatcagtgtttgatatcgccctcaggcacaagtatgaaggcccccacccacataaactccctagcaactggtagtccagcaagcgctggtwcttgctactattgcgccccaggctcgccc

SEQ ID NO: 1293 - DNA, 680 bp, Caenorhabditis sp.
  source 1..680: mol_type = unassigned DNA
taaaagccaaaagccacggagcatcgggaaagaaaaatggaaaaggactgaaaacgagactgaaaaatcccaaacaaaacaaatccaaaacaaactgaaaaaaaaaaaaaaacaaaacaaaaactggacagacactggaaacagtgtcaggcaaagtcgccgattatactgttccacgccttaaaagtcccgaaatggcgcaaaacaacctgaatctatctgaaagtgctccaaaccacgcacaactcggagaaaatcagggacaagttgcttcacgcaacgggctgggacaggtaccccctcctgaaaccgcgaggttgaggatggacgggaaggccgcgaggcttatggcgggtaactcggttggtgtgctagtagatgatttatatccgacagccccaactaagaggaatcctgggaaaggaaaacttgaaaaagtttttacagggctggtaatagttcagcacaattgtagtctactgtcttgcaaccacaacaaaccagtggttctgcgggtagatcaaactataatttgtgtgttttcttttacttgacccgggcaacacattataccacgtccacaaggacgaattcataatggcccctccctaaataaactccctagcaactggtggtccggcgaagccggttcttgccactattgcgccccaggctcgccc

SEQ ID NO: 1294 - DNA, 893 bp, Caenorhabditis sp.
  source 1..893: mol_type = unassigned DNA
tagccgatcgtaaaagaaaccgagccgtaacaacaagcaaagtaaacaaaagaaaaatcaataaaaaggaaggttgacctcagaccccgaggagggaagagagacaccsagaaaaagagagacgcagagaaaaggagagacacctctcataaggagaggtaggtcaatccaaatgtaaacagaaaaaaccagtggggaggaaagaaagactgatttcacccactaaaatgaatttggaaacagaatttggaagagaaaagagaaagggaaacctaaagaaaatagttctcttgccaaaattctgtagaggaatactttgtcaaaacatgatagaaaccagtaatctggtacgaaagacaagtaagacctgaactgacaagaaggaagtcagaaagaaataccgctcacaaagcctgtgatcgattctcttacctactgaacttgttctcttggcctcgtaaccggctaaagggagaaggaatgttaattggagatagacataaagataggtggagtgaaggtcctgttcttgaaactaggaggaatgtggaaagagcagaaggccgcgaggctttagacgggtaactcagtcagttgctagtggtcttcggatccaacggcttcggacatagtgaggaaccctgggtacggagaagaaatggaaaagagatagggcgggcaaaggctaagttcatacactgtcatgcaaccactaaaccagtgggatctgcgggtgaatcactttcgaaaagaagtgaatggacgtgctgatgtctgactttaaagaagtctgaaattaaaaaaacagatataaaggcccctcactataaactccacagcaacaggtggtccggcgaggccggttcttgccaccattgcaccccaggctcgtc

SEQ ID NO: 1295 - DNA, 409 bp, unidentified
  source 1..409: mol_type = unassigned DNA; note = Description of Unknown:Trichomonas vaginalis sequence
taagaagagataagacgagtgagaagaacagaagcatagtaggattggcagagcttaagcgatgtcactcggtacgaaacgtgtaccaaacaccggattccgtgctaggaatcacaagccaaaataaaagagacaccacgaaaattactcaccctccctcaaacagataataatattaacctcccatccatcagtccgtatggtctgataacagactagcaccacatccatgatacactcattggagtgaaaaccaccaacaacaaatccacctagaccaaatcctgccccacctccacccaagtagctcgcttcgctcgctcacctaaaactttgctcgctcgcttcgctcgctcgtcttaaccctttccgaataaacacttacaattcccggctcgccccatttttt

SEQ ID NO: 1296 - DNA, 1468 bp, Caenorhabditis sp.
  source 1..1468: mol_type = unassigned DNA
taaaccggctcctctgggaggaggtatgtcagaggacattctccgtgggcggatgggaggagtagggtaacgacccgtcattctggatgcctaaaccaccacaatctgtcaaggcaaagtgccccaaaagcacacgcgtggatcggtttggatgccgactgagccagagggcaaagtcgaaggccggtaggctcccggcgggttgtccgtcatagtcagtggtgcgcctacacccaactgctatgacacacaaggacaacccaaaataaataagccaaggcggcgttagcttcgagctaacaagctccccgagaggatggttgccacagggcaccatcctggggaacgacccgatctttcggatgcccaaccaccgccaatctgtcaggcaacgtgccccaaaagcacacgtgcggagcggttggatgccgactgagccagagggcaaagtcgtaggccggtaggctcccggcgggttctccgtcgtagtcagtggtgtgcctacacctaactgctatgacaagcgtataggaggcccggaaaaacaagccaaggcggcgttagctgagagctaacaagcttctcgtggatgggtgccagagggcaccatcctggtgggtggatggggggagcttgggaacgtcccgatccttcggatgcccagaccaccgcaatctgtcaaggcaccgtgctccaaaagcacacgcgcgggttggtttggatgccgactgagccagagggcaaagtcgtaggccggtaggctcccggcgggctctccgtcatagtcagtggtgtgccttcacccaactgctatgacatgcgtacaggaggcccggaaaaataagccaaggcggcgttagcatagggctaacaagcttctcgtggatgggtgccagagggcaccatcctggtgggtggatggggggagcttgggaacgtcccgatcgttcggatgcccaaccaccgcaatctgccaggcaacgtgcttcggawggtcattggttctagacttgtaatagaccattggccggaagagcacacgcgcggttggttggatgccgaccgagcctagagggtgcaaacctgaagggcgaggtcgaaggccgtgaggctcccggcgggaaactccgtcatagttagtggtgtgcctacacccgacgactatgacacataggaggaatcctgatctgatatgatcatgtatatagggagggcgaaggtaaatagtcagkgtcaaagtccacgtggcagctactccccagcatagtagtgatgcgagtggawccaactttgacactgatgttccctgagcctgacccatctgcacaaatccaacagtgtatgatggcccacacactgaggacgagtatcacttgtgatactcagaggtgtcccccatgatcaaccaatatcacagctagcggacctaccgtgaggtagacccccgccgctgtagcaggctcgcctc

SEQ ID NO: 1297 - DNA, 635 bp, Caenorhabditis sp.
  source 1..635: mol_type = unassigned DNA
tgaataccgtcagataagcccccaacataaaaataaaagtcggcgttagctaaccactaaaccggctcctcattgggggagagtatcattccggtgctctccgtttgggcggtagggaggagttgggtagcgacccggaagtatggatgcccaaccaccgcaatctgatctggcattgtgtttcggatggtctctgtctctagatctgaaatagagctctggcctgaagaacacacgcgcggaccggttggatgccgactcgatctggagggtgcaaacctgaaagggaaagttgaaggccgtgaggctcctggcgggaaactccgtcatagtcagtggtgtgccaacacccgacgactatgacatagttggaggaatcctgatctgataataatcattgttcatataagggagggggatggtaaatacccagggtccgaaaccatcaaagcagctactgaccagcatagtagtgatgaacacatagaccctggggttccctgaactcgacccatctgcacaaacccactttgtacaaatgaaccaaactgatgaagagtttaatgatttcttacatcacagctagcggacctaccgtgaggtagactcccgccgctgtagcaggctcgccattg

SEQ ID NO: 1298 - DNA, 1425 bp, Caenorhabditis sp.
  source 1..1425: mol_type = unassigned DNA
taacatgccttggaaggcaccacgccaaaagtcctggcaactgatttgaataatgtataaaagtaactggaaccaaatgcccgataggtagggcgggagaaaatgacctagaaaacacaaagtcccaagcccccggattcgaaagacctataggaagtcagtgaatagagagaaatatcaaacaaatctcacccattcacaaggacttactggtcgagtagaaaacaagccaaaacatcaagcacgacgcaaaaaggggtaactttgggcaactaattaacggatacctccgtgtatcaggcaaagccgccaccaacagcaaattactgcccgataggtagggcgtgagaaaatgacctacaacctccaagacccgagcccacggaatcgaaagacctataggaagtcagtgaattgatggaaatacaaaaccaaatttcttccattcacaaggacttactggtcgagtagagcacaagccaaaatatcaagtatgacgcaaaaatgggtaaccttgggcatccaatcaacggatacctctgcgtatcaggcaaagtcgccaccaaactgtactactccgaaaaaaccaagaaacatgattttcccactccgttaaagcatctcaaccaagctaaagcggtaaggttatcatgtcaaaaggtgtagctacagcaacctaaagcccgaaaggtagggccgtataaaaagacctacaccctccaagacctaaacccacgaactcgaacgacctacaggaagtccgtgaatggagagaaatatctcaccaaatctcttccattcacaaaggctaactggtcaagtagagcacaagctaagcctccaagcacgaagtgatatgggtaatttaggcaaccaatcaacggatacctccgtgtatcaggcaaagtcgccacaaacactgtactactccgttactcccaaacacatggatctccttctctcaccaaaaagctttataaccaagctaacggtggaaaggacatcatgtcacgaggagtagctacagtaacctctctcttgagactgcaaagtcgaggatggattgggaaggccgcgaggcaaaaggcgggtaactcggccagacgctagtgatcttcggatccgacagccctggccttagaggaaccctgggataaggagcacgacgggaaggatgttccgcaaggatttcccttcccattagtcagggctggcagttggtaatatagcctttctacacaccaccgtcttgcacccactaaaccagtgggatatgcgggtggactcaatgtagaaaggtgttcccactgcctgactcgccaactttatatgtcttgtcaacataatggcccctcactataaactccctagcaactggtggtccggcgaagccggttcttgccactattgcgccccaggctcgcc

SEQ ID NO: 1299 - DNA, 146 bp, Schmidtea mediterranea
  source 1..146: mol_type = unassigned DNA
tgagtgtgctacgaggcagcgctggtaattgcatcggcgttgcagatttgtgtacgatagataaaaaccaatagtaataaatgctgagcctagctcgcatatctaagccgaaaggcagcatatatatgagacaatttaaaaaaaaa

SEQ ID NO: 1300 - DNA, 178 bp, Girardia tigrina
  source 1..178: mol_type = unassigned DNA
tgatccgtgtgtttgtgtcgtatgattgtttccgtgtgtgtctatatttttcttttttatactttcaattacctcgttgtaatgttataacttcatatggaatatatgtaatttagtttagtttagttagtttagtttagtttagtttagtttagttagtttagttagtttagttagt

SEQ ID NO: 1301 - DNA, 338 bp, Chrysemys picta
  source 1..338: mol_type = unassigned DNA
taaccgagaccgccgaccagggaaataacccacttccttccctgacgaaccaagggacgcaccccacccatgtacttattcgctacaccgatactgacttggactccttatacattccatgggtggcgtacccgagcccacttatccactgacactttaaaaactcttgcaccccaatctgggtctatgccggttatgcgatatgtatgtatctcttcatccttgcaaccgatacctgtaatccctcataacccaagcctgaccccagatgtacagtaccttccctcttaactcgtgtatatttaattttaaacattaactttaataaaatttttaaa

SEQ ID NO: 1302 - DNA, 124 bp, Acanthamoeba castellanii
  source 1..124: mol_type = unassigned DNA
taacaaccatgtatggtgaaccacacctctctcgatcttgtattctgtgattggacatcagagttcctgcgaagggatacactctgccaatctcgtgggttgtaataaatccacaccttcaaca

SEQ ID NO: 1303 - DNA, 668 bp, Acromyrmex echinatior
  source 1..668: mol_type = unassigned DNA
taaattattttgtctttgtcttggccccccctttttaaaccaagcaggagagagtggcccaatgcccaactattatatattaactatttactgtgatatttattatttgactgttgggcgggcccctctctgctggttttatttatatatattttttactcgcgtactttttgtactactctatttttctttttattttagctatgctatttttatctctttctttgtctctattttctttctttttttctttccttttcttttctttcttttattcttcttttatttatctttttttcttttctgttgtggggccctgaccgtccgagtgtgaatgccgcgaaaaacaatattatgttttatacgagtgtgcatgtgcgtgatatatttatctattttattttatttatttattataatttattgccgcgcgcgctcctccgggacttttattcgttgacaatactgtgatatttttctgckcaggctgggggggcttgccccccagccccttagttttaattgcctatgcggggggggcttttgtcccccgcaaatgtatatatatatatatttagcgcgcggcttagccgcttttgtttgtattaccccagaggggaattgtccctctggggaaaaaaaatgattggaaaaataaagtgagctaa

SEQ ID NO: 1304 - DNA, 408 bp, Alligator mississippiensis
  source 1..408: mol_type = unassigned DNA
tgaaccccccctctgcaccagatggaccttcacttcgagaggattcttcagcaatggacgaccccgctccacccgaagaggacccccgcgatgagactctatatggactgagacactttttcttcgaaccacttcctccaccattgcggaccattgtaacgggtttgtgtgtatctatcttctttctctctcagcgtcgcgaaccccctccctccccttcccctccccctcccccccacccccgggcttagttggctaacattgtatctcctgtaacctagttgcgttcccctcctcacccccatccctctattgttagtccctcgctcgggcgctctgtatttccctaccggctttgtcatcttttttggattcacaatcctaaacatctactaataaaagtcaatc

SEQ ID NO: 1305 - DNA, 401 bp, Chelonia mydas
  source 1..401: mol_type = unassigned DNA
tgagccggtacgacatcgtgcatcaactatgagaaagggactgagagactttttccattggaccatatgaactggaaccataaactcactgaacattaaatctcaccaaatgagggtaaatccatcctcatcatcgtatccactcattatactccacacctgaacatagccattatatgaacaacatacccccatatctcaatgtctgtactttgacccgttaaccttttacccccaatcggggatattgcagattatgtattccttacgccacccgatcctaaaccgaatttcgcaccccttgataatctgtaccttattccctgataaccagaaacttctatgcttaaactctgtaccgtttttttttatttcaacatcatcttaataaaattattaaa

SEQ ID NO: 1306 - DNA, 402 bp, Chrysemys picta
  source 1..402: mol_type = unassigned DNA
tgagccagagtgacatcgttctcccactacgagaaagggaccaagtgaccttctccgttggatcatatgaactggaaccataaactccctgaacattaaatctcaccaaatgagggtcaatccatcctcatcatcatatccactcattatamtccacacccgaacacagccactctatgaacttcataccctcatatctcaatgtctgtactttgacccatcaaccttttacccccaatcggggatattgcagattatgtattcctcatgccacctgatcttaaaccaaactttgcaccctcgataatctgtatgttattccctgataaccagaaacttctatgctcaaactctgttcactattttttttaacatcatcttaataaaatttttaaatctgtt

SEQ ID NO: 1307 - DNA, 228 bp, Drosophila sp.
  source 1..228: mol_type = unassigned DNA
taaaaaattaaaatgccttaaaaataaataaatatatcaaaatttaaaaaaaaaaacgaggaacaaataaacacaaattctgaaagatttatataatttaaaawataaatcgaaaataaatgttgaaaacaaaaaaaaaataataataataataaaaacacaataacactcacccggcctgccccagaggcaggtaaacatttactggccatatggctttttttttaa

SEQ ID NO: 1308 - DNA, 408 bp, Gavialis gangeticus
  source 1..408: mol_type = unassigned DNA
tgaaccgccccccctccgcgccagacggaccttcacttcactccgagaggattcttcgaccacggacgaccccgctccacccgaagaggacccccgcgatgagactctatacggactgaggcacttccttcgaaccacttcctccaccattgcggaccattgtaacgggtttgtgtgtatctatctcctttctctctcagcgtcgcgaaccccctcccccaccccccacccccgggcttagttggctaacattgtatctcctgtaacctagtcgcgttcccctcctcacccccatccctctattgttagtccctcgctcgggcgatctgtatttccctatcggctttgtcatcttttttctggattcccgatcctaaacatttactaataaaagtcaatctgttcttt

SEQ ID NO: 1309 - DNA, 297 bp, Lytechinus variegatus
  source 1..297: mol_type = unassigned DNA
tgaatagcatttatattgtgttccaaacaacatactcattattatatctaaacatttttttttctgttcctgacaatctacgtaaagtctgctaaccaactggcatgatgaaataagataaaatccccttacacattaatttcttgtcacatcataatgctttgtcaaagcaatgtcctacataatatctcgatgtcaccccaattaattttacatccttcggtaacctttataccgttggatcaacatatatgatttgtaaaactgttatttctgagttttttctatgctaataaa

SEQ ID NO: 1310 - DNA, 257 bp, unidentified
  source 1..257: mol_type = unassigned DNA; note = Description of Unknown:Nasonia vitripennis sequence
tagtggggccataacacctaggccccacagtgtggcgatgtccatgtgtgtcgtccttacttatttatttatttgtcctgtcgagctgtttaatctattcatatgtatgtgttgtgtgtgtcgtccctcgtagcagttttattccgtccaaccagaggtcgaccaatattaaaataagcatggcttgaagcaggccaagcgccgtgttctaaccccgttttaggggaagttacttaacctaaaaatacaacttttcc

SEQ ID NO: 1311 - DNA, 246 bp, Phytophthora capsici
  source 1..246: mol_type = unassigned DNA
tagacggcacagttctggcccacgtaggccgaaagggccccacccatgtagggaaccgccctcgggaaatccattccggtgttcgactgaagagatgctccttcgccttgacggaggtacatctcgacagtcgaacttcaactcgcaacatatccgatacagttacaaaccacagttagatatcagataggaaccttcctttaggaagctaacgggtacactggatggtaaatacacatacatttc

SEQ ID NO: 1312 - DNA, 948 bp, Phytophthora infestans
  source 1..948: mol_type = unassigned DNA
taagctggtcatcatgaccgacagggcactacccaggtagggaaccgcccttaaaaaacccaggaagacacaaacaccctccacttagtgacatacatattttagcctagatttcagttacggagaggttactaactggtaaatacgaacacatattctgttctaatcagtgtgaaaactggttttcgccttttggcggactttttcactcgcatttttgggcaatcgtctgcggctagcttgctagcggcggacgagcggtctccgggggcgttcacctttcccccgcgaggccaactacaccgatcttctctacacttttctaattcgcctccgtcttcggtcttcggttgtcgggcttttttctttttgaccaatcagagcgcgccatgcgcctcttctggccaatcagagaccgggccctgtcctcggacagcgaggcctccacggccagccaatcgagtctcggcagcgacgcgtctttctatagcgcagctgacgaggccgatctggcggcccccgattggtccgactttcggccaatcagcgacgacgagggggcaggggtttacacttttgcccccgtttcgacttcaacttcaggccaaaatggcgatttggaccctccacgcgccgtgccactgctcggcaccggcggcgattcagcgggtgcaacttcgggcacgtgtgcaacacatgcagcgcccattgcacgccaagcggcatcgcgggacgacgcctcggccgcccaagcgcagccccgcccttccagcacgacctcgcgccgtttggcggatcgccatcaagacgtgcgagagccaggcggggtcgggcaaaatatacttactctaagtatgcccgaatccctgccctctcaggctgaacgcggccccatacttgatctaagtatgggaggatccctggcctctcaggctgtacgcgagaccc

SEQ ID NO: 1313 - DNA, 1277 bp, Patiria miniata
  source 1..1277: mol_type = unassigned DNA
gattagcgaacactaatatcctgccmtagacgtgattgctaatccgcaaaccaaccggatctacagcctgaacactgaactttaatcttcacccatgtcacatctggacactaggtttttgctctgtttgtgttttcctgcctttwcmttggawctttcgcmctggaatttatttgtcgcttggattattttttttctcacaatttggatctattttcgtttgttcacttcgaactctagctgccctttcttcggacactgaactttaatcttcgccatggctgtcagtcgccggttcacttgctgcggtgggatcctgttgtgataatccccgtgcattgcccatggatttatttccgccttagttgttcctaaccttggatttattgctgtgggtgatgcccgggttttgtttacatcgggatcccgctgcggctcggtgttccatgcgactggcagcccctttgtttactctsgactctattcattgttgtatttcttccacactggccagtgatcacactgctgtgtttcccgggaagatatcctctgcggttttcacgctctgggtgtctccccgggcaacgcactggttgcttgctgcgccatcacccttttcgtttatattcattttcagtctgccgttatcttggccagcgctcattcttttgtgatggccgtggactgaccctctgcggttttctgcggtcascactctcggtgaatgctgtgccaccatttttcatttgtttactttttcagctacaattatcctggccagctttcactcttttgtgatggccgtggacggaccctctgctggttttcacgctccgggtttgtctgcggtcagcacccttggtgagtgctggtcgtttgtttgctcattttgcttagttcaccattatctttmttctcttttgtwtggttttcctagcggttgtctgggagttgagctgcagttgtctggtcttggttttacccccatttgttttcttttaacgcggggcgtattgccttgaccggccgtctcagcttttctcctagagcaaccttccgttcatccaacttttagttttctcagttcttggccattccggttggttaatttttatttatacttaattttatgtttacattttctggttggagaccattttagcttgttttaatagcttttcttctttaattaataccctctgccattgagggtttttattactattaattttgtttactctttgtaacttgtttgattgaatattttaataaaccac

SEQ ID NO: 1314 - DNA, 346 bp, Phytophthora sojae
  source 1..346: mol_type = unassigned DNA
tgaagctgcacaagcgcgaggctcgacagctggaccttcagctgtcgagccactgcatccgcgccagccaccgcacctggggctggtactgccggcgccaccgcgaaggacaacggagcggcaacgcctcgcgagcgccgcgtgggtctggggggggcccgcggcgcacatcgcaggctcgggcacggcggtaagctggtcatttgaccaacagggcactacccaggtagggaaccgcccttcaaaaacccaggaagacacaaacaccctccctttagtgacatgcatattttagcctacatttcagttacggagaggttactaactggtaaacacgaacacacat

SEQ ID NO: 1315 - DNA, 159 bp, Pythium ultimum
  source 1..159: mol_type = unassigned DNA
tgatgcgggtcatattgaccgaaagggcaccatccacgtaggacaccgccctcaaaaacccagttcagtttattgacaccctccacttagtgacatgcatattcaaaccgatacatattcgttaggagaggttactaactggtaatatatcaccatttc

SEQ ID NO: 1316 - DNA, 371 bp, Strigamia maritima
  source 1..371: mol_type = unassigned DNA
tgatgggagagtgaggaatcttctccactgtgcaaaaccatacagtcagaagatgctaactactagtttgataccctgtgccccctgcaatgtcccgcgtgtcgtacccaagcccggctggcattgagacacattaggctctcgctcccccgtatactctcataatttcgtgtacgctaatcctaccctacccctccctttgaccactcacccaaccatgtgtatagctgtgctggtgatcccggggcggttattcactggttatcatatcattctaaaatgatctttgatctctcaattaacaactaacttatttctgtttgtttcattgtttcacctcgtaagaggaagttcattgtgcgataaatcaa

SEQ ID NO: 1317 - DNA, 317 bp, Strongylocentrotus purpuratus
  source 1..317: mol_type = unassigned DNA
tgacgaaatgttcaatatatgacattctaatgttcatgtattttttgtttgcttgacaaagctagatgaatatattccctgtcctactacatacatctcgatgtgcccttgctagacgatccattggtaaccatgatatcaatggattaacacatgatctgtaaacaatatatgatttacacaatgtatttattgtttcaataaatctgttcttttcactttaatacatgaaacatgactgtgccttctccaactggagacctacataatttgttaaaatgatataaatatttcgaagatgaaattattattaataa

SEQ ID NO: 1318 - DNA, 134 bp, Trichinella spiralis
  source 1..134: mol_type = unassigned DNA
tgatccgtcccgaaccaacggaaccacattgccgcatgacttcgatttcgcttttgctctttttgtatttaattttgctattaacaattcagtttgttaactgttttgtattcatttgaagatccaaataaaac

SEQ ID NO: 1319 - DNA, 394 bp, Chelonia mydas
  source 1..394: mol_type = unassigned DNA
tgagctggagtgccgatgagaagcgcagtcgggaaagtaactgaaatactttcctcatggattgtattttctaaatggacaacctacctaattctcaattactgagggacaatctccactcattgatatattttgctttccacaaccaaatctctgtacaacttttcatgagtgatgtacccgagtacttggattctaatatctaaactgtattgttaaatctattcacctaaatttgggttattgctgattatgtactctatgtatcatatgacttttaaaaacaaactttgtatttgtggataatctaagcactatacccagatgtacagacactcttttcccaacctatgtattatatttttttaacattagctttaataaaatttttaaa

SEQ ID NO: 1320 - DNA, 155 bp, Phytophthora capsici
  source 1..155: mol_type = unassigned DNA
taagctggtcatttgaccgacagggcactacccaggtagggaaccgcccttcagaaacccaggaagacacaaacaccctccctttagtgacatacatattttaggctacatttcagttacggagaggttactaactggtaaataaaaagcacttt

SEQ ID NO: 1321 - DNA, 1015 bp, Phytophthora infestans
  source 1..1015: mol_type = unassigned DNA
taggcggaaaccaggcccaagacggccgacagggccccacccaggtagggaaccgccctagaaacccatttcggtggtcgactcgaaggccttacctattttttccttagacattcaattaggtagcgaccaaattacaaatttggtaacgagtaagccaaatggtaatacacaaaacttttctgttctaatcagtgtgaaaactggttttcgccttttggcggactttttcactcgcatttttgggcaatcgtctgcggctagcttgctagcggcggacgagcggtctccgggggcgttcacctttcccccgcgaggccaactacaccgatcttctctacacttttctaattcgcctccgtcttcggtcttcggctgtcggatttttttctttttgaccaatcagagcgcgccatgcgactcttctggccaatcagagaccgggccctgtcctcggacagcgaggcctccacggccagccaatcaagtctcggcagcgacgcgtctttctatagcgcagctgacgaggccgatctggcggcccccgattggtccgactttcggccaatcagcgacgacgagggggcaggggtttacacttttgcccccgtttcgacttcaacttcaggccaaaatggcgatttcgaccctccacgcgccgtgccactgctcggcaccggcggcgattcagcgggtgcaacttcgggcacgtgtgcaacacatgcagcgcccattgcacgccaagcggcatcgcgggacgacgcctcggccgctcaagcgcagccccgcccttccagcacgacctcgcgccgtttggcggatcgccatcaagacgtgcgagagccaggcggggtcgggcaaaatatacttactctaagtatgcccgaatccctgccctctcaggctgaacgcggccccatacttgatctaagtatgggagggatccctggcctctcaggctgtacgcgagacccgtacggccgaatcccctggcctctcagcctgtacgcggggc

SEQ ID NO: 1322 - DNA, 380 bp, Phytophthora ramorum
  source 1..380: mol_type = unassigned DNA
tgagcaccttgggttgctcaagcgtgatgcgaagcggctggaccggcagctctcggtggcgtgcatccagtccagccgccgcatctggaacctgcactgcagccagcaccgcgcgcgccagcaccaagcaccagggggaagtcgggcggcggagaccggggggactccgccgcgcaccggccgccgctagacggcacacaggcccacagcggccgacagggccacacccaggtagggaaccgccctcaaaccccgccggtacattatggtccgacacctatgaggtgcaacctgtacacaagttacacaccacatagcgactaccaggtatttactacctggaagccaaggattaaccggtcggtaatacacataacttt

SEQ ID NO: 1323 - DNA, 210 bp, Pythium ultimum
  source 1..210: mol_type = unassigned DNA
taagcggggggtccagaccccacaagagagaagcaggaatcatggtccgcatggaccagtagggcacgctccacaaaggttatcgccctcaaacccatcacacgaaggatctaaaaagaaagcaacaatcgaaatagtaaatagtaaatagcttagaaaggtcaacatgcgaaatgcatgaggaacgtaagatggtaatacatttttata

SEQ ID NO: 1324 - DNA, 1098 bp, Phytophthora infestans
  source 1..1098: mol_type = unassigned DNA
tagacggcaaagttctggcccgcgtaggccgaaagggccccgcccaggtagggtaacgccctcgggaaaaccattctggtgtttggctgtttttcaacagtcgaacttcaactcggagcatatcagatacacttactcacacatttagatatcagatagggaacctttattagggagataacgggtacaccggatggtaaatatacaaaaccttctctgttctaatcagtgtgaaaactggttttcgccttttggcggactttttcactcgcatttttgggcaatcgtctgcggctagcttgctagcggcggacgagcggtctccgggggcgttcacctttcccccgcgaggccaactacaccgatcttctctacacttttctaattcgcctccgtcttcggtcttcggttgtcgggcttttttctttttgaccaatcagagcgcgccatgcgactcttctggccaatcagagaccgggccctgtcctcggacagcgaggcctccacggccagccaatcaagtctcggcagcgacgcgtctttctatagcgcagctgacgaggccgatctggcggcccccgattggtccgactttcggccaatcagcgacgacgagggggcaggggtttacacttttgcccccgtttcggcttcaacttcaggccaaaatggcgatttggaccctccacgcgccgtgccactgctcggcaccggcggcgattcagcgggtgcaacttcgggcacgtgtgcaacacatgcagcgcccattgcacgccaagcggcatcgcgggacgacgcctcggccgctcaagcgcagccccgcccttccagcacgacctcgcgccgtttggcggatcgccatcaagacgtgcgagagccaggcggggtcgggcaaaatatacttactctaagtatgcccgaatccctgccctctcaggctgtacgcggccccatacttgacctaagtatgggaggatccctggcctctcaggctgtacgcgrggaccaagtacagccgaatccctggcctctcagcctgtacgcggggctatacttggtctaagtatgccccggtcgctggcctctgagcccgtacgc

SEQ ID NO: 1325 - DNA, 242 bp, Phytophthora ramorum
  source 1..242: mol_type = unassigned DNA
tagacggcaacactctggcccgcgtcggccgaaagggccccacccacgtagggaaccgccctcgggaaacccagtctggtgttcggccaagaaatgcaccaccaccacggcggaggtgcatttcgacagtcgaacttcaacccgccacatatcggatatagttacagctctagttagacatcggataggaacttcttagaaaattaacgggtataccggatggtaaataaaataaaaacttc

SEQ ID NO: 1326 - DNA, 1036 bp, Phytophthora infestans
  source 1..1036: mol_type = unassigned DNA
taaacgggtcacttgaccgacagggcaccacccaggtagggaaccgccctttaaaacccaggaagacacaaacaccctccacatagtgacatacatattttagcctagatttcagttacggagaggttactaactggtacataaaattacacattctgttctaatcagtgtgaaaactggttttcgccttttggcggactttttcactcgcatttttgggcaatcgtctgcggctagcttgctagcggcggacgagcggtctccgggggcgtacacctttcccccgcgaggccaactacaccgatcttctctacacttttctaattcgccttcgtcttcggtcttcggctgtcggatttttttctttttgaccaatcagagtgcgccatgcgactcttctggccaatcagagaccgggccctgtcctcggacagcgaggcctccacggccagccaatcaagtctcggcagcgacgcgtctttctatagcgcagctgacgaggccgatctggcggcccccgattggtccgactttcggccaatcagcgacgacgagggggcaggagtttacacttttgcccccgtttcgacatcaacttcaggccaaaatggcgatttcgaccctccacgcgccgtgccactgctcggcaccggcggcgattcagcgggtgcaacttcgggcacgtgtgcaacacatgcagcgcccattgcacgccaagcggcatcgcgggacgacgcctcggccgctcaagcgcagccccgcccttccagcacgacctcgcgccgtttggcggatcgccatcaagacgtgcgagagccaggcggggtcgggcaaaatatacttactctaagtatgcccgaatccctgccctctcaggctgtacgcggccccatacttgatctaagtatgggaggatccctggcctctcaggctgtacgcgagacccgtacggccgaatccctggcttctcagcctgtacgcggggctatacttggtctaagtatgccccggtcgctggcctctgagcccgtacaca

SEQ ID NO: 1327 - DNA, 193 bp, Phytophthora ramorum
  source 1..193: mol_type = unassigned DNA
tagacggcacacaggcccacagcggccgacagggccacacccaggtagggaaccgccttcaaacccggccggtacattatggtccgacacctatgaggtgcaaccggtacacaagttacacaccacatagcgactaccaggtatttactacctggaagccaaggattaaccggtcggtaatacacataacttt

SEQ ID NO: 1328 - DNA, 1063 bp, Phytophthora infestans
  source 1..1063: mol_type = unassigned DNA
tgacgcaccgtgacatagtgcggcacgtgaagatgcacatgaagctccgacactgggccaagtgggcggccatgcgcgaccaaggcaagacagctcgtgcacatggtggggttggtagtggcttcctcacacggccgcgaggcctgtgggaagccgactaccggttcgcggtggccggccgcttaaaccaggtagacacgcacagtgtcctcaagcgccggcgcctccgagcacatgacaggtgcagacacccaggatgcacgcgctccgagacgctggcgcatgtgcttaaccactgcgacggaaccatggacgcagtccgtggccggccatgacgccgcactcaagattattgagcgtgcgctcctcgcatcgtcggccgaccagcaggaccgtgctgagctccgcgtgaaccagaccgtgccgtcactcgccggccccgcgctacggcccgaccttcagctctacaaccacaccaagaagacggtggcggtggtcgacctggccgtggcgttgaggagcaggcgagtgacgacgcgagtagctcggcactgtcccggatcgccaaccacaagcgagccaagtacgaccacatcaagctacacctcgagcgccaaggatggaaggtacacctctcggcactcgtgtacgggtcgcttggggcggtcgctagtggcaactaccaggtgtacaccacacacctggggctactcaagcgcgatgcaaagcggctggaccggcagctgtctgcctaatgcatccagtccagccgccgcatctagaatctacactgcagccagcaccggactcgccaacaccaggcgaggcccagccaaggaccaagaggcagccgggcgacggagaccggggggactccgtcccagacaagccgccgctaggcggaaaccaggcccaagacggccgacagggccccacccaggtagggaaccgccctagaaacccatttcggtggtcgactcgcaagccttacctatattttagacgtagcgaccaaattacaaatttggtaacgagtaagccaaatggtaatacacaaaacttt

SEQ ID NO: 1329 - DNA, 415 bp, Phytophthora ramorum
  source 1..415: mol_type = unassigned DNA
tgatgcccgccaactacaaggtgcttactgagcaccttgggctgctcaagcgtgatgcgaagcggctggaccggcagctgtcggtggcgtgcatccagtccagccgccgcatctggaacctgcactgcgcgcagcatcgagcacggcagcaccagggccaagcgccaaggggcagtcgggcggcggagaccggggggactccgccacagagcggccgccgctaagcggacatcgggcccgtagcggccgacagggccacacccatgtagggaaccgccctctaaacccgcccggtacattatggtccgacacctatgaggtgcaaccggtacacaagttacacaccacatagcgactaccaggtatttactacctggaagccaaggattaaccggtcggtaatacacataacttt

SEQ ID NO: 1330 - DNA, 1562 bp, Ciona intestinalis
  source 1..1562: mol_type = unassigned DNA
tagccaaaagatttggtgttcttggcgagctgcagtcccggcagagtaggcgagatcgtgagctctacaccgcttcacgatttgacgagttcttcttgagtcgatccccaacggcaacgcactccaaatttaacgaccgcatggcgacgccactgatctcccagtcatccgtgctccgagggcacttaaggggaaccgattcactgatgctgcaagttggcgggggcgcactcaccaatggaagatgagggagcccaacgatgccccgaactaccgcaccgtccccagcaccgtgtccttgtgagtaattattttcactaatccagggacggggccatgaactgaactatgtctgcacgctgccccgcctagcctcggccacaaataaatagtcaagccggggcgtactaccaattgattcggatttggcggggcccatcacgcgcctccgcccccacacacaaaaacacttttaaactcttcggttccccaaccactacaacaaagcgagcggcccctcttagatccaattttaaaattttaaatcagtgcactcaacttttttacgtgttgtgttttttgtattttttcccacagattttgtatttttatattatattttatatacacaacactatttttatacactaccttgcactgtcccactttttgtaattatcaccttttaccttttatgccgctcgctgagctccttgcacggatgaccagacaaacttttataaaattataacattgttttaattgtcgcggggtatcagtggcgcccccttgcggccgtgaaagcccttttcaccttaattcgccccttagtccaaatttttccccattgcctgtaaaagtgcgttgccgtcgactcgaactcgtcctttttaccgcctctctgttactgaactatgaccagcttggctgttgaagtcggctttaattcgccggcttcacattatatttttttgttgggtaatctgttttttttcatatataaaaccattcggcttaaaatcaccaatccccatcatccaccctggtcacccattgaaacatctctttttagtcaattattttttcagattacccctcccaaattgtcatatagtttaacaccccgtttgccaagttggtcttttccccatccccttctgtccttccggtaatcccataacattttattctttaattcggccccataaatagtgtaatcttaagacgaagtccccagaggcccggtcccccccttctttgtcatggaccgggccagcccccctgttaccacaacaacccaccattttattctttctttctttttattagtatttatttatattgccgcccaactgtcgtgtcgtggcgcaggggggttccctctgtcggcccagtggacgaccgtctaaaaaacaggcacaggcagcaggcacttatcacccggtacctccgggtaccggaggctggttttcagcgcactgtacgtgatggccaattttattcattgcattttatccgcgtcgtggtgtttgcgtggatgcattaataaaagatgaaattcc

SEQ ID NO: 1331 - DNA, 602 bp, Schistosoma mansoni
  source 1..602: mol_type = unassigned DNA
taacggctgaacgaatagcccccttcactcttagacattcccccactgttgttgcttatcttcatgctcttgtgttaattgactgctctcttctgggttgacgtctgattgtctctctctctttccatattgcttgctctgcccgcttacttccaatagttgtcatattatgtctttgtttacttgccatgtctaacgacaattactttatctaccttagtttgtcctcttggtttcgattgccttcatatgttcatggcggaatctgatgtttataatgactattcctattaccaccactacaactactattattattttcattactattaacattattataaacattattactattattattattactattattacttctacaattaatattatggctactcctctcagcacaccaataaaatatcaatcaaacatctcaattatatccacctattaaactctctctatttcccctgagttataaacttacaattcagtctaaccgaatatctctcttttacaaatcttaagtatgtaattttgtgccaaacccatttgggtctgtacaatttgatacttaaaaataaatgttattagcc

SEQ ID NO: 1332 - DNA, 90 bp, Bombus terrestris
  source 1..90: mol_type = unassigned DNA
tgaaaacacgataacgattatgaatcaaaataagaaagtaaacatcccagaaattgtctacgtcttatttgttatctatttatttgttta

SEQ ID NO: 1333 - DNA, 1815 bp, Crocodylus porosus
  source 1..1815: mol_type = unassigned DNA
tgaatcccactctggggacccccaaaaattagaaaaacccaaaacagttgtgtttaagtgtgttcttgtttgtccctttggcttcacctccaagttgcgatcccccatctcccctgcgctgtctttctgaatgaccagtggtgttgaggctggtgtgacctcggtcacctccaaggccaagtgccctggccccgagtaggaccaggtggcccagcttgctgggcacccgtcaccgcccagggcaaatggaagggatctatcctgaccactaccaggctaagtgtggtgctgcctagcctgccgtaaggtcaagcgccctgctgccgctcgggtakcagtcctcgttcactcgtccctcctagtaccctccgcmtctgcgcttctgctatccactgtggccggwgatgccgaggwtgswmcawcctcgacacctccagggccaagcgccttggccmcaggtaggacctggcacctgcccagggggccagacactgcctgcggcaagggaaagggagccgtccctgaccgttaccgggcttgatggtgctggctagcccgccgtatgtcaagcactccacagctgctcgagttcgctggcttcaccttcatcccwcctagtgccttccgcctctgcgctattttcgtcccgactcgtacctccccacctctgcgctacmgctatccctgmaaggaccaagtgggcaggggsgttcgccccccgcccgcaggaggctcggcgtatccgtggcktcwtgcctccaccgtcttgtgccgctagaggggtacctcmgagaccggcgcaacacgaccttgacgsttagacagtagggtgmaacakccctgctgcaggcstgaagggccaaacggctgtgccatgagaggggaaccttgaagaccgggscagtcagccagttagtcagttgggcgaaacaatcccagctgcaggcccammagggctgtcaggtgagggggtatccccawccaccccccgccgccgactacggaggcakgaagtccctagtgacttckgacccccacgtcttgtgccgggagaggggaaccttgaagatcggggcaagccgcacttgatagttagccagtckggtgaaacaatcccagctgcgggtccgaaagggccgactwccaggcgaggggggcctgcggaaamccccctccatggtacggagktctggcgtcctmaccgacwccttgccaccaacgtcttgtgccgggagaggggaaccttgaagatcgggscaagctgcacttgatggttagtcagtcgggtgaaataatcccagcwgcccccgctgtgactgctaagmcwggtccccaaggggcatgaggcatstgcgctgagccggsaggggtgacacmcggcgatcggcgcagcacakastgaagggaggcacttgctgagactgcttctgaggccccagacttggggtggtgcagccttgtctggggtatggtacagcaccctactgctccctttggkcagcagaattcgtcccgacctcttacccacccgagtctgcgccttgttccgctatcctgcatctccgatccacctcgctgtctccccgctgcgctgcttttctctcaagtgggttaaatcttgtcatgattacctcccacgtttccgctcaagggcaatgcccaamatgacggggatcgctggtgcatggcagtcatgagaccatccggaccctccggtggtcgctatagtcattttktgttgcatggggcatsctgagtcacttaaccgaaagactcwaaataactcaaaagaggkamcctctgsggttcggtaaa

SEQ ID NO: 1334 - DNA, 236 bp, Drosophila willistoni
  source 1..236: mol_type = unassigned DNA
tagatgtactaacctctagcttttcttatacttttgcctgctaccttggcattacatctaaaaaggtacaaacatcgcattgtcataaagaggtggttttagtacgtaggcgctgtgggacttcattgtcccggtgatgcagtgaatcgtgcatacgagattgtccagtagttggttgctcgtatctttagaagatttccttcctcggcgatcaaaaaaaaaaaaaaaaaaaaaaa

SEQ ID NO: 1335 - DNA, 2018 bp, Gavialis gangeticus
  source 1..2018: mol_type = unassigned DNA
tgagaagttgcgagttcttatgcaagttgaataccactctkgkgaccccaaaaaawwaaaccccaaaacagttgtgtttaagtgtgttcttgttcgtccctttggcttcacctcsaagttgcgatccccccatctcccctgcgctgcctttcagaacggccggtggtgtcgaggctggcgcgacctcggtcacctccaaggccaagtgccctggccccgagtaggactgagtggcccagctcgctgggcacccgtcaccatctggggcaaatggaagggatctgtcctgaccactaccaggctaagtgtggtgcggcctagcctgccgtaaggtcaagcgccctgctgccactcaggtatcagtcctcgttcacttgtccctcctagtaccctctgcctctgctcttttgctatccactatggccagtgatgttgaggttggtgcatccttggtcacctccagggccaagcgccttggccacaggtaggacctggcacctgcccagggggccagacactgcctgtggcaagggaaagggagccgtccctgaccgttaccaggcttgagatggtgctggctagcccaccatatgtcaagcactccacagctgcttgagtttgttggcttcaccttcatcccacctagtgtcttctgcctctgcactattttcatcccaactcgtacctccccatctctgcgctcctgctatccctgcaaggaccaagtaggcaggggggttcatccccctacctgcaggagactcagcatatccatgacttcttgcctccaccgtcttgtggcgctagaggggtacctcagagaccggcacaacatgaccttgacggttagacagtagggtcaaacaaccctgctgcaggcccaaagggccaacagctgtgccacgagaggggaaccttgaagactggggcagtctgaccatgctggttagtcagttgggtgaaataatcccagctgcaggcccaaaagggctgacagtcaggtgagggggtatctccatctgctccccactgccaactacggaggcatgaagtccgtagtgacttctgacccccacgtcttgtgccatgagaagggaaccttgaagattgggacaaaccgcacttgaaagttactcagccgggtgaaaataagtcccagttgcgggcccctcggggctgacagtcaggtgaggagggctgcaaagcccatctcctgactccagaggcctggcgtcctaaccgacttcttgccaccaatgtcttgcgccaggagagggcaaccttgaagatcggggcaagccgcacttgatagttagccagtcgagtgaaacaatctcagctgcgggtccgaaaggactgacttccaggcgaggggggggcctgcggaaaaccccctccatggtacggaggtctggcatcctaaccgacaccttgccaccaatgtcttgtgccaggagaggggaaccttgaagactggggcaagccgcagttgatggttagtcagtcgggtgaaataatcccggctgcaccctgctgtgactgctaagcccggtccccaaggggcatgaggcatgtgcgctgagacgggaggggtgacatctggcgatcagcacagcacagactgaagggaggcacttgccgagaatgcttctgaggccccagacttggggtggtgcagctttgtctcgtgtatagtacagcaccctactgctccctttgggcagcagaatttgtcctgacctcttacccacccgagtctgcgcttttgttccacctcgctgtctccctgctgtgctgtttttctctcaagtgggttaaatctcaacatgattatctcccacgtttccgctcaagggcaatgcccaacatgacggagatcgttggtgcatggtagtcacgagaccatccggaccctccagtggtcgctatagtcattttgtgttgcatggggcatgctgagtcacttaaccgaaagactgtaaataactcaaaagaggtaccctccggggttcggtaaa

SEQ ID NO: 1336 - DNA, 437 bp, Ixodes scapularis
  source 1..437: mol_type = unassigned DNA
tagtgtgacggagtcctcaagcccccacaagtgcctgccaggtggcaggaaagggcaactactggtgagcgacccaagcaaggcggagccaagaccaagctggagccaagagcaactccaggaggcaggggtggatatcaagagcaaccccaagggacacagaccacgggcaactactggtgagcgcccaagacaggggtggatattaagaacagccccacaaagtgttacctatattaacaataaagttgaagcctcaaccacgcattgcgggttagatggcgtggcttggcccgccgccatgatgagctggaaccctccacctggtgggccgcacgagaccaccggctctttctactaaggccggtctccgtgactgcggttgggataaactccaagcactgagcggtaaaaaaaaaaaaaaaaaaaaaaaaaaa

SEQ ID NO: 1337 - DNA, 970 bp, Mnemiopsis leidyi
  source 1..970: mol_type = unassigned DNA
tagtgacgagaaaagtcgctttatccttacataacagtgtgatagtcatccttatcacaactgtcctggcgaacaaaatggcagagggatagtactcggtccaaccagaaggaagcccacacgatgccaaacttgctgtaacccacgtgagcggaaaacatcctccgagtatagtatgatggaaggatacaggatgtggaccgctctaggcggcggacggtgtagacggcgaccttaccatagctgcgactgctgtgcgatccggaacgggcctttctcacttacctcaagcaccgtgtcggatcgcggggtgggcgcgggattcctgctgggaagttgtctgcacccaagtcgtcagctaactgtcggtacttatacgcacccagagccatgctcttaccaggccacttgacggcgctacaccggtctgtaggagggtatctcagcgacttggacaaaatggatcttgactgcctgagggcgcttatcgagtgacccagagtaagctggtaggaagaatcttgcagttgagagggctagtagggccagcctctgctcgtcaactgtcctaggcgttaacgtgtgcctccctatgaggtaaccgtgaagtattacttgtttccctgtagagaccatataactagctgagaaacgccctgcgggttaatatacagttaccgccgtcctgcatccccgagttgtgaccagcgtacagccatgtaccacggcacttccagcattctctggtctaagaatgtatcagctggcccgccgaaagatagagcgaccccgcctctatcactagagtaagcaggcacgcgaaatatatgcaggacgccttggctcagtagctctggtactgagtatagcatggctgaacgcccctttaagttcggtggcccagagactctccgagacttcccagtcctggagagggtacacctttaccagaactttctgtggtcggttg

SEQ ID NO: 1338 - DNA, 153 bp, Petromyzon marinus
  source 1..153: mol_type = unassigned DNA
taatttaaggtaaaatcgtgggattgttttgatggcaatctgcctagtcgcggccttccattttgggtaggcagcagacccatctatataacaaactactttgcctttcataggggtacccgaccctaccaactttcggggaagtaaaagaaa

SEQ ID NO: 1339 - DNA, 1231 bp, Schmidtea mediterranea
  source 1..1231: mol_type = unassigned DNA
  misc_difference 260: note = a, c, t, g, unknown or other
  misc_difference 446: note = a, c, t, g, unknown or other
ggccacgcgcgtcgtccttgtttgatcactagtggatcaaccttcgactccccggaactgtgggagtggcggaagaaaggccagaggatgtcctgaaaccatatatttatttatagaagttttacttcatcctatttacgtatttcagtatgaaaatgagtaaagttctcgactcgatgagttgggggcaaccattgggggtcctgaagagaggctctcactgtaaaaaatctcttcgtgtctgtttattcctaggcacntgctgcattatgaagcggwgaaagtaaagttagagctgagagataggtacttgctgcattatgaagcggagaaaggcctcgaataaatagggtgttagagttattgatggagagtatactagtaagcttaagctgcgcctcgcgcggtgcccaaaaatatacttaatgagagcaataactcaaggngagtttaattcatatgcgcatgcggcaccaaggtgctgaatggcatcgattaaacctctcctgttgtagaagcaggtcataaatggaggrgggcaaccactgaaacttatgagccagaagaagcttaactacawaagttttaggcaattactgaacggagttaactgttagttaacactaccatgtagttgtttataaagcaaatatcaggtttcagtctatatactaaaagtattttttgataccgtggtatataggcaactagttaggaaatagtaagggatgacgcattgtctctctttatggtactgaggaaacttatcgactcgcgagggatgaaacccgtaaaccgatcgatytagcctataagtaccagcgacagttaaaccatcttacgcgaggggtaaaacctgaggaccgattatggtataacttctcaagattagcacaaaatgcgagtgcaacttgaggaggaggatttgagtgttaattcataatgtactaatctaattaaactgtgacgggaattgcagcttcggctgtaattactttgaggcctatcacggattgtaaggaacatattgacaccgtaagtctaacgtgttcccgatttccaaccaggtcatatgaagggctgcccttgataaggcggatttgacccaattcttcatatgagaggcttattccagccttcccgtagtaccgtgaggttttcccgcctcgaacggaacaatgttgcagggtaattaagtacatcgggctatatmgcgatatttaacgtttta

SEQ ID NO: 1340 - DNA, 813 bp, Strongylocentrotus purpuratus
  source 1..813: mol_type = unassigned DNA
taaaccttgcctccccgggcccccctcagtgactaagacaactttcaccgtaataatcatatatttgtataccatgtattaatctaggtaacaattgaaagtaacattgaaccgtattcatactttaatgagtacaatagtgaagggaactgtatattacatacctcgagatagaggtttttgtaccttaagggttcgtgagaatccatactgcataaaggggttaacttgtaactcaaccccagggagacaagccgacaaattcggcattactatgtgagggtcataagtgttaaaggacccattgtatataacttgtaaatgtacagagaattcgagttgagttcgaagaataaacaaacaaaaaagaaaacaaagagaattcgttcgtccatagaagcggaaaaagcgcaaaaaggcgtcctaacctcacggtctaacccagaaacatttaaggggggaaggagctcattactccaatccaaaaccacgttccctagcccaaaagcgcgcttcaatgagggagccgatattggaggacagagttcatcaaaagccacctgtaagtaggcccatttctgccaaggacatgcgcaaaaggaagcagattatcaaaccagtcaaacaagcacaaacattggggggatgggataaccccggaaagagagggatctttagatagtggatggaaggggtgggacgttgaatccaaccatgccgtttttatgttcccgataaagaaggataaggtcactccagcctgacacacaaagtggggtaaaagaactccgctcgtacggactccaaatagaa

SEQ ID NO: 1341 - DNA, 2663 bp, Salmo salar
  source 1..2663: mol_type = unassigned DNA
tagatccgtttgttatgattggagggagcctgccgagtggtatgagcgctccaactattgaacccatatgattcccgaggcctggccagacgcctagatgcctgccacaattgaacgcagccctagcttgctaggagatccataggaactggcctatggggcgtcatgacggttgaagttcctccatagcgtgcttgggaggggacgacaatgacgagtcatgacgtaccgagagaaccccaacccaggttgggggagagagccagcaagagcggagatgcttggtataccaagctagcagagagagggttgaagaggatgactactgggctcagagtcatctcaccctaaaaggcggtggggcatcggttgaacacctacccataccgggatgggaggtggtaggccgaaaaagaacaggaagatggtggagtaagttgagagcggttgctcgggaagttatgttgtgataactccattaaggccggtgggcatggtgcggataatggaaactataaaaacaataaaaagaaagaccaaaaaaatgttctgttatgatgccttacacatgtctgggagaccccataagggtctccccttatacttcactgggaaaccccataagggtatccccctatatttactgggagaccccataagggtctccccctatagatgtagagcgtaaggggtctccaaagtaccggccgatatggccttatggcaaactctggtggtagggacaaggaggtaagggcagtgccaacccctacttgatcgggaccatccagggaatgccatcctcccgcgaaggtgatgtggtgaggtaaggggggagcccgtcttcgagtttccccaacccctacccacaggtgagaggaggagaagaggaatctgtccccaacgggaggagggtgaggtgtaagggggagaccttctagtagggtcttctcagtcgcctgacgtcctgactgtggggtggatcagtaccctacaggtgagaccggtgaggtaagggtgtggccctcttgagggctgcgccaacccctactcgaggtaacctgagggagtggtggaatggcggcatgttagtgctgggacttgattgcgagggtttaatgagagtggcctgctgagagcaacacttgtggtgcttaaagcggggcggcccatgaccaccgtgagataggacactgcacagtgcagccatgaggttcctggaggatgatgcgatgaggtgggggcctcatcagcccctcctggcagggcgtcggccagggaaactaaatgtctctagcatgtcagtgcagtgaggtaaggggagagcactctagtagggctcttccaacccctacctgtaggtcacctggtccaggtgtcgatgatgtgaaaacaagagctactttggtaccggtctgttgcaaaaagggttctgcagaggacgacggctatccctatcgggagggaatagtcggtcccaggtagtggaaaatggggctttccactgagcatgaaaatgtggtagaggttgcgtccaacccaatgatttgcagcagagctcttggacacgaagtctgtatagtcccatgcaggcagccaaccagagaatggtggcaagaccccagctccgtatgggaggggagggccaagatatacggaacggctgctaaagcgttctgccggtgtcagtctaatcacagacagctgtgacgaaacaaagtatgggttccgacatgcttggtcagctcttagccgcaaggcttaaatcgaacgcagcccgccgagagtgaacattaaacggggatggaatgtgtctagcggttacgtactaccagggctcaggttcgcctgagccgaggctctacacgtcatggtgggagttctccccacgctcgtgagggcatgtagtgggatggcatgtggcggaccatcagctggcactaccaggcctcgggcttgcccgagtgcgggacctcacacattgtaggtgtgcttgtcccccctacgttcgaagacttgaggcggagaatactcataggccccacggcaaagggacacaacacggaggcttgtgtccgacgagccgtggactcctatagacagcccgggatatcactgggcacgctcatactgaagaaattcgatgaaccgggcctaccggagcaaatgcactctaatcgcctttgtgggcgactgtggccccctcatgcgagtgaggaatatcataaactgcaatggttcaaaaagtgattcctatggctcgtcggggagggctgactggggcaagcaaatgattgaaaggggaagaacctttttcaactgtttcttgccaagcccggttgatggtggcgctagtaattgcgacgggaaaatgcggtttaagtctccgaagtagtgcgtagcaccggatgtcgaccgggtgtaaaagcccttcgtaaagtccctggggaggtcagtcctggggctactgatgcgcagtatgtaattcgcagaatagggccatcgataccgcctgcgtgactcgactgggtttccacttgaggatatccgaccgtagcgtgcaccctcttgtagttgcgccggaaacggctgtgttccctcacgtatgtgaggaaactcaacaatgtgagtgggtaaacggcgggacgaactatggctctcgt

SEQ ID NO: 1342 - DNA, 155 bp, Tribolium castaneum
  source 1..155: mol_type = unassigned DNA
tgaaaagagtggcagttgtggagacttccttcggacgtcgggtcggattttcggacgccagggtacctccaccgctgggttcacaaactaggcgaacatctgccgataccctctttaggtcataggaccacatgtctctgcacgagattaaccca

SEQ ID NO: 1343 - DNA, 398 bp, Tinamus guttatus
  source 1..398: mol_type = unassigned DNA
  misc_difference 100: note = a, c, t, g, unknown or other
tagggggcttggcatttctcattgcctgctcctgaaaggatatgggtcctgcgtcgcgtggtaggcagacccattcgtccgagtagggggcttggcagtntccattgcctgtgcccgaaaggacgtgggtcatctggtctgtctgcctacacctctctagacttgtaacatctagtctgtcaacaagatcaaaattcttcacacagacgaccgagcttgctcagtcttcctgtacccgcagaattttgctcttgctctcctttggctgtgtcctggacgtgggactattccatctcgtcccaaatgccgcgtccaattataccggatttgacaaagcggacggcccgctttataagccggaaaaggtgccttgtaaaattgcaaggttcattaaatag

SEQ ID NO: 1344 - DNA, 304 bp, Trichinella spiralis
  source 1..304: mol_type = unassigned DNA
tgaggtttttgttttcttttttccttttaccattcttgttccattgttgttatttgctttaatcctgtattttaccgccggcaattccattgttattattactgttactgttattattgttactattgtttttacttttacttactactgttattatactttaattcgttaacttacgttattgttaccactacttactttgctctctcgcaaacgttcgttgttgtttcttttggaccaggtttagagaaatcgcacgcacagcggaactggaccgcttaagccagaaatagtaaagtaacaa

SEQ ID NO: 1345 - DNA, 155 bp, Tetranychus urticae
  source 1..155: mol_type = unassigned DNA
tgatgtatcccttcaatatattgtaatcctcattcgtccctatcctttcatttgataaaagaaactttgttgctccttttaatagttggtccctcctgtcccttttctggaacctggttgtatcgattattgaaagttgcaataaacggatttaa

SEQ ID NO: 1346 - DNA, 235 bp, Drosophila willistoni
  source 1..235: mol_type = unassigned DNA
  misc_difference 217: note = a, c, t, g, unknown or other
tagatgtactaacctctagtttctctatacttttgcctgctaccttggcattacatctaaaaaggtacaaacatcgcattggcaaaaagaggtggttttagtacataggcgctgtgggacttcattgtcccgatgatgcagcgaatcgtgcatacgagattgtccagtagttggttgctcgtatctttagaagatttccttcctcggcgatcaaaanaaaaaaaaaaaaaaaaaa

SEQ ID NO: 1347 - DNA, 162 bp, Petromyzon marinus
  source 1..162: mol_type = unassigned DNA
tgagaataatgaggtgctaacctccctgggcctgaccaaacccagaacacatcactggccaagatgatttcccgcagcacgttgcttttctctctcgatacccgagaatgttctgcggaactacgcagtctatgaacagtcacagacaacctctgatccaag

SEQ ID NO: 1348 - DNA, 257 bp, Schmidtea mediterranea
  source 1..257: mol_type = unassigned DNA
tagaagggaaacaaaggaaaaacgaaatgactggaaactatgaaggatatagctgaaagccgcaaggaaggctaagtcctgaaaccgatctacatcttcgatcccaagaggaactgtgggttaagcttgagccgacggaaaaagcgaatgcatgttagacgacgaggtacagtcacctcctcgtggtatttggcgggcaatgctcactaaattaactgtgagtagctgagaactgtatgtgtatcatgaaaaaaaaa

SEQ ID NO: 1349 - DNA, 233 bp, Tribolium castaneum
  source 1..233: mol_type = unassigned DNA
tgatgctcctttggttttaccatctgtgggggcatcggtcctcacggtttcctcgggtttcctattgtttttcctaaacccgacaaggagccctttggccctcctccttaaacacctctccttcatcctsttagtccattccggctaaaatgatgaagaccgaggagtgtcactctcttggcggggttaacccgtccaagtgtaaatgtgacctcgccattcgggctctgata

SEQ ID NO: 1350 - DNA, 214 bp, Megachile rotundata
  source 1..214: mol_type = unassigned DNA
taaatgtcgaaccgaattttgggtaacgtgcaccccaccatccttaatcggcagcacgcaataaagccgtgggcagtggttttagtgggtagtcattaggagtcccacagtacccagcgaacatcttagtgggtctgcgtaaacgcatttccactgcctatcctccgggaaaaaaaaaaaaaaaaaaaaaaaaaaaaaaaaaaaaaaaaaaaaa

SEQ ID NO: 1351 - DNA, 508 bp, Apis mellifera
  source 1..508: mol_type = unassigned DNA
tgatcgttaaaagtaaaaatctatttatttatttttattcctatattataacacattatttatttatttacttattgttttaaagatgacgaagccgcaaggccaatccaaatttaacaaaagaacgagactactggtcgacattaaaaagacgaagcagctgccagctgataaacaacagagcccgtctcggcctttacaccgagcggtgcaagtcctgacgtactattgtacgtctagggcgcggggcagattctaccgtgtagaatctggggcgacgcctccgcgaggcactccctggacaacgtacgctaaagcgtacggctaagtgcgcctcccgaaagggtccccgttcctaatttttccgagcccgcgggcagatctcgtggcagtgacgctagaaagttaagtccgcggacatataaaattacagccttaaataatgaaccccacgaaggaggtatcctcgaaattccgccacgatccttctgatcgtaggcgcaaaaca

SEQ ID NO: 1352 - DNA, 696 bp, unidentified
  source 1..696: mol_type = unassigned DNA; note = Description of Unknown:Nasonia vitripennis sequence
tgacctgaacaaaacgtgttgtcttgtcttgtctaaaactatttattcgaaataaggggaggctaactgcctgcaagttgaacgcgaaagttagaccttcccacctaaagcccaaaagtgatcggggaatgaatccgcgggtgaccccagagttgggtaaacccttgaaacgttggagaagcggaagagagtcccgccaccgagcatcgagtgctgcggcgcccgaatgaaaccgatcgcggatggtgcaagtcgtaggacggggcacgacctaagcctctgtcacggcggcgaagccaggaatcaccatgcaaaggtgtgaactggggcggatacctccacggggtttccctgggcatcgcgcgagcgatggccaaagtccgctttctcagctacaaaacaaaaatggtatgagacttcgttaacactaatttttccgagcctagcaggctcccttgacaacgcttatgaatctggaaaaggacacaaagtggaaaaagcgctgatggtggacaaaagtcagttgagacttgatatcagttgttttgactaagaattttattatcgttgacttttaaatattttattattgactgttaatatactgacttgggaccaagtcatctctgttacccggtaccggttcctgtcatcaaaccggaaagtccgtcccacgtaatgtggtagacgcaggag

SEQ ID NO: 1353 - DNA, 122 bp, Ciona intestinalis
  source 1..122: mol_type = unassigned DNA
tgacagtaatatgaaaacatcacatctgaccggcacagaatcaccatgccgtaatgcacccaactaaggattccaatgggtaaaaaaaaaaaaaaaaaaaaaaaaaaaaaaaaaaaaaaaaa

SEQ ID NO: 1354 - DNA, 112 bp, Nasonia giraulti
  source 1..112: mol_type = unassigned DNA
tagcggactggactgtctggaggagtgtttaactcgggttctcatgggaacccgacaacgttgttatcttgtatgacaattcataaaaaaaaaaaaaaaaaaaaaaaaaaaa

SEQ ID NO: 1355 - DNA, 345 bp, Lepidurus arcticus
  source 1..345: mol_type = unassigned DNA
tgataatcgctccatcctgcaactaattatgaatgcaaatctgttaagtgacattagtgatacttacctgatacttaccctggtatttatttgacctatacttaccctggtatctacctgacatatatttatctaaccacctacctatgatgactcccgcggaaactctcacttaccttattacccacttggtcttttattttctcgttccttattactttgttcctttggtgtagggttctctggtttttggaacggcttccttagccggaattttgtctgatgtatcttgcttgtgtccttgaaatatacgacccaggcttgcgtcatttaggctctgggaaa

SEQ ID NO: 1356 - DNA, 380 bp, Lepidurus couesii
  source 1..380: mol_type = unassigned DNA
tagtgcttgagtgatgcctatcctttctttgattaactcttaccatatacttaccagttcttacccgtacttaccctgtatacttacctgtgtgcgtacctgtgtacttgtcctttagccgccttgtgtttttaccattggtacttaccttgtgtggttgcccgatacttaccttgtatttgccttgtaattctgcatgatatttattgtgtaggttcctgatgcttacctgatttgtccccctcatcatctttagtttcgttctatttcactccattatggagttccgtttgttttttggtggaggtacagcaccctttaagctggaattgagtgagtttatgtactttggatggttgtaataaactacccggaggcat

SEQ ID NO: 1357 - DNA, 345 bp, Lepidurus couesii; identical to SEQ ID NO: 1355
  source 1..345: mol_type = unassigned DNA

SEQ ID NO: 1358 - DNA, 324 bp, Nematostella vectensis
  source 1..324: mol_type = unassigned DNA
tgatggtgggttactcgcctctgtgtaacaggcaaatgaaagctgcgcaagcagtcgatgagccaaagccgcacagcccccgactggggtacagggcagccctgggctatgcccgaagtcttttgacaggtccaaacttcacccttgccgccagtagggcaccagggccaggtgcaggtgggcgctttgttctatttggtttcgcttaatttttgttaaatttttcccgtgcgcccaccctttttaacccttttaacaccaattttttttacaaccctctactcaataatccaaatgaataaaagcggcataacaggtgaacac

SEQ ID NO: 1359 - DNA, 533 bp, Schistosoma mansoni
  source 1..533: mol_type = unassigned DNA
tagcccccttcactcttagacattcccccactgttgttgcttatcttcatgtttttgtgttaattgactgctctcttctgggttgatgtctgattgtctctctctctttccatattgcttgctctccccgcttacttccaatagttgtcatattatgtctttgtttacttgccatgtctaacgacaattactttatctaccttagttggtcctcttggtttggttgccttcatgtgttcatggcggaatctgatgtttataatgactattcctactaccaccattacaactattattattatcactattattaacattattattacttctacaattagtattatggctactcctttcagcacaccaataaaatctcaatcaaacatctcacttattaaactctctatttccccttcgttataaacttacaattcagtttaaccgaatatctctcttttacaaatcttaagtatgtaattttgtgccaagcccatttgggtctgtacaatttgatacttaaaaataaatgttat

SEQ ID NO: 1360 - DNA, 314 bp, Triops cancriformis
  source 1..314: mol_type = unassigned DNA
tagatgactgccctacccctttgctgccgaagaactactgaagactattgaactaaccaactgtgttaagtaagaactaatgcctctttttccctgcatgtatcccctgatcagtgacttattttcttttcctgttgcgccctttgtttagttatttcctttaattactagaattatcttttcgttctccgtctaattgctttttcggtgtaggaacggctacctaaagctggaagtgggaagtgttttcaatgtactttgtgattatagaaatatatgacccgaggtgcattgtttggcatttcctcgagaaa

SEQ ID NO: 1361 - DNA, 256 bp, Drosophila ananassae
  source 1..256: mol_type = unassigned DNA
tagccaatgcacgggttccagattaagcttgctgccgaagcataccatcaaaatcggcataaaattcgcttaataaaggaggtggttttagtacgtaggcgtcccgggacttgtctcgggatgaatcgtgcatgcgtataattgggatcgataacaaataccaactaagttattactaatatatcgaaatacataaatatcccgtccttacgtatctttgaagatttccatcctcagcgaacaaaaaaaaaaaaaa

SEQ ID NO: 1362 - DNA, 256 bp, Drosophila melanogaster
  source 1..256: mol_type = unassigned DNA
tagctaaatcgtttggttcaaaacatttgcttgctgtcttggcataacatcaataaaggcataaacatcgcaaaataatggttataattaaatggctatgaggatggttttagtacgtaggcgttgcggaacttcggttcatatagagcaatgaatcgtgcatgctaggaaaactgaccacacacagtgttggcagacctagtatctttcgaagatttccatacctccgcgatcaaaaaaaaaaaaaaaaaaaaaa

SEQ ID NO: 1363 - DNA, 203 bp, Drosophila persimilis
  source 1..203: mol_type = unassigned DNA
tagcctatacactatgttggagagaagacgcttgctacctaggcaaaatgtgaaattaggtataaacatcgtggttgtaaaacttgaggtgggtttttagtacgtatgcgtgattacttcgtaatcatgaatcgtgcatgctagtggggtttggcctccactagtatctttgaagattttccttcctcagcgatcaaaaaaaa

SEQ ID NO: 1364 - DNA, 219 bp, Drosophila pseudoobscura
  source 1..219: mol_type = unassigned DNA
tagcctatacactatgttggagagaagacgcttgctacctaggcataatgtgaaattaggtataaacatcgtggttgtaaaacttgaggtgggtttttagtacgtatgcgtgattacttcgtaatcatgaatcgtgcatgctagtggggtttggcctccactagtatctttgaagattttccttcctcagcgatcaaaaaaaaaaaaaaaaaaaaaaaa

SEQ ID NO: 1365 - DNA, 247 bp, Drosophila sechellia
  source 1..247: mol_type = unassigned DNA
tagctaaaacgtttggttcaaaacatttgcttgctgtcttggcataacatcaataaaggcataaacatcgcaaataatggtaatatataaattggctatgaggatggttttagtacgtaggcgttgcggaacttcggttcagatagagcaatgaatcgtgcatgctaggaaactgaagtgttgacagacctagtatctttcgatagatttccatacctccgcgatcaaaaaaaaaaaaaaaaaaaaa

SEQ ID NO: 1366 - DNA, 258 bp, Drosophila simulans
  source 1..258: mol_type = unassigned DNA
tagctaaaacgtttggttcaaaacatttgcttgctgtcttggcataacatcaataaaggcataaacatcgcaaaataatggttatatataaatggctatgaggatggttttagtacgtaggcgttgcggaacttcggttcagatagagcaatgaatcgtgcatgctaggaaaactgaccacacgcagtgttggcagccctagtatctttcgatagatttccatacctccgcgatcaaaaaaaaaaaaaaaaaaaaaaa

SEQ ID NO: 1367 - DNA, 242 bp, Drosophila sp.
  source 1..242: mol_type = unassigned DNA
tagcttaaaacgtttggttcacatacatctgcctgctgccttggcacaatatcaaaaaggcataaacatcgcacatattggttatttacggctatgaggatggttttagtacgtaggcgttgcggaacttcggttcggatagagcaatgaatcgtgcatgctaggaactgaccaaataacagcagccctagtatctttcgaagatttccatacctttgcgatcaaaaaaaaaaaaaaaaaaa

SEQ ID NO: 1368 - DNA, 221 bp, Kalotermes flavicollis
  source 1..221: mol_type = unassigned DNA
taatgtcccttttggcttgcccccacctgcttaaaggaactggcaggaaagagagtgatccgtgccatagaaatatggttatccggggcaagtcactagcaatatgggacttctccgggtccgtgcggtccttccaacatgagctggacgtagtccactctatgacttgaacgatacgggggcgtatctcccccggaagaggtcgcctaggcgacttagaa

SEQ ID NO: 1369 - DNA, 289 bp, Reticulitermes lucifugus
  source 1..289: mol_type = unassigned DNA
tgagttagatatatatgacgactgattcttccctaactaaaatataatttggaatgtgcattacttatactttattgtatttattgacatccgtagtagtctgtttagtggatttagatcgttaaccattctgtgacgtcgctgatgtctatatgtaccagtggcagaatgctgactaagaacaaaataattttaaacaatagacagcactaagaaattctgcaaactggaacgtggcccacggtaggccaatataccggaaagggaaaatgacacatccccccttaaa

SEQ ID NO: 1370 - DNA, 289 bp, Reticulitermes urbis
  source 1..289: mol_type = unassigned DNA
tgagttagatatatataacgactgattcttccctaactaaaatataatttggaatgtgcattacttatactttattgtatttattgacatccgtagtagtctgtttagtggatttagatcgttaaccattctgtgacgtcgctgatgtctacatgtaccagtggcagaatgctgactaagaacaaaataattttaaacaatagacagcactaagaaattctgcaaactggaacgtggcccacggtaggccaatataccggaaagggaaaatgacaaatccccccttaaa

SEQ ID NO: 1371 - DNA, 312 bp, Rhynchosciara americana
  source 1..312: mol_type = unassigned DNA
tagaaatgtgtgcgataaggtgtgaatagaagggttcaccaagagggagacctagtttggacctcagaaatggggtcataggagtgataggttgtaaagccgttggggaatccggctacacatggtatctcaggagccattcatgcgctgatctcattaaggcgtaataaactgtgaaacagatcctgataatgccgtgctaccaaatgatgtaacgaggcggaaataaaattaatctggggcgttctgcggaatgactactaaatatagcgatgctatatatacaaacgactgatggtaacaccggcctta

SEQ ID NO: 1372 - DNA, 1206 bp, Ciona sp.
  source 1..1206: mol_type = unassigned DNA
  misc_difference 1079: note = a, c, t, g, unknown or other
  misc_difference 1181: note = a, c, t, g, unknown or other
taagatccgcggctgtggcgccgaacgagcacctgcccattcttcttgtagggactttttcaccctcactccccccaatagttttttttcgttttttcgttttttcacccccaccccactcgcctctgggctgcacatcccacacgtagggacctgtttatattatttgccttttatatgtaccactttttaaatatatttttgtaccccacaagatgcttttcgccaaaaaaaaaaaatttttgtatcacatttttatattttgtaaaacacagatttttataaactttgcactatttttatataaacttcgcacttatttaaaatgaatcgcatcttttttatatacaccaacacaaacaggatgtgcagctcaggggaaccaatcctgcgtccctcctagcggcgggaggggcgcccacctacccccacgctcctcttgagcaccaacagggactcccttccggagcccctgcaccctcaacttttcttatttttaaaaaaaaaaaatcatatatattgatcttgacgacgggggctacattcagcccccaaaaacccacccaccatccccaacgagtgccggggcattgaagagctccggcacaattagcacttagcttatttattattttttgtcaacatttttgttttttcaaattttttcacccctcacccccaccctaataggtccctcgggcttgggcccctttttcgtgctcgagaagcgtcacatcgccccactgaccacgaccttccccgacattggagtccttggcgtctcccaggtcgaaacagtcccaagtgatagcacctaatgctcgacttgtttcggcctgggccgccgaggattcccagaacgaccattcttctaaataatatttatatttcagaataaaactatatatatatcgttggcgggacttgtcccgcctcgataccgagtgctgcagagcggcaaaataaagaagaaaccgacgtcgctctgcagccaaggaccacccaaactcaagccagcaccgtcgacaaccaacatcctcaagtcggcggttgctggaacaactcataacatcttcaanataaattatcaccctgtgcagcaggaggccgtgcttttaaaactactctgtagtggctcatgataatatttcgctccttttttgccccgtgtaaacttagtngatgcgaataaaatcagttgaatca

SEQ ID NO: 1373 - DNA, 128 bp, Bombyx mori
  source 1..128: mol_type = unassigned DNA
taaaaactagcataattattaactcataactaatgtatattacttggccaaaagcccgtatatacagttccaccggctctgtcgacagactgaactgagaaaggggaaacatatggaaataataataa

SEQ ID NO: 1374 - DNA, 204 bp, Anopheles gambiae
  source 1..204: mol_type = unassigned DNA
taacatccggtgcaaactcattaacattaagaaaagagagaggagaaatgagaatgagattcattcacctttggcatttgaatagcccggggtaggtgaaaagttcccagcatattgctgagaagtgacaaaattcggataataataataataataataataataataataataataataataataataatatgcataataata

SEQ ID NO: 1375 - DNA, 474 bp, Bursaphelenchus xylophilus
  source 1..474: mol_type = unassigned DNA
taagaaaagcatgaaataataagaaatcagataagaataacaagaatactaataagtatatcatgtaactatgacaaaaagaacgcaccaataagaacatgcttgagtggccagctctgcaggcaaaagtcgaatttggaacagccggtaatggaagacctgcaacaaacgtggggtagcaggcaatatgtaactatgacagaccaaaactccgaaactctggtaatgagcccgtgccccccaagcatgtggtctcgttcgatgtagttaggaacagttctctttaacccgtgatgattacgccctgtcttaaatggcaggtgccaccaaataccgaacactcgttgaggtatggtggtccgaatgtgaagctgggagtacaatttggtacgagagcaccagcgcccccgatctaagtgatgacgcatgcgtcggaacaatgaagacggctggcaaacattcaggagtcgcaaa

SEQ ID NO: 1376 - DNA, 31 bp, Heterodera glycines
  source 1..31: mol_type = unassigned DNA
  misc_difference 11: note = a, c, t, g, unknown or other
tgaggactcanaattgacaatacacctcaga

SEQ ID NO: 1377 - DNA, 106 bp, Parhyale hawaiensis
  source 1..106: mol_type = unassigned DNA
tgagccttaggtcgcgggatgtgacccggcgccagagtgtagagctgaacatcgctcaaccgatccaatttgggtcgtgaaatcccctcgataataataataataa

SEQ ID NO: 1378 - DNA, 651 bp, Bursaphelenchus xylophilus
  source 1..651: mol_type = unassigned DNA
taacaagtgtaataaaaaccacccatgcgtagtaaaccgatcaattatctagcaaaatcgcaggtcagaagaccaaagaaccgacccagaggaataggaccagagctgaaactctcagatacgccaacggtcctaataaaacgtcgttaagtaaagcatcgttaagtacaaaacaaaagcactgtaaacgcgaggccccctctttgccaaactccggtaatcctcgtagtacggtgctttttcccgcttcacgaatcagaacgctgccagatcttgtccgacatgggccgtagggtttgggagtaccagcgtggggcggagagcgtacctgggtacactgcataatcgggtctcagaaaaccacctatggtttattattctgtctcccatctgcagggtagcttttcgttgggccataggagcctaggggcaagagtgcatgtagtcttcaacggccatgccagggaaacttgtgagaggtgagggataactagcatcagataatatcagtcatgaaattagtaacaaccaacgttcaccgtcgttggcaaaacaccgactaacgatgctagttagaaagagtcgggtcttcccaaagttaggtgcttgcaccgaagccgatccgctctacccacagctctgcccagcgtt

SEQ ID NO: 1379 - DNA, 406 bp, Heterodera glycines
  source 1..406: mol_type = unassigned DNA
tagtcgtagcccagatgtcgacagcccctacaccggtagatggaaggaggtatgtatctaagcccacggcaagccaccagtggaaacggtgaccacctctgttcgcggaaatgccccgtagagtatatgaaggtcggagcattgaagcacaagtgagaaccctggaagtatggtggtgagctggtaacctcgaattcctcctatgggtgcttgcgcccgtaggtcatttgtgtatgtagggatggaaggaatctcgatagcgcaaatcgggataccgcactggcgatcatgctgccagtgggccctgctgagttgggcgggttagcaacccgtccagggacgcagatgccaaaagcctggtgacactctaaagggagtctacggcgacgagaacatcccctaagtc

SEQ ID NO: 1380 - DNA, 99 bp, Strongyloides ratti
  source 1..99: mol_type = unassigned DNA
taattagatttatatgtgccactttacctcaaagatatattaatactaacttaattataatttattatgaattataatataataagttttaaaataaaa

SEQ ID NO: 1381 - DNA, 587 bp, Bursaphelenchus xylophilus
  source 1..587: mol_type = unassigned DNA
tgagaccacccatgcgcagagtatccgaatcagtgaaagtccaagtttcaggacagaaacgtcagataagtccaagagaaacgagaaaacaagttcaagtatgcaagagttaatcaataagagagtaccgtaaatgtatgacccccccctttgccaagtcgacaactgtcatgcaggtgtctctcttttcacccgccatatggaccaaacgctatccagcctcgctcagaagagccttagggctggggagtaccacatgtggcggaaactgaatctggatgcgatgcataccgggagcgcagcgaaatcacttaacgctggtgcacctcctgctatcgtagtacttcctagatagatgagtagggtgggctaaaggtagtcgtcttcaatggcaataccgaggggtctcgtgacaggtgagggataactagtatcagataatatcagtcatgaaattagcaacaaccaacgtcaccgtcgttggcaaaacaccgactaacgatgctagttagaaagagtcgggtcttcccaaagttaggtgcttgcaccgaagccgatccgctctacccacagctctgcccagcgtt

SEQ ID NO: 1382 - DNA, 364 bp, Bursaphelenchus xylophilus
  source 1..364: mol_type = unassigned DNA
taattaggcagtgctcctagcggagtgccgtgaagtggtgtcagtacccgtcgtgtggaaagcccaggagggttagtaccgacagtgggaaacccgctgcacgcaacctaaagacatttgcccttcgggggagaggtatgagaccacactagtcatggttgcttgcgcaagcatgactcattcattgtaagttcgtattatgaggcctcgcggaatgcgaaagtccaagagcgccaacttgtctctttgggaggttcctccgggttccttagggttggcgtaccatgcttcgtgtgagacctaggccgcttggacctagagttaagctgttgcatgtttgaggatgccttaggcggacgccatg

SEQ ID NO: 1383 - DNA, 177 bp, Ascaris lumbricoides
  source 1..177: mol_type = unassigned DNA
tagtcgctaaggggtccggaaatggtccggtcctgcgctacccggttctggtagcacgttcaagcgctcaatcgcctgccttgtaggcagtccatctgtggaagtcgcgctcttgatacagatgtggacggatggaagcagatgatagagccggtgacggccctactagccaaacgc

SEQ ID NO: 1384 - DNA, 160 bp, Heliconius melpomene
  source 1..160: mol_type = unassigned DNA
taacttattgtcagaattccttactagtaataataattatcgctgaaaatctccacccaaatattgcttggctatatgctcgcaatttttggttaacgtaccccaatgatttgggagaacaaaaatggtaaaactataataataataattatattaatat

SEQ ID NO: 1385 - DNA, 84 bp, Takifugu rubripes
  source 1..84: mol_type = unassigned DNA
tagaggacccgagtctgaaggaaggaggcaccgcccaggagggcgaggaagagatttttttttatatatatatatatatatata

SEQ ID NO: 1386 - protein, 1365 aa, synthetic construct
  source 1..1365: note = Description of Artificial Sequence: Synthetic polypeptide
VGLCPSPGVDGTHQPNDSFQNFGETNFSVQVARLVTRNLAPRSVRGNGFGSGMATHPVPADESGHESDPFLVGRSCGQPARLTRQSVGTQTSRDDILPSKTTKLTENELDLLVNFSLELYRSDLQGFVQEGIHFSVNREVLEGFPEVYEQPAPQPAVGDDLNTSLPPDNNICVLEKGSSEAVEDGTPEVAHPVPETQGKESPNNIVMVTLPNKNPPCPCCRVRLHSVLALIEHLKGSHGKKRACFRCVKCGRENFNYHSTVCHIAKCKGPKVEKAPVGEWICEVCGRDFTTKIGLGQHKRLAHPLVRNQERIDASQPKETSNRGAHKRCWTKEEEEMLIKLEVQFEGHRNINKLIAEHLTTKTSKQISDKRRLLPRKQLTDLSKGVAGQKVLDPGLSHQPQLGVVDNGLGGGHLPGGPAAEGRTIEPLGHHLDKDNGHREIADQHKAGRLQAHYRKKIRKRLSEGMISNFPEVFEQLLDCQEAQPLINQAAQDCFGCLDSASQIRKALRKQNTQKDQGDQPKRPAQKWMKKRAVKRGHFLRFQKLFHLDRGKLAKIILDDVECLSCDIPPSEIYSVFKARWETPGQFAGLGDFEINRKANNKAFRDLITAKEILKNVREMTKGSAPGPDGIALGDIRKMDPEYTRTAELFNLWLTSGEIPDMVRGCRTVLIPKSSKPERLKDINNWRPITIGSILLRLFSRIITARLTKACPLNPRQRSFISAAGCSENLKLLQTIIRTAKNEHRPLGVVFVDIAKAFDTVSHQHIIHVLQRRRVDPHIIGLVKNMYKDISTVITTKKNTYTDKIQIQVGVKQGDPLSPLLFNLAMDPLLCKLEEHGKGFHRGQSKITAMAFADDLVLLSDSWEDMNANIKILETFCDLTGLKTQGQKCHGFYIKPTKDSYTVNNCAAWTINGTPLNMINPGESEKYLGLQFDPWVGIAKTSLPEKLDFWLERIDRAPLKPFQKLDILKTYTIPRLTYVADHSEMKAGALEALDRTIRSAVKDWLHLPSSTCDAILYTSMKDGGLGVTKLVGLIPSVQARRLHRIAQSPEETMKDFLEKAQMEKMYEKLWVQAGGKRKRMPSIWEALPEVVPSIDTATTSEWEAPNPKSKYPRPCNWRRKEFKKWTKLIAQGWGIRCFKGDKISNNWIRHYRYIPHRKLLTAIQLRASVYPTREFLARGREDNCVKSCRHCEAAEESCAHIIGMCPVVRDARIKRHNRICERLMEEAGKRDWTVFQEPHIRDVTKELYKPDLIFVKEGLALVVDVTIRFESTKTTLEEAAAEKVNKYKHLETEVRNLTNAKDVIFMGFPLGARGQWYNKNFELLDTLGLPRSRQDIIAKTLSTDALISSVDIIHMFASRGRRQHA

SEQ ID NO: 1387 - protein, 1343 aa, synthetic construct
  source 1..1343: note = Description of Artificial Sequence: Synthetic polypeptide
NKFLGKSRVAYCLKPGPPVSDRGKEFGSGLTTHPEPESESGHDPTVPNPGPSLGAGEGAQPLPLLRVSVGTQTCEEDFITSRPTKLPGIESELGPLVKFSLEVYRSDLKGDVQFEGIHFPDNWGVLEGFPEVYEQLAPQPNGGDELNHSLPGDREGDVLEKDSSEKEKEAAPEALPSVQRARSEQLPDNIVKVTVPDKNPPCPCCGVRLNSVLALIEHLKGSHGRRRVCFRCAKCGRENFNHHSTVCHYAKCKGPQIERPPVGEWICEVCGRDFTTKIGLGQHKRHMHAMVRNQERIDASQPKETSNRGAHKRCWTKEEEELLMKLEVQFENHKNINKLIAEQLTTKTAKQISDKRRMLLKKGRGTTGNLETEPGMSHQSQAKVKDNGLGGDHLPGGPVVDKGTIGKPGQHLDTDNSHQITAGKKKGGGLQARYRRRIMKRLAAGTINIFPKVFKELINDQEARPLINQTTEDCFGLLDSACQIRTALREKGKSQEERPRKQYQKWMKKRAIKRGDYLRFQRLFHLDRGKLARIILDNTESLSCDISPSEIYSVFKARWETPGHFNGLGDFEIKGKANNKAFRDFITAKEIEKNVREMSKGSAPGPDGIALGDIKKMDPGYSRTAELFNLWLTAGDIPDMVRGCRTVLIPKSTTPERLKDINNWRPITIGSILLRLFSRIITARMTKACPLNPRQRGFISAPGCSENLKLLQSIIRTAKNEHKPLGVIFVDIAKAFDTVSHQHIIHVLQQRRVDPHIVGLVNNMYKDISTYVTTKKNTHTDKIQIRVGVKQGDPLSPLLFNLAMDPLLCKLEESGKGFHRGQSSITAMAFADDLVLLSDSWENMKENIKILETFCNLTGLKTQGQKCHGFYIKPTKDSYTINNCPAWTINGTPLNMINPGESEKYLGLQIDPWTGVAKYDLSTKLKIWLESIDRAPLKPLQKLDILKTYTIPRLTYLADHSEMKAGALEALDQQIRTAVKDWLHLPSCTCDAILYVSTRDGGLGVTKLAGLIPSVQARRLHRIAQSPDETMKDFLEKAQMEKMYEKLWVQAGGKKKGMPSIWEALPMTVPPTNTGNLSEWEAPNPKSKYPKPCDWRRKELKKWTKLESQGRGVKNFRNDTISNDWIQYYRRIPHRKLLTAIQLRANVYPTREFLARGRGDNYVKFCRHCEADLETCGHIIGFCPVTKDARIKRHNRICDRLCEEAAKREWVVFKEPHLRDATTELFKPDVIFVKEDRALVVDVTVRYESAKTTLEAAAMEKVDKYKHLEAEVKELTNAKDVVFMGFPLGARGKFYKGNFNLLETLGLPKTRQLSVAKTLSTYALMSSVDIVHMFASRSRKPNV

SEQ ID NO: 1388 - protein, 1193 aa, synthetic construct
  source 1..1193: note = Description of Artificial Sequence: Synthetic polypeptide
MESTAKGKSYWMARRPVEGATEGSLGRVPFVTRDPKRKPEAKRTLTHGLGLRECSVVLTRLIEGRRGRDHTPSGWNAQRGMPNDESSVEEPNGPIPSNPIPTGTQALPEPMADGEQGEHPGVVVTLPLRDLNCPLCGGSASTAVKVQRHLAFRHGTVPVRFSCESCGKTSPGCHSVLCHIPKCRGPTGEPPEKVVKCEGCSRTFGTRRACSIHEMHVHSEIRNRKRIAQDRQEKGTSTDGEGRAGVERADAGEGPSGEGIPPKRPRRARTPREPSEPPANPPILSPQPDLPPGGLRDLLREVASGWVRAARDGGTVIDSVLAAWLDGNDRLPELVDAATQRTLQGLPAGRLARRPATFVAPNRRRGRWGRRLKLLAKRRAYHDCQIRFRKDPARLAANILDGKSETSCPINEQAIHEHFRNKWANPSPFGGLGRFGTENRANNAHLLGPISKSEVQTSLRNASNASTPGPDGVGKRDISNWDPECETLTQLFNMWWFTGVIPSRLKKSRTVLLPKSSDPGAEMEIGNWRPITIGSMVLRLFTRVINTRLTEACPLHPRQRGFRRSPGCSENLEVLECLLRHSKEKRSQLAVVFVDFAQAFDTVSHEHMLSVLEQMNVDPHMVNLIREIYTNSCTSVELGRKEGPDIPVRVGVKQGDPLSPLLFNLALDPLIQSLERTGKGCEAEGHKVTALAFADDLALVAGSWEGMAHNLALVDEFCLTTGLTVQPKKCHSFMVRPCRGAFTVNDCPPWVLGGKALQLTNIENSIKYLGVKVNPWAGIEKPDLTVALDRWCKRIGKSLLKPSQKVYILNQFAIPRLFYLADHGGAGDVMLQNLDGTIRKAVKKWLHLPPSTCNGLLYARNCNGGLGICKLTRHIPSMQARRMFRLANSSDPLMKAMMRGSRVEQKFKKAWMRAGGEESALPRVFGANQYQEGEEVANDLVPRCPMPSDWRLEEFQHWMGLPIQGVGIAGFFRNRVANGWLRKPAGFKERHYIAALQLRACVYPTLEFQQRGRSKAGAACRRCSSRLESSSHILGKCPAVQGARIRRHNKICDLLKAEAETRGWEVRREWAFRTPAGELRRLDLVLILGDEALVIDVTVRYEFAPDTLQNAGKDKVSYYGPHKEAIARELGVRRVDIHGFPLGARGLWLASNSKVLELMGLSRERVKVFSRLLSRRVLLYSIDIMRTFYATLQ

SEQ ID NO: 1389 - protein, 1454 aa, synthetic construct
  source 1..1454: note = Description of Artificial Sequence: Synthetic polypeptide
MLRGGVGTPPAGGAGAVGPGMASPGGCSVRFSPGGRRLLGHRTGGLSPSVSWRLKRLSVSLRRWSGPGLLGADGAGGGAAVASPRGTQVLGSGAGRRWLGHGSRGSSPSAARGLRRLTVRLKRLSGGLLSPKACRDAEEGSSSSPGFRNPKGLGGRGLTPLGSRRFCRLTVSLNRWRGSLVKLNASSRASGRRTPVKPACDSRAGRGSEHAEGGGVSAAPMVLRSRRKLTFSVDGDSNSGDRARSGSVSAARPGHLLVDGESASSRSGPAGDARLAGPSTRSRRKGCLPPVDFENPKKRTRLMAKMTNGNPTSHVPCPAPCSNGHEGGGRVAVIEGRLPELSGSRISGIQPALPVETSFVGQSTGRGADGDANANSSPPSPNLGGSVGMVPAVRDGTPPLGRPGEDHSRECAGGNTPLWMLEDSFRCDYCPREFGTRAGRSLHMRRAHLAEYDGAGFCWGERLSEFAATRLWSTEETKKLAVFCERGVPSPSECRAIAASLGAGKTHHQVRSKCRLVFEAIRRRELLEVAAATERLEKSARRKQPAVPPAPVHGVRGVLRGLLGKRVPREGGTTGSTSARIVRRDDCRQGAVASASLNLIRRLGRKATGRSGRRRVLGRPPRMDVRRSVRMRRMRRFLYRLARLGWAKLAMFVLDGQMGASCPVPLVEVSAVFRERWSIVRAFLGLGQFGGFGTADNAGFGKLIDPAEVRAHLQSIKNRSSPGPDGITKVALSKWDPEGIKLAHMYSTWLVSAGIPKVFKKCRTTLIPKTGDVSLHGDVGQWRPITIASLVLRLYSRILTERMTVACPSHPRQRGFIASPGCSENLMLLEGCMSLSKAGNGSLAVVFVDFAKAFDTVSHEHLLSVLVQKGLDQHMVELIKDSYENSVTKVHCQEGCSTDIAMKVGVKQGDSMSPLLFNLALDPLIQQLEREGRGFPVNGKSITAMAFADDLAIVSDSWEGMRANLDILVDFCELTGMRTQPSKCHGFLIEKSGSRSYKVNRCEPWLLNDTALHMVGPKESIKYLGVQVNPWTGIFAEDTVAKLRQWVVAISKTPLRPLDKVSLLCQFAVPRVIFVADHCMLSAKALTEMDRSIRQAVKRWLHLARCTTNGLLYSRKSSGGLGIPKLSMIVPAMQARRLLGLSRSKDETVRWMFLETTDHVAFERAWLRAGGSPDEVPELGPDLVEGSPAEGNADPVSTVRPRKRIVPCDWRQVEFDRWAGQLVQGKGIRTFEADKISNCWLYDYPPNKLKPGDFTAAVQLRANVYPTRELAGRGRTDTIDVCCRHCGEAPETCWHILALCPKVKRCRIQRHHKVCQVLVAEAERHGWEVEREKRWMLPSGECVAPDLICWLDELALIVDVTVRYEFDEESLERARIEKECKYRPLIPVIRASRVQTKKVTVYGFPLGARGKWPAKNELLLADLGLSKARTRSFAKLLSRRVLLHSLDVMRTFMR

SEQ ID NO: 1390 - protein, 1114 aa, synthetic construct
  source 1..1114: note = Description of Artificial Sequence: Synthetic polypeptide
MMASTALSLMGRCNPDGCTRGKHVTAAPMDGPRGPSSLAGTFGWGLAIPAGEPCGRVCSPATVGFFPVAKKSNKENRPEASGLPLESERTGDNPTVRGSAGADPVGQDAPGWTCQFCERTFSTNRGLGVHKRRAHPVETNTDAAPMMVKRRWHGEEIDLLARTEARLLAERGQCSGGDLFGALPGFGRTLEAIKGQRRREPYRALVQAHLARFGSQPGPSSGGCSAEPDFRRASGAEEAVEERCAEDAAAYDPSAVGQMSPDAARVLSELLEGAGRRRACRAMRPKTAGRRNDLHDDRTASAHKTSRQKRRAEYARVQELYKKCRSRAAAEVIDGACGGVGHSLEEMETYWRPILERVSDAPGPTPEALHALGRAEWHGGNRDYTQLWKPISVEEIKASRFDWRTSPGPDGIRSGQWRAVPVHLKAEMFNAWMARGEIPEILRQCRTVFVPKVERPGGPGEYRPILIASIPLRHFHSILARRLLACCPPDARQRGFICADGTLENSAVLDAVLGDSRKKLRECHVAVLDFAKAFDTVSHEALVELLRLRGMPEQFCGYIAHLYDTASTTLAVNNEMSSPVKVGRGVRQGDPLSPILFNVVMDLILASLPERVGYRLEMELVSALAYADDLVLLAGSKVGMQESISAVDCVGKQMGLRLNCRKSAVLSMIPDGHRKKHHYLTERTFNIGGKPLRQVSCVERWRYLGVDFEASGCVTLEHSISSALNNISRAPLKPQQRLEILRAHLIPRFQHGFVLGNISDDRLRMLDVQIRKAVGQWLRLPADVPKAYYHAAVQDGGLAIPSVRATIPDLIVRRFGGLDSSPWSVARAAAKSDKIRKKLRWAWKQLRRFSRVDSTTQRPSVRLFWREHLHASVDGRELRESTRTPTSTKWIRERCAQITGRDFVQFVHTHINALPSRIRGSRGRRGGGESSLTCRAGCKVRETTAHILQQCHRTHGGRILRHNKIVSFVAKAMEENKWTVELEPRLRTSVGLRKPDIIASRDGVGVIVDVQVVSGQRSLDELHREKRNKYGNHGELVELVAGRLGLPKAECVRATSCTISWRGVWSLTSYKELRSIIGLREPTLQIVPILALRGSHMNWTRFNQMTSVMGGGVG

SEQ ID NO: 1391 - protein, 1160 aa, synthetic construct
  source 1..1160: note = Description of Artificial Sequence: Synthetic polypeptide
MNLLIVTSSIKESDVPSSGKGGVAVNNITAGASGKDTCVIIHPGTDGIWCCTECVEIHNSGKDLKRHLAKRHPSVTISGYKCNLCPFVSERQLSVGTHLRYCRGVKEVVKREFACASCSFSSDTFSGLQVHMQRKHIAEWNDQLKEKTEFAWTDRELRELAEKELTTPSFRYNKIFYAALGTSRTYDAVRKIRYNDRYKSAIAEMRSQIADAAAAAQERDVERGLVSAHSDRGKEMLPVVETKSDIQVNNDIKKDIELTPNSRQKQTNLALARPAVIEVEEDLGRQDVKQYLASLRQDDYTSPAERSIFAYCREETNWSATKRQVLKISRTTRGLRQPKKVRPFEFPEGFKPNRNMRKWRKYRFLQECYREKRAETVSKILDGTFIDEPEEEIRPELEEVQRMYIDRLEKRTQLDTTKIVQTDEVFCLQSYGRITIGEVRDALGASKKDSASGPDGLLLQDVRRLGPLLLCNIFNMWYLHGIPVEENRCRTILLYKSGDRHLASNYRPVTIGNMLNRLYAKIWDKRIRKNVRLHVRQKAFIPVDGCFENVKTIQCVLQSYRKRKLEHNVVFIDLAKAFDTVLHDSIRKALWRKGVPSGVVKVVDSLYAGAVTSISVGKTKTRSICINSGVKQGCPLSPLLFNLILDELAERIEATGCGLDLDGHVLSSMAFADDYVLLAKDSVEMNELIRVCSTFFKEKGLSVNPGKCQSLRVLPVKEKKRSMKVLVRPHRWWRIKDQDVDIPSMTYDSLGKYLGVSIDPTGKIALPIEEWKNWMTKLKECKLKPEQKVKILKEVVCSRVNYVLRMSECGISELRSWTRFVRNWAKNIIHLPTWCSSDWIHSIKGLGIPDVSKGIVIQRMRASEKMSTSEDGIVRVVGARLVQKNRVLWEKAGFEGIELKAARRHCEVERLNNIGNITNGVALKTIAAVSSVNRYWMIEDNLKSGNKILVWKAMAGAIPTKINLSRGVADQTLKKCRRCGLTAETDGHILAGCHTSSDAYSKRHNMLCDKLAKELKLNGGPNRRVWRERTCFTSTGRRYRPDIIVKDDSKITVIDMTCPYEKSEGHLIQCESAKVTKYEPLKLDKYWTRELEGANGIVAEKVELMGLAIGAIGTIMRSTLRKLCELKSGRIVRRLQMIACNNSAQIIKGHLSRATRRNLR

SEQ ID NO: 1392 - protein, 1158 aa, synthetic construct
  source 1..1158: note = Description of Artificial Sequence: Synthetic polypeptide
MSNRITIGDVPSVGKGGLTVNKQTAGADGAEACVVIHPGAKGIWSSPACLRKFTIGKELRAHLAQIHKLAPSAVRYRCNKCPYEGDVQLSVGTHLRYCKGIAGVVEEKKQFACAICNFSSDTFSGLQVHKQRKHVVEWNEQLKEKTEFAWTDRELRELAVKEVTIPFSVVNTETFAVLDITTRTKDAVRKIRYTDRYKSILAEVRAQVNAVAEEAPQASDESQITLLVNTGRGAELQPAVINITDSIELVTDVNEVEMVTSNSTNEEQPINAPVEPAVIEADLGRQDAKLYLASLRQSDCTNASDRWTLAYCRGEVDWCKTKSRLFKVSRHARGLRQPQRVENWEFPEGFRPNRNLRKWRKYSFLQSCYRTKKKETVSKILDGTFKDTPEEEIRPELEEVQRVYVDRLEVRTQLDTTRTVHIDERFDLVSYGRITIREVQDAISASKKDASGGPDGLLLQDVKKASPRQLCIIFNMWYLHGIPVVENRCRTILLHKGGEKHLTSNYRPVTIGNMLNRVYAKIWDRRIRKNLQLHVRQKAFVPLDGCFENVKTIQCILQSYRRSRREHNVVFVDLAKAFDTILHDSIEKALLRKGIPRSVIKVVDSLYAGAVTSITVGKTKTRPICINSGVKQGCPLSPLLFNLVIDELAERLEATGCGLDLEGHVISSMAFADDYVLLAKDSVEMNVLMNVCNTFFEEKGLAVNPAKCQSLRVLPVKGKRSMKVLTRTHRWWKINNQDVEIPSMTYESVGKYLGVMIDPAGKIALPIEEWKLWLTRLRECKLKPDQKVKVLKEVVCARANYVLRMSGCGICELRKWSRFVRGWVKSIIHFPAWCNSEWMHSSKGLGIPDVVSGIVIQRMRAAEKMAKSTDGVVRVVGARIVQTNRVLWKRAGLAGIELDAARKFCEVKRVNKIGNQTNGGALKTIAESSVSRHWLLEKNIRPGNKILVWKAMAGVIPTKINLSRGVADQTLKKCRCCGLTAETDCHILAGCPTSRDAYSKRHNLLCDKLAKELRLNGGPSRRVWRERMCLSGNGRRYKPDIVVKDDGVITVIDMACPYEKSERHLSQCEDAKVAKYEPLRLDRSWTQELEGNNGRSANEISVVGIAVGAIGTITRKTQRILSKLKLAKVGRPLQIIACNESAQIIRRHLSGSRLRNLR

SEQ ID NO: 1393 - protein, 1102 aa, synthetic construct
  source 1..1102: note = Description of Artificial Sequence: Synthetic polypeptide
MNLPIREHAVSVHNINKFNYLCQLCSKSYDTINSVKAHYVACRRQKNASSTTAVPTNVINNNQLAINTNQVISRNPLQCVECLMKQVDFYAKDTKALVTHMRTKHAAAYEESKKVATRRVAWSPDEDQILAELEVKLKKIQKGQLLSRLVVEYNKCADKSKAPSRSKDAIRTRRQQHDYKLLLRSLQSQQPPVGSEDSDSDISSSNNNPLTTTHNVTPTPDSSNVVLLIQKIRESVDSIVKITNLKLNTNMLNAASAFINQNNNMDPLELSMRGIEEDVKAIRDKELQKPTRNVPSSTTSRKPTRNAKRLEKSKKYGYYQHLYYNNKKKLVAEILDGETSGAKPPPMNLVEDYYRNIWSRSTIDDSPVNNIKTVNSDSIFAPISRDEIKLALSNTKKDSAAGPDAVTIKEAKAIIDNLYVAYNIWLGVQGIPEQLKLNKTILIPKGNSDLSLLKNWRPITISSIILRVYNRLLAYRMNKIFKTNDKQVGFKPVNGCGINISWLHSLLKHARLNKNSIYACLVDVSKAFDSVSHQSIVRALTMNGAPSLLVKLIMDQYTNVNTVITCSGSISNKINISSGVKQGDPLSSLLFNLVIDELFDVIKDQYGYTIDNIGTTNARCFADDLTLISSSRMGMNKLLELTTKFFKERGLNVNPSKCMSIGMSKGYKGKKSKIESEPLFSITDAQIPMLGYIDKTTRYLGVNFTSIGAIDAKRIKKDLQDTLDKLEHLKLKAQCKMDLLRTYMIPRFMFQLIHTELYPKLLIKMDILIRKLAKRILHLPISTSSEFFYLPFKEGGLQLTSLKEAVGLAKIKLHKKIMSSNDPMLCYLIESQRSRIVEHFMKDLKLGDSLTLNEMNNIKECFMKEKRISFAQKIHGVGFEVFSSSPLTNQWINGEIKTMTTKTYINSIKLRTNTLETRVTTSRGLNIIKTCRRCHVADESLMHVLQCCSSTKGLRYSRHHKICAKVANKLVMNGYGVFREKSYPDPNNSGSYLRPDIIAVKNGHVIVLDVTVVYEVTGATFINAYQTKINKYNAIMVQIEQMFNCVNGELHGLVIGSRGSIHHSQLHIWHQMGFSSIELKYVAIGCMEDSLRIMSTFSKAIT

SEQ ID NO: 1394 - protein, 1276 aa, synthetic construct
  source 1..1276: note = Description of Artificial Sequence: Synthetic polypeptide
MGTDTVYVGQDYPSGLSKRVPARLVAGPMLRERSCHAHVFRAGHMWNWRTSLPSGRWDQPALEKSRVLTRSVATATDPEITSYPGKSVSTSTQVQEEDWCSRESGWISPGLAPEEPSVVSEITASMVATMRVATEEVVLEPQPEQVVTILPEHGRNVPPGLAEQDTASPIEVSVLLPDLAENCPLCGVPSGGLRLLGKHFAVRHAGVPVTYECRKCAWRSPNSHSISCHVPKCRGRARMPSGDPGIACDLCEARFATEVGVAQHKRHVHPVEWNKVRLERRGARGGGIKATKLWSVAEVETLIRLIREHGDSGATYQLIADELGRGKTAEQVRSKKRLLRIDTASNSPDDAEVEEERLESLAVRSSSRSPPSLVATRVREAVARGESEGGEEIRAIAALIRDVDQNPCLIETSASDIISKLGRRVDGPKRPRPVVREQTQEKGWVRRLARRKREYREAQYLYSRDQARLAAQILDGAASQECALPVDQVYGAFREKWETVGQFHGLGEFRTGARADNWEFYSPILAAEVKENLMRMANGTAPGPDRISKKALLDWDPRGEQLARLYTTWLIGGVIPRVFKECRTKLLPKSSDPVELQDIGGWRPVTIGSMVTRLFSRILTMRLTRACPINPRQRGFLASSSGCAENLLIFDEIVRRSRRDGGPLAVVFVDFARAFDSISHEHILCVLEEGGLDRHVIGLIRNSYVDCVTRVGCVEGMTPPIQMKVGVKQGDPMSPLLFNLAMDPLIHKLETAGTGLKWGDLSIATLAFADDLVLVSDSEEGMGRSLGILEKFCQLTGLRVQPRKCHGFFMDKGVVNGCGTWEICGSPIHMIPPGESVRYLGVQVGPGRGVMEPDLIPTVHTWIERISEAPLKPSQRMRVLNSFALPRIIYQADLGKVTVTKLAQIDGIVRKAVKKWLHLSPSTCNGLLYSRNRDGGLGLLKLERLIPSVRTKRIYRMSRSPDIWTRRMTSHSVSKSDWEMLWVQAGGERGSAPVMGAVEAAPTDVERSPDYPDWRREENLAWSALRVQGVGADQFRGDRTSSSWIAEPASVGFAQRHWLAALALRAGVYPTREFLARGKEKSGAACRRCPARLESCSHILGQCPFVQANRIARHNKVCVLLATEAERFGWTVIREFRLEDAAGGLKIPDLVCKKADTVLIVDVTVRYEMDGETLKRAASEKVKHYLPVGQQITDKVGGRCFKVMGFPVGARGKWPASNNTVLAELGVPAGRMRTFARLVSRRTLLYSLDILRDFMREPAGRGTRVALIPAATGAAN

SEQ ID NO: 1395 - protein, 1168 aa, synthetic construct
  source 1..1168: note = Description of Artificial Sequence: Synthetic polypeptide
GIDGYMFGYARASGSTSVSIQSSSMTEGETNERATPRASDSSSVSIQSSCVTEGECLPPTDNCNPSVENQLPCVTEGRFERVGSLVTVRLPFRKVACDLCSKEFLTYSKFAVHQANFHNSETQACCTYCGKSDGNHHSIACHVPKCPWRRTVTFAANLSNFLCDLCNDSFKTKSGLSQHKRHKHPCSRNAERILSLGVRTPSARPRQVVWSEEETRTLREVEVVYSGQKNINVLCAGHLPGKTSKQVSDKRRDLHRIRSSNVHGTPTTQSRGDPVEQVEEYEELDWEGMHPFPDPDSKFCSYLDQLRDQKGLTEPVWQEIEIVAQEWVENLAHVQSSWNHERTTKQVPENNTPARRPFKRRLHRVERYKRFQRMYDLQRKRLAEEILDGREAVTCNLKKEEIKDHYDQVYGVSNDRVSLDDCPRPPGANNTDLLKPFTPTEVMDSLQGMKNGAPGPDKITLPFLQKRLKNGIHVSLANVFNLWQFSGRIPECMKSNRSVLIPKGKSNLRDVRNWRPITISSIVLRLYTRILARRLERAVQINPRQRGFVPQAGCRDNIFLLQSAMRRAKRKGTLALGLLDLSKAFDTVGHKHLLTSLERFAVHPHFVRIVEDMYSGCSTSFRVGSQSTRPIVLMRGVKQGDPMSPILFNIALDPLLRQLEEESRGFMFREGQAPVSSLAYADDMALLAKDHASLQSMLGTVDKFCSGNGLGLNIAKSAGLLIRGANKTFTVNDCPSWLVNGETLPMIGPEQTYRYLGASICPWTGINSGPVKPTLEKWIANITESPLKPHQRVDILCKYALPRLFYQLELGTLNFKELKELDSMVKQAVKRWCHLPACTADGLLYSRHRDGGLAVVKLESLVPCLKIKTNLRLVHSTDPVISSLAESDGLVGAIEGIAQKAGLPIPTPDQRSGTYHSNWRDMERRSWERLALHGQGVELFKGSRSANHWLPRPVGMKPHHWVKCLAMRANVYPTKRGLSRGNLSKNKDSAKCRGCTSMRETLCHLSGQCPKLKSMRIRRHNKICEHLIAEASFKGWKVLQEPTLVTDNGERRRPDLIFHRDDKAVVVDVTVRYEISKDTLREAYASKVRRYGCLTEQIKDLTGATSVVFHGFPMGARGAWFPESSDVMADLNIRSKYFEEFLCRRTILYTLDLLWKSNNEQYLERLAP

SEQ ID NO: 1396 - protein, 1687 aa, synthetic construct
  source 1..1687: note = Description of Artificial Sequence: Synthetic polypeptide
MLRRKGRHRMVMVNSVKWQPSAHAEAIGTGKSWAPQRSQASEHGWQSNAMFDPPNRILFARDSWSLNQSTHLQNQRSGSGLGIRPGQVRNNMVGGGPHRAGDPKRRVELVSIQGSEVTVRTIYPSDEIFSCYSKSCDIKTKAGYGPEDLKHLTRHIKNEHGLKARWAYQCGLCNEKSDPSVSEGHKWMEAHMVAVHQSSAEKRIKSYQKCTGARVAEQLQAAAPSLTVPGKHKSGSRDAAKDSMTPTKDDDPKTRIYQTRSVVKKSTQKTAEPTDEGSRGPKYASIFQKSVKARKSLALLCELSSPKPMNPLPTNELTLKEGNSRELAKEEAPSEGIDDIVIIDLDESEESPPRRKRFNTWCLDHESSREAWLDDTAIFWYISYLCRGSTKYSALDPCLWSMYKVKGSRYILDRLESSITYFFPICEEDHWTLLVLKDNSYYYANSLHQEPRGPVRDFINDSKRARKEFKVQVPLQRDSFNCGVHICLMTNSIMAGGKWHSEEDVRNFRKRLKKTLQEEGYELYSVNSLGIPFQAPTTEQMDYKETRCKRSYASVLTQISPPAKRPDCKPDNNIFVPTKDCAAEGNPQEKGRNESPEEINTEHIVVAGKPANNISPRCRSTSEMLFEMVKATTSSGRSSLGTMTQDEFIRTSTIAEAVPLMSIKLPPMELPRKILPPIPPRKPTQTNGGQKGKQQRVPTGKPDTLNAKVRNWFNNQLESYAMEGRSFQRLEWLTEVLTASIQKAAAGDEGIVDIICKRNPPLEVAKGEMCTQTENKRKTTNNAARIADPIQSSKGAGDVKASYWKERARTYNRIIGSKEELCKIPIDQLEDFFKKSTSRTNVQESIMKEKSSKIPALKIGNWMEKKFIGKEVAFALRKTKDTAQGADGLRYHHLQWFDPSGELLAKVYNECQRHRKIPKHWKEAETILLFKNGDQSKPENWRPISLMPVIYKLYSSLWNRRIRAVPNVLSKCQRGFQEREGCNESLAILRTAIDVAKGKRRNLAVAWLDLTNAFGSIPHELIEYALTAYGFPQMVVDVVKDMYQGASMRVKNATEKSDRIPIMSGVKQGDPISPTLFNICLETVIRRHLESANGHQCLKTRIKVLAFADDMAILTDSPDQLQRELSKLDNDCTPLNLIFKPAKCASLVIQKGVVRSASIKLKGNAIRCLDENTTYKYLGVQTGSAARISAMDLLEKVTKELECVVKSDLTPPQKLDCLKTFTLSKLTYMYGNSIPLITEIKMFANIVIRGVKVMHRIPVRGSPLEYIHLPVKDGGLGVACPKTTCMITFLVSTLKKLWSDDEYIKTLFTSLAEEVVKKESKKSTVTMDDIADYLNVEERINRSEFGYNSITRLRDVMRNLAITGDSPLYRLKMVVKNGKIALLVQATSESMERIYTEEDAKKLQRSLKDQVNKALKHRFNTTKVVKSKVVRVVQQHPASNRFVTKGGNLSLACHRFVHKARLNLLACNYNNYDKSKSKVCRRCGKDLETQWHILQNCPFGFSKKITERHDAVLHKVKTLIESGGKKNWTMKIDEELPGFSRLRPDICLKSPDEKQIILADVACPYEHGVEAMERSWQAKIDKYETGFAHLRKSGTKLTVLPIIIGSLGSWWKPTGDSLKELGIKGSVINSAIPELCATVLEHSKNTYWNHIFGEAYIPNPMRNGHAKPAGNGWKKERLQKAPVRPTN

SEQ ID NO: 1397 - protein, 1059 aa, synthetic construct
  source 1..1059: note = Description of Artificial Sequence: Synthetic polypeptide
MSLQRAKNARGDPGRCNLCSADYRDLKDHLNKQHSTHFFVPSDLRGSSLVACPRCGTPCSAGTGLSRHQSRYCGLTAPRIRRNRVGNSTNTSRCPPSNTAASPIVPSPSPERPSPPQPAEVVASLEPLSEAEEVLEVAQVDAETVDTLEGTRRAPESVPRSAEEGSTRVRELNMTAPEEEHRGEEESSHTNPTAPAGLENAVSSTLGPSPGTLPSLLPSQECANERFLYLAHLPVRSKPLPNNLVTDFMDAAERCALAYIAQPSDSTLLAFLALPKVGLTQALAPEQPLRPSTFLKQFPHIPWPEQPPARRPPSNIRPDTTKQVIKLVENGRLGAAERVLEEDASVAELDQGVIDQLITKHPKGPSCPFGNAVGPTPGKAPDIDTIQKALDSFKPDTAPGVSGWSVPLLKTAAKREPVKQFLQLLCAAIANNTAPGRSMLRTSRLIPLKKDDGSIRPIAVGELIYRLCAKALIISHFQPDFLLPFQLGVKSIGGVEPIVRLTERVLEGSAGAEFSFLASLDASNAFNRVDRAEMAAAVKTHAPTLWRTCKWAYGDSSDLVCGDKILQSSQGVRQGDPFGPLFFSITLRPTLNALSQSLGPSTQALAYLDDIYLFSNDSQVLSKTTQFLADKQHIIKLNEKKCKLISFDEIRQEGFKMLGTMVGGKEKRAEFLEGRIRKEMAKVGKLKDLPHQHALLLLRFCIQQNLRHLQRSLRSDDLVDLWERLDTMLWEEVKRMRMRQREDTAEEEALGRSLTKLPARLGGLGLLSFKDVAPLAYRSAAEASDTLLDNLGLLSSPEEPPTPIPQRTRCAELWESQQEAILHNLGDTERKRLTENASRLGRSWLSVIPYLQPLRLSNVEIASGLHDRTLVGSSIPVCRFCGSDSPLGHDELCRARNPWTQRRHNAINRVIYQHLKQIQGATVEIEPHTLSGQRRNDLRVRGSSALAFTDYDLKVYSLGDRDARSTVTPCAPNGKLADFCLDRCVNWLDKVGQVVSKNAPKVTGGVFKPIILSTGGLMSRSTADEWKDWRDAMPVGGFEKMEKRIGVELVKARARTLVL

SEQ ID NO: 1398 - protein, 1024 aa, synthetic construct
  source 1..1024: note = Description of Artificial Sequence: Synthetic polypeptide
MSQPNISSAETPLSQLPTPVPTPPSPSNPSLSLPTVRDLLLCPIRSSHVYSSIPSSCLHSFTMLLIKTVRAASATMTPTESHRAFIHLHILPIAVLRRSFRGETGWRSRTGQHHALRQRIRRASSGRHWAALWHEALAAHQVDLDYRTRHSRRYQASATSRHRIGRAMRLAADAQYGRAMSALKAKPLPDLHAAATRDTLTALHPPPASPVQPLSPTDLPPVPEITEGQVLRAARALNPTSAAGPDHLSPRILQLLARTTISPEAGVTGLSALTNLVRRLARGDIPDRTAPLLAAATLIPLQPRPHKIRPIAVGQALRRLVTKVLLPPAIQDTRDHLLPEQLANSVASGMDAIVHDTRMLMHRHGRNPDYIMVSVDARNAFNTFSRQSLLDRLPLQTPSLARFLNLIYGRTVPDLVLPSSPRFLMKSQEGTQQGDPASMLLFSLAIQPLLRRLTRECRLDLNRWYADDGTLVGPISEVIKALRILRDDGPQSGFHVNINKCRAYWPTVMPEKLSELLRIFPLHVECGEGGVALLGAPLGTDAFVRRHLMNKVQSCHASLSLLDEIPDARTRFHLHRVTGSVCKVEHVFRLTPPHLSLPAATKFDEQQIAAYSRLNDVAVSTSMATQIGLPFRLGGHGFTPLSPFIHASYAASLIEAAPVRVKGPHNPSESFYRRMARRHIVHVLGALNPEVRTRGILGTHSPLGPFEPEALLSRPERVHHTLIQAMQGATSRLYWEHTAWDLDPLPRNHSAASVRRRARYNSLRAPGAASFLCSHPSLTSRVPSAVWSCMLRRHLDTPVYCDSIRPLICSHCCKPMDARGDHAAICRHGFGVVHRHNTVRNLLARHAFRAAGLCCDLEVPSLLPNTANRPADILVQPAPPPSGALPDRPTAYDVTVRSPYCRSTMSLAAKGLAGAAEAADLDKLRVHSRTVRDAFHLQPDSPLPLLDWHFVPLAFDTLGATSSRTMAVLEYLAHRIANRTYSSYGTAKIRLLQRISFAVWSSLASATLSRMPYHGAALSSPAQV

SEQ ID NO: 1399 - protein, 1353 aa, synthetic construct
  source 1..1353: note = Description of Artificial Sequence: Synthetic polypeptide
  VARIANT 3: note = Any amino acid
  VARIANT 4: note = Any amino acid
  VARIANT 6: note = Any amino acid
  VARIANT 31: note = Any amino acid
  VARIANT 32: note = Any amino acid
  VARIANT 33: note = Any amino acid
  VARIANT 34: note = Any amino acid
  VARIANT 46: note = Any amino acid
  VARIANT 52: note = Any amino acid
  VARIANT 59: note = Any amino acid
  VARIANT 79: note = Any amino acid
  VARIANT 85: note = Any amino acid
  VARIANT 92: note = Any amino acid
  VARIANT 96: note = Any amino acid
  VARIANT 98: note = Any amino acid
  VARIANT 100: note = Any amino acid
  VARIANT 103: note = Any amino acid
  VARIANT 122: note = Any amino acid
  VARIANT 140: note = Any amino acid
  VARIANT 163: note = Any amino acid
  VARIANT 170: note = Any amino acid
  VARIANT 188: note = Any amino acid
  VARIANT 193: note = Any amino acid
  VARIANT 199: note = Any amino acid
  VARIANT 207: note = Any amino acid
  VARIANT 209: note = Any amino acid
  VARIANT 220: note = Any amino acid
  VARIANT 257: note = Any amino acid
  VARIANT 274: note = Any amino acid
  VARIANT 276: note = Any amino acid
  VARIANT 292: note = Any amino acid
  VARIANT 298: note = Any amino acid
  VARIANT 303: note = Any amino acid
  VARIANT 306: note = Any amino acid
  VARIANT 307: note = Any amino acid
  VARIANT 309: note = Any amino acid
  VARIANT 333: note = Any amino acid
  VARIANT 344: note = Any amino acid
  VARIANT 353: note = Any amino acid
  VARIANT 368: note = Any amino acid
  VARIANT 382: note = Any amino acid
  VARIANT 383: note = Any amino acid
  VARIANT 391: note = Any amino acid
  VARIANT 476: note = Any amino acid
  VARIANT 480: note = Any amino acid
  VARIANT 573: note = Any amino acid
  VARIANT 591: note = Any amino acid
  VARIANT 620: note = Any amino acid
  VARIANT 669: note = Any amino acid
  VARIANT 678: note = Any amino acid
  VARIANT 707: note = Any amino acid
  VARIANT 709: note = Any amino acid
  VARIANT 728: note = Any amino acid
  VARIANT 759: note = Any amino acid
  VARIANT 780: note = Any amino acid
  VARIANT 791: note = Any amino acid
  VARIANT 799: note = Any amino acid
  VARIANT 845: note = Any amino acid
  VARIANT 857: note = Any amino acid
  VARIANT 860: note = Any amino acid
  VARIANT 878: note = Any amino acid
  VARIANT 880: note = Any amino acid
  VARIANT 882: note = Any amino acid
  VARIANT 896: note = Any amino acid
  VARIANT 939: note = Any amino acid
  VARIANT 959: note = Any amino acid
  VARIANT 1030: note = Any amino acid
  VARIANT 1038: note = Any amino acid
  VARIANT 1066: note = Any amino acid
  VARIANT 1139: note = Any amino acid
  VARIANT 1153: note = Any amino acid
  VARIANT 1155: note = Any amino acid
  VARIANT 1217: note = Any amino acid
  VARIANT 1253: note = Any amino acid
  VARIANT 1262: note = Any amino acid
  VARIANT 1271: note = Any amino acid
MAXXPXISPPGAPPAPLRYRMLQCPPPLPKXXXXPVPHPMSSPIRXRLPHRXMRGPPSXTPPRDMHRPHGTPGPHSHRXCGRPPXHCTHASXQPRXAXHXLQXPKLRSPPPHPHVSPLILCXGPLPTPMTQPRMKRALSXSAKAPPTKRPSASQGPAASSHDXPRTPPPXPPRPPPYRFPPPTLDQHXFALSXAYPHPXPRRPPSPXRXLRHSFPPRFGXQTFSSIPGPRLHSTVLLLIRLVRAATAANTPETTTLXSCTFTCSRLPFFERPSXAXLAGGPRAVNFMLSACXYGERVXDESGXSYXXKXHCITSHPPRPRRYSRQHSRNHHTXFLHLHLLPTAXLREAFRGEXGWRSSRGQLHALRLXIRRACTGREWGLLXXEALDAHSXRTEWQHTHARRPSPPVSPSARAARAMRLASQAQYGRAMRTFTNPPLADLNDPATMERLQALHPTPTVPVVPLPPSAQPRPPEVTXEAVXRAVRRLNPNSAAGPDRMSPKLLHLLAHTPISPEAGVTGLSALTNLVSRLARGSLPPCTIPLASAATLLPLQPRPGKIRPIAIGQALRRLVTKXLLPAAIDDCRDHLAPEQXANGIPNGIDAIVHDARMLVRRHGNDPHYXMVSIDASNAFNNFSRQQVLDQLPTRAPSLSRYLDMVYARAPSPLVLPSXPPTILHSRXGSQQGDPASMLLFSLALQPLTRLISRECXLXMNRWYADDGTIIGRIDEVXKALDIITKEGPRFQFFLNPSKTRVFWPSRQXDLLSPLMTVGPLRVIDEGGVXLLGAPIGSPSXMAQYIREXLNTCKTALAHLDHIPEARMRFHLHRVSASACRLQHLFRLVPPDFAXPFAQQFDRDQLXAYXRFNSVTMSPRIVPKYGCXFXTXATASPHWHLPYTPXTLLASSIPLQHGYKVPTFPPSLSISVLHEARCGSFFEIYLHSXNPHTSRCDYVAKNRAQIRLXFSHGGHGLTSLASTIHASYAASLIDTAPARLQGPHFPAVSQYQRFARGPLRVVLRNLPSFVQPAHFSMTEXDLGCLEPXALLARPERIHTFLLQAQYSAAASSYWQXPLWESFPNPGDHSAASLRKRVRYNSLLAPGATSFLTAHPAATSRVHNATWSTMLRRHLDAPVTNDSISPLRCXHCSKPMDARGDHAXIXSHGFGTLHRHNTVRNVLARQLFRVAGLAYSLEVPFLIPNTAARPADILVQPPPPAPGLPPDXPTAYDVTICSPFRRGMLYHAARHRGGAADAASVRKXKALERTIRXALLIEDDNXPPPLDWHFQPLSFDALGAPSQSTVHVIEDHAKLMALRNSCTIATAKSRIQQRLSFAIWSSAAAAILSRLPTHAADISYPIEV

SEQ ID NO: 1400 - protein, 1473 aa, synthetic construct
  source 1..1473: note = Description of Artificial Sequence: Synthetic polypeptide
  VARIANT 144: note = Any amino acid
  VARIANT 216: note = Any amino acid
MATTTISRSPSSSSSSSSARSRASASTSASVASIPRLFRDGRFHCPLAHCQTRTSTWQDLSAHLTRMHDGDVPRDVAAACGIVQCLHEGCRKWFRGAAGLASHRGKARHAPPPAPRAALAVAAVPRADSRGRTPAPTPSVAPPXAGPPPRAAPRAAPSPLPCPPALPHPPPSASPPTSSVTSPCSPPTTPPSQPSPDLFSGFANAPTTPSPPSTPXSSPAGSPIPAARRFVLPVATPYPAPAPRANRPKLSPVARPFVPKARAGAIPEASSPVTPQDRAVSRREDAAAAPSSAPGLGLADEHEDDDTYGGDTIALTAPHAPRETRAPFEFEACFLEEEAPATAGDLPPYARAFLACPSARLQEIPRRLKSAWQAAAKTIAEAALDCHTAGDTQGYNAHLRLFIELPARGLAVPTNCRGAARTKLQRERLLDIAAGRIPAIPDPPCDAPGADDALRGFPVSGTTAGDVSNDDDSGGVHDRPAATASARQAKRLVEQGLSSRALRALERGEPAVASADTLGRLEALHPPNPTDRGLWPGAPKAAIPRVTAKHLAQVAKELPRGSAPGPSGWTFELVQAAIDRQPTGTVAAFLIDMAQRALRGTLHWRGLLTASRLVALKKPDGGVRPIAVGEALYRVIGRLVLKADRVMSSADATQYVGRHQYGVAYPGGVEAPVHAVRELHDSGQLRAVVSLDWRNAFNSLDRVHTALLIADRAPALARLYEWSYREDSVLVLPRAFEKAGLPASLLSQAGVRQGDVLGPLFFAIGAAPVLDEIDAIPYVTPRAYLDDIFVTIPHGVTDAATKAAVAATFATAEREGAAAGLRLNRCKSAVWAADAEALLPPHAAGAREDVESCAPVREGLKILGAPVGSPAFVAKSLDGIIKRAIGTLDLVADAELPLQHKLVLLRQCVAQIPTFWARAVPDAGPALAVWDTALLRRTGALVGLDVRDGSLQADIARLPVRLGGLGLRSMKDTAPRAFVASILFAAALANTRRSELTCSASTARRLRAALPELARTDACNDEAAWRRSIARGVFPDVDKLGTTQLQRVLQGMADSKSAHRTRRQVPFLFAAVFEDAATPGSGAWLAAIPSDPTLVLPDAELAEAVRIKLLTTTANAAGVCPACHKTGIDPSHAYTCVSLSHLRTARHDVVVRRVELACKTEKPVREHVLAIPPVAPTDNNNNGDEDGSPVTTADDNADGHAVATKRRPETRASARAAAAAATAAAAAAIINDNSLLSDDDDDDDHDDNCHGEERGEGERNVTCPGHYTATPFAADDTLDNSDEDNEDNAHEDDDEDGKDDNDDDVYNNCNSSSSDGDEGGDDLDYEYSDQSVTRSVDAATGESPNPERPTTPTRALLRADLWLPATSTAVDVMVAAACRRSRAKAFDRAVSRKAAKYGPAVADGSIAKVVPFVVSPFGVLSRPAKAFLKRAMGDTTAAKQAKARLRLAVAAVRGTARLSYAWGACAALIVGGN

SEQ ID NO: 1401 - protein, 1220 aa, synthetic construct
  source 1..1220: note = Description of Artificial Sequence: Synthetic polypeptide
MAPLPWNAATSSPPSPVPLTNDKKKDSTLPTATSKNLSKNNNNKNNNTNRINNIKNNDNTNDGSNKINLKLPPAAVKITNPYKNKKKNKKKNNAGKSNPKTNQNPNSSPLSDNDDDDTDSSNITINRRLKFGTDDLAPPNPPSNTNTIGTATAATAATATTTATAATATTATNTTTTTTTTNNTTGDNLASNINNNNNNNNSGSNNSNTNNINNTDGNGSNNRPPPRVYTVDPRSDLPGAEISAANKMLDEVYGDHVHDNPGSHLSGLISSSQDQLWQGYFRRLIPHNQSLYDCPKGKLGKDITNEYSNLFEAIMNGKCNMEKLLVFPVVVLQRRHGVTKNADVKRRLLSRLTAWKEGKFKYLVEDTHRDLIAKQSKARGDTTPAHRAKVYSSKLMRGHLQSAVNYITDREGGGILYPYDVDEKSGHTVSRVLQDKHPSMRDPGPTAMPAYESVPELPTLEITADTVEIVAGKLSGGAGLSGVDSIQLKHLLLHHGQASQRLRNVCAKFGRWLANEHPPWASYRAMLANRLIALDKMPGIRPVGIGDTWRRFFAKLVLAVSMSYATDCCGSDQLCAGLRAGVDGAIHGLSAMWREMESEENTGFVLIDADNAFNEVSRINMLWTIRHEWPAGARFAFNCYRHHSLLVVRNPGGKPFTFFSKEGVTQGDPFAMIAYGVALLPLIRKLKELNVLLVQSWYADDASAAGKFDEILRLFQDLLRMGPDFGYFPNASKSILITHPDNVVAAHHFFNETHGLGFKISTGSRFLGGFIGDTTSRDEYVSTKIADWIHGTKELAAVARLKYPHAAYTGITKCLQHKWSFTQRVIPGIDDLFQPLEDELTNNLLPALFGDPPSTMDDKLRLLTALPVKHAGLALPNPVTSSATNYKNSTLMSSHLLLAVQGKINFSLQDHRDTCQSSLSASRELRQTENDSSLTNLLAALPPAAAGQPSTTRAIKRAGETGLWLTTIPNHINGNILGCDEFIDAIRLRYQKVPHNLPAKCDGCGSAFDVGHALQCKSGGLIIRRHDELNLELASLAKMALRESAIRAEPEINPSASIMDSPTTITAIDTNGDRGDLLIKGFWDNGMDAIIDVRITDTDAKSYRTRDPKKVLQSQEKEKKKKYLDQCLLQRRAFTPFVVSVDGLIGYEASNVLKQLSKRLADKWNKPYSVTCGIVRSRISIACARASNQCLRGSRIPFKTMSRQIQWEDGAGAGLYRIVR

SEQ ID NO: 1402 - protein, 1027 aa, synthetic construct
  source 1..1027: note = Description of Artificial Sequence: Synthetic polypeptide
MNMVSICKRCDRSFTTLKGLNIHKGQCKIFVSNTNKQINNVVNNELTTPNKNKVEINTILNCDEISVEHYSTNTPYLPKINICESIIDPNDYLWGHMPFSFLLNHVNTIYDEIVFYHKNLFKVPSGKGGKMFIEELTFWLKQFNNRTKLNGIAMKCFMIVPSLMLQKPSIRSKAKEHAECLVRRITLWRNGNFSELMREIRYIQSKINTSKKKRTFEDISRIFAKLMMEGKVAAALKVLDRESSGILQCSESVLKELKSKHPDETPVQDNCLLYGPLQNTPECLFDSIDEISIFNSALQTKGSAGPSGMDADLYRRVLCSKCFGPSCKTLREEIATFTKNIATKSYQPDIVQPYIACRLIPLDKNPGIRPIGIGEVLRRIVGKTISHHCQKEIKEAAGPLQTCAGHGAGAEAAIHAMQKIFHQEDTDGVLLIDARNAFNCLNRSVALHNIQITCPILAMYLVNTYRKPAKLFIYGGETIFSKEGTTQGDPLAMPWYSLSTVTIINTLKLVIPDVKQVWLADDATAAGKLQSLKKWYKCLEDVGGLYGYYVNQSKCWLIVKSDNQAEEAKLIFGNSINITTQGKRHLGAALGSEAYKKVYCEDLVSKWSKELNNLCEIATTQPQAAYSAFIKGYRSKFTYFLRTIEAFENFVTPVEKILSEKLLPVLFGTDCSIIKENRDLLALNPSEGGLGICNLITEAKEQHTASKKITNLHIKSILDQSDVMKEKDDFGKTFSEIKTKTNMDKSKKKKEEVKKIHAGLPENLKLLVEQACDKGASSWLNTLPIKEQHLDLNKEEFKDALRLRYNVPLANLPSYCACGEKFDELHAMSCKKGGFVCNRHDNIRDLLTVCLNKVCTDVQAEPHLIPLTNEKFNFKTANTNDEARLDIKAKGFWRKGETAFFDVRVTHVNSKSSKKQPTKHIFRRHEDAKKREYLERVLEVEHGTFTPLIFGTNGGFGDECKRFTALLAQKLSLKMGERYGAVINWLRTRLSMEITRASLLCLRGSRTPFRHYNTDDVGLENVQCGLI

SEQ ID NO: 1403 - protein, 1068 aa, synthetic construct
  source 1..1068: note = Description of Artificial Sequence: Synthetic polypeptide
  VARIANT 33: note = Any amino acid
  VARIANT 100: note = Any amino acid
  VARIANT 350: note = Any amino acid
MASSSTSSSDICLCPFRSFHCCPNGEVGSKGIXRMISHIKRHHLLTEDRKCVLREALSSDVGLFMAVEETLKAFGQWMCGKCMTLHALSRYCHHPDGRVXFVTGADGSSRYIVGILKPSTKESVTNALGGLVFDVGLLDRVFKEPITTVKSIPHSCRLAFSQALKTALYKVIAQPGSVDAWICLLLLPRCTLQVFRPKNRQECRSGNRKSLQQSSILKSLDTWGKEDGIRKLVQNMLDNPEVGAMGQGGGILQKESTSSNTNIRQCLRKVADGHFTAAVKVLCSSGVAPYNGDTIKALEDKHPFRPPPSMPSPIISEPPLVADFDCVFGCIKSFPKGTSCGRDGLRAQHXLDALCGEGSAIATDLIRAITSVVNLWLAGRCPTILAEFVASAPLTPLIKPDNGIRPIAVGTIWRRLVSKVAMKGVGKEMAKYLNDFQFGVGVSGGAEVVLHSANRVLSEHHADGSLAMLTVDFSNAFNLVDRSALLHEVKRMCPSISLWVNFLYGQAARLYIGDQHIWSATGVQQGDPLGPLLFALVLHPLVHKIRDNCKLLLHAWYLDDGTVIGDSEEVARVLNIIRVNGPGLGLELNIKKTEIFWPSCDGRKLRADLFPTDIGRPSLGVKLLGGAVSRDAGFISGLAMKRAVNAVDLMGLLPQLCDPQSELLLLRSCMGIAKLFFGLRTCQPVHIEEAALFFDKGLRRSIEDMVVCGGPFFGDIQWRLASLPIRFGGLGLYSAYEVSSYAFVASRAQSWALQDHILRDSGICGMDSDYLCAMTRLRDTIPGFDCSGFTNKDTPPKSQKALACALFSKIVKDMEVDFDMTVRQKAVFECLRAPHAQDFLLTIPIDGLGQHMSPVEYRTILRYRLMIPLFPIDEICPVCRKACLDTFGEHAVHCRELPGFKYRHDVVRDVLFDACRRAGISAKKEAPVNFLTDPQDGRSTLRPADILVFGWVGGKHACVDLTGVSPLVGLRSGGFTAGHAALKAAACKVAKHENACIENQHVFVPFAFDTFGFLAPEAVELLNRVQRVMHSNVISPRSTDVVFKRISFAIQKGLAAQLVARLPSIDMY

SEQ ID NO: 1404 - protein, 1461 aa, synthetic construct
  source 1..1461: note = Description of Artificial Sequence: Synthetic polypeptide
MATESGGEDSWTQVRGAKRPSAESPPSNTTTSPSQTHRSAKHTKHGSARHDRNHVFPDPMTTPLRPHARHSVPTARASSHVPSTSPAAGATESSARAVVPAAEPVTRTSNGGGEQHPIIGNTSNASPRTPRTPSSPRSFAQVAAAMPAAATATSSAPMTEDLSASVPSEPNGSGEQQPSPESTGQTHHSIPNTPSDFLTMSSDESDSPPRSTALRAPTPIAPPAHDGDGDTNGSATPEPLVQSPTPAQMVLPYPSGTQQTHSDPSPPSASPPATTILPAAISHPVEHSEHANSAPLGEVSESETHNTAGEHSESEQDVLLSDPAPPIAANVLDAQRKVLLKTSGHRQLLACPFGLCKCKGPRLDRKAWVNHVLREHPYDEQATDLVKQVMEAKLVAQCNKCHLFFEAAGISQHRSRCGANLKRATEALFHAAGHDLLEIMRGAWPQQCVGSRISVCELLKLARHPLMQRSRYPSNATETKLMAATLSQLYWSAVHSDYTAEEREMCWALILALPSMLLSAPSTALSTIDLRNMFHDRLRWLVTGQLGRVVDAMRKAVARKQSRRGQLNAGAGAHPNDAVDQSLRSLVRDPDLADEAWANHVTNRLNRGQIAKAFDADKARAVIGNSEVQAVRDLLVPPGLTPYIASTPASTSTLAPATAVSSPTVSFTKGELPKALAATKGVTDPYGWSGELLASIYRIKEHFSQVLGPRQGSTSDPTAPSDGDAPQGPTTATGGPQVALNKIFHHIANNTVPESIRHALCSINYTILEKANGKFRPVGTDSIFNKVVNRALLEQQQPHIAHLLQASPELAVGVKDGISAAVGMAFGELQACESTPGWTMLSLDFKSAFNYTDRARLHEIVADKVPGLLRAFERHYARPTTHCIVDKFFKVIDIDVGQGIVQGNELSPFFFALYSCEVLGLLDATTDYRCKVIKYLDDIVLMGPAEDVAADVEIVKARAESAGLHLQPSKSRFYMPRHHSASITAIKSVLPDAVRETANTGMTVLGTPIGRREWMKKQLNDKAKHIAGKLNDMLTTGVSLQALLTAMQYVPSLINHLYTLPPSLTSGLSELLNRACKDTFVKAFFAKVNLSAPAGAEGHDVTLEQLLEARLFTRANTGGFGLHDLVERGPVAYVCNMAKLATRYPRVYDRLLEDASRAADFEAHVQRAGFQMATVKDAATQRPAEIIALRSKAALDDLMAKCALDLQQAYLASREWGVSTVLTMRGRDKLRRLSDTTFAIAVVSMMGFGLHELINVKPTDKCPLCSSKTPQPRLTREHLLTCRPIKRHNALRDEMGRLLRYATLSHVWVEKSGYNANGQSCRIDLHCRNPFPGGALGPALPDLGIDVTVRTAQPPTTSQACIKVGAALRRAEKEKRDYYTGFNHGKTLIVPAAMTTTGGFASSFVDLLGQLARCAEARGVYQPGLDEAFVPRWKGRFAALVHQMNADHIQRHFGGVCLRSS

SEQ ID NO: 1405 - protein, 1095 aa, synthetic construct
  source 1..1095: note = Description of Artificial Sequence: Synthetic polypeptide
  VARIANT 276: note = Any amino acid
MSSCKVTIPHVCPYCKVELKTICGINRHILKCKKNPLQIPSLQKTNTSLTLEPNTKVIPSITKQNDIIIASTSSNNLAFNQKKDYTLTPTYSRKTTPVSILSSMKMTPISITSHIVRRKLPELPSQTTNHLFNENFINVPFLPEIMNHLPVPNNNVMWGVYSYQQFKLFVDSTYDEIVNYRRNIFNIPSGKAGKEFIEELTFWLRKFNSTSSLNSIALKVTMILPNLLLQKPSAKSKSKEHTLCLTRRIDLWKKGDTSLLLKEVRNIQKKFVNSKXKRSMDDISRIFAKLIMEGKITAALKFLEKEASSGILPLSDNTLKDLKSKHPEPSRVEDYSLLFGPIDLIPKCFFDCIDEQLVMKAAFATKGSAGPSGMDADIYRRILCSKNFIKEGKELRKEIAKMTQNLLTETYEPTFLEAFTACRLIPLDKNPGIRPIGVGEVLRRIIGKVISWSFNSEIKEAAGPLQTCAGHGAGAEAAVHAMKEIFDNVQTDAILLIDAKNAFNCMNRQVALHNIQIICPLISIYLINTYRNPSRLFVAGGKEISSQEGTTQGDPLAMPWYSCNTTIIIEHLLVNYPQVKQVWLADDAAASGSIANLHSWYQHLIDEGCKHGYYVNQSKCWLIVKSPSLAENAGIVFGKSVNITTEGQRHLGSVIGSQNFKNKYCTEKVAKWLTELKQLCKVAETQPQAAFIAFTKGFRSKFTYFLRTIPKFEQYLAPVDEILSHLLLPTLFGKDTPFEDHIRKLFTLTPRDGGLGIPILVEEAPHQFLSSVKLTKNLVQQIIDQDKILKTKNSSGNVLEDLEKILTTDRLKHRKEKIIAVDSMQPDSMLRNIQQTRSECASTWLNALPLENQGFVLNKEEFRDALCLRYNFDLKNIPRICECGEPFNVTHALSCKKGGFISSRHDNIRNLFTTLLKRVCINVQSEPHLIPLDNENFYFHTANKSNQARLDIKANGFWRNGQTAFFDVRVTHVNSMSNKNLDIAAIFRKHEKEKKREYGERVREVEHGSLTPLVFGTNGGMGKECHRFVRRLAEKLAEKQNEKYSVVMTWLRTKLSFEILRSTILCLRGSRTPWTKKNDFEIGVDFKMDALEARI

SEQ ID NO: 1406 - protein, 1070 aa, synthetic construct
  source 1..1070: note = Description of Artificial Sequence: Synthetic polypeptide
MVCPTCNGVYADYNDHIRKKHPDERYTALQLQPLGLTPCPICKTACKNDLGVKTHLSKIHKISGASKISTQPRIRTENTDNTNSVPTSSFNPVLPEIQTLTPGLNNSRWADNPRKRRADTPSPTRGRNTRPRRFSYTDIDLTNDEPADNPRANNPRVNNPRVNNEPPSSPNSLPSISEFHTPGTLPLTNSNISLKDQHDKITGPILQKPLIQKLIEYSKIPIPEHHLHARQAKIFADAANRIAKNFIQSPTEKTLFNLLILPRIFGIGLINGKVTKIMQNFPSQIPPIPKIDFPSEKTDSDPVLNAKKLLEKGYIGRAAKAIIDPTPVAPETPESLNILREKHPIGQNNPFNTKSQPISGRQITEKAILLAISSIGREKAPGLSGWTRSLLDAAIKIPTQNDVIPALRLLTDMIRQGTAPGRELLCASRLIGLSKPDGGVRPIAVGDLLYKIAFKAILNTLWSPNCLLPYQLGVNSIGGVEPAIFTLEEAIMGPNINGIKSITSLDLKNAFNSVSRAAIASSVAKYAPTFYRSTCWAYNQPSILITENGSVLASAQGIRQGDPLGPLLFSLAFRPTLETIQKSLPYTYIAAYLDDVYILSKTPVKDKIAKIIEKSPFTLNSAKTTETDIDTLKTNGLKTLGSFIGPTELRKEFLQNKIQNFESSINALKKLPKQYGLLILRKSTQLLLRHLLRTLNSQDLWELWEKTDKLIADFVINLTVTKRKKRPITDFVTPLITLPIKDGGFGLLRHNGIAQDIYFAAKDLTTEIRHKIQRISNDFPQNQSPTATEILHLLHNGVLADCKNGLTNAQLNALTENASYLGRKWLNILPIQKSNRLTDWEMAEAVRLRLLAPVKPLTHPCNHCGNRTNINHEDVCKGAVRKYTARHDQINRSFVNSLKSRPEIDVEIEPDLNNENNVNNANTTTENPTPSPNGQNDTGCLFTTPIRSGTRNGQNGLRADFAVINGVSKYYYDVQIVAINKDSGNTNPLNTLADAANNKRRKYQFLDPFFHPIIISAGGLMEKDTAQAYKQIQKLIGPVAAHWLDTSISLILLRSRTTAAISIAKNRPRA

SEQ ID NO: 1407 - protein, 1101 aa, synthetic construct
  source 1..1101: note = Description of Artificial Sequence: Synthetic polypeptide
MNAVCVCGKVCKNQRGLRIHQTKMACLRRVQAEHRSGAVATTVEPVLSASAPGQTEEDQGPEAPHSARNLRATPAPPQGRKSDHHRVKWPAANSKEWSQFDEDVDMILESVSRGSTDQKLQSMCTVIMSMGAERFGTIGQRKPTDTMKPNRREVKIRQLRQELKSLRRSFKASTSGEERAALAELTHHLREKLRTLRRAEWHKKKGKERARKRSAFITNPFGFTKRLLGQKRSGNLTCPVEEINLHLSNTFSDASRDVDLGPCPLLVTSPEPEVHFDISEPTLKEVRETVKAARSSSAPGPSGVVYKVYKHCPRLVVRLWRILKVVWRRGKVAADWRQAEGVWIPKEEESSKVDQFRLISLLSVEGKIFFKIVAQRLIKYLLDNQYIDTSVQKGGVPGVPGCLEHTGVVTQLIREAKENRGDLAVLWLDLANAYGSIPHKLVETALTRHHVPESIQNLILDYYSNFWLRAGSSTATSAWQRLEKGIITGCTISVPLFALAMNMIVKGAEAGCRGPVSRSGTRQPPIRAFMDDLTVMTATVPVCRWLLQGLERLITWARMSFKPAKSRSLVLKKGKVAERFRFTLGGTQIPTVSEKPVKSLGKVFNSSLKDTASVQQTRSDLTTWLEGIDKTGLPGSFKAWMFQHGVLPRVLWPLLVYEVPMTMVEQLERTISRFLRKWLGLPRSLSNIALYGRSTKLQLPLSGLTEEFKVTRAREVLMYRDSSDSKVSSAGIHVRTGRKWKAQEAVDQAEARLRHSVLVGSVAVGRAGLGSCPKPRYDKVSGKEKRLLIQDEIRAGEEEDRRCRMVGMRKQGAWTRWEHADSRKVTWPELCRAEPSRIKFLISSVYDVLPSPANLHVWGLAETPSCQLCQRRGTLEHILSCCPKALGEGRYRWRHDQVLRVLADTVSNAIQSSRSQQPPKKSIVFVRAGEKTRQQPTSAGGLLSTARDWQLLVDLGRQLKFPEHIVATSLRPDMVLVSESTRQVVLLELTVPWEERISEANERKRAKYAELVVQSQSNGWRARCVPVEVGCRGFAGQSLAYVLKLLGVRGFRLRKSIRDILEAAEKASRWLWFRRGEPWKPHGHRSGNDQPRLGRPGEGVW

SEQ ID NO: 1408 - protein, 1087 aa, synthetic construct
  source 1..1087: note = Description of Artificial Sequence: Synthetic polypeptide
MTHANEQTTNKIYVTCICGKLCKNHWGLKIHQARMKCLEQESKVQRTGPEPGETQEEPGPEATHRAKSLHVPEPQTPSEVVQQRIKWPPASKGSEWLQFDEDVSNIIQAIAKGDADSRLKTMTTIIFSYALERFGCIEKGKTKPTTPYTMNRRATQIHHLRQELRSLKKLYKKATDEEKQPLAELKNILRKKLMILRRAEWHRRRGRERARKRAAFITNPFGFTKQLLGDKRSGRLECSIEEVNRFIEETVSDPLREQELEPNKALISPTPPAREFSLRGPSLKEVKEIIKASRSASTPGPSGIPYLVYKRCPGLLLHLWKILKVIWQRGRVAEQWRCAEGVWIPKEENSKNINQFRIISLLSVEGKVFFSIVSRRLTEFLLENNYIDPSVQKGGIPGAPGCLEHTGVVTQLIREAHENRGDLVVLWLDLANAYGSIPHKLVELALHRHHVPSKIKDLILDYYNNFKMRVTSGSETSSWHRIGKGIITGCTISVILFALAMNMVVKSAEVECRGPLTKSGVRQPPIRAYMDDLTITTTTVPGSRWILQGLERLIAWARMSFKPSKSRSMVLKKGKVVDKFHFSISGSVIPTITEQPVKSLGKLFDSSLKDSAAIQKSKKELGAWLAKVDKSGLPGRFKAWIYQHSILPRVLWPLLIYAVPMSTVESLERKISGFLRKWLGLPRSLTSAALYGTSNTLQLPFSGLTEEFMVVRTREALQYRDSRDGKVSSACIEVRTGRKWNAGKAVEVAESRLQQKALVGTVATGRAGLGYFPKTLVSQVKGKERHHLLQGEVRASVEEERVSRVVGLRQQGAWTRWNTLQRRITWANILQADFQRVRFLVQAVYDVLPSPSNLHVWGKNETPSCLLCSGRGSLEHLLSSCPKALADGRYRWRHDQVLKAIAASLASAINTSKNHRAPRKAVHFIKAGEKPRALPQLTTGLLHKASDWQLEVDLGKQLRFPHHIAATRLRPDIIAISEASRQLIILELTVPWEERIEEANERKRAKYQELVEECRERGWRTYYEPIEIGCRGFAGRSLCKVLSRLGITGVAKKRAIRSASEAAEKATRWLWIKRADPWTAVGTQVGT

SEQ ID NO: 1409 - protein, 1001 aa, synthetic construct
  source 1..1001: note = Description of Artificial Sequence: Synthetic polypeptide
MALPAVRSGPASTWTLLITLVIVAAKGTDGFMSFKLPLLSTDTWSGYNNDVKTLLGPLHHELATNEMSPKLAGEGFSDIMCDFMASKPEFSHTTEESHSEGYISHEPQSLAQVKRLKNKLRKKAFRADATPEDRKAFRDAIKTYSFMKRQQKRKETTKSAAHQEKEYHKNFWKFAGKCAKGQLDIPPVKPAFSVYYANEYYKNKYSHPTRVDFNKLLWFPHLPVEEQLPANSFDMSPVRPKDIKAVLSKRCATSAPGPDGIMYGHLKHLPACHLFLSTLFSKLLESGDPPTSWSSGNVSLIHKDGSPEAAENFRMICLTSCVSKIFHQILSERWAKYMTCNDLIDPETQKAFLTGINGCVEHVQVMREILAHAKKNRRTVHITWFDLADAFGSVEHELIYYQMERNGFPPIITTYIKNLYSRLKGKVKGPGWESDPFPFGRGVFQGDNLSPIIFLTVFQPILQHLKGVEQQHGYNLNDKHYVTLPFADDFCLITTNKRQHQKLITQISSNTKSMNLKLKPRKCKSMSIVSGKPSDISFTIDGDPVKTTKDAPEKFLGGYITFLSKTKETYDILAKTIETTVENINKSAIRNEYKLRVYMEYAFPSWRYMLMVHDLTDTQLQKLDSIHTKAIKTWLRMQPSATNAILYNTRGLNFKSISDLYLEAHALAYSRSVLKADEKVKHALQAKLDRESQWTRKMQKWGIGKCHTIHQQAIHVAKDSEWTSVRKHVKQQVTDMRHDVWTKHQENLLQQGQMLQLLEEEKCDLTWRSAMYNLPRGILSFAVRASIDALPTLCNLTTWGKRNTDKCKLCGNRETLHHVLNHCGVALQQGRYTFRHNSVLKHITDTIIESIDTSRINATIYADIQGYTTNGGTIPVHTIPTTQKPDLIIYLPEQKTLHIHELTVPFEKNIKTSHDRKVNKYSTLAADLETAGISATLTCFEVGSRGLVTPENKTRLRTLFKIVKAKPPKTLFTDISRIAMLSSYAIWNSRHEPYWESETLL

SEQ ID NO: 1410 - protein, 1074 aa, synthetic construct
  source 1..1074: note = Description of Artificial Sequence: Synthetic polypeptide
MTTHRAEVTTSGKTQEEPGPEATHSAQSLLVSPTPAAGRSPATQSCPQVTAAHNSPQSPQSQQVAVTRSDCVPLAQPRIQWPQSSKKAEWLQFDKDVNQILEVTGKGGVDQRLSTMTTLIVNIAAERFGTVTPKPTPSTYTPSHRVKEIKRLRKELKLLKRQYKAAGEVERAGLEDLRGILRKQLVNLCRAEYHRKRRRERARKRAAFLANPFKLTKQLLGQKRTGKLTCSKEAINNHLKATYSDPNREQPLGPCGALLTPPEPTSEFNMKEPCRSEVEEVVRRARSSSAPGPSGVPYKVYKNCPKLLHRLWKALKVIWRRGKIAQPWRYAEGVYIPKEEKSENIDQFRVISLLSVESKIFFSIVAKRLSNFLLSNKYIDTSMQKGGIPGVPGCLEHTGVVTQLIREAREGRGDLAVLWLDLTNAYGSIPHKLVEVALEKHHVPQKVKDLIIDYYSKFSLRVSSGQLTSDWHQLEVGIITGCTISVTLFALAMNMMVKAAETECRGPLSKSGVRQPPIRAFMDDLTVTTTSVPGARWILQGLERLVAWARMSFKPAKSRSLVLRKGKVRDEFRFRLGQHQIPSVTERPVKSLGKAFNCSLNDRDSIRETSTAMEAWLKAVDKSGLPGRFKAWVYQHGILPRLLWPLLIYEVPMTVVEGFEQKVSSYLRRWLGLPRSLSNIALYGNTNKLKLPFGSVREEFIVARTREHLQYSGSRDAKVSGAGIVIRTGRKWRAAEAVEQAETRLKHKAILGAVAQGRAGLGSLAATRYDSASGRERQRLVQEEVRASVEEERTSRAVAMRQQGAWMKWEQAMERNVTWKDIWTWNPLRIRFLIQGVYDVLPSPSNLYIWGRVETPACPLCSKPGTLEHILSSCSKALGEGRYRWRHDQVLKSIAEAISKGIKDSRYRQATAKVIQFIKEGQRPERTAKNCSAGLLSTARDWVMTVDLERQLKIPPHITQSTLRPDIILVSEATKQLILLELTVPWEERMEEAQERKRGKYQELVEQCRANGWRTRCMPVEVGSRGFASYTLSKAYGTLGITGTNRRRALSNNVEAAEKASRWLWLKRGEQWGQ

SEQ ID NO: 1411 - protein, 1085 aa, synthetic construct
  source 1..1085: note = Description of Artificial Sequence: Synthetic polypeptide
  VARIANT 172: note = Any amino acid
  VARIANT 744: note = Any amino acid
  VARIANT 910: note = Any amino acid
  VARIANT 944: note = Any amino acid
  VARIANT 1056: note = Any amino acid
  VARIANT 1068: note = Any amino acid
MTPAMEMTTTVTCICSKLCKNQRGLKIHQARMKCLEREVEVQRTGPGPGETQEEPGQEATHRSQSLHVPEPPNPNRVVQQQRIKWPPANRRSEWLQFDEDVSNIIQATAKGDVDSRLQAISTIIVSYGSERFGRIEKGNTETTSYTMNRRSFKIHQLRKELRTLKKQFKRAXDGDKQALKELYNILRKKLKTLRRAEWHRRRGRERARKRAAFIANPFRFSKQLLGDKRSGRLECSREEVNRFLQNTMSDPLRGQDLGPNRALISPAPPSAEFKLAEPSLKEVEEVIKAARSASSPGPSGVPYLVYKRCPEILRHLWKALKVIWRRGRVADQWRCAEGLWIPKEEDSKNINQFRTISLLSVEGKVFFSIVSRRLTEFLLKNNYIDTSVQKGGIPGVPGCLEHNGVVTQLIREAHESKGELAVLWLDLTNAYGSIPHKLVELALHLHHVPSKIKDLILDYYNNFRLRVTSGSVTSDWHRLEKGIITGCTISVVLFVLAMNMVVKAAEVECRGPLSRSGVRQPPIRAYMDDLTVTTTSVPGCRWILQGLERLILWARMSFKPTKSRSMVLKKGKVVDKFRFSISGTVIPSITEQPVKSLGKLFDSSLKDTAAIQKSTEELGGWLTKVDKSGLPGRFKAWIYQYSILPRVLWPLLVYAVPVTTVESFERKISSFLRRWLGLPRSLNSAALYGTSNTLQLPFSGLTEEFKVARTREALQYRDSRDCKVSSAGIEVKTGRKWKAEKAVXVAESRLRQKALVGAVATGRTGLGYFPKTQVSHARGKERNHLLQEEVRAGVEEERVGRAVGLRQQGAWTRWESALQRKVTWSNIMQADFHRVRFLVAAVYDALPSPANLHAWGKSETPTCSLCSGRGSLEHLLSSCPKSLADGRYRWRHDQVLKAVAESIALAISTXKHHHAPKKAISFIKAGERPRAGPQITTGLLHTAXDWQLHVDLGKQLIFPQHIATTSLRPDMIIISEASKHLIMLELTVPWEERIEEANERKRAKYQELVEECRGRGWRTFYEPIEVGCRGFAGRSLCKAFGRLGVTGTAKKRAIKXASEAAERATRWXWLKRADPWVATGTQAGS

SEQ ID NO: 1412 - protein, 1112 aa, synthetic construct
  source 1..1112: note = Description of Artificial Sequence: Synthetic polypeptide
MATTQASVKPTAVATCVCGKICKNPRGLKIHQTKMGCLASVQPEQRARFSLSESREVPARAEPYGPQQPHSPEALGETQEERGQESPHSAQNLRAQVAQAPDNPQHHRRVKWPPASKVSEWQQLDEDLEGILESTAKGGVDRKLQTMTTLVISFATERYGTMEKRAAPEKYTKNRRAEKISQLRQELRVLKKQFKGASEDQKPGLAELRCTLRKKLLTLRRAEWHRRRAKERAKKRAAFLANPFGFTKQLLGQKRSAHLECAKEEVDSYLHDTFSDAERENSLGECRVLISPPEPACSFNTKAPTWKEIQTVVRAARNNSAPGPNGVPYLVYKRCPKLLARLWKILRVIWRRGKVAHQWRWAEGVWVPKEEKSTLIEQFRTISLLNVEGKIFFSILSHRLSDFLLKNQYIDSSVQKGGIPGVPGCLEHCGVVTQLIREAREGRGSLAVLWLDLANAYGSIPHKLVEMALARHHVPGPIKTLIMDYYDSFHLRVTSGSVTSEWHRLEKGIITGCTISVIIFALAMNMLAKSAEPECRGPITKSGIRQPPIRAFMDDLTVTTTSVPGCRWILQGLERLMTWARMRFKPGKSRSLVLKAGKVTDRFRFYLGGTQIPSVSEKPVKSLGKMFDGSLKDAASIRETNDQLGHWLTLVDKSGLPGKFKAWVYQHGILPRILWPLLVYEFPISTVEGLERRVSSCLRRWLGLPRSLSSNALYGNNNKLTLPFSSLAEEFMVTRAREVLQYRESKDPKVALAGIEVRTGRRWRAQEAVDQAESRLHHKELVGAVATGRAGLGTTPTTHLSRLKGKERRDQVQLEVRASIEEQRASQWVGLRQQGAWTRWEEAMARKISWPELWRAEPLRIRFLIQSVYDVLPSPSNLFLWGKVESPSCPLCQGRGTLEHILSSCPKALGEGRYRWRHDQVLKAIAESISSAMEYSKRLPLPGRGVRFVRAGEQPPPQPRAQPGLLATARDWQLRVDLGKQLKFPENIVETNLRPDIVLHSQSSKQVILLELTVPWEERMEEAYERKAGKYAELVEDCRRAGWRSRCLPIEVGGRGFAGKSLCKAFSLLGITGMRRRKAICAASEAAERASRWLWIQRDKPWTSASWTQAGN

SEQ ID NO: 1413 - protein, 1522 aa, synthetic construct
  source 1..1522: note = Description of Artificial Sequence: Synthetic polypeptide
MMDSRQLNTPKIRKYQNPKMTNDIMKSYNYAVLSDVTPQETTQTTTHLNVDIDNETTQPKQPLTKSGKPKSKPIAVSYKFKDATFIWDTTPQTNPPRDCTKLIDKTRPRKTIFKKSAFQSYLKKELSNETFVEVKTFLMATHKYRFKDENSRLLAYRIINRYVMETANEFKETEFDMARFAKFFTIPENWLKHLKPYSTATETSPADRIKVQKLVDLTCRYPFKTQEEQTSVANFLHFFTQRSIIGISRDYKFQKFIPFMARKNTRPETTSTMVTTSPTEQNRLPMVIITPLEEPKSEHRRPEKRGASNDTIVLSDEEFPLLKRRTLPTRKSKNPTGAGNVPTETECTDEVKFILNNEYQIECKECGKVWENVRNGLNHLRQKHDFPNRTDVMVSCVRCEVPIKGAECVNHIKNHKKDDKEESEAGSLVANTQDIPNESSLSQAAIEVYLRNILKMKENQERNIQYLEPSTANFLINRNLRAFYQNVKIEKLIGWEQVIWLIHWNKCHWIVYLANCDSKTSVILDSDNQMTLQQRCNIKAKFDKFLEGTFEEKTVLGTLERKVPQQPNNFDCGIYVIQYISDFLKDPQRIDYHTPDSKRIRKEIGELILEEMKNPASKIKNPNKEIQSLLQKFRLLQINVNDVFHWFAAEYQKSLPKIRTKRDGKLNKLSCSYQIQRLFGLAPKRAVKEIYFQETSTADLETRVLNEHFKKDESTMKECKIKNGNHYQDWITKAQIDNKEILEALKNSTDSAPGEDNIPLRQWIIWNNDGVLFDMFNYIKRTHDIPDMWKNYTTTLLIKPGKSQESNIPANWRPISILPTSYRIFMKVLNKRVLEWANRGELISKWQKAVDKANGCDEHSYVIQALIEKANRSYYKNEQCHLAFLDLADAFGSIPFQVIWHTLKNMGMDEETINLLKEIYKDCSTKYKCGKNESEKIKITKGVRQGCPLSMTLFSLCIQYLIQGIAEKKKGATIAGQEVCILAYADDLVIVANTAKDMQMLLTTIENLAKQADLIFKPAKCGYYRDPRDKKSMMKIYGKEISIVDEKNVYTYLGVRIGDTKKKDLNVRFEEVKKKTTAIFKSKLRSDQKLEAYNIFCQSKFVYILQGEDIAKTKIETYDEEIKKMIKEDILKLQDKSPFTDFVIYSPREKGGLGITKIIDEQTIQTINRTAKLLNSSHRAIRAIIYEELIQVANLRGEKEINTIEEALKWLEGTNKYKKNSNAKTTWITRVREAFQTLEKKHKIKVRFVPKENCIGYKIKCDTQEKIVELDNSKELSKSLHWMIKEAYYKEWKALKCQGYIISLKTSEFMEWKMPRGLPDPDWRFLTKVKANMLDVNMKQANQGGRLGSTKCRKCEDKESASHVINHCASGNWSRVEKHNQVQNELAKELTKRNISFEKDSIPKETKESLRPDLVIRLKDKIMIVDIKCPFDEESAIESARNKNIDKYRELAKEIQAKTGLQTTVSTFVVCSLGTWDKRNNELLRQMGIRYEESKEMRINMIQKAIHGSRKTYDHHRNFNNG

SEQ ID NO: 1414 - protein, 1870 aa, synthetic construct
  source 1..1870: note = Description of Artificial Sequence: Synthetic polypeptide
  VARIANT 4: note = Any amino acid
  VARIANT 151: note = Any amino acid
  VARIANT 153: note = Any amino acid
  VARIANT 154: note = Any amino acid
  VARIANT 187: note = Any amino acid
  VARIANT 202: note = Any amino acid
  VARIANT 245: note = Any amino acid
  VARIANT 250: note = Any amino acid
  VARIANT 1545: note = Any amino acid
  VARIANT 1547: note = Any amino acid
  VARIANT 1679: note = Any amino acid
  VARIANT 1774: note = Any amino acid
  VARIANT 1809: note = Any amino acid
MPLXISDCVHLVSAEGDTMNGRSTCGPLSRSSSVVSRSRSSPSPSVPPHPSPSIGPDTGLSAGIIGTSRGCSLWLPEVDNALSQWLRKGLERDHEVLVCGFEAAKPLSLSKARLLRKTPRNTGVVRHILEFDGRLVHTNCNETECVLSTLXSXXAVEVVRISLKCEPREPCEPKCVLSILCSDKIVXISFECETREPFPFFXDRKFREPIPFVFERMYDPRDPIPSFICWMYDLRQRMTPGTLPXNPLSXENKDSWGRPAVIKNEIRSMRSYLEENVKENRLNLLRRLRGGGEGKKMIRKLVAEKKSDTEAVCRILYPLDDRYECFVDGCETTSTMGYGSSDLKYMTTHIKKEHGVKVQWTYECSLCNKQAPFMGGAASKWVTAHMATKHTETVKLKLKPSISTTAKVAAKLDEIAVSLPKPRQVRVLRDPDEVKEKVAKPTLASTREEVKRNALRNMAPLVELSSQNQLTGAERPEETSEAMRLEECRTPEKIAELEGKIQTRTVTKKLSALKESMEKRTREEKVGKPSLAPIHEEVKKTARRSLAPLVEPSTFTHLTGASRLQAVRDAFSKANKDAAAKRRSSLAKPARLSEIMNTTFTKETVNETKEPVNDTDESIATIQPQVRVYRFNTWCLDHETTREAWLTGEVVDWFMGKVTEKKDQYRVFDSLVWSMYKFHGVGYVLDLMRDPLTYFLPICEHDHWVLLVIDEKGIWYGDSKGAEPCREIAKFIEETKRERRMFPVPVPLQRDGVNCGVHICLMVKSIVNGEPWYTEEEVKVFRRNVKRGLKEFGFELYSERIVYVGDDSIKVNDEHDDDVVFLSEETNNTTFTIEQAEDPAEEDAQHLESPVKPVKLMELKIPKIEIKKKEIRRKPKQQIEKKRKVPTGKPDELLVRVRLWLEREVQSYFDSGKRFQRLEWILDVLTAAIHKATAGDEQAIERIEKRSPPLEVEEGEMSTQTEPKKRERKEKESGCEMKASHKEMYFKNRSKAFNVIIGKDSKQCEIPIETLQKFFEGTTAETNVPAEVLKEMGSRLPKLEALDWMEANFIESEVSDAMKKTKDTAPGVDGLRYHHLKWFDPEYKMLTLLYNECKNHRKIPSHWKEAETILLYKGGDETRPDNWRPISLMPTIYKLYSSLWNRRIRSVGGVMSKCQRGFQEREGCNESIGILRTAIDVAKGKRRNLSVAWLDLTNAFGSVPHELIKSTLESYGFPEMVTEIVMDMYRGASIRIKSKNEKSEQIVIKSGVKQGDPISPTLFNMCLENVIRRHLDSASGHRCIKTKVKVLAFADDMAILAENRDQLQTELNKLDKECESLNLIFKPVKCASLIIERGMVNKNAEVVLRGKPIRNLDENGSYKYLGVHTGIATRVSTMQLLESVTKEMDLVNQSGMAPFQKLDCLKTFVLPKLTYMYANAIPKLTELKVFANLTMRMVKEIHEIPIKGSPLEYVQLPPSQGGLGVACPKITALITFLVNVMKKLWSSDSYIRKLYRDYLDEVAETETGMEEMTKEDIAKYLSGDVPIDKKAFGYNTFTRVRDVCNSLTXIXGAPLHKLKIVERDGDFAILVQATKEGMEKIFTCAQEKKLQQLLKAEVNTALAHRFFTEKPVKSAVMSVMRQYPQSNAFVKNGKNVSIAVHSWIHKARLNALHCNFNTYGENKSKVCRRCGKDVETQLHILQXCEYGLPKLINERHDAVLHVVRNLIRKGSKKDWKLKIDETVSSCNQLRPDIYMCSPDGKEVIMADVTCPYESGMQAMQESWNRKVTKYEGGFSHFXKMGKKFTVLPIVVGSLGTWWKPTTNSLVQLGIEKXTIRRVIPELCSMTMEYSKDVYWNHIFGDTFRKPPMRFGVEKPKGNSWKKEGSEPKGAASSD

SEQ ID NO: 1415 - protein, 2030 aa, synthetic construct
  source 1..2030: note = Description of Artificial Sequence: Synthetic polypeptide
  VARIANT 53: note = Any amino acid
  VARIANT 67: note = Any amino acid
  VARIANT 169: note = Any amino acid
  VARIANT 222: note = Any amino acid
  VARIANT 274: note = Any amino acid
  VARIANT 342: note = Any amino acid
  VARIANT 351: note = Any amino acid
  VARIANT 626: note = Any amino acid
  VARIANT 1031: note = Any amino acid
  VARIANT 1077: note = Any amino acid
  VARIANT 1239: note = Any amino acid
  VARIANT 1424: note = Any amino acid
  VARIANT 1437: note = Any amino acid
  VARIANT 1550: note = Any amino acid
  VARIANT 1726: note = Any amino acid
  VARIANT 1745: note = Any amino acid
WRRPAPKQTKNSSLHHLGHEVKRIARLKPGIFEFHAKPKNSSLHHLGHGVKRXARLKPGIFEFHAKXKNSSLHHLGHEVKRIARLKPGIFEFHAKPKNSSLHHLGHEVRRNSRLKPGIFGFYQKSKNSSLHHLGHEVRRIARLKPGILEFHAKNRIKSGLKVTFLSDLXAHAGALACSRFLASTLKTEHCRQKSFKPVGFLLHFLKNSSINEVASLRNVKKXFLEFFSGKPIGGMASFSRTKITFFKLCLKNFVLSAENPPIIRQKTNQNKASXVQIARGGHLSDCLPSQKMAGVLGRLFLSVQSTLSHRPFDTLLRSDDDKRGRKTIKLQFFIKENLVTPXVARDVKILXKQTKNNSGNSDSNSETKNFSKNKVSRQNGPLIGGGNHKKIGENQITRTLEIESKSDDNKVLVLRILYPTNDWYKCYSQWCQHKSLVGYGAHDLKYLTDHIKSTHSKKVEWSYQCSICDAKAEGTGTKAARWITAHMPKVHGIEATHRIKQNSEKTTNVKTANSLQEMALSLQKPKNGPKKVVMATSTTPEKKISELESKIQTREVAKQLSALKESAQKNQQGNKTKNVKSSLKTIAENTNETKKISARKSLINYLKPEDVLNHIPKEPKPASAKXGLQELTGAQRLQETRRRFMAGNRRDSIARRESLSLGKISNSFKIELKNAPEKTTLKKPAVTQKQNTSQNVSSSTVVKENKTGNDVITIDDTETVKRKINTWCLDHESTENAWMADDIIFWYIQKQIEISLDNKKFKVIDPLIWTTYRIYGVECVQDELVGFEKYFFPICENGHWVLLIIDDKRVWYSDSLADKPIEVIEDLINKLNRTQGKFNQTVPKQKDGFNCGVHVCLVAKSVITENFWYTEKDVNDFRKTVKLWLFSEGFELYSEPYKQIQNKNISVNSEKNQISDNEKNWGDKTQTVNESTLKERDEDIFLLRPHISVGVALKTEDEKNQKAENLKAPQKLKAIRRLKILKTCLKKLTAVKGKPEETERAAIPNLMAIKLKTPPKVEPVRRNPEKGENYXKSQPNKKRQIPTGKPDELVKKVREWFEIQFQAYFEDGKSFQRLEWXTGLLTAAIHKASAGDEQAVGKIIKRCPPLEIEEGEMATQTETKQKPKNQKSTKGANSSSSIREAYAENRARTFNKIIGKDDKCEIPIEKIEKFFENTTSNTNVPTETLARITSDLPKLEIGSWIEEEFREKEVAEALKKTKDTAPGVDGLRYHHLSWFDPKXKLLTKLYNECREHKKIPGHWKEAETVLLYKGGDETQAENWRPISLMPTICKLYSSLWNKRIKSVTGVLSKCQRGFQEREGCNESIAILRTAIEAAKGTKKSLSIAWLDLTNAFGSVPHESIEATLIAYGFPGMVTEVIKDMYNGASIRVKTKNEKSKQILIKSGVKQGDPISPTLFNICLESVIXRHLKSADGHKCIXSNIKLLAFADDMAILSDSKTKLQQELQKMDDDCTPLNLIFKPAKCASLIIEWGKVQKDQKIKLKGQFIRSLAEQDTYKYLGVQTGIETRVSAMQLMKKTVSELDKINCSALAXWQKLDAVKTFVLPKMTYMYANTVPKLSELKEFANITMRAIKVMQNIPVKGSPLEYVQLPIGKGGLGVACPKTTALITYLVSTMKKLWSTDDYIRKLHTDYLKMVAIKETKTKEVTLEDLASYLSDDKTVCKKAVGYNSFTRVREICKTLSKNKGALLSQLKIIAKDGKLAILVQAXKDGKTKIFTHDHVKTLQKXLKKEINEALLHRFTTEKRVKSEVVRVVQEYPQCNSFVRDGGKVSIGAHRFVHKARLNLLACNYNTWQDAATKQCRRCGYEKETQWHILSSCPKSMGGKITERHDSVLKTVKEMIQTGSLKNWKLKLDHELPGSTRLRPDIYLRSPNGSEIILGDVTIPYEHGIEAMQTAWQKKIEKYEEGFKYLRSTGKKLTIVPIVVGALGSWWKPTTDSLVSLGIDKNTVKRAIPEICSTVLEYSKNIYWNHIFGDSYQKVPMFFGGEKPKGQSWKKVKPPEGKTASNHEPPG

SEQ ID NO: 1416 - protein, 1719 aa, synthetic construct
  source 1..1719: note = Description of Artificial Sequence: Synthetic polypeptide
  VARIANT 138: note = Any amino acid
  VARIANT 766: note = Any amino acid
  VARIANT 797: note = Any amino acid
  VARIANT 966: note = Any amino acid
MTVFIDRGIGERGQMAVCSLHRYFSFSPFSPIPPYVNNGSFGENGCGTDKSLLPVIEVVVREVKINWSENILVVECLIMVKSGERVVVKRQNLEKVIQNLARINSTLFSNLGNQIFCVVPRIKDSTNKEQGYRKEKQXKFHVSFRSIKSQVPPYLRGGGDVMEDTEIRGIRKLEPEAQLDSSKPLICRVLYPTQGYMYKCFYPKCKGHSNGSTDLRSLKKHMVDKHFTNIEFAYKCATCMFLTTGKSATALKSIKAHMASHHKVTMEPGKKSLVQKLNARLEEAAPSLPMPRNRSKVIQLTPEKSISELEKKKQTRSVAKQLSTLKESAQKKEEEVKIAEVKKREPRLSIIPESNVRRSLAAGLEQCINPEQSVAQRIREKREEYAKASREAAAKRRSSLAMKPARLPDKENEITLQETKKIDDPIVIDLEKECILTTVLQVPRNQFNSWCLEHETTIDAWLTDEVIHMYMCTITENRKYFMAIDPVLWPVYVRNGAEDLLRRTSCPGTFFFPICESNHWVLLVIEHDVYWYLDPKGEEPKGNVEILLESMKRKRQYYEFPPPSQRDNVNCGVHVCLMAKSIVDECGYNWYSEEDVRSFRTNMKDILKSKGYELCPEPYNRQNLLKTEKQKEVILEEMIDSFVVEDDMTFTVHRDSDHGDDEVEHLKTIEQEPENEISEIENVEGSVDSVIPKLMEMRVQTPPVINEKRGKKRVSAKEKPRKQKEKEQKVPTGKPDELVKRVRVWFEKEFKSYVEDGKSFQRLEWXTDVLTAAIQKASAGDEKAVELIEKRCPPLEXEEGEMCTQTEKKKKPKSGKGNGGQESMKSLMASYSENRAKTYNRIIGKHSKQCEIPIAKVQKFFEGTTAETNVPKETLKEMCSRLPKVEVGTWIEGEFSESEVTEALKKTKDTAPGVDGLRYHHLKWFDPELKMLSQIYNECREHRKIPKHWKEAETILLYKGGDESKXDNWRPISLMPTIYKLYSSLWNRRIRAVKGVMSKCQRGFQEREGCNESIGILRTAIDVAKGKKRNIAVAWLDLTNAFGSVPHELIKETLESYGFPEIVVDVVEDMYRDASIRVTTRTEKSDQIMIKSGVKQGDPISPTLFNMCLESVIRRHLDRSVGHRCLKTKIKVLAFADDMAVLAESSEQLQKELTAMDADCSALNLLFKPAKCASLILEKGIVNRLNEVVLRGKPIRNLMENETYKYLGVQTGTETRVSIMDHITEVSREIDLVNMSQLAMHQKLDILKAFILPKMTYMYQNTTPKLSELKVFANLVMRSVKEFHNIPLKGSPLEYVQLPVGKGGLGVACPKNTALLTFLVTIMKKLWSSDSYIRKLYTDYLEEVAKVEIGKFEVNLNDLAEFLSDERAVDSKLFGFNAFTRVREVVRSLCKNKDSPLHSLKIIEREGKLAISVQATEESIEKIFTEDQEKKLMYLLKGELNTALQHRFFTQKVFKSEVMRVVQQHPQSNSFVRNGGKMSFSAQRFVHPGRLNQLPCNYNTWAKGRTKLCRRCAKNENETQSHILQVCDYSIGNIIKERHDAVLYKFRELIKRGSKGHWLERTDRTVPNTGSQLKPDLYLESPDGKHVILADVTVPYERGIEGMQKAWNEKINKYTDGYKEIFRRQGKSLVVLPLVVGSLGTWWKPTEESLIKLGVEKTTVRRIIPETCGMVAEYSKNCYWRHIYGEKYVQTPMINGGKKPEGNDWKKCEKGIEVPKVTN

SEQ ID NO: 1417 - protein, 1888 aa, synthetic construct
  source 1..1888: note = Description of Artificial Sequence: Synthetic polypeptide
MIPVLGTGGPEKLPLQSYVYCGNTAITDSFTPTAKTILKPEEQNLDIVLKNIAALNPENYSDLIRSLSKMEFRLDYPKEIENYWISEKLFSQSIASLPISLLVASMFSPEDRDLSTEPFHCNADGCNFHCDNCERMVEHIREHHNTDPMINTFETTEDTFRRITAIKIDKTGIEELNPLKYRCSYCDELFTEAEDHAIHMISHLTEKLSPDISFFFNDILRLYKTIDKPTVQNLFPETQVAIFDTLEETNRFRLIVGREAIETIEEAFPPSPPGTDRKPSIIITDTCQLRFVPCMDEPPKGDLGILTLLLRDFSAHNIPIKSLNNKELIADKDIDYSPDFVEGALANAEEHDTTNSQNNNGRYINSAEKLTEFLIQCEDYLTNIKTLEDLERFYTTIKDYRVNKEVIAEDTPIFVYFLVEEGKLPKPGLRCPLESYEGHEDKAFESLRKLCDHFKGEIAKTSFDPKVHTIDIWVEFLAQAYGTGTFVYKDENGNIDLDTHVFKCPYADCSYTNNDRSKLMDHMKTKKHAKNVYIERYGFFWGIVIEGVNRPKGIVYPTLKDIKEHACRKCPEAGCNTYVTELSDIKEHLKKKHKSTTAGVDGEIAHTDATYCWITKEELDALHAERARERAEQVDNTPVQQIINADNNEENNENQEDNGNNEEADALDPPNNTTETEDEAVHAVIINPPATEEEEVAIIAEARRNIPELQQAEERGCVTPKMTSLVRLKLLKGGGELFNKKLTPLATRYAATGNTEADKIKVDYLTLKCNAALREMIYTNNHSESKFMTAENGEDTAPPPRISEDTRDRIQKAANEIKGTLIKVVKHISHARCLKDSTRDDEHNKFVEMIAKIKNDLRDNKFEQYNIEEIFQGPISDQSILNIVNTEDNNEFIKKMDYINRILGTPQDASPYARKKLQACFADNPTKTLRNIILADKVPQQSLKPSEYLDYYGPQWANEAEGYENFLHHDYALPERYGQVFANDFLDFMTNESKIIEVIRNKNHLSAHGLDGIPNSVYMLFPVSAAKFLSILFRSIIISGHIPDCWKLSKTVMLFKKDDPSLAKNWRPIGITSCTYRIFMTLVNKALQMIPMFHAMQKGFVRGATLSEHIAVANEVLCQSTRTQSEMFQTAIDFTNAFGTVPHQLIFDSLEAKKVPDSIINLLKDLYKGARTAIYTRHAHSEIVPVRRGVIQGCPLSPILFNCCLDPLLYAVQRRHFEDGYRFQDKAGQYSIAIQAYADDVLVISPTHEGMQRILNTVDEFQKIAKLKVAPQKCVTLAKTSTAIQPFRIGPDEIPIKTSMDNITYLGIPISGTKTSRFAAATGILEKVKAQIRVVFASHLALSQKIIALRVFILPQLDFYMFHNVFRVNDLKATDQMIRGLIDKEAPTSNIPVSFFYMPKNKGGFGLVKLELRQPQLVLTKFARLWLSQQAETKAFFHTMAQEEKSFRKVVEDQENGFLGIKMENGKIVQKNERSKRTNCFITQAAKAADKLEVRFKEWDKGGIQVRGVGENATDWYRSKHIGQISPLIGRVIQQRQYEEFKKDETHSHTFCEPAALAESHDIMKRPQAVPNNLYSAAIALRTNTAPTPANMHFHNPEVLANCPLCGCQSCTLFHTLNMCRNRFSLYKWRHNIICDDIYQFIHDHYPGVTIKCSARITSDGYQTTGPELDDTVKDLLPDLVVYDEANKMIKIIEVTCPYGTDNNVGNSLDAAYDKKVNKYKSLAEQTERLFNWTTTLSIIVVSSLGVIPLRTKLDALRISPADHIQLLKRLSMHAIAASACIVFEKVPEFFGMRCRPLPGRVTAPNAAIPPNNNENNNDTDHGQENQQATSEEQPTNNGNAQEDNGQGEQINNSTEQTISVDQIIEEDAENNAIEQALDQPDEDEFLN

SEQ ID NO: 1418 - protein, 1734 aa, synthetic construct
  source 1..1734: note = Description of Artificial Sequence: Synthetic polypeptide
  VARIANT 5: note = Any amino acid
  VARIANT 8: note = Any amino acid
  VARIANT 11: note = Any amino acid
  VARIANT 17: note = Any amino acid
  VARIANT 22: note = Any amino acid
  VARIANT 51: note = Any amino acid
  VARIANT 59: note = Any amino acid
  VARIANT 62: note = Any amino acid
  VARIANT 73: note = Any amino acid
MRYHXSNXPAXRTSDNXWRSIXKDVRRPDPSTIEEKSRYNRSIGIPDSLKXRSSAVRSXSSXPPSGPQDVRLXNSPSLDDRRRLVDCETTLGSYREWTDKPMMGKMTYAAVTKRAPPRPQTGGARLSTNLLADEMEIKYRDTNDIRLVIDLPNPHLIKCPLCKSCISARGRGANALKYMKRHIADAHHLNADFVYKCSRCQEHEPENVCGAKWIVNHLKRVHGYTLEDAVSTAKPSTRQQIANAFNDSAPFIDARKTSDVPEKKSREAGLEKFLAPTKSEDTREKTPPSTRKSSESSEASIQSTIQETLSESSDTLTVQEIINISSEDEMDEEPPKRRVNVWALIHENGKDAWIDSDLMVIFLESRARGYESCSIIDPLNFICTDMSYLTTIVRRRMEEGYKKIIFPLCANDHWTLVTITGSTATFYDPMGNEPTETVKKMIDELDLEMQLAPSNSPRQRDSWNCGVFVMKMAEAYIKDTQWDLTDVDTDVKTFRRSLLTELKAKFNIFAEDIQTYRPPSRKALTRNSQSPVVVCHKCSRPATPIQDVSRMEVEEAPVLVPTPEEPPQEWTFVGKNRKRGVTSRTPNTSPEAKRPAFPPVPLKPSANRWHFPEEETEKMEVSSADEVKNSTPPKPPKIPNLLAMKIASPVPLKRGNPSKKHGKGHMMNTARKGPTKKEMPKGEPANLIVKIRSWFDEQLKMYKDEGSNLQRLTWLSDSLTAAIGKAFNGNKYIVDQIIKRNPPPLVEKGAMSTQTSRKRDEFKPRERMAQEPNEPLRIQYAKNRQKTFFKIIGKQSEQCTINIETVEQHFRKTLKAPVVSENAIKTVCGSIKKVLMPKTIEDPISSVEVKSILTKVKDTSPGTDGVKYSNLRWFDPEGERLAKLFEECRKHREIPSHWKEAETILLPKDCSDEEKKKPENWRPIALMATIYKLYSAVWSRRISGVQGVISPCQRGFQSLDGCNESIGILRMCIDTASVLNRNLSCSWLDLTNAFGSVPHELIRRSLESFGYPQSVIQIVTDMYKGATMKVKTADQKTQSIKIEAGVKQGDPISPTLFNICLEGIIRMHQMREKGYDCVGHKVRCLAFADDLAILTNNKDEMQEVIDKLDADCRSVSLIFKPRKCASLTIVRGAVDKYAKIRINGDAIRTMADRDTYRYLGVKTGVGGRASETEALIQVVKELQKVHETDLAPHQKLDILKTFLLPRLQHLYRNATPKLSELREFENVVMKSVKRYHNIPIKGSPVEYVQIPVKKGGLGVLSPRLTCLITFLTSTLCKLWSDDPFISSIHKDALSRITVKAMGLTTQSATIKETCEYLNTRKAVTKGGYSLFCRMNESLRTLSVIQGAPLKSMEFIPVNNEIGIAVQATKDSEIKVFTKADSLKLMSKLKDLVRSAMLKRFLEEKSVKSRVTQVLQHHPQSNRFVRDGRNCSIAAQRFVHPARLNLLSCNANTYDVNHPKGCRRCQADFESQQHILQNCHYSLAGGITQRHDRVMNRILQEIGNGRKAHYKIMVDMETGATRERPDIIMEERDGPEVLLADVTVPYENGVQAVERAWDKKIEKYKHFLDYYRKIGKKATILPLVVGSLGTYWPDTSHSLKMLGLSDGQIRNVIPEICQIALESSKNIYWKHILGDSYKTVEGLFCQRNNKEVRFEGKGEKHHVSQRFQPLKCEKVRTMKSTKEEGRSRSNAKKGPNWRRSKSESDGRSVSKGRYWRDPSNKPPHSKMTQSALAKR

SEQ ID NO: 1419 - protein, 1723 aa, synthetic construct
  source 1..1723: note = Description of Artificial Sequence: Synthetic polypeptide
  VARIANT 255: note = Any amino acid
  VARIANT 658: note = Any amino acid
  VARIANT 1425: note = Any amino acid
  VARIANT 1494: note = Any amino acid
MTNVYLKPVNDNQTNKTGDNSRNTMSNSQCEMTWKPVARTYAQAASTNPADDKTVTVLGCKYNLLKLGNTPQTSKRSPPKPSRGGARISSVYTLTDELEITHREEGKITFAIDLPNKNNILCPLCRECTQTRGRGSSFTKHMKLHVKEKHQLDATFIYKCSMCNEYEPEKKCGTKWIQTHLQKVHNYKYDESAIVVPVPPNTRQQIANELNNAAPFVDIRKPKAAAVEEKKTENGALLKFLTKSNKDDQVKSPSXDIPDAESPEKETQALTIDPKGNNSPSKSSIRSSQSSASSVCQEIQEIITLSEDEDPKGARPKPGINVWSLINETGKDAYIDTDIMMAFLKMRVENCDSVNIIDPLNYQFPARVDLVPLIQRNLEDGKKRVVFPICADEHWTLLTISNGIAAFYDPTGSRMSSYIEELVNELGLIIPKEQDEQPRQRDSYNCGVFVMKMAEAFIQDTEWEMEEVEEDVKNFRRNLLEELKPNYEIFAEKIKYYNSPGKSFAQSRPTSRSSQCAVCPTCSRSATPMMDVGNMEVDPVPQQQETPKSREPEQDEGWKVVGKARKRGVVTERSPNISPEAKRQFTGPEIKVVSPGKFHPLVGETEEMEVTCDSPPTKEPTTEPKVTPSLPAMKIASPEVTKKQTSKKKGKYGKKKQXTKKAQPPKGEPTKKAQPKGEPAKLIEQVRTWFDKQMKSYQEQGSNIQTLTWIADSLTAAIFKANSGNKYLVDKITARCPPPLLNEGEMATQTSRRTEAVKPKDRFVKESNEPLRIQYAKNRAKTFNVIIGKHSARCEIDINVVENHFRQTLKAQPVTEEALNTVCSGIKKAKVDPSIEGPISSGEVKAILAKIKDTSPGTDGVKYSDLKWFDPEGERLALLFDECRQHGKIPSHWKEAETVLLPKDCTEEERKKPENWRPISLMATVYKLYSSVWNRRISSVKGVISDCQRGFQAIDGCNESIGILRMCIDTATVLNRNLSCSWLDLTNAFGSVPHELIRRSLAAFGYPESVINIISDMYNGSSMRVKTAEQKTQNIMIEAGVKQGDPISPTLFNICLEGIIRRHQTRKTGYNCVGNDVRCLAFADDLAILTNNQDEMQDVLNQLDKDCRSVALIFKPKKCASLTIKKGSVDQYARIKIHGMPIRTMSDGDTYKYLGVQTGNGGRASESESLTQIAAELQMVHDTDLAPNQKLDVLKAFILPRLQHMYRNATPKLTELKEFENTVMKSVKMYHNIPIKGSPLEYVQIPVKNGGLGVMSPRFTCLITFLASTLFKLWSDDEYISSIHKKALSRITAKVMGLKTQKATLQEQCEYLNTKKAITKGGYSLFSRMNEAIRTLSVNLGAPLKSMQFIPENGEIALEVQASENSQIKVFSKADSMKLVTKLKDLVKSAMLKNFLENKKVKSKVVQVLQHHPQSNKFVNDGKNXSISSQKFVHPARLSQLVCNGNSYSKDLPKNCRWCGYECESQAHILQHCTYSLSSGITQRHDRVLNRILXEVIKGRKNNDYYDIMVDTEPGPTRERPDIIMIQKDGPEVLLADVTVPYENGVVAIEAAWDWKMEKYSHFIDYFARLGKRAVILPLVVGSLGTYWPDTSNSLRMLGLSDGQIRNLIPDISMIALESSKQIYWRHIFGDSYRIVSDLYCRKDQQEIRFGDEPMENVQVSDRFQPFKTREREKKSEEEKKRRSKSKKGKTWRGSKKQTDSRQSGKSNQNQGFQRSVGQGVSR

SEQ ID NO: 1420 - protein, 2017 aa, synthetic construct
  source 1..2017: note = Description of Artificial Sequence: Synthetic polypeptide
MTKTEWSWRHRSRSRSVGIVVKIDTSDYANVRVHVAADLSNEDGHTSHNNGIILPIPMKPSVDRFCQIQYPPRGYYVPHPQSQKGHDAKPSRHWNEEAQPPYYHNNNHGRRGRSAKPSGRRPPRKPILQEESLAAHPQIPGDTASAVPLYSDVVNNENKSQGKPPQGSHRRSGRPGTKPSVPVGEAEQETNSRPIAPEPIVKFKHDKHGWTTVQGSHSSGRPVPKPSVPVVSEANRFQLLQEGDFPPLTTSESSQEEIKVPNYQRIVSPIPLPSEEDSKLPTKSNYRAPKGRKSRNYKKPQQQNPKKYQQRLPYQPKVNNAPTDRMAPEQLKGGGGKTAHNDIEEMEIEEDTDEKIIQVKRIKIVNKLTPHHFVCMMTYPTDNIYRCFVKGCTATSQGGWGAEDLKYLTVHIRQEHKIKVEWTYECGICGDLSGGAGKHISKWIKPHMRKKHNRDAPTNFKMGSRSSGKPKITELLEESAPSCSNPRRKTLNQKKTAIITQVTPEKLKTGYQTRSVTKALSVLKESRQKELEVLREEEKANAKQKSKLHPFFTKAPHIDGVKPTVRRELSKMITPGGEHKGTKIPMVHTKRGLIQKINRKAKKAKPMHLDESTIIEASQLDVITIDDDDEDDNMTPMRRRFNTWCLDHETTQEAWLTDDVINWYLKDLCFGNEQYMLVDPLVWLIYKMGGMAGVEQRFKSKKTCLFPICEADHWILLVFDETNLCYANSLGSQPNGQVKNFIQQLNRKLCSFEKEVPLQKDSVNCGVHVCLIAKSIVNGQFWYDDSDVRTFRTNAKAALKAQGYELFSEAPKQIENPDSSHREDIKENSMEMCSESLMIVATPQRSEAPMELVDTEPSDLESPKSDRVVYEDCITALSDVSEPRMTPEKSETPEVPVVEERDLDWPKLESPKSDRVVYEDCITDLSDVSEQRMTPEKCETPEAPLVVECVELERLPKDLPVTDRSTVVAIPEAVKLEEKSEVVIPRLMELSYTVPPEPSPVVEYTQPYTHTHTKPKVKATCQMGKKRKVPTGKPDELIQIVRQWFEKEFNDYVTEGRNFQRLEWLTNLLTAAIQKASAGDEETIEKIRKRCPPPEVRENEMSTQTSQRQKPTTTNQKKRSRNTTQSDTQANTYWRNRAKTYNQIIGQDFKQCDIPIAILEEFYKKTTSVTNVPQETLVKVTSRLPRLDIGKWIEDPFTEQEVFGALKKTKDTAPGTDGLRYYHLQWFDPDCKMLSSIYNECQHHLKIPAQWKEAETILLFKSGDESKPDNWRPISLMPTIYKLYSSLWNRRIRTVKGIMSKCQRGFQEREGCNESIGILRSAIDVAKGKRSHLSVAWLDLTNAFGSVPHELIESTLSAYGFPEMVVHIVKDMYKDASIRVKNRTEKSEQIMIKSGVKQGDPISPTLFNMCLETVIRRHLKESSGHKCIDTRIKLLAFADDMAVLAESKEQLQKELTEMDEDCTPLNLIFKPAKCASLIIEFGKVRTHEQIMLKREPIRNLNDDGTYKYLGVHTGADARTSEEELIISVTKEVDLVNRSALTPPQKLDCLKTFTLPKMTYMYANAIPKLTELSAFANMVMRGVKIIHYIPVRGSPLEYIQIPTGKGGLGVPCPRITALITFLVSTMKKLWSDDEYIRKLYNSYLKKVVEAETGIVEVSTKDLAEYLSNKVPSRKHEFGYNCYSRIREVCNGLALNQAAPLYKLEFIEQDNELAVVVQPTEESKERIFTKDHVKKLQSLLKASVNDALLHRFLTTKPVKSEVVQVLQQHPQSNSFVRMGGKVSISVHVWIHRSRLNQLTCNYNIFDPKQPKNCRRCGYKNETQWHILQDCTYGWAKLIRERHDAVHHKVVTMICAGAKKNWGRKIDQELPGFTSLRPDICLTSPDGKEVIFADVCVPYSRTRNIEFAWKEKIRKYTEGYSHLVAQGIKVTVLPIAIGSLGTWWTPTNESLYQLGISKSDIRSAIPLLCSTVMEYSKNAYWNHIYGNSYTSVPLRYGHQKPDGDDWKKELSCEPVLALQQ

SEQ ID NO: 1421 - protein, 1560 aa, synthetic construct
  source 1..1560: note = Description of Artificial Sequence: Synthetic polypeptide
  VARIANT 326: note = Any amino acid
  VARIANT 367: note = Any amino acid
  VARIANT 588: note = Any amino acid
  VARIANT 755: note = Any amino acid
  VARIANT 909: note = Any amino acid
  VARIANT 1171: note = Any amino acid
  VARIANT 1315: note = Any amino acid
  VARIANT 1389: note = Any amino acid
MNVDLDATIKSIGMNTKETTYPNSQLRVETTPCTSTTIMHASCNTTSTISYSPLPSAVSLPESPASSITITTTDDNCDIIETPYPLPQTNGDLSEILKDIEANKDTTMSNKVLDCDSDSGDDRDMIIENDRESDMDLFSQSLLNTNQSDERREKNLTENAPTEITTEKSYFDIISKASDNTTSKKLLNVKNELTAGLPPMPPVTNTAKFIRNVRPEDIADPTLYRLDSRGKLGCRTQYKKPGCGDIAVYDYEAIVEHAAFIHTIPFNEQNNVDCQPCHPKKGKDVHTIVLIKYADIFNHIEAHSHVVQTAITDNMKTYLRLTKENXFYCSYRNNKKKNKCKKAFNLESNMMDITEHMKTHTGYSFDXNLNILCYCGIWKPFTELIAHIKTEHLQEYINSIPNKENIHNTTTIVSPLNFAGILASGETQNIPDEEIIKPRDLPENLAFNRNIENELSWSQHLVKAYIFSYAVKTSTIFINPYTCNALIQCNYKTFFETFPFKDFAKWNEIVLPIHNNTSSWSFFFLNKKKRVAMIIDPTADDSHTLHFELATDILRTILNVQNIFEDLNFPLTEVEYPVCHEANLSAFXVCHFLKCLMSDLPIDIPDIDHMKETMRPIIRKYNCAKFPESDVRNYRVLIEDLIYQLNLDTITCEEILCEIERINGRLNPKRYFKESKPKTDIIHLQKKKSAELLCVKRLKFQISQKTEIGKIWENDDVDHRPPMARFLKTFASQDCPVSNTSSINLPYYMDTDTDXCTDCENLSHIMKNLDSSAPGMDLITGGDWKKISPKHELITAICNCILRNKVCPEKWKLFRTVLILKPGKMSESFRANSWRPLAIMDTAYRIFTTLLNNRLLQWIRNGNLISPNQKAIGIPDGCAEHNATLHFAIDRAKRCKTELHIVWLDIADXFGSLPHDLIWYTLANMGLKNETLTLIKELYKDVKTIFDCQGTLSEPVPITKGVKQGCPLSMTLFCLSIDYILKSILTNYPFLLHDLNISILAYADDLVLLSDSYLEIKKSLESTVELAAFANLKFKPSKSGYLSINNVNSDILKLHLYNEEIPTISENNKYRYLGVDFSYKRNQDVDGRLGSALALTRSLFKSYLHPAQKLNAYKTFIHSKLIFSLRNCVIGHRILDCDRNRVTQGREKQLGFDQEIKALLKTMIGDKFQAXNNYFPYTHCKLGGLGITSAIDEYLIQSITGITRLFHSSNLSFRKMLITELAHSRGGKNFEAGLKWLNCEVNKAFPNTSFFVKFQKSALALKRKFCICVNLKFVEDNFSLEMTYKKRTSYVNHQNLSTLSKELHDFVGLYYAEQXCQMRVQGHIATAIGDSITAKYLIASDILNDAQYYFLVRARNNLLNLNYNAYRLKYNIGTKCRLCHLDEETQAHXFNHCRAKPNARRVKHENVLVSIVAFLEKIGFEIDVEKSPKYISIPTKLKPDMVIRSKRNKDIHVLDLKVPYDSGEGFEKAREDNYVKYKDLAIEIGKAFNQKATISAVVIGCLGTWDKKNNAALSKIGLTKTEIISLARIACPNAVIACYHIYREHVSFTKSAMALPFSLA

SEQ ID NO: 1422 - protein, 1171 aa, synthetic construct
  source 1..1171: note = Description of Artificial Sequence: Synthetic polypeptide
TTGRNLGQWSCYSRSIQQSNYSFKLSSTEVGELVEQSPAPLQSPQFSNNYNNLNINNNLYYSLNTFNQSNNLCCLVNIEFFPTQHLLGDIVNSGCINYMNNYNNFDNINLYINSNVLSYNNYNHSFLASPYTTNITEHADINMHVQEVNMQQDNNTQHAITQQVSLQATSLQHTLDEMIVQFNTAVRLKKKHKVAKIFRGHNHRKDLPTLPAREQYKTKPKLAIREVLHRKTTATSSPSENAIKAFFSSYSRPAELFTGQELLESSWFPVHPEDDFEFRIPGRDQIAKYIKFASKSAAGLDWITYEDIKLGDPSGEILQPIFEYIVQNNICPSEGKASRTIMIPKPGKSDYSDPSSWRPITITSAVYRLLMKYLTWELYNWILLNQMLSRSQKSLGKFEGCHDHNAMLNMLIQDVRRQTNPSNPINKNKRLYIVFLDFTNAFGSVPLDTLMYVPQRFGLGTSALTLIKNLYLDNYTNVTCGESKIENVKLNKGVKQGCPLSMLLFNIFINIIIRAIEAMPDVHGYPLGDMDIRILAYADDIALISDSHKDLQEMVYKAEYIGRILGLLFNPSKCALMDIPHDKKRTPPILVNGEMIKCVGKADPYKYLGTFRSWFRKLDIKELLQMMMDETKLITESNLHPHQKIHAYETFIHSQLPFHLRHSRIPFSDFITNRKTNKTTNNSNDSEKSIQKAYDPESGQLFLNTFALPSGCAKDFFYITKDAGGPQLTSGLDEYLIQSIMYIFRLLGSEDPTLNSAIKHDLISHLNLKGFVNINFSQAISIFNSNFTDRTDHFSHLSRTEWARLQLARKKLKSTLAIQTNVCLINGHLVLTLSLENNVLLIDSKEKGDVKKIHASLMGFLRLAHLIRLQKHGWSKLLFSATTHHEILNKRILNGHVPYKIWYFIHRARLGLLPTKLFSVSNLCRKCGGKKETMSHALVNCPMMQTLINERHDALEISLVQILSSKFQGTVIRQKTYVNELRPDITMESDTQYYLVEVKCPFDTKMSFELRTQQTTDKYNIIIEILEDVHPGKEVRLVTFIVGTLGSWGPQNSDFLRDLGFSKDEIDQVKTRLMLQNINSSCEQWKRFVQYAPTITPGPIPDAESEDDQGTSDNGPTAATVQGPVIGDEEEELQIYDSGLDESSDDEPDPDDAELLFTIDIEQYLNSVITD

SEQ ID NO: 1423 - protein, 1591 aa, synthetic construct
  source 1..1591: note = Description of Artificial Sequence: Synthetic polypeptide
  VARIANT 6: note = Any amino acid
  VARIANT 16: note = Any amino acid
  VARIANT 23: note = Any amino acid
  VARIANT 25: note = Any amino acid
  VARIANT 26: note = Any amino acid
  VARIANT 34: note = Any amino acid
  VARIANT 35: note = Any amino acid
  VARIANT 37: note = Any amino acid
  VARIANT 38: note = Any amino acid
  VARIANT 40: note = Any amino acid
  VARIANT 41: note = Any amino acid
  VARIANT 54: note = Any amino acid
  VARIANT 59: note = Any amino acid
  VARIANT 68: note = Any amino acid
  VARIANT 72: note = Any amino acid
  VARIANT 76: note = Any amino acid
  VARIANT 78: note = Any amino acid
  VARIANT 79: note = Any amino acid
  VARIANT 81: note = Any amino acid
  VARIANT 90: note = Any amino acid
  VARIANT 93: note = Any amino acid
  VARIANT 108: note = Any amino acid
  VARIANT 111: note = Any amino acid
  VARIANT 112: note = Any amino acid
  VARIANT 125: note = Any amino acid
  VARIANT 178: note = Any amino acid
  VARIANT 241: note = Any amino acid
  VARIANT 243: note = Any amino acid
  VARIANT 279: note = Any amino acid
  VARIANT 311: note = Any amino acid
  VARIANT 324: note = Any amino acid
  VARIANT 364: note = Any amino acid
  VARIANT 366: note = Any amino acid
  VARIANT 408: note = Any amino acid
  VARIANT 478: note = Any amino acid
MESPAXIFEKIDAALXIYSAAAXLXXNSLSLSPXXAXXSXXAAPASSTPQKTQXKPIPXTTLGASRKXRTTXKDEXIXXWXKKAPVDTSXGRXSTRRTALRDLTSRSXNIXXALQEEDPRRTPPXSRDQDAERRPAAPEKAATRGAPPTIQDQDADRCPAGRDATGGAPRRPRTRMLXAAPLGRMPPEEPPPTTRDQDADRRPAAPERDAPEGTTSSTPDPETTYHPPVRRRAAPRGTHSXAXDLDAARCPSGQRDIVASESSTPPGATSPPQASLPDXEESPAESAGTTEVRPTEGEAGEDDCIYLQYPXPTGLLLCPFCLPXHGVQTLGALSKHVRKAHNKRIAFRCSRCDAPFETQKKCKXHXATCKGPLTTAKVNPTDTLRVPTPTPTDGPASAPQPASPEPQXVRGDQPPTEGSATPASRTDDATKRTSPASRIPTLDPAVRGITATSQVSDLTRCLSDLIKTIRHNTDTRRXSAPPQVTSCRPAVGATSTAPQAARRDPANGGASRSPQIPRPDPAPGRPNTSSKVTQRDSDRQKPHAPPRTPQPDTTRRRTRTIPSASKHDRAPTKPNTGVSRTPLPPGRSSAASETPRAAPPPPHQDPRLKTHLNTAPQSEGQQGHRLSPQHLNPRRQRSRRNDGREQRVATPWQSAWMEELAKAEDFETFDTLMDRLTAELSAEITARRREPQEASRATRRFPAPTRNNTAREGRRGDVGRRYDPAAASRIQKLYRTNRTKAMREILDGTSSYCAIQPERLYSYFKDVFDHEAQTNLQRPECLLPLPRINLTEDLERDFSPQEVQARLMRTKNTAPGKDGIRYHLLKKRDPGCLVLAAIFTKCKQFHRVPRSWKKSMTVLIHKKGERDDPGNWRPISLCSTIYKLYASCLAARITDWSVCGGAVSSVQKGFMSCEGCYEHNFLLQTAIQEARRSKRQCAVAWLDLTNAFGSIPHHHIFATLGEFGMPETFIQILRDLYKDCTTTIRATDGETDAIPIRRGVKQGCPLSPIIFNLAMEPLIRAISSGPTGFDLHGKKISILAYADDLALVADSSESLQQMLDVTSQAAEWMGLRFNPKKCASLHVDGGARALVRPSRFLIQGEPMASLEEGEVYQHLGTPTGVRVRQTPEDTIAEILRDAAQIDSSLLAPWQKINALNTFLIPRISFVLRGSAVAKVPLNKADSTIRQLVKKWLYLPQRASTDIIYISHRQGGANVPRMGDLCDVAVMTHAFRLLTCPDPTVRSIAQEAVRDVVRKRIARAPSEQDIATYLSGSLEAEFGREGGDLSSLWSRARNASRRLGKRIGCCWKWCEERRELGILVPRIKTPDHTIVTPTARAMLERTLKDAIRCHYAENLKRKPDQGKVFEVSSKWDASNHFLPGGSFTRFADWRFVHRARLNCVPLNGAIRHGNRDKRCRKCGYANETLPHVLCGCKQHSGAWRHRHNAIQNRLVKAIPPSLGKITLDSAIPGTDSRLRPDIVVTDAEKKKVLMVDVTVPFENRSPAFHEARARKALKYTPLAETLRAQGYEVQIHALIVGALGSWDPHNEPVLRACGVGRRYARLMRQLMVSDTIRWSRDIYTEHITGHRQYHTE

SEQ ID NO: 1424 - protein, 1352 aa, synthetic construct
  source 1..1352: note = Description of Artificial Sequence: Synthetic polypeptide
MAAKSVACPHDGCANKYASEASLRRHIKNKHATDEEGDETSHSCPHCHRPFSTARGLSVHIGKSHRQAPPEPTRPPPAPAPADPGLDPDPGPTVTPPSRDDEDREEPDDDPVEIADLSCPHCAQALPSAHGLANHLRACKDHRVPAPGAPRSGPPSSRYWTAVEHHRYVEAMARFADHPDLLARAAAHIGTRTYKQVDSHRTKVIAAEREGRPVRTLDPTMDWRMRPYCASTTARWLAEQGRSPVAPRSPCPEPHAPPPAAALLYIPATPPAPTPRAPVAPPKLAPPAESTVPATPDGNPEAPAPPFSAPGPPTPKALPPPPPSRRNLRPHLVPKDAWQGVADAVAPAASRLLRTPLAHLSTEQWATFEAALAGLEATLHHAARSAEAVPTRCASRAREDAERQLREARKTREIFGKAAALYAAGKDPTATIERIPPEVRLHLPTPGSAEWPARAAAARRVIRRAVARADRLRKRMGILDSDRDLQRLFNANQKKAVRQILAPSTKAPRCQLDPAAVEEAYIQTLAKPPPIDPSPPWKNSVQWPRPPTAADDGGSPFSVAEVRAQLRRLPNGSAPGIDGIPYEAYKRTKLDATLAHVFEVVRLNARLPARWDVARTVLLYKKGDPNDTGNWRPISLQVTIYKIFTAALSKRLISWAGKHNTFSASQKGFLPAEGCHEHAFVLRSVLDDARRHKQNVYLAWYDLRNAFGSVSHDLIAWCAAMLGLPRYLRDAIGAIYRHSALFVQVGDQETTGVIPMRCGVKQGCPLSPLLFNLCVEPALRCLRRTTGYKFYGTSITVEGQAYADDLLTAAPSAYHAARQVATIEEWANWAGVSFVVQALSLDAPAGKCAALAINFEGGLMHSIDPALKVQGAAIPAMSRNNVYRYLGVHVGLTDALGQANELLEKASRDARTICASGLEPWQKVVAIKTFILSRLPFFFHNGKIQRGRCQQFDRELRENLRAALRLPVCTTNAFFHSRVASGGLGILPIAEEQQVYLAAHVFKLLTSPDLSIRAIARHQLAEVTHARHTTPVQDGEASPFFGWLMRGQEVASTTPSGDVSSIWFAAAGAYSRMGWSVRDALHPTLTVGPGVQFEGRFQRANVIPALRASAFSRHAVEWSALRTQGRAAAYQHAVHPATHHWVHNSAGLTTKEYRFAIKCRLGLLPTRAAPHHRNGPTACRACSYARETANHVLGHCPATKAEVIARHNRICRALAQAAEASWTSVLEDVPIPGVDSPLRPDIYCSRPGQCAIIEVAVSYEDAFNASMEGRAKQKTDKYAGLAATVEEQLRLQTRHAAFVVGFSGVVLPASVTATATSLDLPPKTWNVLLKRCVAASIKGSYTAWRRFRRSTP

SEQ ID NO: 1425 - protein, 2004 aa, synthetic construct
  source 1..2004: note = Description of Artificial Sequence: Synthetic polypeptide
  VARIANT 148: note = Any amino acid
  VARIANT 324: note = Any amino acid
  VARIANT 759: note = Any amino acid
  VARIANT 912: note = Any amino acid
  VARIANT 1400: note = Any amino acid
VCSVRGCRREDSRRFYKFKFPLNFVKVPKTIVIGSAFQKSSVSARSQNHSRSTRVPKTRQPRTSNTIGRYTAASANNYLTVIITGNYTVFAQWICYRECTWLLSKFVNFFLTIIGYFFQLRLVVIYEGPVILDTFSNCGSSLFMRGQXSKALLVRLNRSALAMADPQVHYIDYPLPPRVKCVKCFGAEGAGKVKGEYSDPPHLAKHLKKCHPGDTLNYKCSICDLRGTGKYPLRDVKAHYAECHVSPAVDAAGPSTRGSLGECSGAGQPTASRAAKATTRLAETVGGTDKRRAATSGSRQLTLPFAATPSPSTAAGEARAPRSXSTTPTSRSPSYAAVTAGPPSMRSTTTSTTARSKTVAKGAAPNTTTTTTARRSGEAAATRKPPTTATVSKPRVLSVETVRLPVDDIQRAGVQNAAKPARAPSRPPQRTSPEAGGPRTTGAKEKCGEGAYKKLPANSGNPISTRTRRATSVPVEKSEGTARRERVSPHPPPKGIDIILSSTSEEEGTPYQPGGVGRLRLRRKKVTGPPPKMTPREGVVTRARRSTSAPVEKSALDARLTALDRTSSRATGNPTSQIAGGLYTSRGQPERTPPARLPSLSPTTRGSPSGSLGEIRTPISPATSLPATLTTCTVTTTTCGSPITSTGFTGGVGRLITPPSLPQTNILPTIGEEGTSPCVAVVTTHPRPTGEDAPCEAPQPVSDHQRQSIGEPRRDTDTHLACDVATGNAHHLHGDDDHLWKPHNIHGLHRWRGEADNTXEPPPNEHPPDHRGGRNVTVRGGRHHPSLGGRSTSPLILPRPTTPEPERGQEERRLEGAAQPPTTPVVEGDNQWDGQWTVSVRRRARRQQLNDTSPSNSESPPTAGPSRSPRIAPLSALIAASTSRHETSLNLNCTNGNICMDRTPPRNILPVXAERRRETSPQDRVEGDIGYGAGKVSAEHPSAPVNVRGVMSRGRATASSIVPPRANRGEGGRQHHSRRRPDAPVGQPSRDHPAPATVARQRRRERVAARDALLDRAKDVATIADLEAFAASVAAFFGEDASATGAAARARDRSVRSREAGARRGVKGGERPEREGAGRPGSAPADPGASGEARGDWVREAKRLQALYRANRRKAVREVLQGPADQCQVPKRQVQEYFERLYSGGEDLAGAGVEAERPDPSSPREVSAVLGPLAEREVDRRLRRMNNSAPGPDGVSYRDLRGADRGARLLTALYNICLRLEAVPASWKTSNTVLIHKKGDRGMLENWRPLALGDTVPKLFAALLADRLTDWAVTRGKLCSAQKGFLRDEGCYEHNFVLQEVLTHAKRSKRQAVVAWLDLSNAFGSIPHATIRRALIRSAVPRGLIAIWDSMYDGCTTRVRTAEGHTAPIPIRSGVRQGCPLSPIIFNLAIDSVVRVAAEXNDGYSLHGNTWSALAYADDIALLAQTPEGMERMLASVEAEAASVGLRFNPAKCATLHVGAGNGGRVLPTSFQIQGETINPLAQGESYTHLGVPTGFSVDQTPYAAVGDIVSDLRAVDRSLLAPWQKIEMLGTFILSRLDFLLRGARVFKGPLTAVDLNIRRHVKSWLNLPQRASAEGVYMPPRWGGCGLLPLSDLADVLTVAHAYRMLTVRDGAVRELAWESLRGVVGRRIGHAPSCEDIASFLSGSLDGRMRGGGEASLWSSARNAALRQSERLSLRWRWVEATEEMTLECRGPRGAAIKIPPEARGQVVNRLRSAVAEHYASRLLSKPDQGKVFEVSSRSRVSNHFIRGGSFTRFADWRFIHKARLDVLPLNGARRWEANDKRCRRCGEVSETLPHVLCHCGIHSAAIQLRHDAVLHRLWKATRLPGVVRVNQRVEGVSDELGALRPDLVVRHEPSKSVVICDVTVPFENRWTAFEDARARKIAKYSPLAEELQRRGYRVVVTAFVVGALGSWDPRNEAVLRLLRVGNQYAAMMRRLIVSDTIRWSRDIYVEHVSGTRQYLAPSRPSGDLATPPRAVRRRWLAEERSAQDAARRGSDSVSVA

SEQ ID NO: 1426 - protein, 1019 aa, synthetic construct
  source 1..1019: note = Description of Artificial Sequence: Synthetic polypeptide
  VARIANT 52: note = Any amino acid
  VARIANT 652: note = Any amino acid
CHHAGLRPGTPNRTRRPDQTAPLPDPRGHPMPPNRRGSRSRPEEPSRREPPXPRACQGLRVWSPPQQRMPTPWQTLWLEELSRATTFKAFEASVARLTEELSAAARPGQPRGGNNRPATRRDHRLQPQRRPRRQRYDPAAASRIQKLYRANRPKAVREILEGPSAFCQVPRETLFNYFSRVFNPPAEAAAPRPATVEALTPVPPAEGFEDAFTPQEVEARLKRTRDTAPGRDGIRYSLLKKRDPGCLVLSVLFNRCREFRRTPTTWKRAMTVLIHKKGDPTDPGNWRPIALCSTVAKLYASCLAARITDWAVTGGAVSRSQKGFMSTEGCYEHNFTLQMALDNARRTRKQCAVAWLDISNAFGSVPHRHIFGTLRELGLPDGVIDLVRELYHGCTTTVRATDGETAEIPIRSGVRQGCPLSPIIFNLAMEPLLRAVAGGPGGLDLYGQKLSVLAYADDLVLLAPDATQLQQMLDVTSEAARWMGLRFNVAKCASLHIDGRQKSRVLDSTLTIQGQAMRHLRDGEAYCHLGTPTGHRAKQTPEETINGIVQDAHKLDSSLLAPWQKIDAVNTFLIPRVAFVLRGSAVPKTPLKKADAEIRRLLKKWLHLPLRASNEVLHIPYRQGGANVPRMGDLCDIAVVTHAFRLLTCPDXTVSIIAASALEETARKRIGRQPTRRDLATFLSGSLEGEFSRDGGDFASLWSRARNATRRLGKRIGCAWTWTEERRELGVSLQPAPHADRVTVTPRTRTFLERFLKDAVRNKYAGDLRAKPDQGKVFDVTSKWDSSNHFMPSGSFTRFADWRFLHRARLNCLPLNGAVRFGHRDKRCRRCGYVAETLPHVLCSCKPHARAWQLCHNAVQDRLVRAIPAAAGEISVNRTVPGCESQMRPDIVITNEEAKKVVIVDVTIPFENRRQAFTDARARKREKYAPLADILRGRGYDVTVDALIVGTLGAWDPSNESVLHACRVSRRYAKLMRCLMVSDTIRWSRDIYVEHITGHRQYTDPTRRTAAGPDPEGTA

SEQ ID NO: 1427 - protein, 1584 aa, synthetic construct
  source 1..1584: note = Description of Artificial Sequence: Synthetic polypeptide
  VARIANT 117: note = Any amino acid
  VARIANT 118: note = Any amino acid
  VARIANT 121: note = Any amino acid
  VARIANT 139: note = Any amino acid
  VARIANT 141: note = Any amino acid
  VARIANT 278: note = Any amino acid
  VARIANT 328: note = Any amino acid
  VARIANT 409: note = Any amino acid
  VARIANT 490: note = Any amino acid
  VARIANT 529: note = Any amino acid
  VARIANT 688: note = Any amino acid
MTTKKVLGASTTLQTSSTKGKNSGCSKDPLRDAVPGRSWILRPACRDITTRRNIPPAPQQQQPPMESPPTLQLQDALRRPSPTPAAAQVADAGGALAALHTIKRGISVDWTSISPKXXQRXTSASPDACPASETTQRDXRXLLDARPAGPLDPTRPHQDEPASDTADAAGTPLLQGNEDTIYLQYPLAADMLICPICSPPQSFHLLGVVTRHLKRCHSKRVAFSCALCSLPFETQKQCKMHQVACRKCLKGTTQSPAPAPSPPAARRPAAPEPQRRKXTSQAAVKKPAPVARPAERDAAIEKVPAASGNITQVLASRRPVSPSHVAKXISMLRRLSAASPPVQHVPVPRRISAPPRIAARDPVAGRASAAPQTALRTPAAGGASTTPQTALRTPTAGGASAMPQTTLPXPRRPDWRNQPRSHSKAPGLHRQTDQHGPQVHSAGHCLREISRSSSNRLGSSHSAAATHRRTGGVPATPEPDRVSPTTSNAXIPPEIPPQHPTEGNPDPRDRRQADHTAGSEPAPDEVEDXEGQRPMVRAATPWQTAWTEELQAAASFDDFDLLVDRLTRELSAEIAPRRSSNQENAPPAHRTPAPNHNTTTRGARSRDASRRYDPAAASRIQKLYRANRSKAMREILDGPSPYCTIPSERLYSYFKDVFDRIARNDAQRPECLRPLPRVDEAGVLETDXTPKEVMARLSKTKNTAPGKDGIPYSLLKKRDPGCLVLATLFNQCKRFCRTPSSWKKAMTVLVYKKGERDDPSNWRPISLCSTMYKLYASCLASRITEWSVSGGAISSIQKGFMSCEGCYEHNFVLQTTIETARRARRQCAVAWLDLANAFGSMPHHHIFATLQEFGMPENFLRVIREVYEGCSTTIRSVEGETAEIPIRSGVKQGCPLSPIIFNLAMEPLLRAISNGTDGFNLHGERVSVLAYADDLVLTADDPESLQGMLDATSRAADWMGLRFNAKKCATLHIDGSKRDSVQTTGFQIQGEPVIPLAEGQAYQHLGTPTGFRVRQTPEDTIQEILQDAAKIDASLLAPWQKINALNTFLIPRISFVLRGSAVAKVPLNKADKIVRQLVKKWLFLPQRASNELVYIAHRHGGANVPRMGDLCDIAVITHAFRLLTCPDAMVRNIAANALHDATKKRIGRAPSNQDIATFLSGSLDGEFGRDGRDIASLWSRARNATRRLGKRIGCRWEWCEERQELGVLVPQIRSNDNTIVTPSARGMLERTLKAAIHSLYVETLKRKPDQGKAFELTSKWDASQPLPRRGRLHPFRRLAVHPPCPAQLRPAQRSRPPREPRQALQEVRLLQRDPAPRPVQLQAPLQSLAAAPQCHPEPPGESHRTAPGGGRRELRHPRYPASGTPANHFLAGGGFTRFADWRFIHRARLNCVPLNGAVRHGNRDKRCRKCGYSNETLPHVLCSCKPHSRAWQLRHNAIQNRLVKAIAPRLGEVAVNCAIPGTDSQLRPDVVVTDEAQKKIILVDVTVSFENRTPAFREARARKLEKYAPLADTLRAKGYEVQMDALIVGALGAWDPCNERVLRTCGIGRRYARLMRRLMVSDTIRWSRDIYIEHITGHRQYQEV

SEQ ID NO: 1428 - protein, 1420 aa, synthetic construct
  source 1..1420: note = Description of Artificial Sequence: Synthetic polypeptide
  VARIANT 694: note = Any amino acid
MTQDQDADCCPAGKDATRGAPPMTQDQDADRCPAAPERDAPEGTTSSTPDPKTTYHPAVRRRAARRGMHLRAQDLDAARCPSGQRDNVASESSAPPRATSPPQASLPDPEESPGESAGTTEIRPTEGEAGEEDRIYLQYPLPTGLLLCPFCLPVHGVQTLAALSKHVRKTYNKRIAFRCSRCDLPFETQKKCKFHQATCRGPPTTAKVNPTDILRVPTLTPTDDLASAPQPASPESQQIRGDQPPTEGSVTPASRTDDATKRTSPVSRIPTLDPAVRGTTATSQVNNLTRRLSDLIKTIRHNTDTRRCSAPPQVTSCRPAVGATSIVPQAARRDPANGGASRSPQIPQPDPAPGRPNTSSKVTQRASDRQKPHAPPRTHQPDAARRRTRTIPSASKHDRAPTKPSTGASRTPLPPGRSSAASETPRAALPTTPGPPPQDPPEHRSTVRGTTRPQTVPAAPEPAETTQQEERRPRARVATPWQSAWMEELAKAEDFENFDTLMDRLTAELSAEITARRREPQEAARATRRFPAPSRNNTAREGRRGDVGRRYDPAAASRIQKLYRMNRTKAMREILDGTSSYCAIQPERLYSYFKDVFDHEAQTNLRRPECLSPLPRIDLTEDLERDFSPQEVQARLSRTKNTAPGKDGIRYPLLKKRDPGCLVLAAIFNKCKQFHRVPRSWKKSMTVLIHKKGXRDDPGNWRPISLCSTIYKLYASCLAARITDWSVCGGAVSSVQKGFMSCEGCYEHNFLLQTAIQEARRSKRQCAVAWLDLTNAFGSIPHHHIFATLGEFGMPETFIQILRDLYKDCTTTIRATDGETDAIPIRRGVKQGCPLSPIIFNLAMEPLIRAISSGPTGFDLHGKKLSILAYADDLVLTADDPESLQGMLDATSRATDWMGLRFNAKKCATLHIDGSKRDSVQTTGFQIQGEPVIPLAEGQAYQHLGTPTGFRVRQTPEDTIQEILQDAAKIDASLLAPWQKINALNTFLIPRISFTLRGSAVAKVPLNKADKIIRKLVKKWLFLPQRASNELVYIAHRHGGANVPRMGDLCDVAVITHAFRLLTCPDATVRNIAANALRDATEKRIGRAPSNQDIATFLSGSLDGEFGRDGRDIASLWSRTRNATRRLGKRIGCRWEWCEERQELGIRVPQIRSDDNTIVTPTARGLLERTLKAAIRSLYVETLKRKPDQGKAFELTSKWDASNHFLDGGGFTRFADWRFIHRARLNCVPLNGAVRHGNRDKRCRKCGYPNETLPHVLCSCKPHSRAWQLRHNAIQNRLVKAIAPRLGEISVNCTIAGTDSQLRPDVVVTDEAQKKIILVDVTVSFENRTPAFREARARKLEKYAPLADTLRAKGYEVQMDALIVGALGAWDPCNERVLRTCGIGRRYARLMRRLMVSDAIRWSRDIYIEHITGHRQYQEA

SEQ ID NO: 1429 - protein, 1081 aa, synthetic construct
  source 1..1081: note = Description of Artificial Sequence: Synthetic polypeptide
YAPGYEAAQSPCGREPPRDHHRRPRDACGSSHSPEPCLTTPRLLPETVSAEPCDDESQRTRYASPHKQARTLHDAEPRDASREHAPSCAEPRCHRCQWTHWKDCCPHSTNTTDGPEGTDRCADTITSPATAACPQRSPCPLGSSNGCDETAPEKRQPAADLVHTAPFAVLVRAGPFADLVRAGPFADHHQDDDPLPHRSGSLGPLCSKQKDPRKTHQHRHSGQAGNQTHTDIPRAAPSRRAAICLMANAAATREDLLRAATSLSEMAAANQPTRSPTGGGEPTSQGRRGPQALADAAKRIQQIYRTNIPRAMRKVLRTLLTAVFSACLRTGHVPDLCKKSRTVLIHKKGDRTDLSNWRPLSMGDTIPKLFAAVMADRLTAFLTNGGRLSEEQKGFLQHEGCHEHNFVLGQVLEESRRQGKDLVMGWLDLSNAFGSIPHATIMDAVAGMGIPSRIRTIIHQLATGAATTAKTIDGMSEEIPIEAGVRQGCPASPILFNIAIERVLRKIKTVNAGYLLYGSRISPLAYADDLVLIASSPEEMRSLLRAADDAAIEAGLHFNPKKCATLHLTGKKSSRRAVQTGFLVRGTPIPAMTEGDAYEYLGIPLGLKKNQTPRAAMEAIVGDIAKIDDSLLAPWQKIDAARTFVAPKLDFVLRSGATLRAPLRHLDTVIKKHIKKWLYLPQRASAEVVYTPLKKGGAGILPSSILADVLTIAQAHRMVSCPGEVVSRIASEGLREAVKRKINREPSGDEMAHFLSGSTLSGETASFGDAGFWSRVRMATKRQAVHLGVRWAWRGGELLVESRGQRNRPVATDSNSRSQLIQRLRCAAQDEFLTILINKPDQGKVAKLSTLTPVSNAFIRDGSFTRFADWRFIHRARLGVLPLNGAIRWGSGDKRCRVCGYQLESVPHVLCHCMHHSNAMQQRHNAVMDRLAKAGSRLGTPRVNCRVEGVAEDMAALRPDLVWRDERSRKIVIVDVTVPFENGAEAFDNARGEKEEKYRPLAEALRAMGYQVKLEAFIVGALGSWDPKNERVLKTLGVSRFYAGLMRRLMVADTIRWSRDIYVEHVSGIRQFTLPSGAPSN

SEQ ID NO: 1430 - protein, 1258 aa, synthetic construct
  source 1..1258: note = Description of Artificial Sequence: Synthetic polypeptide
MSGPRQAAADPRPSTDPRRQRDSQSPEPRLTRAASRRRTPDPEDAPRTTAEHPERRRTPPDPRGPSATTAGPERRRPPDPGGPEDDPPEGLPTLVEEPRTPPTPDPPDGRPRRGCRRGSAHVPPLPPPCEAAVPDLPPAKAVQVAQRHEQTPTALPPAAPSVLLLPLRHRVRGPEAPEEPPQGMPGPRGREETRHAGEVRRPTTRAAARRPARPAAPPATPPDQTSGDRPTERPAPATPPRRSAPRDPRPDVTPRPDGPPPGPPGPPDAPDPPRIPEPPGEPEPPGALQLPSVPGSPGAETSAQQRMPTPRQALWLEELSRATAFEAFEASVARLTEELSAAARPGQPRRGADNGPTTRRDHRPQPQRRPRRQRYDPAAASRIQKLYRANRPKAAREILEGPSAFCQVPRETLFNYFSRVFNPPAEAAAPRPATVEALTPVPPAEGFEEAFTPREVEARLKRTRDTAPGRDGIRYGLLKKRDPGCLVLSVLFNRCREFRRTPAAWKRAMTVLIHKKGDPTDPGNWRPIALCSTVAKLYASCLAARITDWAVTGGAVSRSQKGFMSTEGCYEHNFTLQMALDNARRTRKQCAVAWLDISNAFGSVPHRRIFGTLRELGLPDGVIDLVRELYHGCTTTVRATDGETAEIPIRSGVRQGCPLSPIIFNLAMEPLLRAVAGGPGGLDLYGQKLSVLAYADDLVLLAPDATQLQQMLDVTSEAARWMGLRFNVAKCASLHIDGRQKSRVLDSTLTIQGQAMRHLRDGEAYCHLGTPTGHRAKQTPEETINGIVQDAHKLDSSLLAPWQKIDAANTFLIPRVAFVLRGSAVPKTPLKKADAEIRRLLKKWLHLPLRASNEVLHIPYRQGGANVPRMGDLCDIAVVTHAFRLLTCPDATVSIIAASALEETARKRIARQPTGRDLATFLSGSLEGEFGRDGGDFASLWSRARNATRRLGKRIGCAWTWTEECRELGVSLQPAPHADRVTVTPRTRTFLERFLKDAVRNKYAGDLRAKPDQGKVFDVTSKWDASNHFMPSGSFTRFADWRFLHRARLNCLPLNGAVRFGHRDKRCRRCGYAAETLPHVLCSCKPHARAWQLRHNAVQDRLVRAIPAAAGEISVNRTVPGCESQMRPDIVITNEEAKKVVIVDVTIPFENRRQAFTDARARKREKYAPLADTLRGRGYDVTVDALIVGTLGAWDPSNESVLRACRVSRRYAKLMRCLMVSDTIRWSRDIYVEHITGHRQYSDPTRRAAAGPDPEGTA

SEQ ID NO: 1431 - protein, 1241 aa, synthetic construct
  source 1..1241: note = Description of Artificial Sequence: Synthetic polypeptide
MSCPREGSDHLGPDPETPALHQGSDIRVTSSRLRGSRGKSSRQPSSRHQVPASEASATAQQTAANECQVCGSSFATSSGLRRHMARLHRAASADPEGAAPASITEIFDYPLPSRWKCSACSENFFNQQTLKRHQTRHHPATTFAYAFRCSSCRSEFDSARRAANHWQVHKKERSQLSGTEPQASSQARVSMAHSPPPLPNTSWAELASNPAEIPSFVWESPPKNRPSVEEFGSSLPTDVTMMSQSPPPQVQSSPVPALTPLSPAATASSSPPGAARQLTPPTQTNTPVTQRARLQPEADVVPELPPSVTEHPVSDAQHWVDAVSSASDWSEFEAVCDQFVIHAVAVSRPNLARPQQQDRQRSGDHPPRQQRGQHRPTFDVREASRIQKLYRTSKKRAIRHILKEKSPSFSGSESDVLDFFREVYSAKEVDEEAVGKLASSLFDVPQGDDSATSLSLPTSAKEIGARLSRMTNSAPGKDRLEYRHIRRADGSFSISEAIFNKCLAEGRIPAPWKTASTILLHKAGPTDDPANFRPIALQSCLYKLFMAVLADRLTKWACENQYLSPEQKSARPCEGCFEHSFLLSAALKDCRRNQKTICIGWLDLRNAFGSIPHPVIKIVLSSLGVPDSLVTLLMDAYNGASTSFTLTGGQTDTVPIRSGVKQGCPMSPILFNLAIELIIRAVKKNASDNHLGVTVQGKNLSILAYADDLVLLSRDTEGLQSLLQVAGSSASTLQMQFKPQKCATLTLDCKRGTNVRQSAHHIQGAAIPSLTEEERYRYLGVPIGLPRLTSLQESSRKLSSDIETISSSLLAPWQKLDAIKTFVIPILQYTLRATEYLKSDLKPLRAAIIKHVKKICHLPVRSSNAFVFASRPSGGLAFVDPGVDADILVVTQAVRTLASDDDTVRAVALGQLTSVVHRTVHSAPSDDCIDKFLSGSSEGPLANSGNSGQASSLWSRTRAASRRLKIRIVGASSGDIKVESGGRAIPSKKVTAGLRSDHHNEMSEKLRSLPDQGKVARALSLDSFANATSWLTSGSFIRFCDWRFIHRARLNCLPTNAAVRRWKQNANTKCRRCDHQLETLPHIINNCRPNMVPIRRRHNSIQERLVKAIHYGDIYQDQHVPGDPNPRERPDITVVEGNKVTIVDITIPFDNGPDALSTAANAKVMKYDTLRQELASRGMDVEVHAFVIGSLGSWHGDNERVLGRLGISRRYRTLMRRLCCIDAIKGSRDIYIEHVTGHRQY

SEQ ID NO: 1432 - protein, 1203 aa, synthetic construct
  source 1..1203: note = Description of Artificial Sequence: Synthetic polypeptide
  VARIANT 3: note = Any amino acid
  VARIANT 213: note = Any amino acid
  VARIANT 235: note = Any amino acid
  VARIANT 271: note = Any amino acid
  VARIANT 328: note = Any amino acid
  VARIANT 347: note = Any amino acid
  VARIANT 372: note = Any amino acid
  VARIANT 451: note = Any amino acid
  VARIANT 463: note = Any amino acid
  VARIANT 770: note = Any amino acid
SGXTGREVKCITVNVLMEQQPHTKAIREGDFIVILLPQSDDETLCCPLCVGRGRYSGKTRVECLNRHVKEVHPDLTTTFRCWGCGFAAPGDKKYPRKIVTQHCATCVPEVSSAPSGRVDGERRVNTRRRLGIAAATEASPVRRTRRNGLASPPVEQNISQSAAPPEPARVPQHPEIVALGESADDEVFRSPVNSPPRDWRAAAPQQAASSSPXAVPGITAATPSNTTRTGNGSAXSILAEHPIPAPPPTNTTEANGRADIPRSGRAPPPGXQAARRRAPTTEQRRIVGLLEAATGREQLEEATTQAMLFLARLTGRRPEPRNAIRPGXRQRHPAQGDVQAQAPDRIXEAKKLQRLYRTSKKRAVQKILAGPXMNCQIDKNTITAHFVELAARRDGGEDWPDVFDREEPTAASGEALCTPITREEVFRRLKGRNNTSPGPDGITYRDLAKAXPGAHVLAALYNXIWRIEATPALWGVSNTTLIYKKGDAMDISNWRPISLGDTVPKLFAAILADRIKRWAVANGRYSASQKGFLEFEGCYEHNFVLQEAIREAKGGRKELVVAWLDLASAFTSVPHSSILQALEGHGLPSKARNIISSLYTGMTTRFHTAEGPTDPILIQSGVRQGCPLSPDVFNLTLEVVLREIQRTGEGYTIEGRRISHLAYADDVAILADSPAGMRRLLFAAERGARAVGLTFNPAKCATLHIAGRGEEAVRPTEFSVQGTPVRALASGEAYEHLGIPTGYQVRQTPINTLRDLLADIGSIDRSLLAXWQKLDAVGTFLLPRLDFTMQGAHIDKGFLTEADKIIKKAAKSWLSLPQRASAELVFLPPSQGGGGLLTVAHSYKMLYSSDVTVSTIAGSTLRRTVSERLKKRASNIDIARFLSGDLDLPRSTSPSTFWTKVRSAALRIKTKLGLRWSWCQGGEVLLMACGDPRAPGTRVSPQTKHLVTTSLRRCLNRHYAESLLAKKDQGKVFEVTRRSGQSNHFLRSGSFTRFCDWRFIHRARLDVLPLNAAKRWQRGMDKRCRRCGSDLETLPHVLSHCGPHSAARQKRHNNIQDRLVKAASRCPGTISVNQTVVGVRGPDAALRPDIVVRDDVNRRVTIVDVAVPFENRLEAFDGVREAKIAKYTPLARQLTDSGYTVTVEAFVVGALGAWDPRNERVLSLLSISRYYAILMRRLMVSDTIRWSRDIYVEHVSGIRQYRE

SEQ ID NO: 1433 - protein, 1458 aa, synthetic construct
  source 1..1458: note = Description of Artificial Sequence: Synthetic polypeptide
MVVSRITARLEATPAPRWDPPLPRRVIASRIADRLVPATAPCRSALNAAFPSPSRDTVTESFTQEDRQLEPLTRHVDEETKDSELPGRAPTVLDEESKDNDATAGEWLLRFDGACRANPGPGGAGAVLFNPSGAASWTCSHFMPGATETNNTAEYTAFLLGARAAADHGATLLRVQGDSQLVLRQVKGIYGAKSTRLRRLRDAVRAELARVGQFSLHHIDRQDNAHADRLANRALDMKSTLVECATHPGRNACTTTLTTSAAAESPASPPPVGARDTPMADAGEERLADVDDGEVYAAMRLGPGEVPERRPRLRLRQLSDEELEAASEMVERLGAALSAKITDAEDWASAEGYITALPYMLYDKLQSYSQAPRGPQQPVLTRSPRGDDRPASSEPNASSTTGGVASEHQPRRRRRRGRRKGRRQRRNPRRSGREGATGGHQQHKKHKPRPPRETQHHREHRLDEALDELHALERTDPHNRPAIAKARRRVGRIRSAINQQLLRHKFDTDEKACVDGILSTARAERAARAATPSPPASGAPTTTVSAPGAIVTNDDGTCPIPSDKLWRHFDAVNTPRLDFDAEAPGSAAFRAAMDHLPAATRLLDLLKEAPSTDEIETQLQHVKASSSPGLDGVGYDVYKRFTIQLLPVLRAAFRCCWLYKKVPQSWKLGVVRLLHKKGPREDPANWRPICLQQAIYKLYTGILARRLTRWMDANDRHAPGQKGFRAVNGCGEHNFLAATLIDNARRKHRPLYEVWYDFRNAFGSVPFALLWDSLQRLGVPPDYVDMCKGLYNQASFVVGNAVDGSTAPVEQRVGVFQGCPLSPQLFNAAISPLLYALRRLPDTGVQLSSVDRPGASAYADDLKIFSGTKAGITQQHELVATFLRWTGMQANPAKCRSMGVRRNTNGAVEADNVHLELDDTPIPSMTHMQSYTYLGIGDGFDHVRRRVELAPKLKTLKHDVTALVESGLAPWQVVKAVKVYLYPRVEYALRHLRPDDQHLESFDLHLRRGLRHLLRLPKNATNEFFYAPVSRGGLGLLPLVELHAALQIAHGWQTLHSPDPAIRRVAREQLYQIADARHRLDKDHWPHRREELCELLLNGELGTSAHAPPKRRNGDIGSLWVDVRKNLKTFGLKVATAPANQETGVPAQPLQLRVPHHAEWLDHGNVLRHVKLHIKNLHWQTWCALSDQGKTARVHGGVGSAFLTRPRGMWESDYRFAVAARLNVVDTVNTLSRRRLRAHDRCRYPACRWKETLAHVLNHCPGTMDAVRGRHDDALKEIEHTLRASSGDRRELRVNQTVPGLPGPPLRPDIQVYNHDKRTVAVVDLAVAFDEQPSEDPESSGLAKAVQIKKAKYAGIKEHLENQGWKVHLSAIVYGSLGSVAASNHKVYTEHLGLLKRDAKRLDRQLSSACIQSSRRIWNFHCAKHRARQHEHQAPPSQATRGRRVTETGGNPSRTDRR

SEQ ID NO: 1434 - protein, 1704 aa, synthetic construct
  source 1..1704: note = Description of Artificial Sequence: Synthetic polypeptide
MLADPAALAAGLARAPPPPSAPQDPSPAFPAGPAGQNPRAAAPARVEVHTVVAPPGRAGGMLPDPGLVEEPIQATYAHDAAQFECALCPYVAESMAVLVQHRRSAHRGTRFKDIFTSGCQCSLVFYARIVAASHAVACARRNQRAVPPAPTPVAPTRPEATPQPTGYLAAAMTAAAAAASSDTVVAAATNMQSAVPAAAKTTGLQLVPPELEPALPQRASCHAGKRRRLNADEAVTPCTPTARVSPQTEVAMAPHDAPQDDTVLQREAAEPQPDPAATPGAQVQRVEDTTAAQDDTVQQDHDADTAQVSPPRRTPTRWGPRPSSTQEPSPMTGEPAATLAARRPLTPAATGTRATRWGPCHRAIGAAAIARLVTGLSTEPAQPQRRQPPPPQEPPSQPEPLAAAATAAADIAATVAADIAAAAANAAMDVDGGPAADETWLLRFDGACRRNPGPGGAGAALFAPSGAVVWTCSHYMPSRSETNNTAEYTALLLGVQSAVHHGASHLEVEGDSSLVIAQVKGTFACRNARLRQLRNRVRHALRSVDTHKLRHIDRQANAHADRLANRALDQRRTSSECGTHGSCMDSCLAVPTALAAQETPPAAPPSTSATPAEGNAMDDIAAEIAARDEGETFPVLPIGPGSAPERQPRLRLRQLSDEERDAAADALQELADTMASKIEDADSWTSGEGYISSIPERIREVLQPYATAPPQPGRSRRQQRRRPPRVTRNQREHRLDEALDDMAATQQATPRDQRAVRRARRRVGRVRASMAQQELRHEFAKDESKCVAKILKTASTETAAEDEHPETCPIDAATLHAHFTGVNAPRTDFDYDATSGREFRAAMSDLPPATVEIDAFDAELTIDEVEDQLTRAAKTSSPGHDGIDYGIYSRFAAQLVPLLHAVFQFCWRHRRVPRLWKVGIVRLIHKKGDPRQPTNWRPICLQPTIYKLYSGLLAHRLSRWLEGNDRLPMAQKGFRAFNGCHEHNFMATTLLDQTRRQHRKLYQVWYDLRNAFGSLPQQLMWRVLRHLGVDSGFIDRCRDIYRDSAFVVANAADGATDPVRQEVGVYQGCPLSPLLFVAALVPLVRRLEKLDGVGVPLADGVRPCTTAYADDLKVFSDSAAGIRKCHDTVAGFLAWTGLRANPGKCASLAVTTNARGNPTRDSSMRLEVHDAAITTLSLHESYRYLGVGDGYDHVRHRLQLEPKLKQLKREAVALLTSGLAPWQVVRALKVYVYPKVEYALRHLRPLQSQLQAFDRVVSKGLRHLLSLPRSATSEVLYAPTSSGGLGLQPLVELHRALQLAHAWQMLHSKDPAIQAVARAQACQVVRKRYRLQEDHWRGRDDELVRSFLNSELAASPHAEVLRRNGDIASLWSDVQRWLRIYHLRFEHCDETEAHGPLSFRVPHHNKWLTHKTVLRHVKLHLKIRHQTRWKGMVDQGKTVRVHGGVGAKFMTTGAGLSDDDYRFGVKGRLNQVDTNSVLKRKRLRAHTTCRDPTCSSAETLAHVLNHCESNMDAIRQRHDDALEQIGSKIRGALDRAKSPTELRLNQTVPEYTGAALRPDIVLRNVAAKTMVIADLAVTFEDQAARARHSSLQLSHDHKTLKYQPIVAELQHKGWRVQTAAIVYGTLGSVQPSNFKAYTEKFKLHKREARQLDLQLSSHCIRASHRIWGWHCRQHRDRQRSGTASRASRGSGGAPRRTSQAPARR

SEQ ID NO: 1435 - protein, 1432 aa, synthetic construct
  source 1..1432: note = Description of Artificial Sequence: Synthetic polypeptide
MCLKSFSSTSGLRRHMARLHRQPSPDASTPSTMTEVFPYPLPKVWPCVVCRENFYHNQTLKRHQKNFHPNVDLTTVYQCSVCGQEFVTGRKASFHFKVHRRMSASAIPTPSAMPSSPMDLIRGLVGEPLPPSPARTPPPLARYISPAPRSSFSPPWNPSPPPRSPTPLPRPLTPPPRSPSPPPRSPTPPPPVTLTTAPVTEPAVPVALTTAQVTEPSAPAVHTAAPVTLSNAPVTEPATPATDPATPVTRLHSPVTHISCSISFTASHAPYSCAAPTSPSVYACSPRRRQCSSTIAAVCNSEASSGNPCLLALPVHRHHLPDTSPQRPGLLFHHPGIPPHRPGRPPHCHGHSLHRHDHRARRPGRQHHLPRSPSPPPRSPSPPSRSPSPPPRSPSPPPRPSTPPPRSPSPTPRSPSPPPRPPILPPRSPDSTHRSLTSHARSPSRPATPPIPVQPRHLRPSTPAHPGVDNAVPPSQQSAIDVWLAELSRSADFESFEDVCDRFVEFAAAEGRNNGRPARPAHQPPRDRGNQGPRPQRPPRPHRPGLGPEFDAQEASRLQKLYRTSKKRAIRTILTGSDVRYSGYRGPHPALMSDTAATEVLTSGFLSLEVFSAREVDTDTIATDTSLLFPNSAQARESGQDLLRPVTQREVSLRLGRMSNSAPGKDRLEYRHIRQVDGAFRVTLEIFNRCLRESRVPSSWKTATTVLIHKKGDATDPANFRPIALQSCLYKLLMAILSDRVTTWALDNDLISSSQKSARPGEGCYEHTFLLSTVVKDARRNQKNMYAAWLDLQNAFGSIPHDAMFTVLTSIGAPEGLVSLVRDVYTDASTDFVTPTGRTAAVPIHSGVKQGCPISPVLFNLTLELIIRAVNASATRDRSAPVVHGQAVPILAYADDLVILSRSSDGLQSLLTTASIMATKIQLKFKPAKCASLSLECRRGTKVRPLEFNVQDKIIPALTEEQHYRYLGVPIGLYRTDDSLETLVAKMTDDIQRIDSSLLAPWQKLDAIRTFVQPCLAYTLRAGDCAKKHLKRLRGQLVKTARKVCNLPTRATTNYIFADRRAGGLGFIDPNVDADIQIITQAVRMLSSPDDITRAIATGQLSSVVHRTIHRAPTQEETDEFLSASMEGDFANSGNSGQASSLWSRARAAARRLKVTISGSLSGSVITKSTENREMAAKSITTALRAQSRAHYTHRLLSLPDQGKVGQSLNQDQYMNSSSWMSSGSYILFCDWRFIHRARLNTLPTNATAQRWKPNTSPACRRCQHPQETLPHILNHCPPNMVPIRRRHNLVQQRIVSAVRHGRVFVDQHVPEDPNPRERPDITVVEGDKVTIIDVCCPFDNGRDALMTAAAAKETKYADLKQALVAAGKDVEVFGFAVGSLGSWLPSNERALRRLGIAKRFRTLMRKLLRIDAIKGSRDVYIEHMCGHRQYT

SEQ ID NO: 1436 - protein, 1216 aa, synthetic construct
  source 1..1216: note = Description of Artificial Sequence: Synthetic polypeptide
MDVDGGPAMPEPWVLRFDGACRRNPGPGGAGAALFKPCGTVAWTCSHYMPNSSETNNTAEYTALLLGVQSAVHHGASHLEIEGDSHLVVAQVKGTFACRNPRLRQLRNRVRHALRAVTSLTLKHIDRKANAHADRLANRALDLKRSLAECGEHQGAMESCLHMNPAAQRQREQPAPPARPACAPTRAESASDHDEDIDAEIAARDGGEAFPTLPIGPGTAPARQPRLRLRQLTEDEQEAAASALQAMAEELACKIEDADSWTSGDGYISAIPSRIRQLLQPFTAAQPHPRPPLQQQRQRPPRVTRTQREHRLDEALDEMAAVQQERPTSRSAVRRARRRVGRIRASMRQQQLRHDFARNESKCVEDILRAASAETAAEEHPETCPIDSGTLHEHFTAVNSPRINFLPDEACGALFREAMADVGTPQERRSALTDELTMDEVEDQLMQAATNSSPGHDGVGYDIYKKFAAQLVPLLHAAFQSCWRHHRVPALWKVGFVRLIHKKGDPNDPANWRPICLQTAIYKLYSGLLARRLSAYLEANGLLLMAQKGFRAYNGCHEHNFVATTLLDQTRRMRRRLYQVWYDLRNAFGSVHQDMLWYVLRLLGVERAFVERCDDIYEDSYFVVGNAADGATEPVRQEVGVYQGCPLSPLLFIAALVPLLRALEKLDGVGVALADGVRPCTTAYADDLKVFSDSAAGITRCHAVVEKFLEWTVLQANPGKCAFLAVTRNARGNPAHDKDMKLSLHDEEVSSIKLHDSYRYLGVGDGFDHVRHRLQLEPKLQQIKREAVALMQSGLAPWQVVKALKTYVYPKVEYALRHLRPLQSQLQGFDRVVAKGLRHLLRLPRSATNEVLYAPTSSGGLGLQPLVEMHRALQIAHAWQMLHSKDPAIREVARAQVWQVARKRHRLREEHWRERDDELVRCFLNSELAASPHAEALRRHGDIGSLWSDVQRWLRIYHLSLVVQDDRNGLDPLGLRVPHHAKWLDHKSVLRHVKLHLKIRHQTRWKGLADQGKTVRAHGGVGAKFMSTWAGLSDDDYRFGVKARLNQIDTNAVLKRKRLRSHKTCRDPTCSSAETLAHVLNHCESNMDAIRQRHDDALEQIGSKIRNALKRGKSTAELRLNQTVPEYTGAALRPDIVLRIVAAKKMVIADLAVTFEEHAAGARHSSLQLSHDHKTLKYQPIVAELQLKGWQVQTAAIVYGSLGSVQPSNSTPTRKS

SEQ ID NO: 1437 - protein, 1417 aa, synthetic construct
  source 1..1417: note = Description of Artificial Sequence: Synthetic polypeptide
MGTQSARERGAPSAPHSHTLGPRTPPRPPACSKHGELESAAGGRDGQCSDGAERERDAERDIRANERDCNGDGDGDDADSDSDDRNDARRRSRRPRATATTTTSAPTTTTTTTTSATTSATTPATDSSPWVLRFDGACRRNPGPGGAGAALFEPGGAVVWTVSHYLPGSETNNTAEYSAMLLGVRSAIHHGATRLRVEGDSHLALSQVRGTFACTNRRLRKLRNRVQAALRELGDYRLVHIDRQANAHADRLANRALDLRKTKVDCGPHATTTDACVQPAEILAPTARLSSSSSSSSSSSSDEPMPGLEEPAADDETDADAEADIAMRDGGEIFPTLQIGPGSAPAQQPRLRLRQLSDDESEAAARTLEHFANDMASKIADADDWRSGEGYISAIPVRLRELLAPYAVPIRSPPRNASSRPPRPQSRPPRPPRVTRHQREHRLDEALDDLAAAQRSTSTDQRSIRNARRRVGRIRTAQAQSDLRSQFATNERACVESILRAAKPDGTEPQASAGTCPIDRATLHAHFAGVNTPRERFDFDDALGADFRAALDVLPPPDQAADAFADELSLGEVEDQLDRVVASSSPGLDGVGYDVFKRFRLQLLPLLHAAYQCCWRHRRVPATWKVGLVRLLHKKGDRAEPNNWRPICLQQAIYKVYSGLLARRLSRWLEANERFTTAQKGFREFNGCHEHNFVASSLLDQTRRLHRKLYAVWYDLRNAFGSMPQPLMWRVLARLGVDTAFLQRCEDIYADSFFVVGNAADGATDPVRQEVGVYQGCPLSPLLFISALIPLLRALQRLPGVGVPLADGVRPCTTAYADDLKVFSDSAAGIQQCHGTVARFLRWTGLRANASKCALLPVTTTARGNPAIDDTLQLELHGDAIARLTLQSSYAYLGVGDGFDHVQHRVQLAPKLAELKRDAVALLRSGLAPWQVLKAIKVYLYPRIEYALRHLRPLQSQLEGFDRAVAKGFRHLLRLPANATNELLYAPVSSGGLGLLPLVELHKALQIAHGWQMLHSKDAAVQAIARAQVRQVVQKRYTLDADHWQGRDDELVQLFLNSELAASPHATIKRRNGDIGSLWSDVQRHLKTLQLRLETREPTADAPDSPNGLLHLRVPHHRKWLSHKTVLRHMKLHIRLCHKHKWQSMSDQGRTVRAHGQAGSHFVSRGVGLWDADYRFALQARLNQLDTNSTLKRRRQRTNATCRAPNCSRTETLAHVLNHCETNMDVIRQRHDGALEQIGAAINAAIKGRRTDTEVRLNQTVPEFNGPAWRPDIQVRDARSKTMVIADLAITFEDQPNDQSASSSLQHSREHKIAKYQPIAAALERQGWRVHTSAIVYGSLRSVHPSNFTVYTELLGLLKRDARRLNTTLSCHCIRSSRRVWNWHCGQHRARQHQRCQEGRAHGSGGNQRAEGGTATT

SEQ ID NO: 1438 - protein, 1369 aa, synthetic construct
  source 1..1369: note = Description of Artificial Sequence: Synthetic polypeptide
MATVRLKYPYPPEGILCGPCAANTNAPQTRPYSDKSGLAKHLKLYHKATLVVECRHCGHEESDLRKMKKHISTNHPVAAAAAPTVPPRLGPTAPPPPRVILRPRFIPRPRTPSPSSSSSSASSPASSRRSVSLPPASPPVSSASSPAARSGRNSPDSQGTAPVTPIGTVRNSPAGSPALSYSTASPIASTITTPRHLSPASPALSAGPGSLGASPPVSPTAATVPPAPPATVPAVMAATVPFVAATTVPSVGSSTVPQRPAGPRRPPPFPIDDWIGRIARVSSLPELDAVSRLLEDEVVKRRPPDPNARPASLHPTRRPPPPSTRPRPCHGTGGTSVSLAALTSSCIREDHRGSLPLLCTSGWDSPWPLSPSPSSHCPSSNPCPSSSTPPSSLLGPPRHSHLTWRGSGSTTPSHRHCSRARYHHLLWRLPYPSSPRLPYPPSALARYPSVPPALDDPLPSLSTIGSEGSPECHLCRNWTPSQGCSRMKWSRDAPLTPTPDPPHSIRHAALPLHLLALVPAMGPAELQSLWRRSRPRAFAKITEGASPFCALPVGTVHGHFLQVHQATAHLPTPVPLPPLRPPRSSDPLVTPISPGEVLDRLRRATDTAPGPDTIIYSEWRAIDPTGRLLSSLFQKVQTFGAPTRWKESTTTLIHKGGDHTAMSSWRPIALLSTVAKIYGSILSHRLTTWAVQNGRLSLSQKGFLPFRGCLDQNYLVQSCLQDARRNKKTLSLAFLDLKNAFGSIPHLTIRHSLEWLGLAPSSIDILEASFLGSSTRVRTETGLTPPISLDTGVVQGAPLSPILFNLAIEPLLRTVPSAHSGFSLHGHVVSVVAYADDLAILAPSTPALQSQLDAISGMADWAGLSFNPAKCATVTLTGKDNSRDTLSLQGSPVPSISDGDAYKHLGVPTGTTTFPSGTDAIKKMTTDLQAIDHSDLAPAQKLDALRTFIMPQLSFHLSHGSVPKAPLTQLDKKIKRAAKHWLFLPQRASNEILYMSHLHGGQSLLPLSVLADIGQVTHAVALLQSRDPAVADLALRTCREVASKRAKKTVNGPELAQYLSGSTDGIYCTPTSDIPSLWTTARAATRRLSSTLPLTWTSPLPSGVPFLSINGSPLSPFRVQSTLTNAIRHNHLSTLIAKRDQGNSYRTSHDPDPSNYWVKGGDFLRFCDWRFIHRARLNLLPVNGARRWDANSIKTCRRCGAPNETLAHVLNVCPVGLPEMKKRHDAIHARIKKALRPSPHTVVHHDRTVPGCGPLRPDILRISERDKSVAIVDIHVPFDNGTDAVERAHETKRAKYELIRRHYEHQGYRVTFDSLVVTALGRLWRGSEAALQALQISSQYSKLLRKLLVADAIHGSRNVYAHHMTGMVM

SEQ ID NO: 1439 - protein, 1305 aa, synthetic construct
  source 1..1305: note = Description of Artificial Sequence: Synthetic polypeptide
MSHSITEVFDYPLPSRWKCTVCLENFFNQQTLKRHQARHHQTTSFLYVFRCSACQAEFDSARKASNHWQSHKRKPILSQPAVNEIPSSGLDPSPPRSRPPVEVIGSSFPDDVSMLSEPSTPSTSLQMDPEVVHPPSRSISFSPMHLSPTQPASPIQIGVEVSFNSSSSLQMDPEVVQPPSPSISFSPMHLSPTQPASPIQIGVEVSFNSSGSLQMDPEVVQPPSPSISFSPMHLSPTQPVSPIQIGIEVSFTSSSPLQMDPEVVQPPSPSMSYSPMHLSLTQPDSPIPVDIDVIPAAEVPLPDIEIPPSPDRHPAAEVPLPDIEIPPSPDRHPVAEVPLPDIEIPPSPDRHPQSPPRPVMMEQPVHTPPPADTQQANGPQHWVTVLANATNWEDFGRVCVEFANHAVEAARSRQDAPQVRPAAQRQPRRPTRPRQPTFDVREASRLQKLYKRSKKRAVRHILRDDAPSFSGSNEQLLDYFKEIYAPPEIDENRAQQLAESLFTDLEEAKESAAALMSPISQQEISTRLSRMSNSAPGKDRLEYRHIRQADGACRVTHIMFNRCLQEHRIPSAWKEATTILIHKSGTTDDPANFRPIALQSCLYKLFMGILSDRMTQWACNHNLLSPEQKSARPCEGCHEHTFLLSSVIKDTKRNQKTANIAWLDLRNAFGSIPHQAIHAVLTTIGAPVSLVMLLKDTYTGASTSFLSTSGETDPIQIQSGVKQGCPMSAILFNLTIELIIRAVKKKATDDGLGLVVHGQRLSIMAYADDLVLMSKTPEGLDAILSVASEQAETLRLAFKPTKCASLSLSCRHGTSVLPREYTVQGHLMPALDEEEQYRYLGVPFGLPRFTNLKDLIGKLKGNIETIASSLLAPWQKLDAIKTFVQPGLSFVLRAADYLKSDLRSLKSAITTNVKKICQLPLRAANAYIFAAKESGGLAFIDPNVDADIQVITQAVRVLSSDDEVVQTIATSQLKSVVHRTIHAVPTEEDIDNYLSGSNEGLLANSGNSGQASSLWSRTRSAARRLHLTLRATTSGTVVVNQQADIDHTRDILPASITRGLRLIQRTTNAEKLKSLPDQGKVARSLSNDPFANGSSWHATGKFIRFCDWRFIHRARLNCLPTNVATKRWKANANGKNGHQQETLPHVLNHCLPNMVPIRRRHDNIQQRLVTAIRHGDVFVNQHVPGDPNPRERPDITVIEGNKVTVIDISVPFDNGPNACTTAAQAKVEKYSALRQALRDMGRDVEVHGFIVGALGTWHQGNERALGRLGVSRWYRTLMRKLCCIDAIQASRDIWVEHVTGHRQYE

SEQ ID NO: 1440 - protein, 1701 aa, synthetic construct
  source 1..1701: note = Description of Artificial Sequence: Synthetic polypeptide
MCSAKTPALKSGRRRGKEVNYEGQIVRVERRRGSRSSTSATDLGTRMVTRGRKKLMEASVREAGHHGGESASTVDVDVVESKKITGKTARRNRRAPSGDGKRRESCGAECGQAVCGNAVADRSEASSPRTPNVSKSGRDKCGQPTIKASTPSPPKRKPTTSSSPRTPCLSKRGARSKIPSTPDTPSTSGGSGKQRVLVSPLLRTEKLPDLEVLQRTEEQVTVRATFPIAQAVVCPLGCEKPYTAVRPDGQFAHQTLTRHFMRVHNCHSVQWHYRCRNCNTDFLPADHRYPLRVVNTHVRSCVSRWEITRKLGESEDLHGVRCDLCDYVGVSKRAVGLHRRRHANENIMQNTGTAAQIEALSKQVGEIRVAGDYSQFKFGKRVRQYVAPTQRRDGLDEEEVHEAEEEEVPAESRTILGEPSTATAIGAEEISATGPVRADTAAQQMICRIGQWCVWPQDYHSIPAPQCWTDTLMDLMIEQIVLQRYPDGAGVSVMSCSAVSAAIHHEISAEFAAQVMSSHDASLYCIIPVNVRNHWQMIVLDVAERVVHYYCSLREHNTVVLSSLLSLVELSGKHTGCTSWKIETHDGAPVQTNAFDCGPFSCLFLKHLLHGIDMNFGDRESAALRTDLKFMIDAVSTPVVPATDKLKKKPDGSATQLTQFQQKFLSASDNWQSPDVDLQAVYDEVVESIVSGHNEPSSRNTSRLQKKSPGKGGKGQVRRRSAVTRDPAWLKSASAVQKAFNSAPARTVNAILRRPNACPSFTATQVADHYFNLRPAVTSLAPEVIDILPPPATDHSMLVAELSESEVWEKMQKAPNSAPGADRITIRMVRMADPGAMILTRFYRACLLRKWVPLQWKQSVCKLLYKDGDKERLANWRPIALEPVLQRVLSAVVASRVTNWARANGLISLEAQKGFQPADGTSEHNFVMEVAIQEARRTNAQLAISWLDISNAFGTVSHQLLFSLLERYGLDPTFTSFIQNLYKDATIVVKGANGTHVTARWSVGVRQGDPCSGILFCLFVEPLLRSVLPSLPCEAETTAVNVLGQPITALAYADDIALFAPSIGVMQQQLCKIQGMASAMGFRFNPKKCASLYLNRAVVNAATFTISGEEIPALVHGDTFRYLGVAAGLGKPQTPFSLLRENLREAELIFRSKLAPWQKMDAYRTYVLPRLTFQLMIAKFNNIKQSAGQYDRAILRLVKRCFQLPVETSTDFIRAPRQCGGLGVPSLRELYATAKVSRALKMLWSPCRVVSSLAASQLQRVASAYFAKRLRDVEAADLSTFMNAARSTPLDRSGYPTCLWMDARKQMSYLTKVAGVDCYFLVGEAGTSFFIRNGLGQTVSVLSPLRKNKVMSVLGGAIQTRHLDAWLQCKRQGKTASCIVLDRSSSRFITTGRYTSFAAMRFALPARLDLLPCRARSSMRSYQNCRRCGYDRETLPHILQHCRQFSAPAYQARHDAVQGRLETVMRRRFPNLRVNRALPEIGSNKRPDLVVVDEEKRLVILLDIAIVFENTAAAFVDARTRKWAHYEKEILAYRLRGYSVTYDAIVVGALGTWDPKNDAILKRIGVVSQRYLRLMKVLVVSEMLEHSSRIYRKHLGLRDLLPDTGTKRRPVGTTETDPPGGDLRQKKRNTISARASGGKCLERRFTSPVGTPSQRGELQCQPCPGPRRPALAGIAPNPPSLQPRKPPPRQHQKPVTKSTAH

SEQ ID NO: 1441 - protein, 1195 aa, synthetic construct
  source 1..1195: note = Description of Artificial Sequence: Synthetic polypeptide
  VARIANT 231: note = Any amino acid
  VARIANT 253: note = Any amino acid
  VARIANT 275: note = Any amino acid
  VARIANT 387: note = Any amino acid
  VARIANT 389: note = Any amino acid
  VARIANT 398: note = Any amino acid
MLQLRLPTPQTLRLLHPSQLPQSHSTKRWSNIYEERARAPKDTTIERVSAASKIPKLDPAKRRIGAPLQLMQGNSISRQLSASSQYVQHNAVVRRVSAPPHTGNFTGSCRRKLALPHRPPSETQPAESYLHCWTTQRDPTLADQHGLQDHPTGLPPEGSHCIKDPRQNSSTEGQRRSGNSQARRIPKRASTAASKTVLPKRTSAALKSVREDTALVLEDPAKWSSQHREGXRQQANPTAVFQPEPAEIEQQPXVRAATPWQAAWMEELARTASFXDFDLLVDRLTKDLSAEIVSGRKGTQENTPTAHRQNQNNMREARRRNISRCYDPAAASRIQKLYRSNRPKAMREILDGPSSYCAIPSERLFLYFKGVFDRVAQNDMQRPECLXPXPRVDYAEDXEQDFTSWEVEARLTKTKNTAPGKDGIRYNFLKKRDPGCLVLTAIFNKCKQFRRTPSSWKKSMMVLVYKKGKQDNPNTRRPISLCSTMYKLYASCLAARITDWSVNGGAISSIQKGFMSCKGCYEHNFVLQTAIHMARRAWRQCAIAWLDLANAFGSMPHQHIFDMLREFGMPENFLQLVRELYEGCTTTICSMEGETPEIPIRSGVKQGCPLSPIVFNLAMEPLIRAISSGLGGFDLYDNRVNILAYADDLVLIADNPESLQQMLDITSQAANWMGLRFNARKCASLHIDGSRRDSVQATSFQIQGEPMIFLEDGQAYQHLGTPTGFRVQQTPEDTIAEILRDVARIDSSLLAPWQKINALNTFLIPRISFVLRGSAMVKVPLNKADNTIRQLVKKWMFLPQRASNELVYISHRQGGANVPRMGDLCDVAVITHAFRLLTCPDAMVRNIAESALQDAVKKRIARTPSNQDVATYLSGSLEGEFGRDGGDFASLWTRARNATRRLEKRIGCHWTWCEERQELGVLVPQVKNTDHTIITPRARTMLERTLKDAIRCQYVENLKRKPDQGKAFEVTCKWDASNHFLPGGSFTRFADWRFIHRARLNCVPLNGAVRHGNRDKRCRKCGYANETLPHVLCSCKPHSRAWQLRHNAIQDRLARAIPPPVGKVAVNSAIPGTDSQLRPDIVITNEDRKKIIMVDVTVPFENRTPAFHDARARKVEKYAPLAETLRAKGYQVQTHALIVGALGAWDPSNERVLRECGIGQRYARLMRQLMVSDAIRWSRDIYIEHITGHRQYQEG

SEQ ID NO: 1442 - protein, 1465 aa, synthetic construct
  source 1..1465: note = Description of Artificial Sequence: Synthetic polypeptide
  VARIANT 27: note = Any amino acid
  VARIANT 59: note = Any amino acid
  VARIANT 61: note = Any amino acid
  VARIANT 425: note = Any amino acid
MQDMEEELLLDVEMETETTEPQTSTAXDATTTTDRPTRWGPHPRAVAAAAIAQLVTGEXAXPALPSRQDRRPAPRSHAPTRSRWGPRHQAVGAAAIASLATGLPASAAPVSRATKHGEGRRRLQTRWGPRVSIPRAARRPGSRWGPPRAAGASGQLPASASGATGQLPEHVEAITTTPRVASDADEGPTPPDPWILRFDGACRRNPGPGGAGAALFKPSGAVVWTCSHYMPSSNETNNTAEYTALLLGVQSAVHHGATRLDIEGDSSLVIAQVKGTFACRNAKLRQLRNRVRHALRSVEKYTLRHIDRKANAHADRLANRALDRRSSSSECEPHGSCMERCCGTDTTPAVQGPTPQAAAAVPVQVWPQWQRQTMVAWTTSHGGRCRDCSTRCGRSLPSLAHRPRLSPRRQPRLRLRQLSDEERDXAADALQELSDVMASKIVDADSWDTGEGYISSIPERIREVLQPYTTRPPRPGHQQQQRRRPPRVTRNQREHRLDEALDDMQATQQAAPRDQRAIHRARRRVGRVRASMAKQELRQAFAKDESKCVSKILAGASAETAAEEHVDECPIDAATLHAHFTGTNAPRTDFDYDAACGQEFRGALDSMQPPTVATDAFEEELTIDEVEDQLTRAAKTSSPGHDGIGYDIYSRFAAQLVPLLHAAYQFCWLHRRVPALWKLGIVRLIHKKGDPMQPTNWRPICLQPAIYKIYSGLLARRLSRWMEQNQRLPMAQKGFRAFNGCHEHNFVATTLLDQTRRSHRRLYQVWYDLRNAFGSLPQQLMWSVLRHLGVDASFIARCKNIYQDSAFVVANAVDGATDPVRQEVGVYQGCPLSPLLFISALVPLIRRLEKLDGVGVPLAEGVRPCATAYADDIKVFSDSAAGIRKCHDAVTRFLEWTGLRANPGKCASLAVTTNARGNPVRDDGVHLELQGEVIAPLSLHDSYRYLGVGDGFDHVRHRLQLEPKLQQIKREAVALMQSGLAGWQVVKALKTFVYPKVEYALRHLRPLQSQLQGFDRAVVRGLRHLLRLPQSATTEFFYTPTSGGGLGLQSLVEMHQALQVAHAWQMLHSKDAAVVAVAKEQVCQVARKRYRLQEEHWRGRGDELVRLFLNSELAASPFADCLRRNGDIGSLWTDVQRTLRLHHLSLTAQDDRDGQDPLALRVPHHTKWLDHKTVLRHVKLHMKIRHQTRWKGLVDQGKTVRVHGGLGAKFVSTGAGLSDDAYRFGVKARLNQVDTNAVLKRKRLRSSKTCRDPTCSSAETLAHALNHCASNMDAIRQRHDDALEQIGSKIRGALERAKSTTELRLNQTVPEYTGAALRPDIVLRNVAAKKMVIADLAVTFEDHAAGARHSSLQLSHDHKTLKYQPIVAELRVQGWQVQTAAIVYGSLGSVQPSNFKTYTEKLKLHKREARQLDLQLSSHCIQASHRIWGWHCRRHREGQRSGNTSRASRGSGGTPRRTSQVRARR

SEQ ID NO: 1443 - protein, 1812 aa, synthetic construct
  source 1..1812: note = Description of Artificial Sequence: Synthetic polypeptide
MLADPAALAAGLARAPPPPSAPQDPSPAFPAGPAGQNPRAAAPARVEVHTVVAPPGRAGGMLPDPGLVDSSPAAATAATPAPVAATATTARAAARVAVEHHAHAEPNQEHLPMARVLVEPMQVDECSSCDRSTLTADDGSGDDVAAPSSMLSNDVAAPMDVDSGTSCPPTLQQPLQRPRALHVGSKRRRLDADDGEEAHQLQEEEEAGIHAPALRLSAASAQPASVLAVYTHNASRFDCTLCAYTAGSFASLLTHRNSRHRRTAFLDRFSAGCACGVPFASRLAAARHAQACASLSSAPSAEASSAAGTSSPTADGADSTVSAVAHAEPGLPHHNDTELTASPPLVSSSDVEVQATKTEATDNRWGAPLPRVLVASRIAGRLAQVPPPRWGPPLPRTTIAARIATRLAATPAPRWDPPLPRSLVVSRIAARLLPALPDAPACEEEAKDSDTMDWAPTWTNEETKESEPHDEAPGQVDEETIDDADGEWLLRFDGACRANPGPGGAGAALFKPSGPVVWTCSHYDPSTTATNNTAEYTALLLGARAAADHGVTKLRIEGDSTLVIQQVRGIFATRSTRLRALRNKVKLELARVGSFSLHHIDRQANGHADRLANAGLDRRRTKLECSVHPDGRGCTNTSVATAAPTAPAAPLPSARPPASTAAPSPDDDHSDQGDIDDGEVYAAMCISPDAVPHRRPRLRLRRLTDEESEEAGNVVERLAASLAAKIADAPDWETAEGYITALPYALYDKLQPYSQSQHQPPRQQQQQQRQRPRQQQQTRQRRQRRCKRGGGSQHRQRKTRRRRPPRVTRHHREHRIDEALDDLHALESRRPQDRTAISKARRRVGRIRSALDQHQLRHRFDTDEKACVDGILAAARDKDRAASVTTTAQTAAPPHSAPASAPSSAVDDGICPIPGDLLHAFFTDVNTPRTEFDADSPIGARFREALAQLPAAIAATELLMEPPSPDEVEDQLQRVRGTSSPGLDGVGYDVYKTFTQQLLPALHAAFSRCWTDQRVPQSWKLGVVRLLFKKGDRQDPANWRPICLQQAVYKLYAGILAHRFTRWLDANTRHADAQKGFRAVNGCGEHNFLAATLTDNARRRRRELHVVWYDIKNAFGSVPHELLWEVLRRMGVPAQFIACCQGIYDAAAFTVGNAADGTTAPIQLRLGVFQGCPLSPHLFTAVISPLLHALKRLPGTGVQLSAVDRPGASAYADDLKVFSDTKDGITRQHQLVTDFLRWTGMVANPSKCSTMSVQRDNRGVLKTANLTLQLDGAQIPALGMTEAYAYLGIGDGFDHVRRRVELAPKLRELKADTTALMQSGLAPWQVVKALKVYIYPRVEYALRHLRPFQQQLQGFDRHLARGLRHLLRLPTSATTEFLYAPTSRGGLGLLPLTEVHGALQIAHAWQTLHSPDPAIRRIARVQLRQVADARHRLDAEHWKERGEELCERLLNSQLGTSAHAPPKRRNCDIGSLWVDVQRHLRSLGLQLQTAPADTHTGAPAQPLQLRVPHHDKWLTHKDVLRHVKLHIKNNHWHRWTSMRDQGKTARAHGGEGSGFLTQPRGMWEADYRFAVAGRLNQVDTYSVLKRRRLRSHDRCRQPGCHRAETLAHVLNHCPGTMDAVRGRHDGALKRIERELHASATDRRDRVELRVNQTVPSLAGPALRPDLQLYNHTKKTVAVVDLAVAFEEQASDDASSSALSLIASHKRAKYDRIKRHLERQGWKVHLSALVYGSLGAVASGNYQVYTTHLGLLKRDAKRLDRQLSVECIQSSRRIWNLHCSQHRTRQHQARPSQGPRGSRATETGGTPSQTSRR

SEQ ID NO: 1444 - protein, 1595 aa, synthetic construct
  source 1..1595: note = Description of Artificial Sequence: Synthetic polypeptide
  VARIANT 337: note = Any amino acid
  VARIANT 1389: note = Any amino acid
  VARIANT 1441: note = Any amino acid
MSGDVVSSDGSSRTTDASGDGDDGAGSSDAAGDVGVVAMDVDQGARRQQPPWQRVGGKRRRLNDVDDEDTRELAELLLEEEDEAGDHAPAPRLSAASARPASVLSVYAHNAQRFQCTLCTYTAASFASLKRHRDSRHRRTAFLDRFSAGCACGAPFASRLAAANHAHACASLNRTLSVAATPAAGELSPTAGAANATVKAATVTPDSPRQDPPELAASPPLASSPDVAVQAADMQAPTRWDPPLPRTLVATRVASRLTDLTPPRWGPPLPRATVVSRIAARLEAAPTPRWGPPLPRVVVASRIAERLAPPELAADDETKDGEEDQSFTEPVAAARSXGGEDANGEWLLRFDGACRANPGPGGAGAALFKPSGPVVWTCSHYMPSSSETNNTAEYTALLLGMRAAADHGATRVHVEGDSTLVIQQVRGIFATRSTRLRGLRKSVKAEMARMEHVTLHHIDRQANGHADRLANAALDRRKTKLECGLHPDGQGCSSTAATTAVPSVVPDRPPSSTAAAPTPSAEPDETEQGDIDDGEVYAAMCIGPDSIPERRPRLRLRQLSETEEEEAGAIVERLAATLAGKITDASDWATAEGYITALPYTLYDKLQPFAQHRHQPRPQHRQQPQRDPPLGTHDGDHGQPSTSRSRRRRRRAKDRLRRRPPRITRHHREHRLDEALDDLRAVEHASPHDRPAVARARRRVGRVNSAIAQQQLRHKFDKDEKACVDGILAAARASRGLATPSASASRHPPPVPSTAADDGSCPIPSDELHAFFTAVNTPAGTFEPMAPVGAPFRSAVAHLPAATSQPELLSDAPTTDDIEDQLQRARGSSSPGLDGVGYDIYKAFAAQLLPALHAAFACCWRHKQVPQSWKVGVVRLLFKKGERTEPANWRPICLQQAIYKLYAGVLARRLTRWLDANGRHADTQKGFRAMNGCGEHNFLAATLVDQARRKRRELHVVWYDFANAFGSVPHDLLWEALERQGVPSPFIACCRGLYADAVFTVGNAADGTTAPIALRVGVFQGCPLSPHLFTAAIAPLLHALKRLPDTGVQLSRVDCLGASAYADDLKIFSGTEGGTKRQHALVADFLRWTGMRANPAKCCTMSVQRDTRGVLKACNLGLQLDGAPIPALTMSASYAYLGIGDGFDHVRRRIELAPKLQELKHDATALLQSGLAPWQVVKAVKVYLYPRVEYALRHLRPFHQQLEGFDRHLVRGLRHLLRLPANATTAFFYAPVSRGGLGLLPLTELHAALQVAHGWQMLNSKDPAIRRIARVQLRQIADARHRIDAQAWQDREEELAQLLLNSQLGASTGAPPKRRNGDIGSLWVDVQRHLRHLSLKLETAPACAETGTAAAMLQLRVPHHDKWLDHKTVLRHVKLHYKNKHWARWAAMXDQGKTARTHGGAGSGFLTRPRGMWEADYRFAVAARLNQLDTHSVLKRRRLRXHDRCRQPGCTQGGDAGARAQPLRRHHGRGPRPPRRRPQAHRARAARVVAGRPGPRRAPGQPDGAVARRPRATARPPAVQPHQEDGGGGRPGRGVRGAGERRPGELGAGTHRRTQAREVCRRQATPRAPRVEGPPLGARVRLARRGAGRQPQGAY

SEQ ID NO: 1445 - protein, 1614 aa, synthetic construct
  source 1..1614: note = Description of Artificial Sequence: Synthetic polypeptide
MDYDDSEFFDAICIPDEDADVLDDGDEGDEGGNDDESSEPLPLAITNAPSAPLHATMLCGTVTQPWLLRFDGACRRNPGPAGAGATLTRPNGIILWTHYRYIPDKTATNNVAEYEALLDGLRCAAHHGVKHLRIEGDSNLVIEQVKGIFACSTSLRPRRDQVREILRHFETYSFRHIDRALNRQADRLANQALDLLKTVSVCALSQTRVQDDTGAAHGCWHWTPPDASPTDDASTSILTQDVPVPMDIDDYDPDEPMNAADDPVSINAEREGGTVYPVLRLGPNVVPERQKRLQIPWLPPREMQKLEKKIEVLGETFASRIRDAPDWFSAEGYITALTSELATLIRQSTAATTGPNAARPCERTISKEKRRARRTTPLQRALAEAKHELQIIQPDASRKSVRKAARRVKRISQAQQRHDLRRLFSTNERRCVEKILRDPPVGPSSTSSSLPATDDDRCTIDPADLFAYFQTQATAPTNFDFDDEGGELFRSVLDELPRADQEVHLLEDEITRDEIEDQLSRISKSTAPGLDGITNAVYVRFKLQLLDALQAAFNACWRYNRVPSMWKAAFVRLIYKKGNRAVPSNWRPICLQQTVYKLYTAILASRLQRWMDANARFTMSQKGFRAFNGCHEHNFVATCLHDQTRRLRKKLAIVWYDLRNAFGSLPHEYLWRVLARLGMPPQFVARVRQLYADASFTVESRDGTTDPVQLERGVYQGCPLSPYLFIAALIPLVRALHKLKDQHGIVLAPGVTDCVSAYADDIKIFARSGTGAKALHEIVVRFLSWTNMAANPAKCALMVTDGARGGDDTDASMTLSIEGETIPRLTGKEGYVYLGVEDGLAHERRATCLRDSLKAASADVVRLLRSDLAPWQIVRAIKSHVLSRFDYVLRHLRPFLSLFDGFDKMLVRGIKRLCQLPQTATSEFLFSPTSAGGLGFLPLKELFAALQIVHALQMLHSKDANVRAIARHQALQVVRKRYALQSDHWSDREEELLEEFFNGTLERSPFALAKKVSGDIASLWTDVRVNLTKYGLKFGEAHGRRLQPLVSHTDKQLAPQQWASAIKTHMRLRHLKRWTTLVDQGKTARMHERIGSAFLTRPSGVYDASYAFAVRARLNQVDTRSALKRKRIVNNSRCRVSGCSELETLAHVLNHCRFGSDSIRARHAETLLLIKTTMERELTRPGRQHQRLLVDATVPEARDPVPSNDAAESNIGAMAPSISHLRPDIQLYDNKTMEAVIIDLAVAFEDQSTDDAASSSSFARVKGVKTKKYEVIKQFLEYKGYTVHVAALVYGSLGSVDTGNFAVYTERLGLRKGAVRRLECSLSARHINFAHRMWRRHAIAHTTGLRLIGTNSVQQQGVQRAPAEKQQHQRPVQRPSRAQAPRDQPSQQQQSQQSFQQQSQQSQQSQQSQQSQQSRQRHAPTPTPVPVPVPVPVSTPTLTPTPTPTRRPKPAPSSTQPQQGAPAQRRQQREQKKQPACRRRHATAVRETPPAAPTAARTATPTARPTATTRSTSTTRSTATATSTTRSSAPTSRPSAPRPRSSAPRPRSSAPTTRSAAPTTRSAAPTAIATTSVYKSRRTTNAISGATTRRSASSKRAPMQPRTALTPTQQQQRQ

SEQ ID NO: 1446 - protein, 1983 aa, synthetic construct
  source 1..1983: note = Description of Artificial Sequence: Synthetic polypeptide
MPRSLASEPVHSSASRLPSQAPPTSRSGAAHTPPPSLQARPLASADAGLAATALASPQDPPYDVAPPGRAAGRLPDSVSPGATLSAATARALAVRHWPLELDSDSSDDEDAQDPHAAAPGPPADVASVLAPPGRAGSMLADPAALAAGLARAPPPPSAPQDPSPALPAGPAGQNPRAAAPARVEVHTVVAPPGRAGGMLPDPGLVDSSPAAATAATPAPVAATATTARVAVEHHAHAEPNQEHLPMARVLVEPMQVDECSSCDRSTLTADDGSGDDVAAPSSMLSNDVAAPMDVDSGTSCPPTLQQPLQRPRALHVGSKRRRLNADDGEEAHQLQEEEEAGIHAPALRLSAASAQPASVLAVYTHNASRFDCTLCAYTAGSFASLKTHRNSRHRRTAFLDRFSAGCACGVPFASRLAAARHAQACASLSSAPLAEASSAAGASSHTVDGADSTVSAAGHAEPDLPRHNATELTASPPLVSSTDVEVQATETEATENRWGTPLPRVLVASRIAGRLAQVPPPRWGPPLPRTTIAGRIATRLAATPAPRWSPPLPRSLVASRIAGRLLPALPDAPACEDEAKDSDEMDWEASEPHVEAPGPVDEETIDDADGEWLLRFDGACRANPGPGGAGAALFKPSGPVVWTCSHYDPSTTATNNTAEYTALLLGARAAADHGVTKLRVEGDSTLVIQQVRGIFATRSTRLRALRNKVKLELARVGSFSLHHIDRQANGHADRLANAGLDRRRTQLECSVHPDGRGCTNTSVATAAPTASAAPSTPTRPPATTAAPFHSDQGHIDEDDERRADIDDGEIYAPMTLGPDEVPARRPRLRLRQLSDEELEAAGAIVERLSASLSAKITDAEDWGTAEGYITALPHLLYDKLLPYSRTAPRHQRPPRPSRNQQDHPQPRRDQPQRNVDEQQHAESQQGEDQRQQQPPTRRRRRRGKRRGRRQRRHPRQPGQSTRASQQSRQRRPRPPRVTRHHREHRIDEALDELHTLERARPQDRSAIDKARRRVGRVRGAINQHLLRHRFDTDEKACVADILEKAHAARAARTAQAAGAATSTGGAATAPTQQAATSALGDADDGTCPILADELWQYFTGTNTPRWEFNPATPVGEAFRTAMARLPPATRLRELLTEAPTADEIETQLQHVRGSSSPGLDGIGYDVYQRFAQQLLPVLTASFKRCWTAKMVPQSWQVGVVRLLYKKGAHDDPANWRPICLQQAIYKLYTGVLARRLVRWLDVNDRHAPGQKGFRAVNGCGEHNFLAATLIDQARRKRRSLYEVWYDFRNAFGSVPFQLLWDSLQRLGAPADFIDMCKGLYHQAAFVIGNAADGPTAAIRQQVGVFQGCPLSPQLFNVAISPLLFALRRLPETGVQLSGDDRVGVSAYADDLKTFSSTKAGATKQHELVAAFLAWTGMKANAAKCSSMGVRRNSNGATEADNLDLALDGTPIPSMTHMQSYTYLGIGDGFDHVHRRIELAPKLKTLKQDTTALLESGLAPWQVVKAVKVYLYPRVEYALRHLRPEDQLLESFDLHLRAGLRHLLRLPKNANNDFFYSPVSRGGLGLLPLVELHAALQIAHGWQMLNSTDPATRRIAREQLHQIADARHRLDKAHWKERGDELCQLFLNLDLGTSAHAPPKRRNCDIGSLWVDVRKNLQAFGLKLETAPADAESGTPALPLQLRVPHHEKWLTHRDVLRHVKQHLKNKHWRAWCAFQDQGRTARAHGGVGSSFITRPRGMWESDYRFAVAARLNMVDTSATLARRRLRAHDRCRYPGCRWKESLEHVLNHCPGTMDAVRGRHDGVLREIEHALRAPSGARRELRVNQTVPGLPGPALRPDIQVYNHDQRTVAVVDLAVAFDRQDRDDPETSGLAKAAAEKKAKYTGIQRHLERQGWKVHLSALVYGSLGSVAPNNYKVYTEHLGLLKRDAKRLDRTLSVACIQSSRRIWNLHCAKHRARQHQTPSQSRGRRVTETGGAPSRTDRR

SEQ ID NO: 1447 - protein, 1493 aa, synthetic construct
  source 1..1493: note = Description of Artificial Sequence: Synthetic polypeptide
MQDQVDAEQQARNRWGPPLPRPLVASRVAARLGEVPPPRWGPPLPRGVVVSRIAARLEAVPVPRGGPPLPRSFVATRIADRLAPPSPDLSLLDEEMKESEPPDPTHHSADEDSTDAETADAVMEPAFVSDPPTATPREWRLQFDGACRGGPNPGGAGALLYNPEGAVVWTGSHYMPGAKETNNSAEYTALLIGARAAADHGARQLRIEGDSLLVIRQVKGLYATKSTRLRQLRNAVRHELARVGQHSLHHIDRQGNAFADRLANRALDLKSDKVECKEHPVAGACTTCMGSPSAGPPATPPPTTADIEMADAGSDDELRADIDDGEVYAPMRLEPGVIPTRRSRLRLRQLTDDEMEAAGEVVERLSAGLSAKIADADDWETAEGYITALPYMLYDKLQQYTQVRHGTARSPAPHPQRRDVQGQVETHREPRHETIGQPDQPGEPSPTRRRRRGKRKGRRQRRHPRRTNCGGGGRQQRKQRHPRPPRGTRHHREHRIDEAIDELHALERARPQARPAIAKARRRVGRIRSAIDQQLLRHRFDTAEKECVDGILAAARTARDARTTVRAAAATGTTATPETAVTSGTEQQDDNGTCPIPSEVLWRHFDSVNTPQRDFDPEAPEGAAFRSAMARLPAATRFMELLKEEPSTDGIEVQLQHASSTSSPGLDGVGYDVYKRFASQLLPVLKAAFKCCWTHKQVPQSWKLGVVRLLYKKGDREDPANWRPICLQQAIYKIYTGVLARRLTRWQDANDRHAPGQKGFRPVNGCGEHNFLAAMLIDHARRKHRPLYEVWYDFRNAFGSVPLGLLWDALERTGVPAEYIAAVQGLYDHAAFMVGNAVDGSTAPILQRVGVFQGCPLSPPLFSAAISPLLHALQLLPSSGVQLSGDDRPGVSAYADDLKTFSGTKAGVTEQHELVAMFLRWTGMAANPAKCRSMGVRRNGNGAIEADHLELALDDTPIPTLTHLQSYTYLGIGDGFDHVRRRVALAPKLKLLKQDATALMESGLAPWQVVKAVKGYLYPRVEYALRHLRPDDQLLESFDLHLRRGLRHLLRLPKSANNDFVYAPVSRGGLGFLPLVELHAALQIAHGWQMINSPDPAIRRIAREQLHQVADARHRLDKDHWKQRGDELCELLLNGELGTSAHAPPKRRNGDIGSLWVDVRKNLKAFGLKLATAPADPESGAPAKPLQLCVPHHAEWLDHRNVLRHVKQHMKNKRWRAWCSHVDQGRTARAHGGVGSGFLTRPRGMWESDYRFAVAARLNMLDTVNVLARRRLRAHDRCRHPGCRWKETLAHVLNHCPGTMDSIRGRHDDALKEIERTLHASSGDRQGRTELRTNQTVPGLAGPALRPDLQVYNHDQRTVAVVDLAIAFDEQPRDDPESSGLAKAAAEKKAKYAGIKRHLERQGWKVHLSALVYGSLGSVAPSNYKVYTEHLGLLKRDAKRLDRQLSVACIQSSRRIWNLHCAQHRARQHQDQPAPRGRRVTETGGTPSRTDRR

SEQ ID NO: 1448 - protein, 1716 aa, synthetic construct
  source 1..1716: note = Description of Artificial Sequence: Synthetic polypeptide
MLADPAALAAGLARAPPPPSAPQDPSPAFPAGPAGQNPRAAAPARVEVHTVVAPPGRAGGMLPDPGLVEEPIQATYAHDAAQFECALCPYVAESMAVLVQHRRSAHRGTRFKDIFTSGCQCSLVFYARIVAASHAVACARRNQRAVPPAPTPVAPTRPEATPQPTGYLAAAMTAAAAAASSDTVVAAATNMQSAVPAAAKTTGLQLVPPELEPALPQRASCHAGKRRRLNADEAVTPCTPTARVSPQTEVAMAPHDAPQDDTVLQREAAEPQPDPAATQGAQVQRVEDTTAAQDDTVQQDHDADTAQVSPPRRTPTRWGPRPSSTQEPSPMTGEPAATLAARRPLTPAATGTRATRWGPCHRAIGAAAIARLVTGLPTEPAQPQRRQPPPPQEPPLQPEPQAAAATVAADIAATVAADIAAAAANAAMDVDGGPAADETWLLRFDGACRRNPGPGGAGAALFAPSGAVVWTCSHFMPSRSETNNTAEYTALLLGAQSAVHHGAKRLNIEGDSHLILSQVRGAFACNNKRLRSLRNRVQASLRQLDWYRLQHIDRKANQHADRLANRALDLRRTVTECGPHAETRNRCFQTPQPLVEPGETHCVPGSDEVLAANTAMEDATAVPTEDDEAEVAARDGGEVFPTIAIGPDSAPAKQPRLRLKKLDEDDFDAAAAAVTRVSEELASKIVDAGDWTSGEGYISAIPERLRAALRPFALPTQPARPQPREPRMQQPPRRPPRVTRDHLEHRLDEALDTMENVQRSTPQNQKAVRRARRRVGRLRSAMDRTRLRKKFATHERECVAEILRRASTEEAANPSQEKCPIDRATLHEYFTATSTQRTPFDYDSAKGTEFRTFLEVMSTPSHETSALTAEPTLDEIEDQLAHVKAGSSPGHDGVGYDVYRRFQVQLLPLLHAAFRFCWRHRRVPALWKVGFVRLLHKKGDPQQPNNWRPICLQTAIYKLYSGLLARRLSKFLEANELLPMAQKGFRAFNGCHEHNFVATTLLDQTRRMHRRLYQVWYDLRNAFGSLPQQLMWGVLRQLGVTEEFVARCSGIYEDSYFVVGNASDGATEPVRQEVGVYQGCPLSPLLFITALVPLLRALENQDGVGVPLADGVRPCATAYADDIKVFCDSATGIQRCHALVTRFLEWTGLQANPAKCAFLPVTRSQHSNPTRDRDIELRIHGEAIATLGLQESYRYLGVGDGFDHVRHRLQLEPKLKQIKREAVALLHSELVPWQILKALKVYIYPKVEYALRHLRPLKSQLQGFDSAIVRGLRHLLRLPENSHDGLFFSPTSAGGLGLLSLVELHEALQVAHAWQMLHSKDPAIRAIARTQVGQVARKRFKLVEEHWRGREDDLAQRFLNTELAASPHATETRRNGDIGSLWNDVRDTLQTLGLKFAAGDEEEAPGLLQLRVPHHTKWLSHSTVLRHVKLHMKLRRMDTWKSKVSQGTTVREHGGVGSRFITAGAGLSDAEYRFAIAPRAHLIDTNSTLKRRRLRANDTCRAPGCSYTEPPAHILNKCSPNMDAIRKRHDDALERIADALRRKVEKSGGRLEVAINKTVPEYDGAALRPDIVLRNTETKRAIIADLAITHENQPTDATTSSALQQSRDNKITKYQTVAAAMMRAGWRVRVTGIVYGSLGSVLPSNFKVYTELLALLKRDARRLNRQLSSHCIRASARIWSAHCRRHRERQRSGNASRASRGSGGAPRRTSQASARR

SEQ ID NO: 1449 - protein, 1546 aa, synthetic construct
  source 1..1546: note = Description of Artificial Sequence: Synthetic polypeptide
MSGDVVSSDGSSRTTDASGDGDDGAGSSDAAGDVGVVAMDVDQGARRQQPPWQRVGGKRRRLNDVDDEDTRELAELLLEEEDEAGDHAPAPRLSAASARPASVLSVYAHNAQRFQCTLCTYTAASFASLKRHRDSRHRRTAFLDRFSAGCACGVPFASRLAAANHAHACDSLNRTFSVAAAPAAGELSPTAGAANATVKAATVTPDSPRQDPPKLAATPPLASSALVVDPDHAEQQARERWGPPLPRTLVAGRVAARLSEVPAPRWGPPLPRGVVAFRIGHRVLPPEMTSDEETKDDSSVQDGDRQDYPVAAMDVDSGMSGEWLLRFDGACRANPGPGGAGAALSQPDGSVVWTCSHYMPSSSETNNTAEYTALLLGTRAAADHGTTTLRVEGDSTLVIQQVRGIFATRSVTLRHLRDQVKLELARVGRFSLHHIDRQANAHADRLANRALDLRRTVSECGVHPDGNGCTPTAIDDRPLAPTQQPPDAPPPPPAADIEMEDPDDEDLADIDDGEVYAAMRVGPNATPQRRRRGRSGTAKKHRRQRPPRVTRHHREHRLDEALDDLHAVERSTPSDRTTVRRARRRVGRVNSAIEQQRLRHRFDTDEKACVTDILAKACATREAARTTASGGDPPAGPATPAAGSADDGTCPILGEELWRFFDSVNTPRQEFAPDAPVGAAFRSALARLPAATSCKELLTAAPSAGEVEDQLQHVRGASSPGLDGVGYDVYQHFAAQLLPALTAAFKACWTAKRVPQSWKLGVVRLLHKKGAREDPANWRPICLQQAIYKLYTGLLARRLVRWLDANDRHAPGQKGFRAVNGCGEHNFLAATLVDQARRKRRTLFEVWYDFRNAFGSVPFALLWDALARLGVPDDYVTMCKGLYESAAFVVGNAIDGTTDPIALRVGVFQGCPLSPQLFNAAISPLLFALQRLPATGVQLSGDDCPGASAYADDLKIFSGTEDGIKRQHALVADFLRWTGMAANPNKCCTMSVQRDGRGVLKTDDLQLDLAGTPIPALSMSASYTYLGIGDGFDHVRRRVELAPALKQLKDDATTLLQSGLAPWQVVKAVKTYLYPRVEYALRHLRPFQQQLEGFDRHLARGLRHLLRLPGNATAECFYAPVSRGGLGLLPLTELHAALQVAHGWQLLNSKDPAIRRIARVQLRQIADARHRIDSRAWEGRDEELCELLLNSQLGTSPDAPPKRRNGDIGSLWVDVQRHLRTLGLKFATAPACADAGSAATTLQLRVPHHDKWLDHRTVLRHVKLHVKHRHWSKWAAMRDQGKTARAHGGAGSGFLTRPRGMWEADYRFAVAARLNQLDTHSVLKRRRLRAHDHCRQPGCSRAETLAHVLNHCAGTMDAVRGRHDDALKHIERALHASSPGGQDRVELRVNQTVPSLAGPALRPDLQLYNHTKKMVAVVDLAVAFEEQASDDPESSALARIAAHKRAKYAGVKRHLERQGWKVHLSALVYGSLGAVPAGNHKVLTEHLGLLKRDAKRLDRQLSVACIQSSRRIWNLHCSQHRARQHQAPGGSRAAETGGTPPRTGRR

SEQ ID NO: 1450 - protein, 1392 aa, synthetic construct
  source 1..1392: note = Description of Artificial Sequence: Synthetic polypeptide
MARVLVEPMQVDECSSCDRSTLTADDGSGDDVAAPSSLNSNDVAAPMDVDSGTDCPPALQQPPQRPRALHVGSKRRRLDADDEEEARQLQEEEEAGIHAPALRLSAASAQPASVLAVYTHNASRFDCTLYAYTAGSFASLKTHRNSRHRRTAFLDRFSAGCACGVPFASRLAAARHAQACASLSSAPLAEASSAAGASSHTVDEADSTVSAAGHTEPDLPRHNATELTASPPLVSSPDVEVQAPETEATENRWGTPLPRVLVASRIAGRLAQVPPPRWGPPLPRTTIAGRIATRLAATPAPRWDPPLPRSLVVSRIAARLLPALPDAPACEEEAKDSDTMDWAPTWTNEETKDSEPHDEAPGQVDEETIDDADGEWLLRFDGACRANPGPGGAGAALFKPSGPVVWTCSHYDPSTTATNNTAEYTALLLGARAAADHGVTKLRVEGDSTLVIQQVRGIFATRSTRLRALRNKVKLELARVGSFSLHHIDRQANGHADRLANAGLDRRRTKLECSVHPDGRGCTNTSVATAAPTAPAAPLPPARPPATTAAPSHDDDHSVQGDIDDGEVYAAMCIGPDAVPHRRPRLRLRHLTDEESEEAGDVVERLAASLAAKIADAPDWETAEGYITALPYALYDKLQPYSQAQPQPPSQQQQQQQQRPRQQQQTRQRRQRRGKRGGGSQRRQRKTRRRRPPRVTRHHREHRIDEALDDLHAIESRRPQDRTAISKARRRVGRIRSALDQHQLRHRFDTDEKVCVDAILAGARASQGATTAPPSATTDPPAPMDDSRCPIPGDDLWRFFDSVNTPRRSFDAEAPDGAAFREAMACLPAATRAQELLTEAPTVDEVEDQIQHARASSSPGLDGVGYDIYKQFAAHLLPALHTAFVCCWNHKRVPQSWKLGVVRLLHKKGDRQDPANWRPICLQQTIYKLYAGILSRRFVRWLDANARHAEAQKGFRAMNGCGEHNFLAATLVDHARRKRKELHVVWYDLANAFGSVPHDLLWETLARQGVPPTFVDCCRGIYSDAAFTIGNAADGTTAPIRLRVGVFQGCPLSPHLFTAAIAPLLHALKRLPVTGVQLTGVDRPGAAAYADDLKTFSSSVDGIKRQHELVATFLRWTGMAANLSKCSAMSVQRDSRGVLKTGDLCLKLNDAEIPALSMTASYAYLGIGDGFDHVRRRLELAPMMKQLKHDATALMQSGLASWQVVKAVKVYLYPRIEYALRHLRPFKQQLEAFDEHLRRGLRHLLRLPTNATSAFFSAPTSRGGLGLLPLTELHAALQIAHGWQILNSPDGATQRIAREQLREIPDARHRLDTAHWRNRDAELCELLLNSQLGQSSHAPPKRRNCDIGSLWIDIRRQLGTLGLKFETAPGRRSHQPARPAIAAFACRTTTSG

SEQ ID NO: 1451 - protein, 1606 aa, synthetic construct
  source 1..1606: note = Description of Artificial Sequence: Synthetic polypeptide
MSGDVVSSDGSSRTTDVSGDGDDGADGAGSSDAAGDVGVVAMDVDQGARRQRPPWQRVGGKRRRLNDVDDEDTRELAELLLEEEDEVGAQAPALRLFAASAHPASVLSVYAHNAQRFVCTLCAYTAASFASLKRHRDSRHRRVSFVDKFSAGCACGTPFGSRLAAARHAQACASLSIPRTVTAPAAAGDLSPTATGANATASAAATSPDLPRPASPELAASPPQTSPFDVAIQADAAEQTAWTRWDPPLTRAAVAARVASRLAVVPAPRWGPPLSRTLVASRIAARLDAQTSRWGPPLPPAMVASRIASRLAAMPAPRWGPPLLRTVIASRIADRLLPPELAADEETKDDDVHMDNAASVDVDEESEVADVVMTDHDGEWLLRFDGACRANPGPGGAGAALFKPSGPVVWACSRYMPSSSATNNTAEYTALLLGARAAADHGATHLRVEGDSTLVIQQVRGIFAARSTRMRALRNQVQSELARVGSFSLHHIDRQDNAHADRLANRALDLRRTVIECGIHCDGVGCTATTTEVQSSSAPEIPTRPVADDHDEHEVVDVVDVCGVCGVCGDRGTCGVCDVSGDIDDGEVYAAMRTGPDAVPARRPRLRLRKLTDEEQEEAGTLAERLGATLAAKIADARDWESAEGYITALPYLLYDKLLPYSQGPARSLPVRQHQRQQQQPDGQFQRPTQSRSAARRQRRQRHRARRRPPRVTRHHREHRLDEALDDLHAVERATPSDRRSIRRARRRVGRVNSAVEQQRLRHHFDTNEKGCVEILLAKARAQRSTTVARTAVGEPNSGAAEDDGTCPIPSERLHRHFTEVNTPGSSFDAMAPVGAPFRAALAHLPAATEASELLTEAPTPDEIEDQLQRAKGTTSPGLDGVGYDVYKAFSTQLLPVLHAAFQCCWQHHRVPQSRKQGIVRLLYKKGPREDPANWRPICLQQVIYKTYAGVLARRFTRWLAANGRHADAQKGFRTVNGCGEHNFLASTLIDHARRSRRELHMVWYDLKNAFGSVPQELLWEVLQRMGVPPAFVEVCQGLYQDAAFTVGNAADGPTDLVRQLVGVFQGCPLSPHLFTAAISPLLHALDRLKDTGVRLSADDRPGASAYADDLKIFSGTADGVKRQHALVADFLRWTGMVANPNKCCTMSVQRDGRGVLKACDLELQLDGARIPSLIMNASYAYLGTGDGFDHVRRRIELVPALMQLKDDATALLQSGLAPCQVVKAVKTYLFPRVEYALRHLRPFQQQLEGFNRHLVCGLRHLLRLPVSATTSFFFVPVSRGGLGLLPLTELHAAPADRRPAPPPRPRPLEGAGGENMRAADQLAARDVGPRPTQAPQRRHRLVVGRRPAPPPRTRPQARDRAGVRGDRHRGGDAAASRAAPREVAGPPHGPAAGEAAHEEQALAAVGRDEGPRQDRPHPWWCRERLPHAASRPMGDRLPLCSGGSAQPAGHAQRAEAPAPPRARPVSTAGLLPCRDTGTRAESLRRHHGRGPRPPRRCAQDHRARAHRVVRAARTAPSSGSTRPCPRSPAPRCGPTSSSSTTPRRRWRWSTWPWRSRSRRATTPRALRWRASPRTSEPSTPASSGTSSAKGGRSTSRRSCTARWAR

SEQ ID NO: 1452 - protein, 1540 aa, synthetic construct
  source 1..1540: note = Description of Artificial Sequence: Synthetic polypeptide
MATSSSSVSSGNVQTEVRCVYHGKGDLLLECPVAHCPSIHPTVATITKHLKKHHTPQFEQITTKNLTITYTCSQCSFSTTGLTQHHISKHYKTCKGVGAVQEGNKGRFCCPACGTRWALLCKARHHFNNVHFEYDTPPIAAFSGTPYKLKKRKFTIINKALTYSCPLPLNQLLCPLWSCSLTILNKPLSSVQQETAHGDGSQGQSYVPTQLRQVLRARCHCGNPPIGKGHWASCQGKRPLSSPKGGRSSPTPPANLTLHFLNYLPFQLPSQSSSPQSSTLDPTACKARVPIPSFLRGDCEVTFFIIPSVNFYRPYLSYPLRMFWRNRTSSGHCSLHRVVRGFVRERLVPHPRSKSPARTPLEFLCEFRLAGVFPDPGKVASLRPVPAPLTLCLSPPVAGPMISCEDHSAPPSVRSSSPIPNSPASVSSVEAHLSDLLDKVSSGELRPLSPTLPSSGFFGPLLPPTPPPRPTPSAEKASPSGLSYLPCREVKIASIARPSPASQRVGCDADRTGPSLNPNYQQTSPPSTPSFSPIVRPPKFPRSGAKVNSKSKPPGVRPRRAKPIEPGTESASPVDVDTISSSVQEPCTPENRTPEFFYERKWLVSILNIHEREGSNFFQFNRDLEYWTQLLSGSQKGGRAKRASYNRGAANQAMKNRDSGRKDFDPRPVAGHSSGGGTELGSRPRYPKGARLRADFWRDMKGTVRKLLDGSNGERRCGIPLDIIERKFRQVSMPGWIDHRRYAAGASPSLVTQAETDVAITSEEVEAVLSGLNVQSAPGSDGLSYRFWKGLDPSGRLLSCLFEIVRRHGRIPGAWPTCSVILLCKDAQGDVQDVGNWRPITICRTLYKLYAAVIARRIQTWAKQGGVLSRLQKGFMPVEGVFEHVFMLDTVLSDAKLRRKNLLAVFLDVRNAFGSVRHECLLKVLRHFDAPHYLVELVRDIYTGATCRVRSSVGETGDIPCDRGVRQGYPLSGILFNLVTEVLIPGLSAGNDGYRMACLGGKLTQVLAYADDLVVVTENRDQMLRQLGVCEEFGRWAGLAFNQRKCGLIGWRTLRGGRRVALEDPLLLNGVEIPLLRPGEHYKYLGAMTGVMSVPRTGSQLIKDFRARLQRLFTSFLTPHQKLIALKRFLLPSLSFHLRVRPIARSELIALDRRVRECLRVAFRLTKPSCQAVFHTPTDMDGLGVPSVCSESSILTIAQGFKVLTSPDGTVSATASARVKLYAAKFGGLTEAGPSDWARYLSGDDVNGNSTRKPGANLPSGLWTRVRCASRQLGAVWRVCPENGITVRVRNSVITSRDRRKLIRSFHDCSNQQWKEQWMQHPNQEKTAAAHMAYADANRWVKQPSVMEPHTYFFALRARLNLLPTRVSRAIYSRDQHPDILCRRCGASVESLPHVLNHCPPNMSIILGRHNLVLQEVLNAVDKTQFKEISVDRTVPEHMSETGEALRPDIVARRNDGSVVVVDVACPFDQKANFDEAAKRKLLKYDKLCCNIAASTGKPVECHSIVVGSLGSLAEGLSTSLRALGITDFARSKLVACHQG

SEQ ID NO: 1453 - protein, 1144 aa, synthetic construct
  source 1..1144: note = Description of Artificial Sequence: Synthetic polypeptide
MPVSTGAETDITSSLPIPASSIVSPNYTLPDSSSTCLICFAIFPTHNILLSHATAIHHISCPPTPVQDGSQQMSCVLCAAAFSSNRGLTQHIRHRHISEYNELIRQRIAVQPTSRIWSPFDDASLLSIANHEAHRFPTKNDLCQHISTILTRRTAEAVKRRLLHLQWSRSPTAITTSSNNHTITDIPNTEARYIFPVDLDEHPPLSDATTPNASTHPLPELLVILTPLPSPTRLQNISESQTSHESNKNSMHTPPTYACDPDETLGATPSSTIPSCFHSYQDPLAEQRGKLLRASASLLQSSCTRIRSSSLLAFLQNESTLMDEEHVSTFLNSHAEFVFPRTWTPSRPKHPSHAPANVSRKKRRKIEYAHIQRLFHHRPKDASNTVLDGRWRNPYVANHSMIPDFDCFWTTVFTKTNSPDSREITPIIPMTPSLIDPILPSDVTWALKEMHGTAGGIDRLTSYDLMRFGKNGLAGYLNMLLALAYLPTNLSTARVTFVPKSSSPVSPEDFRPISVAPVATRCLHKILAKRWMPLFPQERLQFAFLNRDGCFEAVNLLHSVIRHVHTRHTGASFALLDISRAFDTVSHDSIIRAAKRYGAPELLCRYLNNYYRRSTSCVNRTELHPTCGVKQGDPLSPLLFIMVLDEVLEGLDPMTHLTVDGESLNYIAYADDLVVFAPNAELLQRKLDRISILLHEAGWSVNPEKSRTLDLISGGHSKITALSQTEFTIAGMRIPPLSAADTFDYLGIKFNFKGRCPVAHIDLLNNYLTEISCAPLKPQQRMKILKDNLLPRLLYPLTLGIVHLKTLKSMDRNIHTAIRKWLRLPSDTPLAYFHSPVAAGGLGILHLSSSVPFHRRKRLETLLSSPNRLLHKLPTSPTLASYSHLSQLPVRIGHETVTSREEASNSWVRRLHSSCDGKGLLLAPLSTESHAWLRYPQSIFPSVYINAVKLRGGLLSTKVRRSRGGRVTNGLNCRGGCAHHETIHHILQHCALTHDIRCKRHNELCNLVAKKLRRQKIHFLQEPCIPLEKTYCKPDFIIIRDSIAYVLDVTVSDDGNTHASRLLKISKYGNERTVASIKRFLTSSGYIITSVRQTPVVLTFRGILDRASSQSLRRLCFSSRDLGDLCLSAIQGSIKIYNTYMRGT

SEQ ID NO: 1454 - protein, 1132 aa, synthetic construct
  source 1..1132: note = Description of Artificial Sequence: Synthetic polypeptide
  VARIANT 46: note = Any amino acid
  VARIANT 59: note = Any amino acid
  VARIANT 89: note = Any amino acid
  VARIANT 172: note = Any amino acid
  VARIANT 204: note = Any amino acid
  VARIANT 205: note = Any amino acid
  VARIANT 217: note = Any amino acid
IAKFDNNTNSASDAAPLSPGGAVADLSASEGTTDNDQAMSPAMSLXTVPLVGNRVACPXCEKREANLFFLNLSDLDRHLTQHHPDAPIXWSCIDCAKCFPKLHGARCHIPKCGGASSQARTGEFQCEACPMSFGSRRGLSTHERHAHPAVRNIKRRGADPPEENTKSWKVEXVARLKGLWEIFKDHKYPNKEISKFLTTKTVDXXKYQRKKLNLIGXESPQEATSLATEGGCDLVSSGNASFGSPVGRNENEEELIHEWKLSLKNEINKPTEVPPILKEVYNRLMLIWEEHQDDRDSLTESLDHFIRTALYELINKINKNQTDLKTKRAAKTKSPKNNRNSRKRFSYARCQELFHECPRRLADAVVNNDQAYLEPARQPPGSEEVRGLYEKLWGQVGSTYVPAPVTRVPKLSLSEIFPPIAAEDVGERIGKIRKKAAAGPDGLQRDHLTIPGLPIIMAKIYNILVYCSYFPSAWKENRTTLIPKINKPCSLVENWRPITISPILGRIFSSIIDGRIRRGTVLNMRQKGFTSENGCKINIELLNSALNYSKRNSGGIFTIVDISKVFDTVPHAALKPCLAKKGVPALIVDLIDEMYKNVKTTIKTKDGGVEIMIRRGVKQGDPLSPLLFNLCLEPLLEEIEEQASGINVSEHRKVSVLAFADDIVLLGADAREAQHQINVLTDYLQSLMMNLSIEKCQTFEVVAKKDTWFIKEPGLKIGNQIMPTVDPDEAFKYLGAKIGPWKGVHCGVIVPELLSVVKRVRKLSLKPGQKVELLTKYIFPRYIYHLLVSPPSDTVLKLLDSEVRQEVKTILHLVPSTATGFFYTPKACGGIGIPRFEHIIKLGTLKSAIKIANSIDPAVAGLIDDAAIKKLKQTANSLRINWPASLEDIEKARKRLRKEHISQWADLKCQGQGVPDFIKNKTGNLWLEDHSLLKPSRLIDALRLRTNTFGTRSVLARADKNIDVTCRRCRAQPETLGHILGLCQHTKGLRIKRHDEVKSLLEGRLKSKKNNEVFVEPTIKAGGSLFKPDLVIKNGERVLVVDVTVRYENKNYLALAEKEKIEKYRPCLRALKEIFNAKGGEILPVVLGSRGTITPNTEKVLKRLGIANNDIKTILLNVLRSSIELCNIFIDD

SEQ ID NO: 1455 - protein, 1186 aa, synthetic construct
  source 1..1186: note = Description of Artificial Sequence: Synthetic polypeptide
  VARIANT 16: note = Any amino acid
  VARIANT 18: note = Any amino acid
  VARIANT 27: note = Any amino acid
  VARIANT 33: note = Any amino acid
  VARIANT 49: note = Any amino acid
  VARIANT 50: note = Any amino acid
  VARIANT 51: note = Any amino acid
  VARIANT 63: note = Any amino acid
  VARIANT 66: note = Any amino acid
  VARIANT 88: note = Any amino acid
  VARIANT 90: note = Any amino acid
  VARIANT 95: note = Any amino acid
  VARIANT 96: note = Any amino acid
  VARIANT 120: note = Any amino acid
  VARIANT 122: note = Any amino acid
  VARIANT 128: note = Any amino acid
  VARIANT 133: note = Any amino acid
  VARIANT 155: note = Any amino acid
  VARIANT 168: note = Any amino acid
  VARIANT 173: note = Any amino acid
  VARIANT 182: note = Any amino acid
  VARIANT 184: note = Any amino acid
  VARIANT 186: note = Any amino acid
  VARIANT 192: note = Any amino acid
  VARIANT 195: note = Any amino acid
  VARIANT 203: note = Any amino acid
  VARIANT 204: note = Any amino acid
  VARIANT 218: note = Any amino acid
  VARIANT 237: note = Any amino acid
  VARIANT 260: note = Any amino acid
  VARIANT 271: note = Any amino acid
  VARIANT 280: note = Any amino acid
  VARIANT 285: note = Any amino acid
  VARIANT 311: note = Any amino acid
  VARIANT 347: note = Any amino acid
  VARIANT 353: note = Any amino acid
  VARIANT 357: note = Any amino acid
  VARIANT 365: note = Any amino acid
  VARIANT 367: note = Any amino acid
  VARIANT 369: note = Any amino acid
  VARIANT 386: note = Any amino acid
  VARIANT 387: note = Any amino acid
  VARIANT 401: note = Any amino acid
  VARIANT 410: note = Any amino acid
  VARIANT 413: note = Any amino acid
  VARIANT 414: note = Any amino acid
  VARIANT 445: note = Any amino acid
  VARIANT 457: note = Any amino acid
  VARIANT 459: note = Any amino acid
  VARIANT 483: note = Any amino acid
  VARIANT 490: note = Any amino acid
  VARIANT 505: note = Any amino acid
  VARIANT 516: note = Any amino acid
  VARIANT 523: note = Any amino acid
  VARIANT 528: note = Any amino acid
  VARIANT 533: note = Any amino acid
  VARIANT 545: note = Any amino acid
  VARIANT 556: note = Any amino acid
  VARIANT 599: note = Any amino acid
  VARIANT 621: note = Any amino acid
  VARIANT 647: note = Any amino acid
  VARIANT 650: note = Any amino acid
  VARIANT 664: note = Any amino acid
  VARIANT 691: note = Any amino acid
  VARIANT 694: note = Any amino acid
  VARIANT 701: note = Any amino acid
  VARIANT 716: note = Any amino acid
  VARIANT 719: note = Any amino acid
  VARIANT 720: note = Any amino acid
  VARIANT 724: note = Any amino acid
  VARIANT 736: note = Any amino acid
  VARIANT 743: note = Any amino acid
  VARIANT 752: note = Any amino acid
  VARIANT 762: note = Any amino acid
  VARIANT 773: note = Any amino acid
  VARIANT 775: note = Any amino acid
  VARIANT 782: note = Any amino acid
  VARIANT 785: note = Any amino acid
  VARIANT 789: note = Any amino acid
  VARIANT 804: note = Any amino acid
  VARIANT 817: note = Any amino acid
  VARIANT 820: note = Any amino acid
  VARIANT 836: note = Any amino acid
  VARIANT 837: note = Any amino acid
  VARIANT 841: note = Any amino acid
  VARIANT 873: note = Any amino acid
  VARIANT 876: note = Any amino acid
  VARIANT 880: note = Any amino acid
  VARIANT 890: note = Any amino acid
  VARIANT 895: note = Any amino acid
  VARIANT 896: note = Any amino acid
VPPGAEARGRYHHPRXEXARQGEPPSXRVFLVXLPDSNPPCPICGDHVXXXSVLALHCVEGHXWAXVQYQCTHCGILCHIPRCQGRVXEXTGKDXXCPECPASFDEKAGLSQHKRHTVTXSXERVAGXLLRAXLRHGCWSVEEEETLTRLDAMFXGARNINQLIAAEXVSKMXKQISDKWRXLXLXPEQTTXGGXAESASVVXXESMTPEMEAQSPAXPPGKIRKIFTGQDGHAGGXAWENQEDFHWTRWARRWLKRGQXLSDKVQEVLGXWVEGQPRIXAWVDXVSLDVLTLFLGVPPGPQRAPSKKGPXEGGKPTSWMNKRAIKWGTFLRYQHLFGANRKLLAAXILDGAXRNQXTLLLEEVXQXYXGKWEAEPPFEGLGRFGXXRDVDSFAFEALITXEEAVKHMMXMAXXSAPGPDKLTLRDLRRADPEGDALAELFSLWXITGVVPDRLKEXQXVLIPKAVDFEKLRQLGNWRPITIXSIVLQLXSRVLTARLTAACPIXPHQQGFISAPXCAENLKXPELIXRKVKXDRRPLGVAFVDXARAFDSVSHDXISWVLKAKGVDQHIVNLIEDSYQKVTMRVQVFSGSTPPISIKXGVKQGDPMSPLLFNIAMDPLIXKLKTVRQGVKVGSASLTTLAFADGLXLLXDSWEGMQHNITTSXTPGRACNTTSRHPRGLLQPHGPTSATXKMXGVLLESXMRLLYGEQLRGLEDXRPXXHDAXARRADTISGLEXRSLGWDXQTRFGYATXLLAREDGDCXAQTNAEALCWXSXPFPGCAXRPXYANXGWVASEALDSMSRRXVKEWFHLPACTDXLLXSRHRDGGLGLLRLARXXLAAXVRRPIRVATSSDEVTRKVSYACGISDEVERLXLAXGGDXSNVPRFEDPXAPKSXXVQGPHEAAQETPRVVRTQAIPWPSNWRAEEHSKWAQLSCQGERVELFCNDPVSNGWINSRGQLAERLWIMALKLRSNIYPTREFLGRGQAGTNIGCRHCTHPRETLGHILGICPAMQEARILRHNKLCKILAAEGKNCEWTVYYEPHLHNAAGELRKPDLIFVRDGTALVVDITVWYEGGPATLLSTTAEKATKYLDLNTQIQELTGAEQVTYFGFPIGARGKWHADNWRVLSELGLSNSRKERVTRLLSWRALLGSVDMVNIFVSKHRQENLLDEHCTPAEQVVSSYAS

SEQ ID NO: 1456 - protein, 1055 aa, synthetic construct
  source 1..1055: note = Description of Artificial Sequence: Synthetic polypeptide
FERRSNSWGYRPLEPRSVGTESNNNSPRSNITITSATSRPGDQPREAIAVVNLAGEIPCAVCGRLFNTRRGLGVHMSHQHKDELDTQRQREDVKLRWSEEEAWMMARKEVELEASGNLRFPNKKLAEVFTHRSSEAIKCFRKRGEYKAKLEQIRGQSTPTPEALDSITSQPRPSLLERNHQVSSSEAQPINPSEEQSNWEIMRILQGYRPVECSPRWRAQVLQTIVDRAQAVGKETTLQCLSNYLLEVFPLPNEPHTIGRSNLRRPRTRRQLRQQEYAQVQRRWDKNTGRCIKSLLDGTDESVMPNQEIMEPYWKQVMTNPSTCSCDNTRFRMEHSLETVWSAITPRDLRENKLKLSSAPGPDGITPRTARSVPLGIMLRIMNLILWCGKIPFSTRLARTIFIPKTVTANRPQDFRPITVPSVLVRQLNAVLASRLASKVNWDPRQRGFLPTDGCADNATLVDLILREHHKRWKSCYLATVDVSKAFDSVSHQAIIKTLQAYGAPTNFVSFIEEQYKGGGTSLNGAGWSSEVFIPARGVKQGDPLSPLLFNLIIDRLLRSYPREIGAKVGNTMTSAAAFADDLVLFAETPMGLQTLLDTTVGFLASVGLSLNADKCFTVSIKGQAKQKCTVVERRSFCVGERECPSLKRTEEWKYLGIRFTADGRARYSPADDLGPKLLRLTRAPLKPQQKLFALRTVLIPQLYHQLTLGSVMIGVLRKCDRLVRQFVRRWLDLPLDVPVAYFHAPHTCGGLGIPSIRWIAPMLRLKRLSNIKWPHLEQSEVASSFIDDELQRARDRLKAENVQLCSRPEIDSYFANRLYMSVDGCGLREAGHYGPQHGWVSQPTRLLTGKEYLHGVKLRINALPSKSRTTRGRHELERRCRAGCDAPETTNHILQKCYRTHGRRVARHNSVVNAVKRGLERKGCVVHVEPSLQCDSGLNKPDLVGIRQNHIYVIDVQVVTDGHSLDQAHQRKVERYDRADIRSQMRRFFGATGEIEFHSVTLNWRGIWSGQSVKRLIAKDLLIAEDTKLISVRAVNGGVTSFKYFMYCAGYTRS

SEQ ID NO: 1457 - protein, 1222 aa, synthetic construct
  source 1..1222: note = Description of Artificial Sequence: Synthetic polypeptide
  VARIANT 1109: note = Any amino acid
  VARIANT 1124: note = Any amino acid
  VARIANT 1139: note = Any amino acid
  VARIANT 1170: note = Any amino acid
  VARIANT 1191: note = Any amino acid
  VARIANT 1217: note = Any amino acid
PAAPRAWGAVEAGPWPGRTRAVEPAPSPESSPSEAARAAPAGEGHGPGHESPSVQRPEADTTAPGVSAPTREGEPPSTRVFLVRLPDSNPPCPICRDHVGKPSALALHCVESHAWADVQYQCTHCKKVSANKHSILCHIPCCQGRVPEWTGKDWACPECPASFNKKVGLSQHKRHVHPVTRNVERVAGSLSRAGLRPQTRRGCWSVEEEETLTCLDAMFRGARNINQLIAAEMVTKMPKQISDKRRQLGLCPEQTTLGGDAESTSVVEEESMTPEMETQSPINPPGKIRKILAQRARRWLKKGQGLSDKVREVLGAWVEGQPRIHAWVDSVSLDVLTLFLGVPSGPQRAPNKKRPKEGGKPTSWMNKCAVKWGTFLRYQHLFGANRKLLVAIVLDGADRNQCTLLLEEVFQAYREKWGLEEVLRAYRGKWEVESSFEGLGRFGVRRDADNFAFKALITPEEVVKHMMAMASKSAPGPDKLTLRDLRRADPEGDALAELFSLWLITGTVPDGLKECRSVLIPKTVDREKLGQLGNWRPITIGSIVLRLFSRVLTARLAAACPINPRQRGFIAAPGCAENLKVLELLLRKRKRDRQPLGVVFVDLARAFDSVSHDHISWVLKAKGVDEHIVNLIEDSYQKVTTRVQVFNGVTPPISIKTGVKQGDPMSPLLFNIAMDPLIAKLETDGQGVKVGSASLTTLAFADDLVLLSDSWEGMLKNISILEDFCNLTGLRVQPKKCQGFFLNPTCDSFTVNNCEAWKIAGREITMLGPGESTRYLGLNVGPWVGIDKPDLGTQLSSWLERIGTAPLKPMQKLSLLVQYAIPRLNYQADYAGIGRVALEALDSMNRRKVKEWFHLPACTSDGLLHSRHRDGGLGLPRLAKAIPEAQVRRLIRVATSSDEVTRKVSYACGISDEVERLWLARGGDMSSVPRFEDPEAPRSPGVQGPCEAAQEIPSVVRKLAIPRPSNWRSKKHSKWAQLSCQGEGMELFCNDPVSNGWNNSRGQLAEHLQIVALKLRSNIYPTREFLGRSQASTNVGCRHCTHPHETLGHILGICPAVQEARIIRHNKLCKILAAEGKKCEWTVYYELQLLNAAGELCKPDLIFVRDGTXLVVNVTVGYEGGPAXLLSTAAEKATKYLDXNAQIQELTGAEQVTYFGFPIGARGKWHADNXRVLSELGLSNSRKERVARLLXWRALLGSVDMVNIFASKHRQENLSDXALSPS

SEQ ID NO: 1458 - protein, 1247 aa, synthetic construct
  source 1..1247: note = Description of Artificial Sequence: Synthetic polypeptide
MQCTSRLADAPRFARVGVEGEGVGASGNGTDAQLWYGCTGCDEAFSSLRGLRIHAAQKKHGNQDGLLRLPAGRPRKRRVGKSTTAGASDRVTTDPVPAPVPESPGLLPGLPGPSLPGCSDLPPGVLPGGWSASPGPLSWPPSLDAGPLPGPSRVSPGPSRPSPGKPTGPPSLDAGPLPGPSRVSPGPSRPSPGKPPGTPEPLPGSPGGRRGVSPGQPGSRTDPSSSAGAGHFVCPQCSRAFSSKIGMSQHQKHAHLEEYNAGINITRTKARWDPEETYLLARLEATLNPDHKNINQTLHAALPRGSCRTLESIKAHRKQAAYRDLVTSLRSARESSEAQHVPDRPLETPEPQTPANPQRDSKQAVIEALQSLIGRAPPGSFQGARLWDIARQATRGTNILPLLNSYLRDVFTLPTKPTRKKPAVRPARSRRKQKKQEYARTQDLFRKKQSDCARAVLDGPTSSSVPGTGAFLQTWREIMTGPSPALEAPPLPTRGEVDLFFPATAQEIQSAEIAVNSAAGPDGFSARLLKSVPALLLRVMVNLLLLVRRVPAALRDARTTFIPKVPDAVDPSQFRPITVASVLQRLLHRILAKRALEAIPLNFRQRAFQPVDGCAENIWLLSTALNEARTRRRPLHMASVDLTKAFDRVTTDAILRGARRAGLSGEFIGYLKELYTTSRTLLQFQGESLLVEPTTGVRQGDPLSPILFNLVLDEYLSSLDPDISFVSGDLRLDAMAFADDLIVFASTPAGLQDRLDALVEFFDPRGLRVNVKKSFTLSLQPGRDKKVKVVCDQIFTIGGTPLPASKVATPWRYLGMTFTPQGSINKGTSEQLDLLLTRTSKAPLKPQQRLVVLRNYLLPRLYHRLVLGPWSAALLLKMDTTIRGAIRRWMDLPHDTPLGFFHAPVTEGGLGINSLRASIPAMVLQRLDGLHFSTHPGAEVAIQLPFLTGLHRRAEAAAQYQGQRLLSKADVHRMWSARLHGSCDGRPLRESKRVPAAHRWAAEGTRLLSGRDFISITKLKINALPTLERTSRGQHKDIQCRAGCQAVESLGHVLQACHRGHRGRIRRHDNIARYVCGRLTQIGWAVKWEPHYSVAGRTLKPDIVAHRGAETVVLDAQVVGTSMRLGFHHAQKKEKYSLPDLLHQVCEGRRDAARVSTITLNFRGVWAPESAQDLKSLGLTDNDLKLLTVRCLQGGAQCFRLHRRMTTVVKATGDEANALPAHSGLPPTQLGGRTLGPSAHNQSARTT

SEQ ID NO: 1459 - protein, 1099 aa, synthetic construct
  source 1..1099: note = Description of Artificial Sequence: Synthetic polypeptide
MSNTSHSKLNLKMDNKLKTSLETPSGVRADSIITRVRTSSNRGEHSNGVTYPRCEQGVAPLDTHGGICDAPPQVTVPATETDKQKKCEYCEFTYLKPRQIGTHMRKRHPQEWNDIKRTKFLSEKRQKRWLDEDFELLCIGQEEYLVLSSIGKQGKGINQYIQTKYFPTLSTDAIKSQRKSRRFSEYSEKRSRELQPCNTSSDPEELPNEAVTENSPLSFDPLDRDVVKKISSKDHGDQILLVQEHLINGRYQEANTLAKAIFEKLSGKFPNLKTGDHRPGKQQTARKVGKKRVRGSGKKLSPSKQNRRELYAIVQKQWRTKKRSKVINQILTGNLNKEQSYTHTPDQLAQFWSTLFGRVSPRDDRPINHRRSVIPELDKPLSVEEVEAALKGAKDAATGIDGVPISHLKHLGSAALTILYNGLYVTGSIPDPWKRARTILIPKSNPPASPGDYRPISISSYFYRIYTSAISKRLASAVSLDDRQKGFIKEDGIRDNLSLIDTLINETKAGSKSLFMTFMDVKKAFDSVSHYAIARSLEWAGVPDGMRSVIADLYQDCTTDICGRSVKVTRGVKQGDPLSSTLFNLVIEMVMSNVPERLGIQFQGHRLFYLAFADDLVLLTRGPTANQKLVSLVHEQLARVGLELHPGKCKSIAIMADPKRKTTFVDQGSSVLIGGEPVSSLGPQEWYKYLGIKLGSGGMPQGIYRDQLADLLAKTDSAPLKPQQRLYILRSHILPKFNHRLMFERVTCQTLEGLDKLIRTHVRKWLKLPKDTPGPAFYADKGSGGLGLITLRYRVPLLKLRRHKKMADSPDPVIRLIPNAEPTISLLARWTKMCSLYGKQYQHKSELSKIIRDKYWTMCDGKGLRTEVPPDTAKKTLSLLFEDRTPLKPGQLIGAIGVRLNTLGTPARNNRAKGYSPEANICDKCPGNRQATLGHISQTCPATHGRRVKRHDKIVNRIAKALKERGSVKNILTEPHLRHDKLPLRKPDLIVHTEKSVEIIDVQVVADQGISRHEDEDQQKKIVKYDVDGYKRAAYKMLGIDYGSIPCNVSAFTITWRGNLAPHSLKLASRLQFSPVLKYIVADSLVDTWGAFLIWGKTS

SEQ ID NO: 1460 - protein, 1085 aa, synthetic construct
  source 1..1085: note = Description of Artificial Sequence: Synthetic polypeptide
MNERLTDELTTEFILSDMFLWDYPCTDQNKCYPCNLVFLDHRTWSSHMARVHPHANKTYKCRICNRTADSIHKIASHYGRTCKSLIGKTNAITTTIDETLFSCLHCSRGFTTKTGLGVHTRRTHPTEHEAILQQNTPGRKVRWGEEEVEIMAHKEAQQKDEDINMNQLIQNSVMPHRTLEAIKGKRRNIKYKELVRTLKETTYKVENQCLVNLVLPTTSEITTTPSEGDQPAIRAEKEQSPTAAEDLQVIINDLKSQNFSHNQALLLLNSHVEKFLNRSKPIKRKDHVNQQEIDENRHRRQSKQTKYRRYQYLYHTNKKALLDEITSDRSGPSIYPTEESIRGTFVTLFESNSPPDNIPSKLKNDQSCIDIVKAITLDELIKTLAIMKDKSPGQDNITLSDLRTLPIKYLLDILNIILYIQDIPQIWKQHRTRLIPKTKEELEKPSNWRPITISSIVIRLLHKILSYRLGQQLKLNYRQKAFLPVDGCFENSALLHFIIHNARQKHENTQIVSIDLSKAFDSVSHESIIRALNRFNLSKESITYLTNIYKCNLTDIVFGSTIMRNINLKRGVKQGDPLSPLLFNMIMDELLDNLPTYIGVNVGNQKVNSMMFADDLILFAETECGMNKLLDITTKFLDDRHLKININKCNSLRFIKYGKQKTFSVATTSSYFINNEPINPVSYVKGFKYLGIEFDPRGKRSISCNLLAAMLNKLTRAPLKPEKKVYLINNNLIPRIIHQLVLGKVTKGLLMSLDSEIRKTVKLLLRLPHDTPDSFFYTSVSNGGMGIRNLCDSVALSIINRHNKLITSDDLVIRALSQQSYTIATLKQAHIIAGSKFPSKSLNQNKWSNKLYQTTDGRGLVYCQSQTENNSWITGNHRTIKSYNYIDMVKLRINALPTKSRCNRGTLETKQCRFKCRSINNQISEETLAHILQKCDRSHYSRIARHDSLVQFLATAAQKLNWEVIKEPTLPSDTNKAKPDLILVRDSHVLIVDVAVPWESRSLAHAYDFKVKKYATDKKMQAYLKTIYPEKEIRTEALIISARGGWCALNNMVTKKVGLSSAWVKLALIKVMEGSVKIWRSWSKG

SEQ ID NO: 1461 - protein, 1031 aa, synthetic construct
  source 1..1031: note = Description of Artificial Sequence: Synthetic polypeptide
  VARIANT 78: note = Any amino acid
  VARIANT 87: note = Any amino acid
  VARIANT 200: note = Any amino acid
MKKVLNNETEKLPGSNLTFMCGFCDREFDTARGRGVHESRGHLVERDAAVQSRVKAVVSKKYYYSNEEDVALAKMQLXHADLAKSEXLEAMYLALGKGRTREAIEQHIRKSLRYKGVLEEQRKLLETARGNVRQNNVGVPASNATKNLQRFLESLPLGTNRREERLDRIIRSNSIESQRLELIHYCNDMCQDFVQLDCQXNPINAIRRRNPKRLSKKQLKRAKFSALQRLWIRDRKAAAQLVLKDKLDSLLSNKEDSKDLGSYWQQVFERESELDRRPIPQVVENEELNSPVLEKEVEWAVKNIKKSTAAGPDGLTALALKKIPYSELVKLFNIILLVGFLPDVLKNSRTILIPEVDNPQGGGDYRPISINSVLTRTLNKILAKRVSEGDFGINGQKGFKSVDGCLENLATVESILADARMKKNKLAVVFLDMSKAFDSVNHESIVRAGEIKGYPKLLMTYVKECYNDATTNVAGVTAKFNRGVKQGDPLSPALFNNVIDLAIERVSGTGIGYNMGGKKYSVVAYADDLVLFGESREGLQIALTALLEELKLNGLTPNPAKSASLTFERSGPHWFASTDTVTALGDQIPAMGNIETYKYLGIKFNSCGVVKGSLPGIYTKKLELISKAPLKPQQRLAMLTDFLIPGVLHQAVFGQTNAGDLRSLDKRTRRAVRSWCHLPSDTSTAFIHAKAKDGGMGIPSIRAEVQFGKLDRFGKLPNVKDERSKVLADNAHIKKKMLEKLGVGIPIKGVRCKNKLEFYNKMREELIKSNDGIGLKEASLVPSANTWLKLSDLHMSGRTFVGCLKTRGNLMATVTRTSRGGQNPGIELNCKKGCQYQGSLNHIVQKCPVVKGLRIKRHDEVVKYVEEITKKAGWSATMEPIIPFEGSHRKPDLVLVRGDLGKVVDIQIVSDHCGLDEKNSCKIGKYDNDIIRNYVRGLGPSRVEVAAITLNWRGVWSRDSFNLIKRLGMTEMDAKIISMRVLASTAKMFKTCKKVLEPVCRTKTADCDGYGPEETSARPCHELNLKESSGT

SEQ ID NO: 1462 - protein, 1395 aa, synthetic construct
  source 1..1395: note = Description of Artificial Sequence: Synthetic polypeptide
MENSFAWEGTSSAEGRTTVEDSPSSSDDFVSNVGFKVAKADPTVWEEANMSEDNTIIEDPPSSSDDFANNVGFKVTRADPTAWEEASTSTETEDLPSSSNFIDNVETQIDMAGPTAWEDADSNEDNIDEGTPNNINNNLAIVRGRADAYACSCCERNFISLKAIGTHLKETHNKKVVFECAKCQHTFVKAHGLACHVPKCKEDADTPMLNRLLHGCGECGLAFNTRRGLSQHERHRHPSACLSTRRRSRLDGIARKKSLRNRRDIWTNDEIRLLKQLMIQYEHAKKINIKIAEHFNHKNAKQVMHKRRSLREKDMALGAPHDAPPPLAEEPIIEVVEGAREELEQAPVDVILPDLEALTVNDGRGGGSPVLTEGGESTRDMEENGGTDTRSPSPREERAGSTPWERGWQPRVDRGRGEYKGYGGERGDRHTVSLSQRGESGVDPLTPGGVVEDYDDSYLEDYFPGWDEDEHMHIIGRLDLSDESEQGEAAVSPRLGSFGDLLEEVNAMEGKDNLSEALAETLGLVLHEGHRVEYIKEKMNINVKQMATEILAHGANKGNPKRRKEAVAAKRNPGTRLDRAQRDNQAKAKAKEKKRIFSETQTQYKKNPHRLVEKLLDGKGDERCSVSLEVIQRTYMNRFSRESKEVDIGAYVDPETVEDNQGIVDPISKAEIERAISTTKKGSAPGPDGVTYDALKAYGNCQLYLLIMYNTWLAMGKVPSEAKTYRSILIPKGQGDPMDINNFRPLTLANVISRLYSKILTRRLDGAVSVCPRQRGFTHKASIEDNTLILRELIMKSKRNKECLAVVLLDLAKAFDTVSHDLIIKALRRHRVHEHLISVIMDLYEGGTTSFTTDEGTTCPIAIRSEVKQGDSLSPVLFNLALDPLLATLEQRGKGVEIGGHTFVSLAYADDTALVSSSHLDMTANLDITVEYLNATGLSLNVRKCQGFLLTPINKSFLVNEAESWVVEREAIPWVEPGDTAKYLGVQVGPWSRPWPSIQPVIKRLTAYCESIDKAALKPRQRIHILTTYIAPRIAFEIAEGGYSTLVDCRGGIQYTRIREVDMTIRNYVRKWLFLPACLSNSFLYTRRGEGGLGLVSFYDYVPTERMRKLVRVCDSEDPVIAGAAASLGLRERAAKISAQTGLPVPVKPKGAHNAWRKVQKKKWKAQPTQGKGVSCYQHRLGNKWLGAPSFLTENDYIWAIKLRTNLVPTREAMGRGIIGRNQVECRHCHTTIETMGHISGYCQMVLDIRLIRHNRICKALIKAATATGLRVTEEPRIVGTDGKNYLPDLIFSAGAGEPCYVVDPTVVWDDDPKNLREAWRGKVRKYTPIIPAVEAMLHPSSVQIFGFVCGARGTWCPMNDDIAKIVGLKNSGISRTLQIVLCDTIRMVKAFMAR

SEQ ID NO: 1463 - protein, 1236 aa, synthetic construct
  source 1..1236: note = Description of Artificial Sequence: Synthetic polypeptide
MSGKRIVEMSGCDEKICQNKHCLKRRWAWISGPKGETSPPRKRGTCENVSFQDKSHASDPDPLKAPEAREDAGSVAPQWVGEIKTPSLTSRDGVSEVVLPPQPVHAEGVSPASDSKDKATKITLLISLPVCDLRCGRCERPLETVGKAVRHFAVAHPTVSVVFKCQKCEKSSKNSHSISCHIPKCKGMTETRTDVEGDHGCDHCQEKFTTAMGLTQHKRHRHIVQYCKEKEGEMTARRKGEVEAVKWSEWEESEVARLSDGLAGLKMINRRIADSLGTGKTAEQVRQKRRRMRPEKVRCDKPKEAKDKSNLIKMLSIPSATPTPQTGLKGFLLGELNGVATKGEVQIGGVTLSLRGVEQDSALLNTSALELQRLLGGRAGSANPLSLQRERETTLPSERRKTKQGEYRRVQKMFRSNEKKIAKYILDGNGDGEAASPPLEIALAFKSRWEEVETFHGLGQFYSRGEADGVVFRSLISMSEVCENLGAIKNNTAAGPDGITKPALLEWDPTGAKLAAIFSIWLTSGTLPGPFKKCRTTLIPKTDDPILLTQVAGWRPLTIGSVVLRLYSRILTHRLERACPINPRQRGFISSPGCSENLMILGGLIKRSWAKGERLAVVLVDFARAFDSVSHSHILEILRQRGLDEHIIGIVGDSYTDVTTTITVSGEQSPPIDMRVGVKQGDPMSPLLFNLALDPMIDTLERYGLGYRMGEQQITALAFADDLVLVSDSWEGMACNIRILEEFCRLTGLRIQPRKCHGFLIQKIQRARSVNLCKPWIVCGEELHMVGPEESVSYLGMKVSPWHGIMEPDPVERLCNWISSIGRSPLKPSQKVRMLNVYAAPRMTYQADHGGLGPIVLNVLDGMIRKAVKVWLHLPLCTCDGLLYSRCQDGGLGIVKLACQIPSIQARRVYRLWHSKEAITRVVTRRTVEAEEYRGMWLRAGGSEAGLPPLEDREEGAVQCTDTAGSVKPKNPVIPDWRRAEFLKWQNLTAQGVGVQVFGGDKNSNHWMANPETLGSKERHYIAGLQLRANVYPTREALSRGRPDLPKVCRQCLAGTESCAHILGQCPAVKDSRIRRHHKLCDLLASEAESAGWTVIREMCCRTRAGALRRPDLVFVKTGFALVVDVTVRYEMAYDTLMGAAAEKVARYTPITPYVAMTLKARRVKVFGFPLGARGKWPGSNDRLLKAMGVGGGRRKQLAKLFSRRALLYSLDVLRDFYRAEGETGDLDDESVDDHL

SEQ ID NO: 1464 - protein, 1298 aa, synthetic construct
  source 1..1298: note = Description of Artificial Sequence: Synthetic polypeptide
  VARIANT 129: note = Any amino acid
  VARIANT 184: note = Any amino acid
  VARIANT 218: note = Any amino acid
  VARIANT 259: note = Any amino acid
  VARIANT 369: note = Any amino acid
  VARIANT 370: note = Any amino acid
  VARIANT 402: note = Any amino acid
  VARIANT 721: note = Any amino acid
MSRRPGKSNEPPVRSRAMGLTTLSGTKTSNSGAQGPSTSAPMQNMAGGFVCDCGRSYALKTSLARHKKECGKNNAECRWCGTRFNTLAGTRQHERKAHFVQYQSDLAKALPQPESELMEKIAIVEARSXNGIFYKEMMASTGLTHQQVRSRREKPEYKGFLERARRSLAQTNIRAGSISPASTXAGSLESASPKAGCSSSASPGPTTRSRAPTKGVPXRSSNSARIVVEAQVHTRAPPNTGETEVALRESRRTVPRLGXNPSRPCGISPLMAIAIDEDSVLGGLRVQAGPSPTAVHSVEAFPGTSSMTPMETDRVHNKSGIDPILEHNGTRQVRREESSTREDPVEQWSPNYPKTPVTMPNITTTADAXXTSYNRTPQTLPGNRRRRSRSLPPVQRKSASDXLESVDSLGPWAVFLQDQVDAGSLSGNDSLADLVRVALTKSDRGVLNDAVNRYLAQRAESLRIRKRGSKGKRKSKTGRHYGQTTSGSGQRAALFKKHQDLFLKNRRGLAETILSGKEDFGPRPEPPVTSVEEFYGGIFESPSPPDNEPFEVRATGVEDPPPLTSPWTKRTLRSPCYWRRRPPPTYITMDEIKAARAGWQISAPGSDQIPVAAVKTMSELELAILFNIILFRNVQPSAWGVLRTTLVPKDGDLRNPANWRPITISSALQRLLHRVLAARLSKLVSLSSSQRGFTEIDGTLANALILHEYLQYRRQTGRTYXVVSLDVRKAFDTVSHCSVSRALGRFGIPSVIREYILATFGAQTTIKCGSVTTRPIRMLRGVRQGDPLSPVLFNLVMDELLEKVNEKYEGGSLQSGERCAIMAFADDLILIADRDQDVPAMFDDVSTFLERRGMSVNPAKCRALIAGAVSGRSVVRTGSSYKIHNTPIPNVDALDAFKYLGLEFGHKGVERPTIHNLSVWLNNLRRAPLKPDQKCLFIRQYVIPRLLYGMQNPQVTSRVLREADRLIRRHLKTYYHLNVHTPDSLIHASVSDGGLGIMELRKAIPRIFLGRLVKLLNKNKDSVLSSVLQSNRVRTLMGKLSTMAGEVPESTFWRNQIASGPLSKGLEQAAEDSASRLWISEKPSGWSGRDHVRAVQLRTGNLPTKAIPSVPVGQRRCRHGCACDESISHVLQMCPLTHADRIRRHDEVVKKVARHCTSRGWTVEVEPHIRSRCGRLFKPDLAVHQPGGAIVIADVQVSWDSESLTVPYERKRAKYDVPQFHQAAQHAWPGKALTFAPVIVGARGIWPRINNDRSAALQIPPVVRRACVNSVVKWGSSIHATFMRSVWANRLNPRPLRA

SEQ ID NO: 1465 - protein, 1243 aa, synthetic construct
  source 1..1243: note = Description of Artificial Sequence: Synthetic polypeptide
  VARIANT 40: note = Any amino acid
  VARIANT 71: note = Any amino acid
  VARIANT 84: note = Any amino acid
  VARIANT 347: note = Any amino acid
  VARIANT 495: note = Any amino acid
  VARIANT 503: note = Any amino acid
  VARIANT 572: note = Any amino acid
  VARIANT 724: note = Any amino acid
MGSWIVNFVSVATQTGEFPVDTARRAPVPVTSYPESECHXPLPLTFCNSDVTIWGGVRPEPVDCLGDLPEXYDALPGVAGPREXVGGSPPGEGVRSPGIASPSGTAVQHDFGSPILVPGAEAAEVSTPVVKVPQDHPACPCCGTRVVKVTALSEHLRRAHGRKRVLFQCSRCGRMNEKHHSIACHFPKCRGPPVEEGPLGAPEWCCEECGQKFNTKSGLSQHKRSVHPLTRNVERIEAARPKGKGKRGAHKGCWTEAEVAQLIELEGRFKNQRFINKLIAEHLPSKSAKQISDKRRQLAAATKTSSPEKRVTSSTSGESSPEVEKVEGIKREYRRRVGEWLCAGSLXDQTSFQKILEDVESGSEIVTGPLEELASFARGKLAAARVRHHRKHPAEAVPAREEQRWMKRRVGRRGLYLRFQRLFALDRRKLAGIILDDVESIKCPLPMEEVADVFRRRWEEVAPFTGSGSFRSLGKADNGAFKPMISAKEVMKNVXEMSRRSAXGPDGLSLRDLMKIDPQGSRMAELFNLWLLAGRVPDQVKAGRTVLIPKSADPGKIGNIDNWRPITIGSVXLRMFSRILSARLRRACPINRRQRGFIAAPGCSENLKLLQALIKSAKRDHRTLGVVFVDLAKAFDSVNHQHIFQVLVQKGVDGHIIDILRDLYTNAGTYLESGSQRSGFIKILRGVKQGDPLSPILFNLALDPLLCRLEDRGLGYKYGDQQIXSLAFADDLALLSDSWEGMQQSIRVVEEFCQRTGLRVQAPKCHGFLIRPTKESYTINDCDPWTIADMQLDMIDPGSSEKYLGLGIDPWIGLSRPELSEVLTRWVKNIGGAPLKPLQKVDILRSYALPRLLFIADHAGLSATCLHSLDLSIRSAVKGWLHLPPSTCDAIIYVSYKDGGLGLPRLASLIPNVQARRLVRIAQSEDDVIRSVVLQEGIQEEIRKVWISAGGRPEKVPSVTGEFPVMEAQAADEALSEWERRAPRTIYPIPCKWRKREMENWTNLKSQGHGIRNFENDRISNDWLLHYGRIPHRKLITAIQLRANVYPTREFLARGLGEGAPRGCRHCPAEWESCSHIIGYCPAVQEARIKRHNDICGVLAEEARKLGWVIFIEPHLRDNTNELFKPDLVLVKGSCAKVVDVTIRYESGLTTLSDAAAEKARKYQHLAGEVRALTSATTVDFLGFPIGARGKWYVGNNGLLSDLGFSTSRVVRIARALSKKALLSSVDIIHIFASRARQAQTSE

SEQ ID NO: 1466 - protein, 1085 aa, synthetic construct
  source 1..1085: note = Description of Artificial Sequence: Synthetic polypeptide
MSNRLANTAAAGGVPEKTSGTLDIPGQPSSSGEKRAISYPGPFGCNSCSFTSTTWLSLELHFKSVHNIRDFVFLCSKCKKSWPSINSVASHYPRCKGSVKAAVVPTSLANTCTTCGSSFGTFSGLQLHRKRAHPDVFAASCSKKTKARWSNDEFTLLARLEAGLDPACKNINQVLAERLMEYNITRGVEMIKGQRRKDQYKALVRQLRSNSETQQCVGLAGSMDSNVPANDTSSSVASEVSITYPEYGAVMSCDLIKEATGMAIVDINELQSNLRKAFLSGRKLPMKFHGARETAQKKMANPRVAKFKRFQRLFRSNRRKLASHIFDKASLEQFGGSIDEASDHLEKFLSRPRLESDSYSVISGDKSIGVAHPILAEEVELELKASRPTAVGPDGIALEDIKKLNTYDIASLFNLWLKAGDLPASVKASRTIFLPKSDGTTDISNCRPITIASAMYRLFSRIITRRLAARLELNVRQKAFRPEMNGVFENSAILYALIKDAKVRSREICVTTLDLAKAFDTVPHSRILRALRKNNVDPESVDLISKMLTGTTYAEIKGLQGKLIPIRNGVRQGDPLSPLLFSLFIDEIIGRLQACGPAYDFHGEKICILAFADDLTLVADSAAGMKILLKAACDFLEESGMSLNAEKCRTLCITRSPRSRKTFVNPAAKFIISDWKTGISSEIPSLCATDTFRFLGHTFDGEGKIHIDTEEIRSMLKSVKSAPLKPEQKVALIRSHLLPRLQFLFSTAEADSRKAWLIDSIIRGCVKEILHSVKAGMCTDIFYIPSRDGGMGFTSLGEFSLFSRQKALAKMAGSSDPLSKRVAEFFIERWNIARDPKVIEAARRVYQKKRYQRFFQTYQSGGWNEFSGNTIGNAWLTNGRARGRNFIMAVKFRSNTAATRAENLRGRPGTKECRFCKSATETLAHICQRCPANHGLVIQRHDAVVTFLGEVARKEGYQVMIEPKVSTPVGALKPDLLLIKADTAFIVDVGIAWEGGRPLKLVNKMKCDKYKTAIPAILETFHVGHAETYGVILGSRGCWLKSNDKALASIGLNITRKMKEHLSWLTFEIIFITQISRIYNSFMKK

SEQ ID NO: 1467 - protein, 1086 aa, synthetic construct
  source 1..1086: note = Description of Artificial Sequence: Synthetic polypeptide
MCILGGLTSHSREGGLSRGSSQLKTVKPQNEEDNGTTQLKAGSADSFPRPSGDLNPEEPLSIDICPVCFRQMKSYLGVRVHMQKMHLEEYNASIPDPVVSHTRWSDEEAAQLAFTEAKIEVDKLLPRGKGINKFLLELLPGRTLESIKSHRKRQSHKDLVRKYVKEFVDTLAADNDDDTIICQDNGDIFNDPIVGATDSQSETETVADPAEFKTFIELADDPTKPKVVAKLRNLIKDKPKSEILGSDILVRILRRTLHGLPVEDELDQYLEVYFTGKIKQRRSKTQTALSKKQIKQRDYGRLQELYSRSRKRCANEILNPTSMSGGFGHQELSEFWTKTFGPDEQPTLGEVEIIPKENCWWDIFSPISSDEIKASYPSIGKAAGPDNFSAYQLRKVPVWHLECLYNIFAFYKDIPSRLKDAKTILIPKKDNAESPGDFRPITLSSIITRHFHKILATRVNNFVRFHPMQRGFIQSDGCLENTALIQTVIREAKVRRKQVHITFCDVRKAFDSVRYDSIIAAIAKKGAPGSFIMYLSNLYRGNKTTLLTAGGETRITPTRGVRQGDPLSPILFNCVMDQILTALPSRTGFTLSAGDESVNVNCLAFADDIILISKTKNGHQELLDVTQRILKENGLDLNPDKCCSLSLIPHSKTKKIKVVRADFVVNGVKVRSMSIGDSTCYLGVSINVTGQVAPVKMYQALCEKLDSAAIKPHQRLYILKHFVITKMFHPLILSTIAAHKIKNLDLISRRYVRKWLHLPHDCGSGMIHAKVSDGGLGVPLLFRTIADLKVRRKEKLQVHENPIFRILAKLSTVSKELENCKKIASKTTDIQEKTFKEMLATYDGLSLKEARAVPEVHKWVDSYDKRYKFAGRDFVQVIQARFNALPTRSRVWRGRGADEKSLRCRAGCNARETLNHVSQSCFRTHRVRTARHDKILDFICERLDVVGVKYVREKPISFPGKKLIPDLIVENTDQALVLDLQIVGDNSELPLDERGKNKVIKYNCSEMQELYKRKKKTLAVKALTLHYKGLMAPETSNILRSFGFKSKDLEKMAYMALFGTVAAWGIFNRSTETMRSVANWPRPEEL

SEQ ID NO: 1468 - protein, 1054 aa, synthetic construct
  source 1..1054: note = Description of Artificial Sequence: Synthetic polypeptide
FERRSNSWGYQNLEPSNVGQDMNTVPRINNTTTTPATSRPGDQPREAIAVVNLAGEIPCAVCGRLFNTRRGFGVHMSHQHKDELDTQRQREDVKLRWSEEEAWMMARKEVELEASGNLRFPNKKLAEVFTHRSSEAIKCFRKRGEYKAKLEQIRGQSTPTPEALDSITSQPRPSLLERNHQVSSSEAQPINPSEEQSNWEIMRILQGYRPVECSPRWRAQVLQTIVDRAQAVGKETTLQCLSNYLLEVFPLPNEPHTIGRSNLRRPRTRRQLRQQEYAQVQRRWDKNTGRCIKSLLDGTDESVMPNQEIMEPYWKQVMTNPSTCSCENTRFRMEHSLETVWSAITPRDLRENKLKLSSAPGPDGITPRTARSVPLGIMLRIMNLILWCGKIPFSTRLARTIFIPKTVTANRPQDFRPITVPSVLVRQLNAVLASRLASKVNWDPRQRGFLPTDGCADNATLVDLILREHHKRWKSCYLATVDVSKAFDLVSHQAIIKTLQAYGAPTNFVSFIEEQYKGGGTSLNGAGWSSEVFIPARGVKQGDPLSPLLFNLIIDRLLRSYPREIGAKVGNTMTSAAAFADDLVLFAETPMGQTLLDTTLGFLASVGLSLNADKCFTVSIKGQAKQKCTVVERRSFCVGERECPSLKRTEEWKYLGIRFTADGRAQYSPADDLGPKLLRLTRAPLKPQQKLFAHRTVLIPQLYHQLTLGSVMIGVLGKCDRLVRQFVRRWLDLPLDVPVAYFHAPHTCGGLGIPSIRWIAPMLRLKRLSNIKWPHLEQSEVASSFIDDELQRARDRLKAENVQRCSRPEIDSYFANRLYMSVDGCGLREAGHYGPQHGWVSQPTRLLTGKEYLHGVKLRINALPSKSRTTRGRHELERRCRAGCDAPETTNHILQKCYRTHGRRVARHNSVVNAVKRGLERKGCVAHVEPSLQCDSGLNKPDLVGIRQNHIYVIDVQVVTDGHSLDQAHQRKVERYDRADIRSQMRRFFGVTGEIEFHSVTLNWRGIWSGQSVKRLIAKDLLIAEDTKLISVRAVNGGVTSFKYFMYCAGYTRS

SEQ ID NO: 1469 - protein, 1253 aa, synthetic construct
  source 1..1253: note = Description of Artificial Sequence: Synthetic polypeptide
RPQTKLMTDKLKFSSQLARGLAKQRAMDGARVGDPPITVRPTETDLCNTEGSWGRRPMKLLFVSVSTQTQNEDALWASDVAKPMASRSALKMTSIPSMTFHNSSLEKEEEMNYDFYEQIKSLVESDDSSDDFTEDDEDVEESFLDISAEEPVLGKFPIDTKGTITVVLPSLEYICVICKQHMGKASELVAHFNIKHRDIPLVFKCAKCDKTNSNHRSIACHAPKCGGIKLTEESLPMVCECCQARFATLSGLSQHKRHAHPVTRNEERIKDGIKGTSQRGVHRSCWSLKEVEQLALLELQFQGKKNINKIIAEALGTKTNKQVSDKRRDLSKKTGAPMSDSLHFSSRPLETLSPPPNVTTGTSSILAQAAERLTNENSGTLEKPAMEAIKAWLNGEGQHDALVETATALMLCPMRLVKNKGKRSKPENDIIKPRILPTRSWMKKRAEKRGSFMKHQKLFFKNRSLLASLVLDGTERHECRIPNADVYRFYCEKWEKVLPFNGLGQFKSSGVANNEYFEPLISVEEVQTAIRAIKPTSAAGPDGLTRAAICAADPEGRTLTALFNAWMITGIIPKELKKNRTILIPKVMDDEKLKELGNWRPITIGSMILRLFSRIMTARLARACPLNPRQRGFIAASGCSENLKVLQDLMRHAKKLHRPLAVMFIDIAKAFDSVSHAHILWVLRHKKVDEHVVGIIQNAYDRCTTSFKSNGESTREISIRVGVKQGDPMSPLLFNLAMDPLICTLESHGVGYSIDTDHVTALAFADDLVLVSESWVGMAANLAILESFCGLSGLEVQARKCQGFMISPTKDSYTVNNCDPWTIKNKDVHMIQPDESTKYLGLKICPWTGIIRSDLHVQLKTRISKIDEAPLKPTQKVELLNAYALPRLLYPADHSDCKQSTLRVLDQEIIKAVKGWLHLPASTCDGLLYARARDGGLAILKLENAIPSVQVRRLQRIANSSDAIARNIASSQGVEEEYRSLWVRAGGDSEAIPTFFLRGSESKEPVYPRPCDWRKRESRRRCEKPVQGRGIVNFAQDRISNAWLGPRCGFKQCFFIAALQLRANIYPTRESINRGRDGASRSCRKCSARLESLSHILGQCPAVQKFKDCATQTEAEMVPHGPAGNALPGWSLSRTFLVNVPQYKNSRIARRNKISDILADEAARLGWWVYKEPRFTSEAGELRKPALVFAKGEEALVIDVTVRFELSRKTSSEAASHQVAYYTPPCDQVKVLTKASNVTFFGFQVGARGKVAP

SEQ ID NO: 1470 - protein, 1127 aa, synthetic construct
  source 1..1127: note = Description of Artificial Sequence: Synthetic polypeptide
RKELVTIKNLFEESGATAPAPVPLEVAVEVHQSSSVPEITDESTTTQEGSYSEPPIHRCENCGREFRTRAGVQQHRRKAHTNEFMEEKEKAAPTKKLRWTDEEKEILIESEIKIIKEGSLKEQHEINKILASRMPGRSQDGIAKIRQKQEHKAEIQRRLHGTVTTNETRGNRTSEITEPIRSLPINTKTWSEDEMKRMLAEEVKLRTKNEKDINKKLAEIFPNRTMGSIKSKRTKDKDYQDLVKLTMQTISENPDNETDFNTSNTENNSTDAEKEVKNYLNMLLLTINEEEWLTSTLKEAATLALQGKKTEASEKLNEYASKTLFPGLKITNQTRKREKKISKRETRRQEYAEIQKLYKKNISSAAEKAINGKWSIKPEEEYHNNKDLIKAWKPILEAPPFSDCRPIENIKEMDYALMEISTAEIFLAIRAMGKTAPGPDGIKYSKLKKNIQSMAILFNTCLLTSFLPLPLKIARTILIPKQENPGILDYRPLTIASVVTRVFHSILAKKLDNNAQLSQRQKGFRKCDGVAENIVILETILTNSRSEKRPLCMAFVDLRKAFDSVGHESIIRGAKRVGVPPMLLEYISSSYQNASTNLFGEILNSRRGVRQGDPLSPILFNFVIDEALENLNRNIGYLLKEEKVSCLAFADDIVLIAETKGGLENHIEKLLEKLNGAGLELNASKCATLMVMKNGKEKSTYISTKAIKIKENDIPTMKATETYKYLGLQMGFKAREQNANEVITEGLENITRAPLKPQQRIHILRDFLIPRLIHKLVLGRVAKKSLKRIDQNIRKKVRNWLHLPKDTTAAFIHADAGDGGLGVPALEHTIPLLKRERITNLRKSNDPVTKECLRMEYTKQVLGKWSRPTKIGETLATNKSQLKEAFRKQMLITLDGKGLKDHHETPTIHKWIRRGENMTGKQFITAVKIRGNLVATKSRNSRGRPEQEKLCEAQCGRPDSLGHILQGCWRTHGMRVERHNNICRRIKAIMKGKESEVVEEPRLQTNEGLRKPDLLICHKGKIIICDAQVVADSSNCSLESENQRKIDYYKKDSVVSEARKLIGRVDEDIIIMAVTFNWRGAISKTSIRDLDMLLDIKSKEVIKMSRKIIRDNSIMVEMHRNRTEKRR

SEQ ID NO: 1471 - protein, 1089 aa, synthetic construct
  source 1..1089: note = Description of Artificial Sequence: Synthetic polypeptide
  VARIANT 546: note = Any amino acid
  VARIANT 551: note = Any amino acid
MKSRSFRRIGDCAAGSSRRGVRLTGKAGREGRFAASPHLSPRYLAGSVSGNVPSVPPGPGLGAGAPAFAAGRNADGGPAQNPCPYCARSFTTANGRGLHIRRAHPDEANNAIDIERIHARWSHEETAMMARLEAGAIQRGGVRFMNQFLVPRMPGRTLEAVKSKRRDATYKALVQRFLQAPQINLPELRDGDAPRQPDPQQENPPEPPSFDGAIRGAVADLVGGVDWQRLGFQGDRLCNIARRACDGGDVSGQLLGWLRDVFPVKRVSTRGDQSDLDVDGALVSRRTARTREYARVQELYRKEPKACLARILGDRREGANRAPNRDPAFIDFWRGVFSEASAEVEGWAEEVSDHGELARRVWDPISVEEVGRSRVRNGAAPGPDGIAVSVWNKLPPEAAALLFNVLLLGRCLPAELTRTRTVFIPKTDAPRTPADYRPISIASVVARHFHRVLSARVQRIPDLFTKYQRGFLSGVDGIADNLSVLDTMLTMSRRCCKHLHLAALDVSKAFDTVSHFAIVRACRSIFGSAETVLEEGGRRHFVQVRXGVRQXDPLSPLLFNLVLDRALKRLSTDVGFRLTDATKVTALAFADDVVLCATTARGLQTNLDVLEAELRLAGLLLNPNKCQALSLVASGRDHKVKLVTKPTFKVGQNTIHQVDASSIWKYLGIQFRGSGMCGCGSEGVAAGLKRITCAPLKPQQRMHLLRVFFLPKFYHAWTFGRLNAGVLRRLDVVVRTSVRTWLRLPHDIPVGYFHAPTKSGGLGIPQLSRFIPFLRLKRFDRLGRSAVDYVRECAFTDIADRKIRWCRERLSGIVDQVAGGRDALDAYWTAQLHQSVDGRALRESASVASSTQWLRCSTRAIPASDWLHYTAVHIGALPSRVRTSRGRRGGQDVSCRGGCLLDETPAHCIQVCHRTHGGRVLRHDAIAKRISADLMELGWIVTREVSFRTTAGVFRPDMVAVKEGVTVILDVQIVSPAPTLDEAHRRKVAKYRDRADLARYLAEAAVARGRAPPANIRFASATISWRGVWSAESVGSLRELGLSARHFDRYTTMALCGSWRNWVRFNASTASRMGRGRGDASPRRHENQQ

SEQ ID NO: 1472 - protein, 1123 aa, synthetic construct
  source 1..1123: note = Description of Artificial Sequence: Synthetic polypeptide
SGPATSTFGETKSRLCEPTSALGCRPGAVVIQWAQIHKEKRKRIVGWPLGHLGSPTSLKLRHPRLQAKRIVPVLAELMQCLCARHVSGRSPQKSAWAFTLEERTSACGVDAMFVCSTCQRSFATKIGLGVHVRRAHVEVANAAISVERVKDRWSEEERRIMAAVEVRGVLSGARFINEYIMSHLQTSRTLESVKGTRKNPKYKELVATLLEEARTSVREESPRSAVNDSATQPSGPSDTRSLRTEHLFTESTEPFEHRIRELIGDLEGVTDFRAELLVSIAEQQLQGDEVAESLTRWLGEVFKPENQQQQVQRKRRRQRKAPVSGQLPKWRERRRDYAAMQTLFHRNPSLAAGRVLDGKNESRPPDLPEMTAFWEPILTEQSAEHRAVGPASEKSELCSVWGPVEKEELLSSVPPLDTAVGPDGVTARQWRAVLPAVRALLYNIILKRGSFPASMLESRTVFLPKKQHSVNPADFRPISIASVVVRQLHKILAMRLRRTNLVDERQRCMDDGCAENITVLASLLDDARHGLKELHLVSLDCAKAFDSVSHHAIDATLKECGLPAGFVQYISRTYSDSSTRLEVGRNRSEPIKTNRGVRQGDPLSTLIFCLCFDRVARTLSPHIGYDLNNTRISTLLYADDAFLVSTTAPGMNILLRSVEESAGEVGLSFNTSKCSALSLIPSGKEKKMKVGTTPTFKTSQGFITQITPSQEWRYLGVDFQYSGPKKASRSLKIELERISKAPLKPQQRLLILRVYLLPRYYHHLVLSRTTLGHLRGLDLQVRAAVRRWLSLPRDIPIAYFHTTAKEGGLGLPAFETSIPCLMLARLRSMETSTCKAARAAVQGFWVQKRIHWATAALTKNGEALTCKADVDRWWASRLHKSVDGRELRECSGVGSSSTWVNSALNITGRDYVQYHHVRINSLPTRIRTSRGVRREGMEVTCRAGCQVTETAAHVIQSCHRTHGGRILRHNAVCKVLASGLRDKGWEVREEPKLRTRQGLRKPDIVAIKDGVARVIDAQVVSGSGPLDEAHETKRKYYSDNGDVTAAIARECNIAPSNVAYSSCTISWRGVWSPRSAADLLQVGLSKKLLGFITLRVLRGSHLNWTRWNKMTTMRVHHQRTGIG

SEQ ID NO: 1473 - protein, 1133 aa, synthetic construct
  source 1..1133: note = Description of Artificial Sequence: Synthetic polypeptide
MSSNEEGASDTGAPGPGVPVADVSAADGRATYDDHGMSTDYEKQTIELPLNGQIQCLWCHIEGRNQRFLQESQYLKHKDTQHPKGEIIWRCAACQKEFEKLHGCRCHLPKCKGRKEAKGVAKFKCDSCEESFLTQRGLSMHELHRHPAIRNLKRTQGTSRGNTRPINRASVWSKEETDLLIKLNERYKHLKQPNVALKEYFPDKTLKQISDKRRLLPVQEPEDVATTDETGPPPSDSSEESIYESATEDEGGGDMQQTAPNDSWKEPFIQSIRTNHLEEEDSLRKVEEAIERMAMNEGVTEQEVGTLLEQFVDSLTQSPTTERKGSRRKSQKTTKRKTTHNNRKKFLYAKHQELYKKSPRRLLELALSGESSSGREVVNLPEADSVGPLYKSLWGQIGPEKTHRNQPMCNNIDMSEIWTPIALESLVEKFKKIKSDTAAGADQIKKFHLRKKGALHVFAKLCNLLMLHRIYPAQWKTNRTTLIPKPGKSAEEVENWRPITIGSLLGRIYSAMIDRKLRSKIKQHIRQKGFTQEDGCKNNIAILSSALTKMKEDSGGIITIIDISKAFDTVPHGEISQSLMNKGVPSPICEYIQKMYIGCKTIIYCRDKKTLPVDILRGVKQGDPLSPLLFNLIIDPIIGTLDETTEGIKLENENISVLAFADDLVLLAKDKETADKQNRLINEYLDDLKMKVSAEKCTTFEIKRQNKTWFLGDPQLTLGQQRIPYADPEAAIKYLGTNFNPWRGLCKTSIKEIIDAARTVKQLKLKPHQKINLIRTYLLPRYIHKLVANPPPLGTLDLIDKELKTIIKEILHLHPSTTDGLIYTDKSHGGLGIQRVANIVKLAKLKHSILMTRSEDNAVKIALNGQEGMVKRYATSIGLQWPCGIEEIEETRKKLKRADTNKWKTLISQGQGIKEFFGDKTGNAWLYNPEMLRPSRYLDALKLRTNTYGTKAALHRAKRDIDINCRRCGVQVETLGHILGLCTHTKNKRIKRHDEICDLIAKNVSKEYVIFREPEVEVNGDRRKPDMVIKDHDKVYVVDVTVRYENNDSLNKAYKEKENKYKETAEIMRRDLKAKESRVLPVVIGSRGAVPRATIENLKVLGLQTKHALTASLIALRSSIEMANEFLDYDHTT

SEQ ID NO: 1474 - protein, 1279 aa, synthetic construct
  source 1..1279: note = Description of Artificial Sequence: Synthetic polypeptide
  VARIANT 81: note = Any amino acid
  VARIANT 111: note = Any amino acid
TFAPTHPMVRSGPCRKTKRPGSDYRESLIMDSGNNVASEPRGAVDVTSAAPIGAELNAEPCEGRNQRREAALSAQTRRRNXARRARNAQQADEPGDDEEIETHGPLTIRTXEPMEIVAIAKNPQACPKCLQGGTQLLCMGSWELSRHINKEHPSVDVTWVCGACQRRCTTLRSWSCHVLHCKGRQEPKDLPFKCEHCSLSFDSQIGLSQHERHVHPEVRNDKRAAEANKPKGKSGRRPSIWSDEDLLLIRELESEYHGARNINEKIAEHFPDRTGRQVSDARRRKDYAALRGRGGPQGPAEGVEAIEEVDEGEIPEGEELVATDGAALESGPPENGGSAPAEQVNAPALESSSQQDRECSPAVGSDEQIEDSSDDDEFSDALGEISLPEPLSVERTTISPPPRDDWKGPMRWEICNASEEAGSYANWVTGLQELVRNNALSEIGLDSLYDQLIQIMRHPSDDNEQDRLQLNARGPPRRGHRKNRRRRRLTAADRKRFAFARCQDLWNNNPKKLAELVIANDLSILQRRQAPGRTETQTLYNELWGRVGPNIEAPRRTEDPIPVSRIFTPITPQEIMGRIRRIKNDSAAGPDGVTKDDLRGRGVSIALSKLFNSILLAGYYPKAWRENRTTLLPKPEKDPADVKNWRPITISSMVSRVYSGLLDQRVRAVIKQCDRQKGFTEENGCFSNIQLLDDAVSNAKKAGGVITILDVSKAFDTVPHAVIQGCLEKKGIPETVAAYISSMYRDCSTAIRTRSGDVKIGMKRGVKQGDPLSPLIFNLVLEPLLERLQETSGVEIEGMNLSCAAFADDIVCFANTAPEAGRQLRMVADYLGRLDMSLSVSKCIAVEYVPHRKTWYTKNPGLEVNGNAVPSISPSETFKYLGAKVSPWKGLLEGFESDAFREVISRVQRLPLKPMQKVDLLQMYIFPRYTYGLITSPPAKAVLKTIDRIIRTRIKEILHLPESVSSSFLYTPRKQGGLGLLEVEKMVLIAALRNGLRARQSHDPVTRAAMNSNAADDRLKSYADALRLHWPLTTKELDTYKYQLRLSYAQKWAEQKWQGQGVEEFAQDPVGNSWLQRYDLLPASRYIDAIKLRTNTYPTRALMKIIDGRVDSSCRKCQGSSETLGHILGRCRYTKDKRISRHNEIKDLLKARLAKNHQVMDEPQITVRGQRFKPDLVVKTNEGRVHVIDVTVRYEHRTYLDEGRTEKIGKYRQILSTLRRDLHSNAEEVIPIVIGSRGAIPRETRKALSKLGIGKSDWLTISLIALRSSLEIVNAFMDD

SEQ ID NO: 1475 - protein, 1104 aa, synthetic construct
  source 1..1104: note = Description of Artificial Sequence: Synthetic polypeptide
MGEWPWVSWSLTVLVEKWRPFTILQPYPMPGQLRVDVYLPRKTSYLMDKNIYENTTSPGGGPLCGEKTHRSDVIIPPPGFAPSTDTASNTLGENVDASATTSSANPLSQEPGWCESCSKLFKSQRGLRVHQRSKHPELYHSQNQPLPRSKARWSDEEMVIFAREEIANRKIRFINQHLHKVFPHRTLESIKGLRGKNVRYARIMADLEAEMTSQPEAATSLCTETSENLASSNVLPQTRGWAENLVENIDTAHLANLGPLSQFEPGKPSSSTKEAINTEYNDWISKWLPSGAAHRERRANPPSTKLNARATRRLQYSRIQNLYKLNRSACAQEVLSGAWKVQSGELNLKEVQPFWEKMFRKESAKDRRKPKPTGEVLWGLMEPLTIAEVGSTLKSTTPSAPGPDKLTLDGVKRIPIAELVSHYNLWLYAGYQPEGLREGITTLIPKIKGTRDPAKLRPITVSSFICRIFHRCLAQRMETSLPLGERQKAFRKVDGICHNIWSLRSLIHNSKDNLKELNITFLDVRKAFDSISHKSLGIAAARLGLPPPLITYISNLYPNCSTKLKVNGKISKPIEVRRGVRQGDPLSPLLFNAVMDWALSELDPRVGVQIGEQRINHLAFADDIILVSSTKIGMVSSINTLSRHLAKSGLEISAGKEGKSASMAIVVDGKKKMWTVDPLPRFKVNSQKIPALSITQQYKYLGINIDAQGARNDAARILTEGLAELSRAPLKPQQRLYLLRVHLLPKLQHGLVLSSCAKRALTYLDKSVRSAIRRWLTLPKDTPTAFYHAKACDGGLGITRLEHTIPILKRNRMMKLTLSEDPVIMELVKLTYFTNLLHKYSNVKLLNSWPVTDKDSLARAEASMLHTSVDGRGLSNCSDVPRQSDWVTNGASLLSGRDFIGAIKVRGNLLPTKVSAARGRQREITCDCCRRPESLGHILQTCPRTWGPRISRHDSLLKRVRNQACLKNWTPIIEPSIPTNIGLRRPDLVLAKGNIAFLVDATVVADNANMQLQHEAKVEKYNNSDIKEWIKVHCPGVDEVRVTSLTANWRGCLYGGSASFLTEDLGLPKAELSLLSAKINEKGYYLWCAHYRGTARLWNRPLRS

SEQ ID NO: 1476 - protein, 1115 aa, synthetic construct
  source 1..1115: note = Description of Artificial Sequence: Synthetic polypeptide
WVTSPRRPRYVGPQKKKASDGNDGRAAARAEPTNPGGPDRADDDEGDVKFWCEFPGCDRFFMTRSGRGLHHKKGHPDWNDQRNLAGKQHRKEIWSEEERLLLAKKEAELAISGARFINVELRDFTARSLDAIKGQRKRPDYKILVEKFVRELRVRGIRQGVASRSQQARAMAVAGAPAATSSGAPPVATQPPPSGRVLRSQVVEAPAMEIPVAESEGDSSGDELFEDVEPVRLSDLPPDRFTIYFAGLEIPGTEDIYAHRLHTICLMTTWRTKEEVRLELGLFLKDLFPSKGSQERPERTNLPDPRNRIERRRGEYKKCQDLWRRNKSTCVQRILKEDLSQGECLPRELMEPFWNATFTQNPGTAPVLPPPTEVYSSVWEPIRPENIKGNYPPQNTAAGIDGLTVGDLKGVSREMLARIFNLFMWCGKLPEHLCASRTILLPKKPGAKVPGEFRPITVTSVLIRTFHKVLAERLKVVPLDPRQRGFRESDGCAENVMLLDMTIRYHHERRRKMFLALLDMAKAFDSVSFESMREVLTTKGIPTPFIEYFMTHLEDSFTVLQHGNWQSGKIHPTCGVKQGDPLSPPIFNFIMDEMLKRLPKEIGVNLDGLFVNAMAFADDLSLVANTEQGLQILIDEATSFLGLCGLRANPNKCVTLAIKTIPKEKKTAIDPSSHFRIGNAVIPSLKRTDEWVYLGIKFNSNGRLISDAKPKLIKDLELLTKAPLKPQQRLWALKVIVIPGILYRGTLGSSTAGYLRSLDCVIRAYVRRWLRLPGDCPNGYFHAAVADGGLGVHPIRYKAMVDRLARLRKLEKSAYITGPEAARYLQRQVSIAENRLRDGANRIMSDASMLREFLRELLYKSFDGRPLENSSKVPGQHRWVEEPTRFLSGADYMNCIRARIAALPTAARCARGRLKDKHCRAGCGNVETLNHVLQFCHRTHGTRIGRHDAVVKYVVGGLKKRGYAVKEEPKIVLQDVVYKPDMVATKEGKTLILDAQVLGDQRDMRLAHEDKLRKYGAPEFKRKIRSETGSATIKSLSVTLSWRGLWGPDSVKGLLEEGVILKKDLKILSTRVLIGALAGWRRFNERTSMATSGRREEVTTRMVRRWKRRERVGVG

SEQ ID NO: 1477 - protein, 1013 aa, synthetic construct
  source 1..1013: note = Description of Artificial Sequence: Synthetic polypeptide
  VARIANT 753: note = Any amino acid
MSGKSSKPRTVSSGSSSQETPPSGSNACDICGKCFMKPVGLSRVHPSQYHARLEKNQPKAKKFRWTDEDLYFLAKKEAELLHLGSIKFVNKELAEFFPEKSVDQIRGQRRSETYKQQVLSIHSELLKLQTVADSPPPSRIPAKEVSAWLDFFLALPKTKNKFSEDKLDQLIRTAQDGTLILDDLDLYLREVLVQPTSQGEKQAKLLPPPKSSREKRDREYARAQNLYRKNKTACVNAILDGNKKCENKIPDIDDFWKTIFESHSPPDAEPVCYVVDEEPTNIWSWISFFEMNHNYPDSSTSPGPDGVTARMLRSIPARVLNKLLNLLLFIEDLPAVFKCHRTVLIPKIDNPTSPGEFRPITISSIVVRQLNKIIAARVSEGVPINPRQKAFRQIDGCAENVFLLDFILRDAKTKIKSLSLATVDIKKAFDSVSHHSIFRAIRGARCPENLVNYIQNSYSGCTTQISVGGSISASKIPMNRGVKQGDPLSPVLFNLVINEIIRKLPASIGYPINSELSINCIAYADDLILVTNTREGLKLLLGLLNEELPKRGLELNASKCFGLSLTALGKLKKTHLCTSDQLDLHGTLIKNLTAEESWVYLGVPFSHIGRSKSFSPDLEALLNKLQKSPLKLQQKLFALRVYLIPRLLHGLVLSRVAIGELKIMDKLILKHLRVWLRLPKDTPLGFFYSPVKLGGLGIKNLRTNVLKCRKQRIERMLVSPDDVVRLVAESEIFLKETDKLKDLLTINGMCLDXRNVPRTGKNNKFWSERLYTSFDGKTLAYSEYFTQGGGWIREDKILQPAHVFAECIKLRINALPTKSRVAHGRPTKDRSCRAGCLDVQKVPTIETINHIAQVCPRTHGARIKRHDRLVQFLSLNLRKNPKRNVLVEYNFRTVAGIRKPDIIVIEDTRAVILDVQVVGDSSNLEMEYLEKSRKYSNDANFINALQKLYPTVTNLTFHAVTFNNRGLIAKSTVAALRMLGVPPRCIMILCVISLEKTLEVWRMFNQSTASARK

SEQ ID NO: 1478 - protein, 1016 aa, synthetic construct
  source 1..1016: note = Description of Artificial Sequence: Synthetic polypeptide
MSEESRPKQTASKRGAAVEKTMMSGTYVCTLCGRSFEKSVGLSLHTNRMHPEAYNKLKEAKKPVLKKARWSEEEVFLLAQKEAELSFIGGIKFMNIELHKIFPERELEGIKGQRKNPTYKAQVVSLLAEIRESKANDSSSSSSSSSSCDSASLGISNWLEFLLALPKTSNQFQEGRLDRLISDALRGVDVLENLDAYLLEVFAKPMAQNPCPKPPPPAKNSRERRDREYSRVQNFYKKNRSACINSILDGNTRSQNVIPGLTKFWTETFEKNSPPDDEAPDQFVADEPRDMYKWITFYEMSQDYLDSSTAPGVDGFSAKQLRSMSPRVLNKILNLLLLSENLPNSFKMHKTVLIPKIDDPKSPGDFRPITISPVLARLLNKILAARLSKLVPISQRQKAFLPVDGCGENIFLLDYILRSSKKSSKSVAMAVLDVKKAFDSVSHHSILRALNEAKCPINFINFVRNSYDGCTTKLTCGGTSFPDSVRMNRGVKQGDPLSPVLFNLIIDSAIRKLPDSIGYVIRDGLKINCLAYADDLILVASSRAGLKTLLNIVAEHLSLRGLDLNAAKCHGLSIIASGKAKTTYVSAADSLDLDGQPIKNLGVLDTWTYLGIPFSHLGRAEKVSPDLTNLLNKLQKAPLKLQQKLYAVRNFVIPRALHGLILSKTNLKELNTLDRAIRVFLRTLLYLPKDTPLGFFHSPIKSGGLGITCFRTSVLKCRLQRIARMRSSCDGVIQAVAESDIFADEYAKLRDLIRINGNVLDTTESIKRYWAQRLHSSVDGKTLAYMDYFPQGNLWMSEDKVSQRSYVFADCVKLRINAIPTRVRVSRGRPNKEMCCRAKCFDSQRMPAFESLNHITQVCPRTHGSRIQRHDKIAKFLFKNLNNCPSRSVLYEPHFVTVDGLRKPDIIIYDDSHMVVLDVQVVSDSANLEKEFECKAKKYANDVALRSAMLIKYPFIKSFSFVAATYNNRGLIAKSSVQVLRQLGLSPRSIMVSILICLEGTLETWRIFNQSTMNAH

SEQ ID NO: 1479 - protein, 1020 aa, synthetic construct
  source 1..1020: note = Description of Artificial Sequence: Synthetic polypeptide
  VARIANT 757: note = Any amino acid
MSGKSSKPRTVSSGSSSQETPPSGSNACDICGKCFMKPVGLSLHMSKVHPTQYHARLEKNQPKAKKFRWTDEDLYFLAKKEAELLLLGGIKFMNKELAEFFPEKSVDQIKGQRRSETYKQQVVSIHSELLKLQAVADSPPPSRIPAKEVSAWLDFLLALPKTKNKFSEDKLDQLIRTAQEGTPVLNDLDLYLREVLVQPTRQGERQAKPLPPPKSSREKRDREYARVQNFYRKNKTACVNAILDGNKKCENKIPDIDEFWKAIFESQSPPDAEPVSYVVDEEPKNIWSWISFFEMNRNYPDTSTSPGPDGVTARMLRSIPARVLNKLLNLLLFIEDLPAVFKCHRTVLIPKVDNPALPGEFRPITISSIIVRQLNKIIAARVSEGVPINPRQKAFRQIDGCAENVFLLDFILRDAKTKIKSLSLATVDIKKAFDSVSHHSIFRAIRGARCPENLVNYIQNSYSGCTTQISVGGSISTTKILMNRGVKQGDPLSPVLFNLVINEIIRKLPASIGYPINSELSINCIAYADDLILVANTREGLKLLLNLLNEELPKRGLELNASKCFGLSLTALGKLKKTHLCTSDQLDLHGTLIKNLTAEESWVYLGVPFSHIGRSKSFSPDLEALLNKLQKSPLKLQQKLFALRVYLIPRLLHGLVLSRVAIGELKIMDKLILKHLRVWLRLPKDTPLGFFYSPVKLGGLGIKNLRTNVLKCRKQRIERMLVSPDDVVRLVAESEIFLKETDKLKDLLTINGMCLDXRNVPRTGKNNKFWSERLYTSFDGKTLAYSEYFTQGGGWIREDKILQPAHVFAECIKLRINALPTKSRVAHGRPTKDRSCRAGCLDVQKVPAIETINHIAQVCPRTHGARIKRHDRLVQFLSLNLRKNPKRNVLVEYNFRTVAGIRKPDIIVIEDTRAAILDVQVVGDSSNLEMEYLEKSRKYSNDATLSMRINALQKLYPTVTSLTFHAVTFNNRGLIAKSTVAALRMLGVPPRCIMILCVISLEKTLEVWRMFNQSTASARK

SEQ ID NO: 1480 - protein, 1138 aa, synthetic construct
  source 1..1138: note = Description of Artificial Sequence: Synthetic polypeptide
MLRGTGNMNDKRDGSATADPTSALLGAVGDGSLVCNLCGLACKSRGGLSIHRRSKHATVYHAERQPAPRAKARWTNDEMILVARKQIASEKSRCSAVVEGMREAVPHRTFDAVKSLKTKNRNYTRILEQIRAECSEEEVIESGVLKDRTENVCVQTTSNVPGSAGRAASVELEGNIQVGHQLAQKTMAGNNSRKQPANHTNWAEFNIEEGNITLRKSKRKANGMPDATHRPGPPTVDSLKHPVCLLQGAADKRDEPHTVEQLYYNIEEGMPLAEEQQWSEKLFDAIDSSLLSVEVELGRIVPGCPDEETRQLIDREFLDFIHSYSREKPPQRGLAKSKPPPKGPKSLRRQQYRQLQRLWDKNRSAAAEQALTGKWQEVRTAAGVPLSLMEVPWREIFETPSTTDVREPAPAGPVLWQLLRPVTIAEVEDAISSKKSASGPDGVPCAALQTMGAASLAAHFNLWLLAGTQPKRLTECRTIFVPKEVNTHLPLHHRPITIGSVVVRLFHQILGKPMEAVLPLGSGQRGFRKGDGICQNIWLLHTLIRRSTDLLRPLKLVFLDVKKAFDSVSHESLLIAAKRLGVPGPLLTYINELYSRSETVFEVGGESSGSVKVSQGVKQGDPLSSTLFNCVIDWAVSDLDPHIGVLLGESRVSFLAYADDLVLLSETEAALTSQLNSIEKSLAHCGLKLSTGDSGKSASLNIVIDGKAKRWVVNPTPFLRASGGEIRSLVANETYKYLGINIGAQGVKAAEYNAFKEALDNLSRAPLKPQQRLFLLKTYLLPQLHHSLVLSRTTGKLLNSLDALVRKAVRGWLKLPHDTHRAFFYAHQADGGLNVPSLYHLIPLLRRSRYERLTRVEDPEIREVSRTDYFKRVLGAAAAATTVAGHRIDSKVTLRLAWREALYASADGRGLSQCPLVPEVHSWVTDVSGLQTGSQYISAVRLRGALLPTAVRKSRGRGGVNSNCDCCGRGQPEFLGHVLQTCPRTWGSRISRHNHVLSLIAKACRSRRWQVLEEPIIQTPAQLLKPDLVIWNHQAAYVVDVSVPGDNTPLSTCHNRKVAYYSGESVREWVRSKTGHNPTVSSVVINWRGAMAKESYRLLTKDLRLAKTLPRLLVLRVLEGGHGIWLNFHRSTFAVGVT

SEQ ID NO: 1481 - protein, 1148 aa, synthetic construct
  source 1..1148: note = Description of Artificial Sequence: Synthetic polypeptide
MPVSTGAETDITSSLPIPASSIVSPNYTLPDSSSTCLICFAIFPTHNILLSHATAIHHISCPPTPVQDGSQQMSCVLCAAAFSSNRGLTQHIRHRHISEYNELIRQRIAVQPTSRIWSPFDDASLLSIANHEAHRFPTKNDLYQHISTVLTRRTAEAVKRRLLHLQWSRSPTAITTSSNNHTTTDIPNTEARYIFPVDLDEHPPLSDATTPDASTHPLPELLVILTPLPSPTRLQNISESQTSHESNRNSMHTPPTYACDSDESLGVTPSSTIPSCFHSYRDPLAEQRSKLLRASASLLQSSCTRIRSSSLLAFLQNASTLMDEEHVSTFLNSHGEFVFPRTWTPSRPKHPSHAPANVSRKKRRKIEYAHIQTLFHHRPKDAANTVLDGRWRNPYVANHSMIPDFDCFWTTVFTKTNSPDSREITPIIPMTPSLIDPILPSDVTWALKEMHGTAGGIDRLTSYDLMRFGKNGLAGYLNMLLALAYLPTNLSTARVTFVPKSSSPVSPEDFRPISVAPVATRCLHKILAKRWMPLFPQERLQFAFLNRDGCFEAVNLLHSVIRHVHTRHAGASFALLDISRAFDTVSHDSIIRAAKRYGAPELLCRYLNNYYRRSTSCVNRTELHPTCGVKQGDPLSPLLFIMVLDELLEGLDPMTHLTVDGESLNYIAYADDLVVFAPNAELLQRKLDRISLLLHEAGWSINPEKSRTLDLISGGHSKITALSQTEFTIAGMRIPPLSAADTFDYLGIKSNFKGRCPVAHIDLLNNYLTEISCAPLKPQQRMKILKDNLLPRLLYPLTLGIVHLKTLKSMDRNIHTAIRKWLRLPSDTPLAYFHSPVAAGGLGILHLSSSVPFHRRKRLETLLSSPNRLLHKLPTSPTLASYSHLSQLPVRIGHETVTSREEASNSWVRRLHSSCDGKGLLLAPLSTESHAWLRYPQSIFPSVYINAVKLRGGLLSTKVRRSRGGRVTNGLNCRGGCAHHETIHHILQHCALTHDIRCKRHNELCNLVAKKLRRQKIHFLQEPCIPLEKTYCKPDFIIIRDSIAYVLDVTVSDDGNTHASRLLKISKYGNERTVASIKRFLTSSGYIITSVRQTPVLTFRGILERASSQSLRRLCFSSRDLGDLCLSAIQGSIKIYNTYMRGTQRLNE

SEQ ID NO: 1482 - protein, 1031 aa, synthetic construct
  source 1..1031: note = Description of Artificial Sequence: Synthetic polypeptide
MSQKRRPEKAVPDEGATAHDVAQPDKSKCSVCGETFKGPASVTMHMVKKHPVEFNELKMAKKPVPKKVRWSEEEIFQLARTEAELTLQGVRFINVELQKIFPAREIEGIKGQRKLAKYKELVKDQLDEIGRAPNPPEQEIGEDVPSPFKAWLELLLALPKTPNDFLEHKLDNIIVQALKEDVNSDQVFNDLNSYLKLILEPSGRAKSVPGEIIHGDPSGSAKTSVTKAPKPATVSSSRKKRRDAEFARIQRLYRKNRTSCINTILDGNTREHEAPKNMEGFWREIFERESPDDPDDPDIFLEEEASDIWKYISFYEMCNLYPPPSTAPGPDGFSSKDLRRMTPRVLNKILNLLLHLRDLPQILKSHRTVLIPKTDLPTKPGDFRPITISNILVRHLNKILANRVSHLIPINERQKAFLPIDGCAENIFTLDFILHHARTKIKSLSMAILDISKAFDSVSHHSIFRALREARCPIGFIKFIENCYGGCFTKLFCGGVKYPSEVSMNRGVKQGDPLSPVLFNLVIDGLIRQIPSALGFNVSDQVKVSCIAYADDLILIATTRAGLKTLLDLTNSYLAKRGLSLNPDKCSALSIVASGKQKLVYIASSEHFDLAGQKMRNLNVGDSWRYLGIQFSHLGRAEKVTPDLTCLINRLQKAPLKLQQKLYALRIYLIPRLIHGLTLSKTNLGELKTLDKLIRKYIRAWLHLPDDTPMGYFYTPLKAGGLGLPSLRLVILNNRLERILRMKASQDIIVRTIAESETLGVEIRKLHDLLSIDGTILDTSVKIHSFWAERLYSSYDGKCLCNSANFPPGNKWIGEDSLNQRSHIFADCLKLRINALPTRSRTARGRPLKDKPCRAGCRNSDGVKVIETLNHITQVCERTHGARVKRHDRLVDFAVKGLQRPHRVVLKEPHYKTVNGVRKPDIVIKIPDHTYICDFQVVSDTSCLELEFRKKALKYAEDKGLCDQLTRDHPGELSFTAITFNTRGLIAKSSVTALRKLGMPPRSIMTLQKICMEGSLEIWRIFNQTTAMARN

SEQ ID NO: 1483 - protein, 1056 aa, synthetic construct
  source 1..1056: note = Description of Artificial Sequence: Synthetic polypeptide
FERRKDPWGYRPPGTLKQIGATENNEPRNLNRFVRGESTASSLESTQFGTSAEVNLAGRVPCTICEMTFSSKRGLGVHMSHRHKDDLDAQRLRVDKKARWSEEETLMMARKEVELAASGVRFLNKKLAEIFTHRSADAISSYRKRSEYKAKLEQIRGQSVPTPEAEEINTTQRRPSNSEQNRRVPRSEGGPIAPTEQTNNEILRVLQGLAPVVCLPRWRAEVLQNIVDNAQVSGQETTLQSLSSYLMEIFPPRNEPHILTRPRTEPRNMRQRRRQQYARVQRNWDKHPGRCIKSLLEEDDESVMPNQEVMEPYWRRVMTQPSSSSIKRDMFNMEHSLERVWSAVNQRDLRATKVKLSSSPGPDGITPKTARSVPEGIMLRIMNLILWCGNLPYSIRLARTIFIPKKATANQPQDYRPISVPSVIVRQLNAILASRLSAAINWDTRQRGFLPTDGCADNTTIVDLVLREHHKRFKSCYIGTLDVSKAFDAVAHEAVYNTLASYGAPKGFINYLRKAYEGGGTMLAGNGWVSEAFIPARGVKQGDPLSPILFNLVIDRLLRSLPSEIGAKVGNAMTNAAAFADDIVLFAETPMGLQKLLDTTVCFLSSVGLTLNTDKCFTVSIKGQAKQKCTVVERRSFLIGGRECPSLKRTDEWKYLGIKFTAEGRARYDPAEDLGPKLLRLTRAPLKPQQKLFALRTVLIPQLYHKLTLGSVTIGVLKKFDKLVRYTARKWLGLPVDVPVSFFHAPHKSGGLGLPSLRWTAPMLRLKRLSNIKWPHLERSEVASSFVEEEMRRARDRLQAGSEELLTRSQVDSYLANRLHMSVDGCGLREAERFAPQHGWVSQPTRLLTGKEYTDGIKLRINALPSRSRTTRGRHELERRCRAGCDAPETTNHILQQCYRTHGRRIARHNGVVNFLKRGLERRGCVVHVEPSLQGETGLNKPDLVAIRQNRIYVIDTQIVTDGHSLDQAHQRKVGKYDTPDIRTNLRRSFGAFDIEFHSATVNWRGIWSGQSVKRLIASDLLSSGDSNIISVRVISGGLWSWRQFMYLSGYTRDWT

SEQ ID NO: 1484 - protein, 1022 aa, synthetic construct
  source 1..1022: note = Description of Artificial Sequence: Synthetic polypeptide
MTTRPSVDIFPEDQYEPNAAATLSRVPCTVCGRSFNSKRGLGVHMRSRHPDELDEERRRVDIKARWSDEEKWMMARKEVELTANGCKHINKQLAVYFANRSVEAIKKLRQRGDYKEKIEQIRGQSALAPEVANLTIRRRPSRSEQDHQVTTSETTPITPFEQSNREILRTLRGYSPVECHSKWRAQELQTIIDRAHLEGKETTLQCLSLYLLGIFPAQGVRHTLTRPPRRPRNRRESRRQQYAVVQRNWDKHKGRCIKSLLNGTDESVMPSQEIMVPYWREVMTQPSPSSCSGEVIQMDHSLERVWSAITEQDLRASRVSLSSSPGPDGITPKSAREVPSGIMLRIMNLILWCGNLPHSIRLARTVFIPKTVTAKRPQDFRPISVPSVLVRQLNAILATRLNSSINWDPRQRGFLPTDGCADNATIVDLVLRHSHKHFRSCYIANLDVSKAFDSLSHASIYDTLRAYGAPKGFVDYVQNTYEGGGTSLNGDGWSSEEFVPARGVKQGDPLSPILFNLVMDRLLRTLPSEIGAKVGNAITNAAAFADDLVLFAETRMGLQVLLDKTLDFLSIVGLKLNADKCFTVGIKGQPKQKCTVLEAQSFYVGSSEIPSLKRTDEWKYLGINFTATGRVRCNPAEDIGPKLQRLTKAPLKPQQRLFALRTVLIPQLYHKLALGSVAIGVLRKTDKLIRYYVRRWLNLPLDVPIAFVHAPPKSGGLGIPSLRWVAPMLRLRRLSNIKWPHLTQNEVASSFLEAEKQRARDRLLAEQNELLSRPAIEKYWANKLYLSVDGSGLREGGHYGPQHGWVSQPTRLLTGKEYMDGIRLRINALPTKSRTTRGRHELERQCRAGCDAPETTNHIMQKCYRSHGRRVARHNCVVNRIKRGLEERGCVVIVEPSLQCESGLNKPDLVALRQNHIDVIDTQIVTDGHSMDDAHQRKINRYDRPDIRTELRRRFEAAGDIEFHSATLNWRGIWSGQSVKRLIAKGLLSKYDSHIISVQVMRGSLGCFKQFMYLSGFSRDWT

SEQ ID NO: 1485 - protein, 1070 aa, synthetic construct
  source 1..1070: note = Description of Artificial Sequence: Synthetic polypeptide
SSFGLIVTNLNSETVLWGCQPLGQFSLIGTNMQNTTPRIINTNSLTNQIPTVSSLGAQSEHSAQVNPNSGYQCTICESSFRSKSGLGVHMSRRHKDEFDQLRLRTDRKAQWSEEELSMMARKEIELAANGERYLNKKLAEVFTNRSVDAIKKCRQRERYKTKIEQLKGQAVPLPEALESETIQRRPSIRERDLLVTPPNTLGTTPTELSNSEILAVLQGYPPVVCNDQWRVEVLQSIVDGAQASGKEITLQRLSTYLMEVFPSQNDRPIQTRPPRRPRNRRQGRRQQYALTQRNWDKHKGRCIKAILDGTEGTATMPSQGIMGSYWRQVMTQTSPTYSGTNTTFRTEHPLEGVWSPITLGDLRVHRVSLTKSPGPDGITPRTVRSIPSGVMLRIMNLILWCGKLPVSIRQARTIFIPKVGNASRPQDFRPITVQSVMVRILNAILASRLTSSVDWDPRQRGFLPTDGCADNTTIVDLILRDHHKRCKSLYIATLDISKAFDSVSHAAVSATLTAYGAPKEFVDYVQNSYEVCGTTLNGDGWRSEEFIPARGVRQGDPLSPIIFNLIIDQLLRSYPNEIGATIGDHTTNAAAFADDIVLFAETRLGLQTMLDTTVDFLSSVGLTLNSDKCFTVGIKGQPKQKCTVVIPETFRIGSRSCPALKRTDEWKYLGITFTAQGRTRYSPADDLGPKLLRLTRSPLKPQQKLFALRTVLIPQLYHKLTLGSVMIGVLRKCDILVRSTVRKWLGLPLDVSTAFFHAPHTYGGLGIPSVRWVAPMLRMKRLSNIKWAHLAQSEAASSFLTDELNKARGRTLAGLNELTSRTEIETYWANRLYMSVDGRGLREAGLFRPQHGWVCQPTRLLTGQDYRNSIKLRINALPSRSRTTRGRNELERQCRAGCDAPETTNHILQNCYRTHGRRVARHNCVVNNLKRILEEKGHTVHVEPSLQLETSVSKPDLVCIRDNHACVIDAQIITDGLFLDDVHHRKVEKYKRPEVISALRREFGVSGNVEVLSATLNWRGIWSNQSVRRLIAKGLISSGDSNVISARVVTGGLYCFRQFMYLAGYTRDWT

SEQ ID NO: 1486 - protein, 1070 aa, synthetic construct
  source 1..1070: note = Description of Artificial Sequence: Synthetic polypeptide
SSFGLIVTNLNSETVLWGCQPLGQFSLIGTNMQNTTPRIINTNSLTNQIPTVSSLGAQSEHSAQVNPNSGYQCTICESSFRSKSGLGVHMSRRHKDEFDQLRLRTDRKAQWSEEELSMMARKEIELAANGERYLNKKLAEVFTNRSVDAIKKCRQRERYKTKIEQLKGQAVPLPEALESETIQRRPSIRERDLLVTPPNTLGTTPTELSNREILAVLQGYPPVVCNDQWRVEVLQSIVDGAQASGKEITLQRLSTYLMEVFPSQNDRPIQTRPPRRPRNRRQGRRQQYALTQRNWDKHKGRCIKAILDGTEGTATMPSQGIMGSYWRQVMTQTSPTYSGTNTTFRTEHPLEGVWSPITLGDLRVHRVSLTKSPGPDGITPRTVRSIPSGVMLRIMNLILWCGKLPVSIRQARTIFIPKVGNASRPQDFRPITVQSVMVRILNAILASRLTSSVDWDPRQRGFLPTDGCADNTTIVDLILRDHHKRCKSLYIATLDISKAFDSVSHAAVSATLTAYGAPKEFVDYVQNSYEVCGTTLNGDGWRSEEFIPARGVRQGDPLSPIIFNLIIDQLLRSYPNEIGATIGDHTTNAAAFADDIVLFAETRLGLQTMLDTTVDFLSSVGLTLNSDKCFTVGIKGQPKQKCTVVIPETFRIGSRSCPALKRTDEWKYLGITFTAQGRTRYSPADDLGPKLLRLTRSPLKPQQKLFALRTVLIPQLYHKLTLGSVMIGVLRKCDILVRSTVRKWLGLPLDVSTAFFHAPHIYGGLGIPSVRWVAPMLRMKRLSNIKWAHLAQSEAASSFLTDELNKARGRTLAGLNELTSRSEIETYWANRLYMSVDGRGLREAGLFRPQHGWVCQPTRLLTGQDYRNGIKLRINALPSRSRTTRGRNELERQCRAGCDAPETTNHILQNCYRTHGRRVARHNCVVNNLKRILEEKGHTVHVEPSLQLETSVSKPDLVCIRDNHACVIDAQIITDGLFLDDVHHRKVEKYKRPEVISALRREFGVSGNVEVLSATLNWRGIWSNQSVRRLIAKGLISSGDSNVISARVVTGGLYCFRQFMYLAGYTRDWT

SEQ ID NO: 1487 - protein, 1057 aa, synthetic construct
  source 1..1057: note = Description of Artificial Sequence: Synthetic polypeptide
FERQNFSDGLVPQRKFIHIGTTNRNNEPRSNLRNLMTTRPSVDIFPEDQYEPNAAATLSRVPCTVCGRSFNSKRGLGVHMRSRHPDELDEERRRVDIKARWSEEEKWMMARKEVELTANGHKHINKQLAVYFANRSVEAIKKLRQRGDYKEKIEQIRRQSALVPEVANLTIRRRPSRSEQNHQVTTSETTPITPFEQSNREILRTLRGYSPVECHSKWRAQELQTIIDRAELEGKETTLQCLSLYLLGIFPAQGVRHTLTRPPRRPRNRRESRRQQYAVVQRNWDKHKGRCIKSLLNGTDESVMPSQEVMVPYWREVMTQPSPSSCSREVIQMDHSLERVWSAITEHDLRASRISLSSSPGPDGITPKTAREVPSGIMLRIMNLILWCGNLPHSIRLARTVFIPKTVTAKRPQDFRPISVPSVLVRQLNAILATRLNSSINWDPRQRGFLPTDGCADNATIVDLVLRHSHKHFRSCYIANLDVSKAFDSLSHASIYDTLRAYGAPKGFVDYVQNTYEGGGTSLNGDGWSSEEFVPARGVKQGDPLSPILFNLVMDRLLRNLPSEIGARVGNAITNAAAFADDLVLFAETRMGLQVLLDRTLDFLSLVGLKLNADKCFTVGIKGQPKQKCTVLEAQSFYVGSREIPSLKRTDEWKYLGINFTATGRVRCNPAEDIGPKLQRLTKAPLKPQQRMFALRTVLIPQLYHKLALGSVAIGILRKTDKLIRYYVRRWLNLPLDIPIAFIHAPPKSGGLGIPSLRWVAPMLRLRRLSNIKWPHLTQNEVASSFLEAEKQRARDRLLAEQNELLSRPAIEKYWANKLYLSVDGSGLREAGHWGPQHGWVNQPTRLLTGKEYIDGIRLRINALPTKSRTTRGRHELERQCRAGCDAPETTNHIMQKCYRSHGRRIARHNCVVNRIKRGLEERGCVVIVEPSLQCESGLNKPDLVALRQNHIDVIDIQIVTDGHSMDDAHQRKINRYDRPDIRTELRRRFEAAGDIEFHSATLNWRGIWSGQSVKRLIAKGLLSKYDSHIISVQVMRGSLGCFKQFMYLSGFSRDWT

SEQ ID NO: 1488 - protein, 1063 aa, synthetic construct
  source 1..1063: note = Description of Artificial Sequence: Synthetic polypeptide
TCLAANLSGKNFSDGLVTQRKFTHIGTTNTNNEPRISLHNLMTTRPSVDIFPEDQYEPNAAATLSRVPCTVCGRSFNSKRGLGVHMRSRHPDELDEERRRVDIKARWSEEEKWMMARKEVELTANGHKHMNKQLAVYFANRSVEAIKKLRQRGDYKEKIEQIRGQSALVPEVANLTIRRRPSRSEQNHQVTTSETTPITPFEQSNREILRTLRGYSPVECHSKWRAQELQTIIDRAELEGKETTLQCLSLYLLGIFPAQGVRHTLTRPPRRPRNRRESRRQQYAVVQRNWDKHKGRCIKSLLNGTDESVMPSQEVMVPYWREVMTQPSPSSCSGEVIQMDHSLERVWSAITEHDLRASRISLSSSPGPDGITPKSAREVPSGIMLRIMNLILWCGNLPHSIRLARTVFIPKTVTAKRPQDFRPISVPSVLVRQLNAILATRLNSSINWDPRQRGFLPTDGCADNATIVDLVLRHSHKHFRSCYIANLDVSKAFDSLSHASIYDTLRAYGAPKGFVDYVQNTYEGGGTSLNGDGWSSEEFVPARGVKQGDPLSPILFNLVMDRLLRNLPSEIGAKVGNAITNAAAFADDLVLFAETRMGLQVLLDKTLDFLSLVGLKLNADKCFTVGIKGQPKQKCTVLEAQSFYVGSREIPSLKRTDEWKYLGINFTATGRVRCNPAEDIGPKLQRLTKAPLKPQQRMFALRTVLIPQLYHKLALGSVAIGVLRKTDKLIRYYVRRWLNLPLDVPIAFIHAPPKSGGLGIPSLRWVAPMLRLRRLSNIKWPHLTQNEVASSFLEAEKQRARDRLLAEQNELLSRPAIEKYWANKLYLSVDGSGLREAGHWGPQHGWVNQPTRLLTGKEYIDGIRLRINALPTKSRTTRGRHELERQCRAGCDAPETTNHIMQKCYRSHGRRVARHNCVVNRIKRGLEERGCVVIVEPSLQCESGLNKPDLVALRQDHIDVIDIQIVTDGHSMDDAHQRKINRYDRPDIRTELRRRFEAAGDIEFHSATLNWRGIWSGQSVKRLIAKGLLSKYDSHIISVQVMRGSLGCFKQFMYLSGFSRDWT

SEQ ID NO: 1489 - protein, 1057 aa, synthetic construct
  source 1..1057: note = Description of Artificial Sequence: Synthetic polypeptide
FERRIFPKGLVPLTKDNHIGTTNLQNEPRIFTNDLLTTRPSVDHVPEDQYEPNAAATLSRVPCTVCDRSFNSKRGLGVHMRSRHPDELDEERRRVDIKARWSEEEKWMMARKEVELMANGFKHINKQLAVYFANRSVEAIKKLRQRGDYKEKIEQIRGQSALAPEVANLTIRRRPSRSEQDHQVPTSEASPITPLEQSNREILRTLRGYSPVVCPSKWRAQELQTIIDRAEFEGKETTLQCLSLYLQGIFPVQGVRHTLTRPPRRPRNRRESRRQQYAVIQRNWDKHKGRCIKSLLNGTDESVMPSREFMEPYWREVMTQPSPSSCNGEVIRTDHSLETVWSAITEQDLRASRVSLSSSPGPDGVTPKTAREVPSGIMLRIMNLILWCGNLPHSIRLARTIFIPKTVTAKRPQDFRPISVPSVLVRQLNAILATRLTSSIDWDPRQRGFSPTDGCADNATIVDLVLRHSHKYFKSCYIANLDVSKAFDSLSHAAIYGTLRAYGAPKGFVDYVQKTYEGGGISLNGEGWCSEEFVPARGVKQGDPLSPILFNLVIDRLLRALPSEIGTKVGNAMINAAAFADDLVLFAETRMGLQTLLDKTVDFLSTVGLKLNADKCFTVGIKGQPKQKCTVLEAQSFCVGSREIPTLKRTDEWKYLGIHFTASGRVRCNPAEDIGPKLQRLSEAPLKPQQRLFALRTVLIPQLYHKLSLGSVTIGVLRKTDKLIRFYVRRWLNLPSDVPIAFVHAPPKCGGLGIPSLRWVAPMLRLRRLSNIKWPHLVQSEEASSFIEAEKQRARGRLIAEQNELLSRPAIEKYWANRLYLSVDGGGLREAGHYGPQHGWVSQPTRLLTGKEYLDGIRLRINALPTKSRTTRGRHELERQCRAGCDAPETTNHIMQKCYRSHGRRVARHNCVVNRIKRGLEERGCVVIAEPSLQCESGLNKPDLVVLRQNHIDVIDVQVVTDGHSMDEAHQRKINRYDRPDIRTELRRRFEAAGDIEFHSATLNWRGIWSGQSVKRLIAKGLLSKYDSHIISVQVMRGSLGCFRQFMYLSGFSRDWT

SEQ ID NO: 1490 - protein, 1309 aa, synthetic construct
  source 1..1309: note = Description of Artificial Sequence: Synthetic polypeptide
MEVPLTSSLGSGATQAPGTPELLGEHTVERPGLDQGHSYGLLMDDVELPVRLPFFGPLICPGCRTLLTSEETISSHHRRVHPDARTRWVCYGCDSPFMTYRAIKCHLPKCSGRKVVTGDHICNGCTKRFESQRGLSLHKRRAHPGLRNEEMLEPPVRAERRPNAHKSSIWSIDEIRILEQYEAAYVGDLHINMKIAAHLPFKTNKQVSNYRNDRRKKSRTATDASQQGLGPNDGNRGIVPSGQSSPLFLEGSDAEGDEDVFNVLVPPTLGGLEPAGQVHSLSEGETSPLVGEADPCFMGGTPSAGEASGSTLLGPDPTPADGYSLVRKDLQLSVQTSPLLAVGSVGTESVQFERGVLSCGTPPEFLHPEQFAHCANNDPVLNASEEQVHAPLGEEANDLPDNNHPSELGVDPEDPTCSPATEQVQPSSEEEADDPFAQFKAWRRRVASYALKIETGVLPAQVDDLLRRLRDGDTQSKVTCEEVEEVVLSLTRTILGGTAPKKRVEGRTKWTYKSRTNHEARKRIMYARCQDLYRRRPQRPVERAVGYQAEESLLDNQDERPSHGAFETFYTGLWGKSGQCNITMPPGVPRHTGHVLREVTPKDIYSRLRKLKKDYAPGPDGVTKLKVQSMGAYPSLLAKVYNLVMLTGYFSSCWKEHKTSLIPKDRGSPMDVSNWRPITIGSLLSRIYTGLIERRLRTVSDIHQRQVGFMPVNGCAANLFIFDECIRQAKKEGTIVGSLIDVAKAFDTVPHEAILRALSSQGVDEHTMAHIRDMYSGIRTRINGKGSDIPLVRGVKQGDPLSPMLFNMVMDPLIRDLQRKGFRIGGHEIGALAFADDIVLLADSIDGAQDHVDQVGRYMNKLGMTLNPRKSSSFLITAMRKTWICRDPGLSIGETKVPGARPSSALKYLGVNYTLSEGLESGALIDKLMQAVNRARGLALKPLQKVNLILERIIPKFLYGIILGGPSLTRLHAADKCVRMAVKEILHLHPSTTDHVLYARKKDGGMGIPRLAHLVRLASLRSGLALLASGDVAVQAAGMAGDLEGRCKKVANDLRLNWPVTLRDVVRASNKFKSQESKDWERLASQGHGVKDFRNDRLGNCWLYDPTVLSSSRYTDALRLRTNTFGVNVALRRADKDLEVNCRRCHGKPETLGHVLGECVAGKGMRIQRHDKMAAFVATKCEEKGYQTTREQLFSIEQGKLKPDLVVIDGERALIVDVTVRFESGNALSRGASEKIEKYQPLADYFVSQGAVREANVLPIVVGSRGAITQATLKSLATLGLDVERVGKYLAICAVASSVEIACMHLDYT

SEQ ID NO: 1491 - protein, 1198 aa, synthetic construct
  source 1..1198: note = Description of Artificial Sequence: Synthetic polypeptide
MMADYNNSVDHALEDNTRLIFARDAVLARVCGPFDNLECGLCGVLLTSLQGVREHCHRAHHNLDLTFQCTKCDKGFSSYRGICCHFSKCIGARISVSEGPLSCSECEREFDSKRALSTHERHMHPGIRNAKRLKDFNPRGGGGKTIHGNTKWTEEEVQLLVSLSKRFEGYKSINKEISLILTSKTCKQISDKRRYLNLHNGNGGLAAAEAVLEFCEDSHPEVTESDGAVLSEIMDEECHQSSVTMRSSIVHGDIGREVQGKELVRIPPDNSVMGNCVVLLRKLATDKRSDLDLSKDKELRIDIEKATKANRESADGRVIQSVAGNEIDPDTFQWKELLLGQVRGFPRVDENSELFDLDDKLTKELSSDSPVWNDNCELIVSDLCQVLCKKKYELGRQHHVRKGKRHRGIHHKREKFRECQKIFRKSPRKLAEYLYRDKDLSHISKDASTPQGIEQYYSQLWGEPELLESNTIEEKLPSSSLFDCLPPITPEEVEGRIHKIRPSSAPGLDGVRKIHLVGKGITLVLVKLYNLLFLTGGYPECWKRNRTVFIPKIGKDLSEVGGWRPLTIGSLLARMYSAFLERRIRRVTSLSLSQRGFTNIQGCHVNLTILKEGIRQAKVKNGGVIVSVDIEKAFDTIPHSVIFSRLASQGVPPLLRKIISNMYKDVYTVIEGQCIPIKRGVKQGDPLSPLLFNIAIDPVLRSLEEFQGGLPLGNSAIKILAFADDIILGASSAGQAQQMVDMLGIGLTSCGLGVSHRKCFGFQIVNKNKTWTIVDPMITLNGSSLPFSGPEDRLPYLGVDINPWDRKSRYDAGQRLISAAKRGSQLSLKPQQKINLITAFLLPKFLYILIEDPPSPAYLKSIDHDLRQIYKNILHLPNCVSTAFMYSPKRDGGLGLPRLSCLVPLAHLKAGIKLGSLQDSLVREITTSDRFVRTMGSVAHSLWASWSLTLQDIYKLKSALKRREAKAWESCVSQGQGAAQFRGDSIGNNWLHNPGTYRPGQYIEALKLRANLTGVRVNLKRSGYNVPITCRFCKDIPETQAHVLGLCPKTKGMRIQRHDSIVNRVRDKLKTKSPVALMHEQNFTVEEGQVFKPDIVTILGEVGYVIDVTVRYDDRDYIKDASVEKIRKYEALKGYLKDLYPQLNKVEVLPLVFGSRGAVPGSTVHNMGLLGFTKREMVHISRKVIADSLIISNFLEVY

SEQ ID NO: 1492 - protein, 1198 aa, synthetic construct
  source 1..1198: note = Description of Artificial Sequence: Synthetic polypeptide
MMADYNNSVDHALEDDTRFIFARDSVLARVCGHFDNLKCELCGVLLTSLQGVREHCHRSHHNLDLTFQCTKCDKGFSSYRGICCHFSKCRGARISVSEGPLSCSECERKFDSKRALSTHERHMHPGIRNAKRLKDFNPRGGGKTIHGNTKWTEEEVQLLVSLSKRFEGYKSINKEISLILTSKTCKQISDKRRYLNLHNGNGGLAAAEAVLVFCDDSHLEVTDSDGAVLSEIMDEEYYQSSLTMRSSIVHGDIGREVQGKDLVRIPPDNSVMGNCVVLLRKLATEKRSDLDLSKDKELRIDIEKATKANRESADGRVIQSVADNEIDPDTFQWKELLLGQVRGFPRVDENSELFDLDDKLTSELSSDSPVWNDNCELIVSDLCHVLCKNKYELGRQHHVRKGKRHRGIHHKREKFRECQKIFRKSPRKLAEYLYRDKDLSHISKDVSTPQGIEQYYSQLWGKPELLESNTTEEMLPSSSLFDCLPPITPEEVEGRIHKIRPSSAPGLDGVGKIHLVGKGITLVLAKLYNLLFLTGGYPECWKRNRTVFIPKIGKDLSEVGGWRPLTIGSLLARMYSAFLERRIRRVTSLSSSQRGFTNIQGCHVNLTILKEGIRQAKVKNGGVIVSVDIEKAFDTIPHSVIFSRLASQGVPPLLRKIISNMYKDVYTVIEGQCIPIKRGVKQGDPLFPLLFNIAIDPVLRSLEEFQGGLPLGNSAIKILAFDDDIILGASSAGQAQQMVDMLGIGLTSCGLGVSHRKCFGFQIVNKNKTWAIVDPMITLNGSSLPFSGPEDRLPYLGVDTNPWDRKSRYDAGQRLISAAKRGSQLSLKPQQKINLITTFLLPKFLYILIEDPPSPAYLKSIDHDLRQIYKNILHLPNCVSTAFMYSPKRDGGLGLPRLSCLVPLAHIKAGIKLGSLQDSLVREITTSDRFVRTMGSVSHSIGASWPLTLQDIYKLKSALKRREAKAWESCVSQGQGAAQFRGDSIGNNWLHNPGTFRPGQYIEALKLRANSTGVRVNLKRSGYNVPITCRFCKDIPETQAHVLGLCPKTKGMRILRHDSIVNRVRDKLKTKSPVALMHEQNFTVEEGQVFKPDIVTILGEVGYVIDVTVRYEDRDYIKDASVEKIRKYEALKGYLKDLYPQLNKVEVLPLVFGSRGAVPGSTVHNMGLLGFTKREMVHISRKVITDSLIIISNFLEVY

SEQ ID NO: 1493 - protein, 1009 aa, synthetic construct
  source 1..1009: note = Description of Artificial Sequence: Synthetic polypeptide
MSNYNETNTSGGDNPRMATQTTGSLSSGPINQHTCELCCRTFGTRAGLGQHVRKTHPIESNQSINVERKKRRWSPEEIRRMANMEAQATINNIKHLTQYLATYLPQRTLNAIKGRRRDAEYKELVTGIIANLRSNSSTQQTNQVCNESEMSQRSKILQSIRESVRDLRSRRNKYAKALQELGEAALCGKMLNEEQLIHCIKSMFNTAKCPKGPRFRKTATHSGTNKQQRQQRYARVQKLYKMNRKVAAKMVLEETDKIQIKLPDHDPMFKFWESEFKEGEGMPERMPKDLKESPDLKAIWDPVTEEEVRKAKVANNTAAGPDGIQPKSWNRISLKYKTLIYNLLLYYEKVPHKLKVSRTVFIPKKKDGSSDPGEFRPLTICSVVLRGFNKILVQRLVSLYKYDERQTAYLPIDGVGTNIHVLAAILNDSNTKLSELHVALLDITKAFNRLHHTSIIKSLVGKGFPYGFITFIRRMYTGLQTMMQFEGHCKMTQVNRGVYQGDPLSGPIFLLAIEKGLQALDKEVGYDIGDVRVNAGAYADDTDLVAGTRLGLQDNINRFSSTIKQVGLEVNPRKSMTLSLVPSGKEKKMKVETGKPFRANDVPLKELSINDFWRYLGISYTNEGPERLSLTIEQDLERLTKAPLKPQQRIHMLNAYVIPKYQDKLVLSKTTAKGLKRTDRQIRQYVRRWLKLPHDVPIAYLHAPVKSGGLNIPCLQYWIPLLRVNRVNKITESQRSVLAAVGKTALLTSTVYKCNQSLATLGGNPTMLAYRTYWEKELYAKVDGKDLQNARDDKASTRWNGMLHSDISGEDYLNYHKLRTNSVPTKVRTARGRPQKETSCRGGCKSTETLQHVVQQCHRTHGGRTLRHDRIVGLLQHELRRDYNVLAKQELKTGIGLRKPDLVLIKDDTAHIVDVQVARCSKLNESHVRKRSKYDKKEIEVEVKSRYRVSKVMYEACTISYKGIWDKQSVMSMRRLGVSEYCLFKIVTSTLRGTWLCWKRFNMITSVRS

SEQ ID NO: 1494 - protein, 1455 aa, synthetic construct
  source 1..1455: note = Description of Artificial Sequence: Synthetic polypeptide
  VARIANT 916: note = Any amino acid
  VARIANT 1141: note = Any amino acid
MAGHKITMSEGKLLEVAVRYGGVRNVSYECPVPDCTKTFSQANNLIRHLNNFGNTKHRAHNFTYFFTCEKCKIQIHSNTKHNISNHYKQCCATGGGPSCETGQYFCPACEQAGLGNLESALRHFQSSHPEFNLPPRSQFSKSHPNSYTLSLKPKDHLMKILYSGPLTPGQLVCPIKICLRSSAARLFHDVSKLRKHMLVDHNRTLVYETTCGKCLRPVDTSKNMRKTTSHFEKCSGESFISSPSPIPQKTYKLDLPSTSTPPPRKSPKLQPYKPIRTFKNPLTKSSQSKSDNPPKPTPFFSPRTLERSASWPALSEVVDPLPKLKEKHPSLPCALDKCPPSPRIKPSTLVPPCHTANNSPKPTSPESPSTLKPLPRPIRPSKPLEDWLTVRSVGPDREIVLNIGPRPRPGPAAGSRTTSPPSTAPAKRVAANPIAAPLSGEPGATLDCGQTGRKVQPPKKRPTESAGSLPPPAEPATDLLTGREGLARLVEEYHLSGDFGAFCRDLERWTALSSTNRRPKPRRGRYNRGAAARATRNRGRDDRQDPQDRDDQGGPGPVTCGRPQRYKRAAALRSAFGRDMKATVRRIIDGERGDARCEIDPKTIEGRFRDELSPPVREGPECSLPPWMAEAQAGEHAPSNDSQPGDAYDGPITALEVEMVLSTLNVGSAPGSDGLSYGFWRALDPKGLVLSELFEVCRIERRVPGPWKSSRVTLICKDAEGDLDDLGNWRPISICQTVYKIYAAVLARRLQSWALDGGVISRSQKGFMPFEGVYEHVFLLDSVVADARATRRSLAVCWLDLRNAFGSVDHTTIVEALSRFGAPAGLVEMISDIYTGGSCRIRTRAGFTPDIPVGRGVRQGCPLSGIIFNLVMEVLLRGVEANNACGYRLSCAGGASVRVLAYADDVALVGSSRAEXKIQLGVCERFAAWAGFSFNNKKCAAMVLKHQRGGRRLLDSAPLRLCGEEVAILGPDSFYKYLGAHTGYGRQTGGQLVDRVERQVVRLFTSFLTPTQKLSALKRIVLPAMSFHLRVRPCAEGHLRRLDNTVRRCVKTALRLPKGSCRAFFHTSPDAGGLGITSVVAECDILTVTQAFKMLSSPDHLVSLVAKGRLGMHAARMGRSETASACAMADYLSGDSVMGHXSWKTGYRMPADLWTATRAASRRLSLRFSPQPQGEFGLESGTFKIAPRERRSLTRRLHHRQNLWWRNQWAALPNQGKTVAAHSAYAASNNWVKGPSSLAPQALFFGLKARLNQMPTRSVKACYSRAPNYDKSCRRCGAEVETLPHVLNHCPKSMKSILERHDSVLAEVLAAIPRGTFASVDVDRTSREHFRRVGEALRPDIVARRHDGSVVVADVTCPFESCASALDTAAARKIEKYDQLCANLRQLYRKPVESHALVVGSLGSWGRTNNTALAALGIRGAVRSRLAKQLVNLSVEGSHNIWLRWSGGIPKDLVR

SEQ ID NO: 1495 - protein, 1196 aa, synthetic construct
  source 1..1196: note = Description of Artificial Sequence: Synthetic polypeptide
MLRRGRIFLPASTKAGKTRGRMKWSREVNLFIMRTYYYVTKLETDLTIYRKKLHEHFSLKYPNVIISQQRISDQKRAIERNKLLSQETLDRLKEEVRKQLEDEQTNNVENEKLNSETYSHEYTTLTPQTILTKKTQQHTNIISSTQTSHSSTQTESITLLLENEVDILNTNPTEGATQTQEVKDKFETNLTMYSGMDPKARPPLPKLKYSSKLNELIRLFNNDILVDYISPDTQLSDVHTLTYCTAVTISEQLKYKIIAIEGNARHKKNFKPPWQQRLEKDIAKLRADIGKLTQYINNNRSKKVVQSVEQIFKNTKIHTSHENGNKKSQEFLDTLKQKLALKAHRLKRYNNSQKRKNENTIFLTNEKLFYRNLIKPKTDRDNSNIDIPTAEQLEMYWARLWENSAKHNDKANWITEEKERWDTIEEMQFDDVTEEEITTITARLHNWKSPGIDKIHNFWFKKLICLHKTIAKNLTDIISGNQSIPEFIATGITYMIPKGDFSIEASQYRPITCLPTIYKILTTVITKKINSHIEHNNILAEEQKGCRRGHMGCKEQLIIDSTIMKHATTKNRNLHCTYIDYKKAFDSIPHSWLIQVLEIYKINPIIISFLRNIMTHWQTTLKLKNPPNFVTTRQIAIKKGIYQGDSLSPLWFCLALNPLSHQLHNDRAGYRIKQQDNTETIISHLIYMDDIKLYAKNDKEMKKLIDTTTIFSNDISMQFGLDKCKTVHIIKGKVQPGDYTIDDTNTITAMEPSDLYKYLGFQQLKGLDHITIKQSLTSEYKKRINAICKTKLSGKHLIKALNTYAIPILTYSFGIIKWSKTDIEQIERITRTTLTKHNNLHPKSAIERLTIKRQDGGRGMIDIWHLWRKQIHSLKTFFYIKSDLSEIHRAIAQNDNNYTPLNLKQKELIDNTENLRNRNPQKDMEENWKKKALHGRHPHDLSQSHIDSKASNMWLKTGSLFPETEGFLIAIQDQVINTKNYRKYIIKDPTIRDDKCRKCNTQPETIQHITGACSTLTQTDYTHRHNQLANIIHQQLALKHKLIQNTNTPYYNYKPQTVLENDSCKLYYDRAILTDRTIHYNRPDITLQDKNNKVTYIIDIAVPNTHNIQKTFTEKMTKYTELKEEIVRIWKQKKAYIVPIIISTTGVVPNHIHNSLKLLDLKDNIFISLQKAAILNTCRIVRKFMQLEENQTYYTQ

SEQ ID NO: 1496 - protein, 1209 aa, synthetic construct
  source 1..1209: note = Description of Artificial Sequence: Synthetic polypeptide
METRSMRKRTTRLPEEGAPTGAGPGTGDRASIQRLEDEMVQERSFSQRALPVPRTQNRNGSPINHQGNAASANVAVADRQQSLILAGGRRQRIMWTREMNHYVIRCYYVYTRMETDMPGRVKMLGMFNDRFPRFAHQLDLSKLYIRQRAIILPEELEFIKLEVRREFGEEEAGWRESSRISARLNTIDQNTSRASEDRDLDEPTAPGLSVDIQHQMATAVTQFHGTDPLSRHRLPKLHYSYRLKTAVSIINQDVLPQYLDSVGSIEDLQLIVYSAAVAVVRTLWLRTYPQGDSEGRPCSKAEKPAWMRRLENRINATRTKIGRMQEYQRGNSSMKVVRQIAEMVKPKELRDLTDANITEVLDIHLQRLSALAKRLRRYAECSKRKEQNRMFNINEREFYNWIRNDKPNFREGLPDIGDFTQFWANLCEKPVQHNSEGMRLAEDERFSDGIEDMPVLVVNAQDIREATQYTRNGAAPGPDFVYNFWYKKLITIHEQIAACFNTVLEDSRKLPKFITGGVTYFLPKDQNTKNPAKYRPLTCLSNLNKVLSSVITQKVKDHCDTNNVMTEEQTGRRKNTQGCKDQVIIDAVIVGQAAKKQRNLDMAYIDYKKAYDSVPHSYLLKVLQLYKVDGNVIKLMQHAMGMWSTSLHVTDGKVVLRSRSLNIRRGIFQGDTFSTLWFCLAMNPLSRTLNQQCNFGYLLKSEEISTRITHTFFMDDLKLFAETVQKMHHLLKNVQGFSNDIKMEFGIGKCRSIHLHRGQVLDADSFRANEQEEIRHMVQGETYKFLGFLQLRGIHYAVIKKELQDKFLHRVSCILKSFLSVGNKVKAINTFAVALLTYSFGVMKWSNTDLEALERTIRVVSTKHQMRHPKASVERVILPRKIGGVGIIDIQALCISQIHQLRSYFVESQNRHELYRTVYKADHGLSALHLAQQDYQLNCNIKTVDGKGATWKQKELHGTHTHQLNLEHIDKVSSSTWLVRCDLFCETEGFMVAIQDRVIATWNYRRCILREDVEDRCRKCNSGGESIEHVIAGCPVLAGSAYLDRHNDVAKIVHQQLALRHKLVERFLPCYRYLPDPVQENDCIKLYWDREIITDILIRANRPDILVYEKRKKRATIDIDIAVTLDHNVQTTFSTKVMKYHDLAEELKQTWYLEDIRIVPVIISATGIVPMALLRSLDELELQRELPRIQKAVILRTCSTLRRFLNPYN

SEQ ID NO: 1497 - protein, 1281 aa, synthetic construct
  source 1..1281: note = Description of Artificial Sequence: Synthetic polypeptide
MTCNNAVVFPPADGNPAGTADRNFAIRFPSSEPPGPSGIRPSEPLDGRTGIGDVEHAQAGNGGFLVDVLEYKEAHRYGSKCEFCYVQTKGTVCSKPRTDAWLKCEILFLLHHAYTANQNKSIELAESAFRRAGITRRSKATIAKRWSLIQRGKGTDYKEYWDEYFEKFRYECNPTPIVRRKRNRLAAGLQSPSSVPNGYEFERKRTCETPLDTKASSLPLICNLLTGIVGVENVEENMSVECTEPKELSGTANSSVPGLAEGVYERRHNNVNEPAAGCPQDVPVANNLIDSPTTNDRLEAEFKAQLDRAERSYMRRRLPRLKNLSPDERMWIGTTVERLRLETVSEPVCEQWRLANAGLYAAIRSIAVMRPLDAAREAHKTWLLNMKMTERKLRQQIGWVETTRRTKNEARTERQEIVYRKVAKLRRERFPEMDLDSVSVHLKRKLELLKGRIQVRTAERLRRDTREAAGPYGKTALRGQGFAPNVKDATQYWSGLAQPSGQKCSENSAILSDWKELVECNLSSLPDQMEPLVVQGISRASPWKSPGPDGIFNYYWRQDFIVDWLKQLMLDSLRTGHYPWKLSSGRTVLLYKDGDPTKAENYRPITCLNGCFKMINSVVSEVILKRVENTIALPIEQMALRRKVWACVESQIWDQIKQRKLSDRTQKCKVAWVDFSKAYDSLNHDAIKFVIGVLKLPTGINNYLLDSMQNWSTHLELKSSGKVVRGPSYPIKRGVLQGDSLSPTLFVVVTSIIVRHIKTIESSDIQMYMDDIKLYGKDQETLTRLIKELQTVSNKLGLCMNLKKCAILGDDLPEEINGIEHLKESYKYLGVPQREITQVRATMAALEKKILTEVDTSLGAAELSYRQRISRVNSKIAPLVRFVVQSMLVTPRDVLKVYNRLGGIDVEIRRRLVKYEIRYKKSNVARLYLDRKVGGIGFVNLCRIMVEAVAARAVYCRLAPSFNEFQDFLAEQNTSPITAAQTILDKCGINIELSTSTLGDVKKIVRNHYHELWLTAWKNTGLYKRWENDHVDIKRSSLWINRGNLSANNARIGIGIQDNSIFCRGFVGNKCDTKYCRLCGDGIESVSHIVTGCPTHRTNLYIERHDCVARNVYAYLAIRYGIPVPHYTQRVKTIEKNGDQSVELYWNYKFPCTRALEACRPDIVLIDKVSKRTHIIEVAVSWRGRLQEMVDRKVYKYTVNGEYEADGSSRGWNIVRELNDQYGFPVEVYTLVIGAGGEILPCTVKDVERLTGGAATDNLIERMERSAVLGSCRIIKRHLAL

SEQ ID NO: 1498 - protein, 1354 aa, synthetic construct
  source 1..1354: note = Description of Artificial Sequence: Synthetic polypeptide
  VARIANT 69: note = Any amino acid
  VARIANT 444: note = Any amino acid
  VARIANT 854: note = Any amino acid
  VARIANT 907: note = Any amino acid
MISCDLERETLTQMALFRARSDKTPTHAGIPAPDEVREGGCGQNRTNPAAPRGKAAAIQRQNGITIPIXACAQSGLVRTQRVQQWSAVEESALKDVVVRNTDDRGLINWAKGVLPEWQRLCQLNPTMYMARSSPSLSNKWASLRRTHVGPGCPSKEGSGPSQDLSDVKIQPARLAHDTVAELPQRTVPCGTDGHGVIDSDETETALAEVSRSSPFGEREPLDLGATERITRKRLRNAVRDVVPPRKRRVPSTPSRKEQDLVPEVDGPAPTDVLTHPPTESEPEPMLDPLSLVQLVRPQLGRAMGWAAEEMELGNVVMDVELKREFNREVRRVGRTPPDQMYKRGAGPPLPQKREPERVALLEQLIAARVERGINRGLDWFLELNVAVFAAARVLSRRERVETLADRLHINDSATLSEVSRRRAKAERKLRCAREQPWMSRRIRXLGVRVERLKQLADLVRQRIAGRGNRSSYEGPRRRFRLRPSLRSVTEAPVNPPLNGNEVYTFWHSLWAQSLRANTDDCQLREFKNQLSAARHTDLTSVGTSSLVQMFSAALRKMKKGKAPGPDGIRAAWWGVFRRIAPYVATWVVRVIRGAEPVANWICNGLTVLLPKSSDNADPSNYRPITCLNTCYKLFTAVIAQITASYVDVLGGLPRQQVALRKGVWGTSVSLMIDALTVADARRAKRPLGVCWFDFKKAFDSVPHNLIRWILRVIGLPPVILSVIVSVMDQWATRLKIGGKVMPKTIPVRTGVFQGDTLSPLLFCLSVWPISFALDQFPQYQFRCANHLQQGFSVGHVFYMDDLKCYCPDREVLTAVIQQVQKSASALGLTIHYKKSAWLDQDGGKSGKAVLGVPXLVGTYKYLGMHERFMIVSKDSLESVRGKFMGRLKTLWTSKLTFGQAMLGTKSXCMPVVRYVLQNLFLPKSEFNQTRLVLREWDRQIRDLLDECNIRQVFRSKTELYVSREEGGWGLPSMEDALEEEVVTKLAILVARQETEPLFRVCEALERKRCPTPLSLGLQILKDWGVGVELQGRTLLLNGNTVGPSQATRKLTGELVLRREAERLSRWRSKVKPGCGMTGGAWRDVPGIDVHLSNRWLVKGALSPTVVSNSLAIRANTVILRGSGGGYTKGTLLRCRGCGNTGETRRHIVSACSLGRQKGAASRRHDNVCRILVRAICHKLNIEPPNSANFPHVVVLEGSGAKMWIDFPFVVPHKIRHTRPDIVVLFEWNGVRRLSVIEVAVSDVANMQTQHIRKSHRYGTNSTEPFVAGVTPTYRNDCLAAQLRAKFKAQQVDVIPIIVGTTGETLDGEFGRIRKGLPMLTKLQMPRLWSEIQRAVILGSYRILVEHLALPKGGA

SEQ ID NO: 1499 - protein, 1284 aa, synthetic construct
  source 1..1284: note = Description of Artificial Sequence: Synthetic polypeptide
MKMSHNRDTPSNGVKGTSVRLGTSLVRSPVGEAGAVRERGTHPSESVSQDSDASVNATGEGSVREQAPLSPPGAEEATVPTQRRTRHKWSREDRVVLWECFVASKREGPGYLKRLKQLWDERGIPGNFPQASLSGQIRQICSKNLLSEEERLQIAARMEAQVASPSADEPARQVPTRPVTPPRSPPVEPARRPSIPSEETPDLGAVPSEIDSADPNRSPSRGPRHLPAHNMSQSESEDDVTDPDVSDQQRSDSLEPRDLLRNSSVESTPGHPNQELSDTLLSNYVPSEIDSDDPNQSPRRGPRHLPAHDMSLSDSMDEETEPDLSDQQRSDLLELRDLLRNSSVETTPKGHPSLRHLPEPKIRAAAFRVNSVIGKIHTNNITETNALIKAGADLAVRILEVQPRPQRTQRKKDPPWKHRLEKNIAEIRKHLSWISEWRRGNLHDEEKKTLLESRYRCLEVGLTNLEDTLKQRLSAKRSKVRRFEARVAGFHQNQLFNTNQKRLYQTLRGEETSSDSPNAEESIRFWSDIWSKEVRHNNTAEWLHDVKEKNVAADPDLTITSQQLKKQLSKTKNWKAPGPDMVQGYWIKTFTSLHSRIAAQLNHCLQRGTVPTWMTTGKTVLIQKDKAKGTEVSNYRPITCLPLMWKVLTGIIYERVYQHLDSKKLLPDEQKGCRRNTRGTKDHLLVDKLLTKDARSKKKNLSMAWVDYKKAFDMVPHSWILECLDIYGIAGNIRNLIATTMPNWKTQLTSANKHLGEVSIKRGIFQGDSLSPLLFVLTMIPLSETLNKAGQGYNYSRTMKLNHLLYMDDLKLYAKSKDQVEQLLNIVHQYSQDIKMQFGVSKCGVLNIERGEVTASEGITIEEGTIKDIEEAGYKYLGVMEYNTILHRTMKDSIRKEYLTRLRLILKSHLNGGNTIKAINTWAVPVVRYSAGIINWTKKDCTDMDIKTRKLMTIYRALHPRSCVDRLYINRREGGRGLISVEDCVEAEKRALSQHFRESDDPWARCLVEAKLLKETETADQFKERRRLDRTNKWKSMKMSGQYLEAVQDKIVPDSWNWLLRGELKRETEGTILAAQEQALRTRYIQNKIDKRNVPSTCRICRSSDETINHVISECGVLAQKEYKRRHDKVARHLHWTLLRIHNFPVSERWYEHEPAPVVENEAVQIYWDKRMETDRVLHANRPDIVVKDKQEKSAKLIDISIPFDSRIVDKEAEKKEKYRDLAIELQRLWQMKVDVVPVVIGALGAMSKNLKTALRELKCGHLHPGTLQKSALLGTAHIIRKVL

SEQ ID NO: 1500 - protein, 1261 aa, synthetic construct
  source 1..1261: note = Description of Artificial Sequence: Synthetic polypeptide
MVFNNCKPKHLCPAIRPTGQQETNGGSEGTAEPTAGPSRPAVSEDAAQPVPLFEEGEYIRAHRDKTCPYCEVLWIGARSSKARSDSWPLCQILYLMKRNDDLRGQRTRYPLLESSLRAAGIARTKFAIIKCIRNVLRDRYVPNGPYSEHWKIYRANSGEVPQGATITKGKRSARVAGLPSPSQSGHHTKRIQAGTGIETETTVTETNTTPEVSHEHRDPCGEPETSAANVDKVTELTEDGSETRGTANVANGGVSVSDPGRKRQSSSQNRGNIETTNPELVGMWEDMFGVQLDGAMRTTERPRLPKLKHLSEPERLWIRAKLEQAWLQCVSYDVEQQWLNANAVLYAAIRSVAASRPCKEAREAQKTWLDNKKKDEAKLRRLIGRISSVHSMPKGDRTPREKKLVKNITKLKNTHYPDMDWGGLLNHFKVKLSQLKEKISVRVAEHKRKVNRNAAGQYGKSVAGSAGLAPDVVSATAYWSGLAQPGPKKFKASSPIFQTWKDDVAKNLNTEPVLLYPIIKECIRKPSPWKAPGPDGIYNYYWQQEFVAQWIQTLVKRTLDIGRFPTALMCGRTVLLFKSGDKSMPQNYRPITCLNGCFKITNAVLTKVILQRVQDTCALPREQMALKPKVWSCMEAQLRDQALQSEIGDDCKTAWIDFSKAYDSLDHDALRFVIQTIALPAGMEEYLLKSLDSWRTQLVLSDAGKVVSGKPYPIKRGVLQGDSLSPALFVLTTSPIVAHLQRTCPTGRIQLYMDDIKLYGKTESDLCMLIKETQRVANKLGLNINLKKCALFGKSIKQSIAGFDPLGDRTYKYLGIPQRDVADIKQAYDELKAKTVQTIGETMACDYLTTRQVINRLNSKIPPVVRFVTQSALCSAPMTRGLYNKITELDNVSRAELRKVLIYKATNVSRFYLATKEGGFGYASLQQVFVEAVVSRAIYCLRAPSLCDIREFILSKFDPVKVARIALARSKIDMDIERMDMASATRTIRQHYQAKWKTLFQQSKLYQKWVQHKIDIPNSSRWLQRGEISPRNCRIAVAVQDNTLLCRGFVGSKDPNKQCRLCNAGIETASHIVTECSTHRVHMYIERHDSVARNIYAVLAKNCGFWIPHYSQKIPTVKITKSYELYWNYKFPCTQALEACRPDIVLIDRAKKRILVVEVAVSYVTRLEQMTQRKLYKYGVNGEYQADGETRGWNICRELVQKYNMRIDLCIVVIGACGEILPCMVKEIEKISKVSGRQLLERCQRSAVLGTVRTVRRHLAN

SEQ ID NO: 1501 - protein, 1360 aa, synthetic construct
  source 1..1360: note = Description of Artificial Sequence: Synthetic polypeptide
MRKSFLQHIPELSSHIAMSVPARNYPKMCSLAQGSSGTLSHNGKGVAMHRCPSDDCAGKDPPQRGSQKGNLRSVRWTPSEEKAVFEYWSRLEQHAMLNGSEARGTCAITRSQFLIHWDGERESRSLSDGVPEYPMRTERAYYERVRLLRQRGWQWDCANECLVIGQCAEPCRKPNVVAIKADKGMKRSLVKGKLLSLPHVMGEINQVSVQVEVPLPSVPASVPQVEGVESKGFTETEPSNKPSLEGNPAEEGLRKPERVNVPVHGIISDSERKDLKDRFWSAYKTAKRSVGFRPALKIEPNRVNRAQWEVLDSCVVEVLKKRETSNGYRGCVLRHLNVAVYAAGYVLAEGNKERRQVIRRQSAEWLLRQKSEINNIRRHIGWITDELTRRRTGKNPTSRQLSNFAWLQRRYQVLGKPVRETRDLEVQRERLVSRLRLAQDRINSSMDREERVRKRMLPLRRKLEEPLGDSKLDTKQARTFWASLIGERKEFGKIPELENWAEEVRSKVTDGQGFASDHVDQTVWKKILGKARPLKAPGPDGIPNLLWKRLPSANQALFKWLMGIKRKQLSVPSWLTKGRVVLLPKGGDPVDPANYRPIACLNTQYKLVTGMVTAWVSEHLTTYSILPIEQRAMVSGTWGCTHAMVIDRAITSYAEATGLPLYVGFVDFAKAFDSVSQPWIRYALKVAGVHKRIRCLIGILMKCWSVRYEVFKSGRVLRSAPLAVKNGVLQGDTLSPLLFCLSVAVVSSAVGSLFDFEVTIPGRGVMQQQNHLFYMDDFKGFAPSEASLTRMLVTLERTASALGLKINKRKCALVHPRERENEETGSDIPVLGLRDTYKYLGIEERFGIVFEDAWDRVRTKMFERMRTLLCTEHTFGELRAAFASTIAPVARYLFLNVIVGGPSWSETLTKAKDMDLRIRRLLWERRDNEPGWRFKHCSADRLYLRVQYGGLGFVSVEDTLSESIIYCWAYVQCRPELELARELFGTLNRSARSGIKQSIAKGARKVFRSYALLSKNSAQRVSDLDGDASPGFRVGEMIFMEPTRGARAIVKILRKENDSRRLAAWKGRPMGGRVVSLPELDQVHSYHWLIRARIGRRSFRDCIAAQEGQLKARELMCPHINAKAKWCRRCGDGRVETEQHILSGCAWSRTGTMLDRHNGVVRQVHTALCRKYGLPVSSHVVPLHAVIENEHAKILYDVALHTSPAGVLPREDGSTSYTGLRSTRPDMVIFDKKARTILIVEISVPWRENLVKQELIKWRKYAINSMIEPLELAEAEIPGPNLKHALGLAYGTSFPTVKVVPIVVGSCGEVLPNITKRLSELGIPKRGIPSLLESIQRAAIIGSGHVIRAHLSVPRSESET

SEQ ID NO: 1502 - protein, 1000 aa, synthetic construct
  source 1..1000: note = Description of Artificial Sequence: Synthetic polypeptide
MQKFSVPKDSSQIFLVDSILNKHICSTKNKVKDVIKRRSIIKTLICAAGLTLRKLVCGKLGNNKYNSKINQLWKKERKIINCIEDLKHLIETNKRRHNFGKRLRNAKVSPSEMLKDYYNKLRYIKNEITACLDEHKKAILRTKFKLTPSIKIISNIQNHNDEEAELPKEEEFVKYYKELFTNKDGDDKETPHLDNWLKKFSKTLIVDWTINDKEILEALKYCGNFKAPGSDMVMKVCYKWFKSAQNYLIRWIKSTWYGEYTINKKDTNAVTFMIWKRDGKPKNDVKSYRPISCLNCDFKLLNKLIANKIYESIEKILPINQMAVIKNKHGTCEALLLYKSLVQSMKFRRTKDVKEIWCSWIDFSKCYDSISHKCLKKMIQSIKAPPIIHKLILDGIDSWNISICNGKNISKTKIPVKSGILQGKVASSLYFVLLTGEISYALNKEEQVPIETITPSNTLKINHISFIDDYQLYATSQKKVEKLTIKLREIAEEMNLKLNPQKCGIYGTDDLGKRLMLKESSLNFPYTSEYKYLGLVENSLDLKDINIQLFKDKILSKYSTIFESRLTTHQKRKVFNSTISPCAAYYLGNLITNKCSIQELLNECKKFDQMVRNQLVNQNIKKLQVSNSRIYLPKEYNSLGLNEIEIEVAANIIRKACYIKKRETLRGVDKLYIAMSKNGHRNTLSDALYITKKYSNFQINWNIMGMVKDQNNILLDAKKIIENIKEKRRNLWLEHWKKGNMTYANEAIKKEFHLPDLNIDSKYLMLCYAGSEEQIIYNGHVSLVNQSSPSSRLCRKCNKLEETSYHVASVCEFHKKNLHLMRHNSAVYHIITELCRIMKVKCTLRYPEASGIIKSGNMKIAAGVKYTFGTAKIYHNKPDLVWYTPEVIYVIEVSISSLKNAKSQMKMKTARYAVNSTKKLENFAALNNLKKGENFVEILSHKANFKRVHFMPLVFCTFGEIPKETMKYLEKLNFSNEKIKTIASPIARYTGRTLKAHFTN

SEQ ID NO: 1503 - protein, 1292 aa, synthetic construct
  source 1..1292: note = Description of Artificial Sequence: Synthetic polypeptide
MISRSQADRPVEGQPVTAMSFHNLEPNNLYPENLRPTGSQDANRGVADIAEEVTGPSGLVTNEEAARAPPLFVEGEYKRAHCGGGKCHYCRVLWIGARSSKARTDSWNLCEILFLINKCMELGNVRRIYSPLESSLKEAGINRTRHAIVKCRLAVMRDRFVDNAPYSEHWRLYNACAENRAVVVPMDSATTVKKRTARQAGLESPSQIGVAGKRVHEAETGTDRINAVIETNTTPLEDIDLSPETPEGLAELPSTVEIMELTEDGSRSRGTANDADGGVSISDPLRNRPSSSQESRNVPEQVDPDGELVWESLYGAQLRGAMRTTDRPRLPKLTKFSAAEQLWIKSKVEKARLECVSYGIEQQWLRASAVLYATIKTVAACRPYNKAREAHKVWLENKRAEEKRVRRIIGRIETVRTMPKGKRTDKQIRLARKINRLKRVSFPEMDWHGFLNHFKAKLDLLKKLISVRVAEHERKISRKIAGTYGKSVSGQSGFTPDVVAATTFWSGLAQPGPKKFKKNSLIFQTWKDSVVENMNTEPVLLHPLIIECMNKPSPFKATGPDGIFNSYWRQGFIANWVKSLIQRTIQTGEFPASLMCGRTVLLYKNGDTAKPENYRPITCLNGCFKMTNAVITKVIVQRVQDTCALPGEQMALKPKVWACMEAQLRDQALQSEIGNDCKTAWIDFSKAYDSLDHDAIRFVIETLALPDGMEKYLLKSLESWKTKLVLSNRGKVATGRPYKIKRGVLQGDSLSPALFVIATSPIVSHLKRVCPSGRIQLYMDDIKLYGKSETELRMLIKEVQKVANKLGLQMNLKKCSTYGAGLTESIAGFDPLGDRAYKYLGVPQRSVADTNLAFGELEGKVIRSIEETMACEYLTMRQVVTRLNSVIGPLVRFVAQSVLTSQAKVSWIYNKISDLDSKIRAKLAQTGLRYKKSNVARLYLSKSKNGIGLVNVQQVLVEALVSRAIYCLRAPSLVEIREHILTAEFDPVGAARTVLRRSRIQLEIERVEMASAISAIKTNYQARWMTKFTQSKLYQKWVHHDIDLANSNLWLERGEISPQNARIAVAAQDNTLLCRGFVGNRESEKQCRMCNMGIETCSHILTECSYHRAHMYIERHDSVARNIYAVLAKDHGLWIPHYSQPVSSVTKTPTCELYWNYKFPCTRALEACRPDIVLIDRAKRTILIVEVAVSYVTRLKQMVSRKVYKYGVNGEKGADGESRGWNMIRELSEVYNMKVNLCAVVIGASGEVLPCTVKAIQSISSKTSSRQLLERCQRSAVLGSTRVVKRHLAEFH

SEQ ID NO: 1504 - protein, 1177 aa, synthetic construct
  source 1..1177: note = Description of Artificial Sequence: Synthetic polypeptide
MEILWEDLRLKIEDRYGVTLPQRSASSLKNQYPKVILRGLPDSGLPWAGVQVNDTGQVVVVDHAEAATLRGSSPAAVDGEAEEPVVPPLPAAEVVESAADAAVPDPQSEIVADQGVETRPVENPPANSRETETEPVEVEPYLEGQYKFFVSKILGKSMWRKPIKYPRRVPETLWRQANELIERSIRQGEVSIQSLNCMVYAAGCAVKSSLDKKDQEAKRRESEWYACRKAEIKALERYLNFIDLELKRRSASRPLTSRQRQNLGVLITKYGRARVRSGVRLSELQAMLRDALVGIRKCMAKRSADKKRKQGKFVPIQRYLEPSSAEPRLSPDTVRAYWNDIVGSSQQSTSDSTIQDWSSNLSVPSQELNASKIMGWWRAAVSKSKPNKAAGPDGIPGVLWKRFRSASEWVCTWLYRLLQKRRIITPRWLSVGRVVLLPKKGPLEDPANYRPIACLNTVYKLITSVVEMAVREQIQACPGLVPYEQIANRKGVWGCTHASIVDRMITGASREGKGGGFPDLRVLFYDCKKAFDSVNRDHMFAVLRVANVNVKVVHLLHTLSQQWCVRYELRRNNRVERSSPLRVKRGLLQGDTLSPTWFCLCMAPISASIKTLNPGPTLRPNMGNGRNRGQVAIQVSHVFYMDDLKVYCPRVADQRRMEQNIPQLFGEIGLSINASKSAAAAAVGRYVESELPVLGTKDEYKYLGIESGFVVNEVAALDRMQAVLLNRVEAILSVKEHTVGQRRDAIRAKAIPGGAYILGHIILSDLDPRGAAERMRRLDIEIRRLVKSAGILHDKCSTARIHLSCEQGGLAWPSMERAYYVAVAYSASYLLTSQDETISRARDYFVSGRLSNKFTVYKHLTSIVDSLGLSVELPDPNGLPTGQPSVLARTIARAIDAKLEAQWKETLLTYQRAGRVERADPTVVDHANSYHWLRKAWINEKAYQHAVSVMEGTLLEGVNPHGVLTMCRACKAPSASIAHIITGCAELRKSHMKVRHDGVTRWLYNALTEVDGSLPKFHYTQQIPAEMRGERLTVRYDSDIVTPNKPRHNRPDLVVFDSTRKVIYIVEVSVTWLSVLQKQYDNKLNRYAVNSNHEFSESIPYPPGVNLANEIRVLYPQFTGGVKVFPMIISPTGEVHMQFVPHLAELLENPNIPRILEKIQRSVVLGTDYIIRSYFAM

SEQ ID NO: 1505 - protein, 1353 aa, synthetic construct
  source 1..1353: note = Description of Artificial Sequence: Synthetic polypeptide
MPCSTNSFFERGTPEPHREPISGTDSSESLGMGTHRSPRLNDDEVINGPKGHESDPVHVVRAPRTLHPRRLELPIGVNNLGEASQLRQDSAIAEEAQLESTENHDGRRPPLRGGRKLWSEKEIATLRRLCEAYGNRQVCWKEVQRKFADFHEERTVAALATKWGALKRPRAPMVGAPPTPDHDPERGPAGEGDGGTTSQENVPTDDPIPANGPTEGKESDVRPAVACRCTEPEEQLMESDVRPPAVVRLADPEQHTMKSGVKPVALDGSADLEERPKEKDIEQMGVDFEGEPRFRAFRKAFYGYFRWAVNSFDREPVKRVRRDCPKVFYAYADYLIATGSSKALGPNQSRIGRLNGLVYAAARTIHQFWREEVGHRQQGEKGWYTKTKATREDLQMLISMMESELARRKEKRKPGAKELENIHKLVARLGTRSTSGIVRRLEMTRQRLKLLEDRISLHEQEKRRKRLRKQFAETPSLKLLTKGAKDRGDTMVTMKSVMDFWRPIIGRRVTSNPDQLQVLRDWRDEQKKAYPADLDLEKADLEEKYEGAIRRIQPWKAPGPDGLHAHWWKALPSAKRLLGELVVDWLTTGKVTTGWMCRGRTILIPKKGDRGDPSNYRPITCLNTCYKVLTSVMNSVILSHLSRGEALPMNQRAMRKREWGCTHAMVLDRAMVMDAMAQKKHSLSVAWLDYRKAYDSVSHEYIRWAINSVNIPRSVQLTLKRLMSDWETRFESTQCRPKLRSDKMKVLNGIFQGDSLSPTLFVLCIAPISYALNKGVGQCQSSSGWSAGYGFEIGHQFYMDDLKLYARTPAMLDSQIQVVSEVSEAMGLHLNLSKCAKAHYAPHGAGGAQEAVEGAEGSRKGEIPILGLRSTYKYLGVEQRLLPMEVALKEFEDKFMDRAETIFASELTWGQMATAYNTIAIAGLRYVYSNTNGASPKLLEALKRAATLDTRIRDLLRRHKCRFRNSFVERLYIPRECGGYGLKSVEDTLRESILATWSYIATNPHLAGQQYFFERLAARGKRTPMADGVKILLDLGVEPQVDLKRRTVTVDGIVFEDPTKLHRYLVGKLLKARTEARIRRWKEASLAGRLVNDTSIDMRLSCLWMKKGFVSARNLRDALAVQEGSLLTRACPALKGKGGQEVCRCCHAAPETAEHITSACRYWLPSLYVERHDSVARNLYYVICCRYGITPVHYSNRVSPLSENSQCRVLWNMDMQTRTPMKHRKPDIVVFDLKREKILMFEVSIAHASGLLKQREIKINRYTVNSEELPDETITPYPPGPNLAADLAATYGWQVEFAPVVVGTCGEHVPAVKEDLQRTLDLKPHQVEALLERISRSAVIGTARVVRAHLACS

SEQ ID NO: 1506 - protein, 1368 aa, synthetic construct
  source 1..1368: note = Description of Artificial Sequence: Synthetic polypeptide
  VARIANT 435: note = Any amino acid
  VARIANT 572: note = Any amino acid
  VARIANT 607: note = Any amino acid
  VARIANT 611: note = Any amino acid
  VARIANT 757: note = Any amino acid
  VARIANT 1272: note = Any amino acid
ITYTANMALVTLFMENMENKRYNLRPLPGGRRGASGANAGCHSMRTVGDGGLSRRVPLEKNVTAEQSSSPLTSSSSHSPVSSIPSPSSTRTLLNSPNSSPTSSHSSLVIRSADVVQEALANYPAPTAGSIRARKKWTDIMNRYIWRTYLIITKCETTLLNNYLEPLHQEFSSKFPEMQVTRQRIGDQRRAIIRNKLLSDDTLAQILIEVKELLQIGDQPLTQNNIHSTQLSHSNTRIKWSNELNEEIVKCYFEVTLLEVNKTSYRKNLYSLFISRNPHLSHLTEQRIADQRRLIFMNKSVHNDRIIELKREVEIKLANSNSLTKNITESNSPSSQTNEINDSAYVQSNLQPVEPLDQHCINRHNLIEKHYVEQEFNNALIQFNNTNPETRPYIPRQKSSRKFSQIVSFLNSEVLPKHLNNELDFNALHNIIYTAXYTASLCNGTKFSFIDNYRPRNSKPSWQRRLESRIDKYRLQIGRLTQYISGNRNRKILKTVEEIKTQYKIHSHHEEPNTELPHFLDTLKQKLNATSNRLRRYLTCTKRKQQNNTFVNNEKHFYRTLSSTNQNTTTQLXEHPTENNLQQYWANIWETSIEHNADAEWLNKIPDXEINXMKFKDISIETFNQIIQRTHNWKAPGTDNIHNYWYKKLTCTHSLLLKHINQFIQSPCTLPLFITNGITYMLPKGLDPTNPANYRPITCLQTIYKIITACITDIIYKHIDQNNILAEQQKGCRKNSQGCKEQLTIDAIVMKQAHNKNXNTMYIDYRKAFDSVPHSWLLYILKKYKIHPILITFLSSVMLSWKTRLKLINNNETLITDWIKIQRGIFQGDALSPLWFCLALNPLSELLNNTNTGFKLKHNNTYHIISHLMYMDDIKLYASNNKELKILADLTQSFSTDIRMEFGIEKCKVHSIKRGKSQQNTYILNTGEQIESMDENSTYKYLGFQQAKQIQQKQTKIELTNKFKFRLNQILRSQLNSRNIIKAINTYAIPILTYSFAIINWSQTDLSNLQRIINTHMTTHRKHHPKSCIQRLTISRLDGGRGLIDIRNLHNNLVTKFRNYFYAKAEISELHKFIVNIDNKYTPLNLNDRNIQLNQTLITKQQKIEAWSLKSLHGRHLADLSQTHVDKVASNEWLRRGDLFPETEAFMMAIQDQVIDTRNYQKHIIKRPNMVNDLCRRCYSSPETIQHITGACKTIVQTDYKHRHDQVAAIIHQHLAFKHSLITQAQKTPYYKYSPQAILESTNFKLYWDRTIITDKTVHYNRPDILLHDKVKXSVYLIDIAIPNTHNLASTFSNKIDKYTDLTIELKSQWKVQSVTTVPIVLSTTGVVPHTLHTSLETLGIHRLSYILLQKAAILNTCRIVRKFLSSNN

SEQ ID NO: 1507 - protein, 1136 aa, synthetic construct
  source 1..1136: note = Description of Artificial Sequence: Synthetic polypeptide
  VARIANT 5: note = Any amino acid
  VARIANT 131: note = Any amino acid
  VARIANT 269: note = Any amino acid
  VARIANT 354: note = Any amino acid
MSGTXTDRVIPARTSPGSTRSASGVGEPGPPDVKLATGTRHSWSRAENVVLMECYYGSNPSERGYMQRMWEKWVLRNPTSSLTKKQLLAQCSNIRNKKLLSQLEIDEARRCASPTVQICYGKGEPGRQVSXGVISSSPPNIEIGYKAPMTDGLGTRAADLRERIMKSWGNSTTSLPRLTHKVPDQSLLEDMNTALSTIPTTTITETNQLMYAAATVILQMLGYKMKSMNSQKEQMAPWRRRLEAKIMATRREVSLLTELSRGVNLRTEXPKKYNKLSTTEALETAKQRLTALATRLKRYTREVEARRINKVFSTNPAKVYSQWQGNKMTTDPPRAETEQYWKSIWEKEATHNTXAQWLQDLQTEHSQLPEQDPVVITLADIQTRVSKMKSWTAPGPDKIHAYWLKKLTALHERLAAQMNQLLTSGNHPEWLTQGRTVLIMKDPQKGTIPSNYRPITCLSTTWKLLSGIIAAKISRHMDQYMSRAQKGIGNNTRGAKHQLLVDRAIAQDCRTRHTNLCTAWIDYKKAYDSMPHTWILECLKLYNINRTLREFIQNSMKLWNTTLEANSKPIARVSIRCGIYQGDALSPLLFCIGLNPLSQIITKSGYGYQFRSGTTVSHLLYMDDIKLYAKNERDIDSLIHLTRIYSKDIGMSFGLDKCGRMISRRGKVIATDGVELPEGNITDVQDSYKYLGIPQANGNHEEAARRSATAKYLQRLRQVLKSQLNGKNKIQAINTYALPVIRYPAGIIPWPLEEIQATDIKTRKLNGKHKIQAINTYALPVIRYPAGIIPWPLEEIQATDIKTRKLLTMHGGFHPKSSVLRLYTKRKEGGRGLVSVRTTVQEETTSLREYIKKMAPTDRLLSECLRQQKPTKEEEPEGLSWKDKPLHGMYHRQIEEVADIEKTYQWLEKAGLKDSTEALLMAAQEQALSTRAIEARVYHTRQDPRCRLCGDAPETVQHITAGCKMLAGKAYMERHNQVAGIVYRNICTEYGLEVPGSRWETPPKVLENKQAKILWDFQIQTDKMVVANQPDIVVVDKHQKTVVVIDVAIPSDSNIRKKEHEKLEKYQGLKEEMERMWGMKATVVPVVIGTLGAVTPKLSRWLQQIPGTTSEISVQKSAVLGTAKILRRTLRLPGLW

SEQ ID NO: 1508-1529 - skipped (22 entries)

SEQ ID NO: 1530 - protein, 25 aa, synthetic construct
  source 1..25: note = Description of Artificial Sequence: Synthetic peptide
KRASSQALGTIPKRRSSSRFIKRKK

SEQ ID NO: 1531 - protein, 7 aa, synthetic construct
  source 1..7: note = Description of Artificial Sequence: Synthetic peptide
RKKRKKK

SEQ ID NO: 1532-1533 - skipped (2 entries)

SEQ ID NO: 1534 - protein, 5 aa, synthetic construct
  source 1..5: note = Description of Artificial Sequence: Synthetic peptide
EAAAK

SEQ ID NO: 1535 - protein, 5 aa, synthetic construct
  source 1..5: note = Description of Artificial Sequence: Synthetic peptide
GGGGS

SEQ ID NO: 1536 - protein, 4 aa, synthetic construct
  source 1..4: note = Description of Artificial Sequence: Synthetic peptide
  REGION 1..4: note = See specification as filed for detailed description ofsubstitutions and preferred embodiments
GGGS

SEQ ID NO: 1537 - protein, 5 aa, unidentified
  source 1..5: note = Description of Unknown:Thrombin-sensitive sequence
CPRSC

SEQ ID NO: 1538 - DNA, 16 bp, synthetic construct
  source 1..16: mol_type = other DNA; note = Description of Artificial Sequence: Synthetic oligonucleotide
gcgcgctcgctcgctc

SEQ ID NO: 1539 - protein, 4 aa, unidentified
  source 1..4: note = Description of Unknown:RT domain motif sequence
YADD

SEQ ID NO: 1540 - protein, 4 aa, unidentified
  source 1..4: note = Description of Unknown:RT domain motif sequence
YMDD

SEQ ID NO: 1541 - protein, 4 aa, synthetic construct
  source 1..4: note = Description of Artificial Sequence: Synthetic peptide
YVDD

SEQ ID NO: 1542 - protein, 427 aa, unidentified
  source 1..427: note = Description of Unknown:[Eubacterium] rectale M104/1 sequence
MDTSNLMEQILSSDNLNRAYLQVVRNKGAEGVDGMKYTELKEHLAKNGETIKGQLRTRKYKPQPARRVEIPKPDGGVRNLGVPTVTDRFIQQAIAQVLTPIYEEQFHDHSYGFRPNRCAQQAILTALNIMNDGNDWIVDIDLEKFFDTVNHDKLMTLIGRTIKDGDVISIVRKYLVSGIMIDDEYEDSIVGTPQGGNLSPLLANIMLNELDKEMEKRGLNFVRYADDCIIMVGSEMSANRVMRNISRFIEEKLGLKVNMTKSKVDRPSGLKYLGFGFYFDPRAHQFKAKPHAKSVAKFKKRMKELTCRSWGVSNSYKVEKLNQLIRGWINYFKIGSMKTLCKELDSRIRYRLRMCIWKQWKTPQNQEKNLVKLGIDRNTARRVAYTGKRIAYVCNKGAVNVAISNKRLASFGLISMLDYYIEKCVTC

SEQ ID NO: 1543 - protein, 420 aa, Geobacillus stearothermophilus
MALLERILADRNLITALKRVEANQGAPGIGDVSTDQLRDIYRAHWSTIRAQLLAGTYRPAPVRRVGIPKGPGGTRQLGITPVVDRLIQQIALQELTPIFDPDFSPSSFGFRPGRNAHDAVRQAQGYIQEYGRYVVDMDLKEFFDRVNHDLIMSRVARKVDKKRVLKLIRYALQAGVMIEGVKVQTEEGTQPGGPLSPLLANILLDDLDKELEKRGLKFCYRADDCNIYVSKLRAGQRVKQSIQRFLEKTLKLKVNEEKSVADRPWKRAFGLFSFTPERKARIRLAPRSIQRLKQRIRQLTNPNWSISMPREIHRVNQYVGMWIGYFRLVTEPSVLQTIEGWIRRRLRLCWQLQWKRVRTRIRELRALGLKETAVMEIANRTKGAWRTTKPQTLHQALGKYTWTAQGLKTSLQRYFELRQG

SEQ ID NO: 1544 - protein, 599 aa, Lactococcus lactis
MKPTMAILERISKNSQENIDEVFTRLYRYLLRPDIYYVAYQNLYSNKGASTKGILDDTADGFSEEKIKKIIQSLKDGTYYPQPVRRMYIAKKNSKKMRPLGIPTFTDKLIQEAVRIILESIYEPVFEDVSHGFRPQRSCHTALKTIKREFGGARWFVEGDIKGCFDNIDHVTLIGLINLKIKDMKMSQLIYKFLKAGYLENWQYHKTYSGTPQGGILSPLLANIYLHELDKFVLQLKMKFDRESPERITPEYRELHNEIKRISHRLKKLEGEEKAKVLLEYQEKRKRLPTLPCTSQTNKVLKYVRYADDFIISVKGSKEDCQWIKEQLKLFIHNKLKMELSEEKTLITHSSQPARFLGYDIRVRRSGTIKRSGKVKKRTLNGSVELLIPLQDKIRQFIFDKKIAIQKKDSSWFPVHRKYLIRSTDLEIITIYNSELRGICNYYGLASNFNQLNYFAYLMEYSCLKTIASKHKGTLSKTISMFKDGSGSWGIPYEIKQGKQRRYFANFSECKSPYQFTDEISQAPVLYGYARNTLENRLKAKCCELCGTSDENTSYEIHHVNKVKNLKGKEKWEMAMIAKQRKTLVVCFHCHRHVIHKHK

SEQ ID NO: 1545 - protein, 1114 aa, Bombyx mori
MMASTALSLMGRCNPDGCTRGKHVTAAPMDGPRGPSSLAGTFGWGLAIPAGEPCGRVCSPATVGFFPVAKKSNKENRPEASGLPLESERTGDNPTVRGSAGADPVGQDAPGWTCQFCERTFSTNRGLGVHKRRAHPVETNTDAAPMMVKRRWHGEEIDLLARTEARLLAERGQCSGGDLFGALPGFGRTLEAIKGQRRREPYRALVQAHLARFGSQPGPSSGGCSAEPDFRRASGAEEAGEERCAEDAAAYDPSAVGQMSPDAARVLSELLEGAGRRRACRAMRPKTAGRRNDLHDDRTASAHKTSRQKRRAEYARVQELYKKCRSRAAAEVIDGACGGVGHSLEEMETYWRPILERVSDAPGPTPEALHALGRAEWHGGNRDYTQLWKPISVEEIKASRFDWRTSPGPDGIRSGQWRAVPVHLKAEMFNAWMARGEIPEILRQCRTVFVPKVERPGGPGEYRPISIASIPLRHFHSILARRLLACCPPDARQRGFICADGTLENSAVLDAVLGDSRKKLRECHVAVLDFAKAFDTVSHEALVELLRLRGMPEQFCGYIAHLYDTASTTLAVNNEMSSPVKVGRGVRQGDPLSPILFNVVMDLILASLPERVGYRLEMELVSALAYADDLVLLAGSKVGMQESISAVDCVGRQMGLRLNCRKSAVLSMIPDGHRKKHHYLTERTFNIGGKPLRQVSCVERWRYLGVDFEASGCVTLEHSISSALNNISRAPLKPQQRLEILRAHLIPRFQHGFVLGNISDDRLRMLDVQIRKAVGQWLRLPADVPKAYYHAAVQDGGLAIPSVRATIPDLIVRRFGGLDSSPWSVARAAAKSDKIRKKLRWAWKQLRRFSRVDSTTQRPSVRLFWREHLHASVDGRELRESTRTPTSTKWIRERCAQITGRDFVQFVHTHINALPSRIRGSRGRRGGGESSLTCRAGCKVRETTAHILQQCHRTHGGRILRHNKIVSFVAKAMEENKWTVELEPRLRTSVGLRKPDIIASRDGVGVIVDVQVVSGQRSLDELHREKRNKYGNHGELVELVAGRLGLPKAECVRATSCTISWRGVWSLTSYKELRSIIGLREPTLQIVPILALRGSHMNWTRFNQMTSVMGGGVG

SEQ ID NO: 1546 - protein, 1275 aa, Homo sapiens
MTGSNSHITILTLNVNGLNSPIKRHRLASWIKSQDPSVCCIQETHLTCRDTHRLKIKGWRKIYQANGKQKKAGVAILVSDKTDFKPTKIKRDKEGHYIMVKGSIQQEELTILNIYAPNTGAPRFIKQVLSDLQRDLDSHTLIMGDFNTPLSILDRSTRQKVNKDTQELNSALHQTDLIDIYRTLHPKSTEYTFFSAPHHTYSKIDHIVGSKALLSKCKRTEIITNYLSDHSAIKLELRIKNLTQSRSTTWKLNNLLLNDYWVHNEMKAEIKMFFETNENKDTTYQNLWDAFKAVCRGKFIALNAYKRKQERSKIDTLTSQLKELEKQEQTHSKASRRQEITKIRAELKEIETQKTLQKINESRSWFFERINKIDRPLARLIKKKREKNQIDTIKNDKGDITTDPTEIQTTIREYYKHLYANKLENLEEMDTFLDTYTLPRLNQEEVESLNRPITGSEIVAIINSLPTKKSPGPDGFTAEFYQRYKEELVPFLLKLFQSIEKEGILPNSFYEASIILIPKPGRDTTKKENFRPISLMNIDAKILNKILANRIQQHIKKLIHHDQVGFIPGMQGWFNIRKSINVIQHINRAKDKNHVIISIDAEKAFDKIQQPFMLKTLNKLGIDGMYLKIIRAIYDKPTANIILNGQKLEAFPLKTGTRQGCPLSPLLFNIVLEVLARAIRQEKEIKGIQLGKEEVKLSLFADDMIVYLENPIVSAQNLLKLISNFSKVSGYKINVQKSQAFLYNNNRQTESQIMGELPFTIASKRIKYLGIQLTRDVKDLFKENYKPLLKEIKEDTNKWKNIPCSWVGRINIVKMAILPKVIYRFNAIPIKLPMTFFTELEKTTLKFIWNQKRARIAKSILSQKNKAGGITLPDFKLYYKATVTKTAWYWYQNRDIDQWNRTEPSEIMPHIYNYLIFDKPEKNKQWGKDSLLNKWCWENWLAICRKLKLDPFLTPYTKINSRWIKDLNVKPKTIKTLEENLGITIQDIGVGKDFMSKTPKAMATKDKIDKWDLIKLKSFCTAKETTIRVNRQPTTWEKIFATYSSDKGLISRIYNELKQIYKKKTNNPIKKWAKDMNRHFSKEDIYAAKKHMKKCSSSLAIREMQIKTTMRYHLTPVRMAIIKKSGNNRCWRGCGEIGTLVHCWWDCKLVQPLWKSVWRFLRDLELEIPFDPAIPLLGIYPKDYKSCCYKDTCTRMFIAALFTIAKTWNQPNCPTMIDWIKKMWHIYTMEYYAAIKNDEFISFVGTWMKLETIILSKLSQEQKTKHRIFSLIGGN

SEQ ID NO: 1547 - protein, 857 aa, Drosophila virilis
MERSPEPSININGRHAVCTATNMSYAKIKTKYKDSKRTINKFQLTLVKLTKLKSSLKFLLKCRKSNLIPNFIKNLTQHLTILTTDNKTHPDITRTLTRHTHFYHTKILNLLIKHKHNLLQEQTKHMQKAKTNIEQLMTTDDAKAFFESERNIENKITTTLKKRQETKHDKLRDQRNLALADNNTQREWFVNKTKIEFPPNVVALLAKGPKFALPISKRDFPLLKYIADGEELVQTIKEKETQESARTKFSLLVKEHKTKNNQNSRDRAILDTVEQTRKLLKENINIKILSSDKGNKTVAMDEDEYKNKMTNILDDLCAYRTLRLDPTSRLQTKNNTFVAQLFKMGLISKDERNKMTTTTAVPPRIYGLPKIHKEGTPLRPICSSIGSPSYGLCKYIIQILKNLTMDSRYNIKNAVDFKDRVNNSQIREEETLVSFDVVSLFPSIPIELALDTIRQKWTKLEEHTNIPKQLFMDIVRFCIEENRYFKYEDKIYTQLKGMPMGSPASPVIADILMEELLDKITDKLKIKPRLLTKYVDDLFAITNKIDVENILKELNSFHKQIKFTMELEKDGKLPFLDSIVSRMDNTLKIKWYRKPIASGRILNFNSNHPKSMIINTALGCMNRMMKISDTIYHKEIEHEIKELLTKNDFPPNIIKTLLKRRQIERKKPTEPAKIYKSLIYVPRLSERLTNSDCYNKQDIKVAHKPTNTLQKFFNKIKSKIPMIEKSNVVYQIPCGGDNNNKCNSVYIGTTKSKLKTRISQHKSDFKLRHQNNIQKTALMTHCIRSNHTPNFDETTILQQEQHYNKRHTLEMLHIINTPTYKRLNYKTDTENCAHLYRHLLNSQTTSVTISTSKSADV

SEQ ID NO: 1548 - protein, 671 aa, synthetic construct
  source 1..671: note = Description of Artificial Sequence: Synthetic polypeptide
TLNIEDEHRLHETSKEPDVSLGSTWLSDFPQAWAETGGMGLAVRQAPLIIPLKATSTPVSIKQYPMSQEARLGIKPHIQRLLDQGILVPCQSPWNTPLLPVKKPGTNDYRPVQDLREVNKRVEDIHPTVPNPYNLLSGLPPSHQWYTVLDLKDAFFCLRLHPTSQPLFAFEWRDPEMGISGQLTWTRLPQGFKNSPTLFDEALHRDLADFRIQHPDLILLQYVDDLLLAATSELDCQQGTRALLQTLGNLGYRASAKKAQICQKQVKYLGYLLKEGQRWLTEARKETVMGQPTPKTPRQLREFLGTAGFCRLWIPGFAEMAAPLYPLTKTGTLFNWGPDQQKAYQEIKQALLTAPALGLPDLTKPFELFVDEKQGYAKGVLTQKLGPWRRPVAYLSKKLDPVAAGWPPCLRMVAAIAVLTKDAGKLTMGQPLVILAPHAVEALVKQPPDRWLSNARMTHYQALLLDTDRVQFGPVVALNPATLLPLPEEGLQHNCLDILAEAHGTRPDLTDQPLPDADHTWYTDGSSLLQEGQRKAGAAVTTETEVIWAKALPAGTSAQRAELIALTQALKMAEGKKLNVYTDSRYAFATAHIHGEIYRRRGLLTSEGKEIKNKDEILALLKALFLPKRLSIIHCPGHQKGHSAEARGNRMADQAARKAAITETPDTSTLL

SEQ ID NO: 1549 - protein, 859 aa, Rous sarcoma virus
TVALHLAIPLKWKPDHTPVWIDQWPLPEGKLVALTQLVEKELQLGHIEPSLSCWNTPVFVIRKASGSYRLLHDLRAVNAKLVPFGAVQQGAPVLSALPRGWPLMVLDLKDCFFSIPLAEQDREAFAFTLPSVNNQAPARRFQWKVLPQGMTCSPTICQLVVGQVLEPLRLKHPSLCMLHYMDDLLLAASSHDGLEAAGEEVISTLERAGFTISPDKVQREPGVQYLGYKLGSTYVAPVGLVAEPRIATLWDVQKLVGSLQWLRPALGIPPRLMGPFYEQLRGSDPNEAREWNLDMKMAWREIVRLSTTAALERWDPALPLEGAVARCEQGAIGVLGQGLSTHPRPCLWLFSTQPTKAFTAWLEVLTLLITKLRASAVRTFGKEVDILLLPACFREDLPLPEGILLALKGFAGKIRSSDTPSIFDIARPLHVSLKVRVTDHPVPGPTVFTDASSSTHKGVVVWREGPRWEIKEIADLGASVQQLEARAVAMALLLWPTTPTNVVTDSAFVAKMLLKMGQEGVPSTAAAFILEDALSQRSAMAAVLHVRSHSEVPGFFTEGNDVADSQATFQAYPLREAKDLHTALHIGPRALSKACNISMQQAREVVQTCPHCNSAPALEAGVNPRGLGPLQIWQTDFTLEPRMAPRSWLAVTVDTASSAIVVTQHGRVTSVAVQHHWATAIAVLGRPKAIKTDNGSCFTSKSTREWLARWGIAHTTGIPGNSQGQAMVERANRLLKDRIRVLAEGDGFMKRIPTSKQGELLAKAMYALNHFERGENTKTPIQKHWRPTVLTEGPPVKIRIETGEWEKGWNVLVWGRGYAAVKNRDTDKVIWVPSRKVKPDITQKDEVTKKDEASPLFAG

SEQ ID NO: 1550 - protein, 572 aa, Avian myeloblastosis virus
TVALHLAIPLKWKPNHTPVWIDQWPLPEGKLVALTQLVEKELQLGHIEPSLSCWNTPVFVIRKASGSYRLLHDLRAVNAKLVPFGAVQQGAPVLSALPRGWPLMVLDLKDCFFSIPLAEQDREAFAFTLPSVNNQAPARRFQWKVLPQGMTCSPTICQLIVGQILEPLRLKHPSLRMLHYMDDLLLAASSHDGLEAAGEEVISTLERAGFTISPDKVQREPGVQYLGYKLGSTYVAPVGLVAEPRIATLWDVQKLVGSLQWLRPALGIPPRLMGPFYEQLRGSDPNEAREWNLDMKMAWREIVQLSTTAALERWDPALPLEGAVARCEQGAIGVLGQGLSTHPRPCLWLFSTQPTKAFTAWLEVLTLLITKLRASAVRTFGKEVDILLLPACFREDLPLPEGILLALRGFAGKIRSSDTPSIFDIARPLHVSLKVRVTDHPVPGPTVFTDASSSTHKGVVVWREGPRWEIKEIADLGASVQQLEARAVAMALLLWPTTPTNVVTDSAFVAKMLLKMGQEGVPSTAAAFILEDALSQRSAMAAVLHVRSHSEVPGFFTEGNDVADSQATFQAY

SEQ ID NO: 1551 - protein, 560 aa, Human immunodeficiency virus 1
PISPIETVPVKLKPGMDGPKVKQWPLTEEKIKALVEICTEMEKEGKISKIGPENPYNTPVFAIKKKDSTKWRKLVDFRELNKRTQDFWEVQLGIPHPAGLKKKKSVTVLDVGDAYFSVPLDEDFRKYTAFTIPSINNETPGIRYQYNVLPQGWKGSPAIFQSSMTKILEPFRKQNPDIVIYQYMDDLYVGSDLEIGQHRTKIEELRQHLLRWGLTTPDKKHQKEPPFLWMGYELHPDKWTVQPIVLPEKDSWTVNDIQKLVGKLNWASQIYPGIKVRQLCKLLRGTKALTEVIPLTEEAELELAENREILKEPVHGVYYDPSKDLIAEIQKQGQGQWTYQIYQEPFKNLKTGKYARMRGAHTNDVKQLTEAVQKITTESIVIWGKTPKFKLPIQKETWETWWTEYWQATWIPEWEFVNTPPLVKLWYQLEKEPIVGAETFYVDGAANRETKLGKAGYVTNRGRQKVVTLTDTTNQKTELQAIYLALQDSGLEVNIVTDSQYALGIIQAQPDQSESELVNQIIEQLIKKEKVYLAWVPAHKGIGGNEQVDKLVSAGIRKVL

SEQ ID NO: 1552 - protein, 538 aa, Saccharomyces cerevisiae
AVKAVKSIKPIRTTLRYDEAITYNKDIKEKEKYIEAYHKEVNQLLKMKTWDTDEYYDRKEIDPKRVINSMFIFNKKRDGTHKARFVARGDIQHPDTYDSGMQSNTVHHYALMTSLSLALDNNYYITQLDISSAYLYADIKEELYIRPPPHLGMNDKLIRLKKSLYGLKQSGANWYETIKSYLIQQCGMEEVRGWSCVFKNSQVTICLFVDDMVLFSKNLNSNKRIIEKLKMQYDTKIINLGESDEEIQYDILGLEIKYQRGKYMKLGMENSLTEKIPKLNVPLNPKGRKLSAPGQPGLYIDQDELEIDEDEYKEKVHEMQKLIGLASYVGYKFRFDLLYYINTLAQHILFPSRQVLDMTYELIQFMWDTRDKQLIWHKNKPTEPDNKLVAISDASYGNQPYYKSQIGNIYLLNGKVIGGKSTKASLTCTSTTEAEIHAISESVPLLNNLSYLIQELNKKPIIKGLLTDSRSTISIIKSTNEEKFRNRFFGTKAMRLRDEVSGNNLYVYYIETKKNIADVMTKPLPIKTFKLLTNKWIH

SEQ ID NO: 1553 - protein, 328 aa, Bordetella virus BPP1
MGKRHRNLIDQITTWENLLDAYRKTSHGKRRTWGYLEFKEYDLANLLALQAELKAGNYERGPYREFLVYEPKPRLISALEFKDRLVQHALCNIVAPIFEAGLLPYTYACRPDKGTHAGVCHVQAELRRTRATHFLKSDFSKFFPSIDRAALYAMIDKKIHCAATRRLLRVVLPDEGVGIPIGSLTSQLFANVYGGAVDRLLHDELKQRHWARYMDDIVVLGDDPEELRAVFYRLRDFASERLGLKISHWQVAPVSRGINFLGYRIWPTHKLLRKSSVKRAKRKVANFIKHGEDESLQRFLASWSGHAQWADTHNLFTWMEEQYGIACH

SEQ ID NO: 1554 - protein, 320 aa, Escherichia coli
MKSAEYLNTFRLRNLGLPVMNNLHDMSKATRISVETLRLLIYTADFRYRIYTVEKKGPEKRMRTIYQPSRELKALQGWVLRNILDKLSSSPFSIGFEKHQSILNNATPHIGANFILNIDLEDFFPSLTANKVFGVFHSLGYNRLISSVLTKICCYKNLLPQGAPSSPKLANLICSKLDYRIQGYAGSRGLIYTRYADDLTLSAQSMKKVVKARDFLFSIIPSEGLVINSKKTCISGPRSQRKVTGLVISQEKVGIGREKYKEIRAKIHHIFCGKSSEIEHVRGWLSFILSVDSKSHRRLITYISKLEKKYGKNPLNKAKT

SEQ ID NO: 1555 - protein, 1132 aa, Homo sapiens
MPRAPRCRAVRSLLRSHYREVLPLATFVRRLGPQGWRLVQRGDPAAFRALVAQCLVCVPWDARPPPAAPSFRQVSCLKELVARVLQRLCERGAKNVLAFGFALLDGARGGPPEAFTTSVRSYLPNTVTDALRGSGAWGLLLRRVGDDVLVHLLARCALFVLVAPSCAYQVCGPPLYQLGAATQARPPPHASGPRRRLGCERAWNHSVREAGVPLGLPAPGARRRGGSASRSLPLPKRPRRGAAPEPERTPVGQGSWAHPGRTRGPSDRGFCVVSPARPAEEATSLEGALSGTRHSHPSVGRQHHAGPPSTSRPPRPWDTPCPPVYAETKHFLYSSGDKEQLRPSFLLSSLRPSLTGARRLVETIFLGSRPWMPGTPRRLPRLPQRYWQMRPLFLELLGNHAQCPYGVLLKTHCPLRAAVTPAAGVCAREKPQGSVAAPEEEDTDPRRLVQLLRQHSSPWQVYGFVRACLRRLVPPGLWGSRHNERRFLRNTKKFISLGKHAKLSLQELTWKMSVRDCAWLRRSPGVGCVPAAEHRLREEILAKFLHWLMSVYVVELLRSFFYVTETTFQKNRLFFYRKSVWSKLQSIGIRQHLKRVQLRELSEAEVRQHREARPALLTSRLRFIPKPDGLRPIVNMDYVVGARTFRREKRAERLTSRVKALFSVLNYERARRPGLLGASVLGLDDIHRAWRTFVLRVRAQDPPPELYFVKVDVTGAYDTIPQDRLTEVIASIIKPQNTYCVRRYAVVQKAAHGHVRKAFKSHVSTLTDLQPYMRQFVAHLQETSPLRDAVVIEQSSSLNEASSGLFDVFLRFMCHHAVRIRGKSYVQCQGIPQGSILSTLLCSLCYGDMENKLFAGIRRDGLLLRLVDDFLLVTPHLTHAKTFLRTLVRGVPEYGCVVNLRKTVVNFPVEDEALGGTAFVQMPAHGLFPWCGLLLDTRTLEVQSDYSSYARTSIRASLTFNRGFKAGRNMRRKLFGVLRLKCHSLFLDLQVNSLQTVCTNIYKILLLQAYRFHACVLQLPFHQQVWKNPTFFLRVISDTASLCYSILKAKNAGMSLGAKGAAGPLPSEAVQWLCHQAFLLKLTRHRVTYVPLLGSLRTAQTQLSRKLPGTTLTALEAAANPALPSDFKTILD

SEQ ID NO: 1556 - protein, 710 aa, Neurospora crassa
MPNHRLPNCVSYLGENHELSWLHGMFGLLKRSNPQTGGILGWLNTGPNGFVKYMMNLMGHARDKGDAKEYWRLGRSLMKNEAFQVQAFNHVCKHWYLDYKPHKIAKLLKEVREMVEIQPVCIDYKRVYIPKANGKQRPLGVPTVPWRVYLHMWNVLLVWYRIPEQDNQHAYFPKRGVFTAWRALWPKLDSQNIYEFDLKNFFPSVDLAYLKDKLMESGIPQDISEYLTVLNRSLVVLTSEDKIPEPHRDVIFNSDGTPNPNLPKDVQGRILKDPDFVEILRRRGFTDIATNGVPQGASTSCGLATYNVKELFKRYDELIMYADDGILCRQDPSTPDFSVEEAGVVQEPAKSGWIKQNGEFKKSVKFLGLEFIPANIPPLGEGEVKDYPRLRGATRNGSKMELSTELQFLCYLSYKLRIKVLRDLYIQVLGYLPSVPLLRYRSLAEAINELSPKRITIGQFITSSFEEFTAWSPLKRMGFFFSSPAGPTILSSIFNNSTNLQEPSDSRLLYRKGSWVNIRFAAYLYSKLSEEKHGLVPKFLEKLREINFALDKVDVTEIDSKLSRLMKFSVSAAYDEVGTLALKSLFKFRNSERESIKASFKQLRENGKIAEFSEARRLWFEILKLIRLDLFNASSLACDDLLSHLQDRRSIKKWGSSDVLYLKSQRLMRTNKKQLQLDFEKKKNSLKKKLIKRRAKELRDTFKGKENKEA

SEQ ID NO: 1557 - protein, 785 aa, synthetic construct
  source 1..785: note = Description of Artificial Sequence: Synthetic polypeptide
MILDTDYITEDGKPVIRIFKKENGEFKIEYDRTFEPYLYALLKDDSAIEEVKKITAERHGTVVTVKRVEKVQKKFLGRPVEVWKLYFTHPQDVPAIMDKIREHPAVIDIYEYDIPFAIRYLIDKGLVPMEGDEELKLLAFDIETLYHEGEEFAEGPILMISYADEEGARVITWKNVDLPYVDVVSTEREMIKRFLRVVKEKDPDVLITYNGDNFDFAYLKKRCEKLGINFALGRDGSEPKIQRMGDRFAVEVKGRIHFDLYPVIRRTINLPTYTLEAVYEAVFGQPKEKVYAEEITTAWETGENLERVARYSMEDAKVTYELGKEFLPMEAQLSRLIGQSLWDVSRSSTGNLVEWFLLRKAYERNELAPNKPDEKELARRHQSHEGGYIKEPERGLWENIVYLDFRSLYPSIIITHNVSPDTLNREGCKEYDVAPQVGHRFCKDFPGFIPSLLGDLLEERQKIKKRMKATIDPIERKLLDYRQRAIKILANSLYGYYGYARARWYCKECAESVIAWGREYLTMTIKEIEEKYGFKVIYSDTDGFFATIPGADAETVKKKAMEFLKYINAKLPGALELEYEGFYKRGLFVTKKKYAVIDEEGKITTRGLEIVRRDWSEIAKETQARVLEALLKDGDVEKAVRIVKEVTEKLSKYEVPPEKLVIHKQITRDLKDYKATGPHVAVAKRLAARGVKIRPGTVISYIVLKGSGRIVDRAIPFDEFDPTKHKYDAEYYIEKQVLPAVERILRAFGYRKEDLRYQKTRQVGLSARLKPKGTLEGSSHHHHHH

SEQ ID NO: 1558 - protein, 4 aa, unidentified
  source 1..4: note = Description of Unknown:Polymerase family B motif sequence
DTDS

SEQ ID NO: 1559 - protein, 1145 aa, unidentified
  source 1..1145: note = Description of Unknown:Porcine endogenous retrovirus sequence
MGATGQQQYPWTTRRTVDLGVGRVTHSFLVIPECPAPLLGRDLLTKMGAQISFEQGKPEVSANNKPITVLTLQLDDEYRLYSPLVKPDQNIQFWLEQFPQAWAETAGMGLAKQVPPQVIQLKASATPVSVRQYPLSKEAQEGIRPHVQRLIQQGILVPVQSPWNTPLLPVRKPGTNDYRPVQDLREVNKRVQDIHPTVPNPYNLLCALPPQRSWYTVLDLKDAFFCLRLHPTSQPLFAFEWRDPGTGRTGQLTWTRLPQGFKNSPTIFDEALHRDLANFRIQHPQVTLLQYVDDLLLAGATKQDCLEGTKALLLELSDLGYRASAKKAQICRREVTYLGYSLRDGQRWLTEARKKTVVQIPAPTTAKQVREFLGTAGFCRLWIPGFATLAAPLYPLTKEKGEFSWAPEHQKAFDAIKKALLSAPALALPDVTKPFTLYVDERKGVARGVLTQTLGPWRRPVAYLSKKLDPVASGWPVCLKAIAAVAILVKDADKLTLGQNITVIAPHALENIVRQPPDRWMTNARMTHYQSLLLTERVTFAPPAALNPATLLPEETDEPVTHDCHQLLIEETGVRKDLTDIPLTGEVLTWFTDGSSYVVEGKRMAGAAVVDGTRTIWASSLPEGTSAQKAELMALTQALRLAEGKSINIYTDSRYAFATAHVHGAIYKQRGLLTSAGREIKNKEEILSLLEALHLPKRLAIIHCPGHQKAKDPISRGNQMADRVAKQAAQGVNLLPMIETPKAPEPGRQYTLEDWQEIKKIDQFSETPEGTCYTSDGKEILPHKEGLEYVQQIHRLTHLGTKHLQQLVRTSPYHVLRLPGVADSVVKHCVPCQLVNANPSRIPPGKRLRGSHPGAHWEVDFTEVKPAKYGNKYLLVFVDTFSGWVEAYPTKKETSTVVAKKILEEIFPRFGIPKVIGSDNGPAFVAQVSQGLAKILGIDWKLHCAYRPQSSGQVERMNRTIKETLTKLTAETGVNDWIALLPFVLFRVRNTPGQFGLTPYELLYGGPPPLVEIASVHSADVLLSQPLFSRLKALEWVRQRAWRQLREAYSGGGDLQIPHRFQVGDSVYVRRHRAGNLETRWKGPYHVLLTTPTAVKVEGISTWIHASHVKPAPPPDSGWKAEKTENPLKLRLHRVVPYSVNNFSS

SEQ ID NO: 1560 - protein, 1149 aa, Cynomolgus macaque simian foamy virus
MDPLQLLQPLEAEIKGTKLKAHWDSGATITCVPEAFLEDERPIQTMLIKTIHGEKQQDVYYLTFKVQGRKVEAEVLASPYDYILLNPSDVPWLMKKPLQLTVLVPLHEYQERLLQQTALPKEQKELLQKLFLKYDALWQHWENQVGHRRIKPHNIATGTLAPRPQKQYPINPKAKPSIQIVIDDLLKQGVLIQQNSTMNTPVYPVPKPDGKWRMVLDYREVNKTIPLIAAQNQHSAGILSSIYRGKYKTTLDLTNGFWAHPITPESYWLTAFTWQGKQYCWTRLPQGFLNSPALFTADVVDLLKEIPNVQAYVDDIYISHDDPQEHLEQLEKIFSILLNAGYVVSLKKSEIAQREVEFLGFNITKEGRGLTDTFKQKLLNITPPKDLKQLQSILGLLNFARNFIPNYSELVKPLYTIVANANGKFISWTEDNSNQLQHIISVLNQADNLEERNPETRLIIKVNSSPSAGYIRYYNEGSKRPIMYVNYIFSKAEAKFTQTEKLLTTMHKGLIKAMDLAMGQEILVYSPIVSMTKIQRTPLPERKALPVRWITWMTYLEDPRIQFHYDKSLPELQQIPNVTEDVIAKTKHPSEFAMVFYTDGSAIKHPDVNKSHSAGMGIAQVQFIPEYKIVHQWSIPLGDHTAQLAEIAAVEFACKKALKISGPVLIVTDSFYVAESANKELPYWKSNGFLNNKKKPLRHVSKWKSIAECLQLKPDIIIMHEKGHQQPMTTLHTEGNNLADKLATQGSYVVHCNTTPSLDAELDQLLQGHYPPGYPKQYKYTLEENKLIVERPNGIRIVPPKADREKIISTAHNIAHTGRDATFLKVSSKYWWPNLRKDVVKSIRQCKQCLVTNATNLTSPPILRPVKPLKPFDKFYIDYIGPLPPSNGYLHVLVVVDSMTGFVWLYPTKAPSTSATVKALNMLTSIAIPKVLHSDQGAAFTSSTFADWAKEKGIQLEFSTPYHPQSSGKVERKNSDIKRLLTKLLIGRPAKWYDLLPVVQLALNNSYSPSSKYTPHQLLFGVDSNTPFANSDTLDLSREEELSLLQEIRSSLHQPTSPPASSRSWSPSVGQLVQERVARPASLRPRWHKPTAILEVVNPRTVIILDHLGNRRTVSVDNLKLTAYQDNGTSNDSGTMALMEEDESSTSST

SEQ ID NO: 1561 - protein, 1771 aa, Mason-Pfizer monkey virus
MGQELSQHERYVEQLKQALKTRGVKVKYADLLKFFDFVKDTCPWFPQEGTIDIKRWRRVGDCFQDYYNTFGPEKVPVTAFSYWNLIKELIDKKEVNPQVMAAVAQTEEILKSNSQTDLTKTSQNPDLDLISLDSDDEGAKSSSLQDKGLSSTKKPKRFPVLLTAQTSKDPEDPNPSEVDWDGLEDEAAKYHNPDWPPFLTRPPPYNKATPSAPTVMAVVNPKEELKEKIAQLEEQIKLEELHQALISKLQKLKTGNETVTHPDTAGGLSRTPHWPGQHIPKGKCCASREKEEQIPKDIFPVTETVDGQGQAWRHHNGFDFAVIKELKTAASQYGATAPYTLAIVESVADNWLTPTDWNTLVRAVLSGGDHLLWKSEFFENCRDTAKRNQQAGNGWDFDMLTGSGNYSSTDAQMQYDPGLFAQIQAAATKAWRKLPVKGDPGASLTGVKQGPDEPFADFVHRLITTAGRIFGSAEAGVDYVKQLAYENANPACQAAIRPYRKKTDLTGYIRLCSDIGPSYQQGLAMAAAFSGQTVKDFLNNKNKEKGGCCFKCGKKGHFAKNCHEHAHNNAEPKVPGLCPRCKRGKHWANECKSKTDNQGNPIPPHQGNRVEGPAPGPETSLWGSQLCSSQQKQPISKLTRATPGSAGLDLCSTSHTVLTPEMGPQALSTGIYGPLPPNTFGLILGRSSITMKGLQVYPGVIDNDYTGEIKIMAKAVNNIVTVSQGNRIAQLILLPLIETDNKVQQPYRGQGSFGSSDIYWVQPITCQKPSLTLWLDDKMFTGLIDTGADVTIIKLEDWPPNWPITDTLTNLRGIGQSNNPKQSSKYLTWRDKENNSGLIKPFVIPNLPVNLWGRDLLSQMKIMMCSPNDIVTAQMLAQGYSPGKGLGKKENGILHPIPNQGQSNKKGFGNFLTAAIDILAPQQCAEPITWKSDEPVWVDQWPLTNDKLAAAQQLVQEQLEAGHITESSSPWNTPIFVIKKKSGKWRLLQDLRAVNATMVLMGALQPGLPSPVAIPQGYLKIIIDLKDCFFSIPLHPSDQKRFAFSLPSTNFKEPMQRFQWKVLPQGMANSPTLCQKYVATAIHKVRHAWKQMYIIHYMDDILIAGKDGQQVLQCFDQLKQELTAAGLHIAPEKVQLQDPYTYLGFELNGPKITNQKAVIRKDKLQTLNDFQKLLGDINWLRPYLKLTTGDLKPLFDTLKGDSDPNSHRSLSKEALASLEKVETAIAEQFVTHINYSLPLIFLIFNTALTPTGLFWQDNPIMWIHLPASPKKVLLPYYDAIADLIILGRDHSKKYFGIEPSTIIQPYSKSQIDWLMQNTEMWPIACASFVGILDNHYPPNKLIQFCKLHTFVFPQIISKTPLNNALLVFTDGSSTGMAAYTLTDTTIKFQTNLNSAQLVELQALIAVLSAFPNQPLNIYTDSAYLAHSIPLLETVAQIKHISETAKLFLQCQQLIYNRSIPFYIGHVRAHSGLPGPIAQGNQRADLATKIVASNINTNLESAQNAHTLHHLNAQTLRLMFNIPREQARQIVKQCPICVTYLPVPHLGVNPRGLFPNMIWQMDVTHYSEFGNLKYIHVSIDTFSGFLLATLQTGETTKHVITHLLHCFSIIGLPKQIKTDNGPGYTSKNFQEFCSTLQIKHITGIPYNPQGQGIVERAHLSLKTTIEKIKKGEWYPRKGTPRNILNHALFILNFLNLDDQNKSAADRFWHNNPKKQFAMVKWKDPLDNTWHGPDPVLIWGRGSVCVYSQTYDAARWLPERLVRQVSNNNQSRE

SEQ ID NO: 1562 - protein, 1755 aa, Mouse mammary tumor virus
MGVSGSKGQKLFVSVLQRLLSERGLHVKESSAIEFYQFLIKVSPWFPEEGGLNLQDWKRVGREMKRYAAEHGTDSIPKQAYPIWLQLREILTEQSDLVLLSAEAKSVTEEELEEGLTGLLSTSSQEKTYGTRGTAYAEIDTEVDKLSEHIYDEPYEEKEKADKNEEKDHVRKIKKVVQRKENSEGKRKEKDSKAFLATDWNDDDLSPEDWDDLEEQAAHYHDDDELILPVKRKVVKKKPQALRRKPLPPVGFAGAMAEAREKGDLTFTFPVVFMGESDEDDTPVWEPLPLKTLKELQSAVRTMGPSAPYTLQVVDMVASQWLTPSDWHQTARATLSPGDYVLWRTEYEEKSKEMVQKAAGKRKGKVSLDMLLGTGQFLSPSSQIKLSKDVLKDVTTNAVLAWRAIPPPGVKKTVLAGLKQGNEESYETFISRLEEAVYRMMPRGEGSDILIKQLAWENANSLCQDLIRPIRKTGTIQDYIRACLDASPAVVQGMAYAAAMRGQKYSTFVKQTYGGGKGGQGAEGPVCFSCGKTGHIRKDCKDEKGSKRAPPGLCPRCKKGYHWKSECKSKFDKDGNPLPPLETNAENSKNLVKGQSPSPAQKGDGVKGSGLNPEAPPFTIHDLPRGTPGSAGLDLSSQKDLILSLEDGVSLVPTLVKGTLPEGTTGLIIGRSSNYKKGLEVLPGVIDSDFQGEIKVMVKAAKNAVIIHKGERIAQLLLLPYLKLPNPVIKEERGSEGFGSTSHVHWVQEISDSRPMLHIYLNGRRFLGLLDTGADKTCIAGRDWPANWPIHQTESSLQGLGMACGVARSSQPLRWQHEDKSGIIHPFVIPTLPFTLWGRDIMKDIKVRLMTDSPDDSQDLMIGAIESNLFADQISWKSDQPVWLNQWPLKQEKLQALQQLVTEQLQLGHLEESNSPWNTPVFVIKKKSGKWRLLQDLRAVNATMHDMGALQPGLPSPVAVPKGWEIIIIDLQDCFFNIKLHPEDCKRFAFSVPSPNFKRPYQRFQWKVLPQGMKNSPTLCQKFVDKAILTVRDKYQDSYIVHYMDDILLAHPSRSIVDEILTSMIQALNKHGLVVSTEKIQKYDNLKYLGTHIQGDSVSYQKLQIRTDKLRTLNDFQKLLGNINWIRPFLKLTTGELKPLFEILNGDSNPISTRKLTPEACKALQLMNERLSTARVKRLDLSQPWSLCILKTEYTPTACLWQDGVVEWIHLPHISPKVITPYDIFCTQLIIKGRHRSKELFSKDPDYIVVPYTKVQFDLLLQEKEDWPISLLGFLGEVHFHLPKDPLLTFTLQTAIIFPHMTSTTPLEKGIVIFTDGSANGRSVTYIQGREPIIKENTQNTAQQAEIVAVITAFEEVSQPFNLYTDSKYVTGLFPEIETATLSPRTKIYTELKHLQRLIHKRQEKFYIGHIRGHTGLPGPLAQGNAYADSLTRILTALESAQESHALHHQNAAALRFQFHITREQAREIVKLCPNCPDWGHAPQLGVNPRGLKPRVLWQMDVTHVSEFGKLKYVHVTVDTYSHFTFATARTGEATKDVLQHLAQSFAYMGIPQKIKTDNAPAYVSRSIQEFLARWKISHVTGIPYNPQGQAIVERTHQNIKAQLNKLQKAGKYYTPHHLLAHALFVLNHVNMDNQGHTAAERHWGPISADPKPMVMWKDLLTGSWKGPDVLITAGRGYACVFPQDAETPIWVPDRFIRPFTERKEATPTPGTAEKTPPRDEKDQQESPKNESSPHQREDGLATSAGVDLRSGGGP

SEQ ID NO: 1563 - protein, 1738 aa, Murine leukemia virus
MGQTVTTPLSLTLGHWKDVERIAHNQSVDVKKRRWVTFCSAEWPTFNVGWPRDGTFNRDLITQVKIKVFSPGPHGHPDQVPYIVTWEALAFDPPPWVKPFVHPKPPPPLPPSAPSLPLEPPRSTPPRSSLYPALTPSLGAKPKPQVLSDSGGPLIDLLTEDPPPYRDPRPPPSDRDGNGGEATPAGEAPDPSPMASRLRGRREPPVADSTTSQAFPLRAGGNGQLQYWPFSSSDLYNWKNNNPSFSEDPGKLTALIESVLITHQPTWDDCQQLLGTLLTGEEKQRVLLEARKAVRGDDGRPTQLPNEVDAAFPLERPDWDYTTQAGRNHLVHYRQLLLAGLQNAGRSPTNLAKVKGITQGPNESPSAFLERLKEAYRRYTPYDPEDPGQETNVSMSFIWQSAPDIGRKLERLEDLKNKTLGDLVREAEKIFNKRETPEEREERIRRETEEKEERRRTEDEQKEKERDRRRHREMSKLLATVVSGQKQDRQGGERRRSQLDRDQCAYCKEKGHWAKDCPKKPRGPRGPRPQTSLLTLDDQGGQGQEPPPEPRITLKVGGQPVTFLVDTGAQHSVLTQNPGPLSDKSAWVQGATGGKRYRWTTDRKVHLATGKVTHSFLHVPDCPYPLLGRDLLTKLKAQIHFEGSGAQVMGPMGQPLQVLTLNIEDEHRLHETSKEPDVSLGSTWLSDFPQAWAETGGMGLAVRQAPLIIPLKATSTPVSIKQYPMSQEARLGIKPHIQRLLDQGILVPCQSPWNTPLLPVKKPGTNDYRPVQDLREVNKRVEDIHPTVPNPYNLLSGLPPSHQWYTVLDLKDAFFCLRLHPTSQPLFAFEWRDPEMGISGQLTWTRLPQGFKNSPTLFDEALHRDLADFRIQHPDLILLQYVDDLLLAATSELDCQQGTRALLQTLGNLGYRASAKKAQICQKQVKYLGYLLKEGQRWLTEARKETVMGQPTPKTPRQLREFLGTAGFCRLWIPGFAEMAAPLYPLTKTGTLFNWGPDQQKAYQEIKQALLTAPALGLPDLTKPFELFVDEKQGYAKGVLTQKLGPWRRPVAYLSKKLDPVAAGWPPCLRMVAAIAVLTKDAGKLTMGQPLVILAPHAVEALVKQPPDRWLSNARMTHYQALLLDTDRVQFGPVVALNPATLLPLPEEGLQHNCLDILAEAHGTRPDLTDQPLPDADHTWYTDGSSLLQEGQRKAGAAVTTETEVIWAKALPAGTSAQRAELIALTQALKMAEGKKLNVYTDSRYAFATAHIHGEIYRRRGLLTSEGKEIKNKDEILALLKALFLPKRLSIIHCPGHQKGHSAEARGNRMADQAARKAAITETPDTSTLLIENSSPYTSEHFHYTVTDIKDLTKLGAIYDKTKKYWVYQGKPVMPDQFTFELLDFLHQLTHLSFSKMKALLERSHSPYYMLNRDRTLKNITETCKACAQVNASKSAVKQGTRVRGHRPGTHWEIDFTEIKPGLYGYKYLLVFIDTFSGWIEAFPTKKETAKVVTKKLLEEIFPRFGMPQVLGTDNGPAFVSKVSQTVADLLGIDWKLHCAYRPQSSGQVERMNRTIKETLTKLTLATGSRDWVLLLPLALYRARNTPGPHGLTPYEILYGAPPPLVNFPDPDMTRVTNSPSLQAHLQALYLVQHEVWRPLAAAYQEQLDRPVVPHPYRVGDTVWVRRHQTKNLEPRWKGPYTVLLTTPTALKVDGIAAWIHAAHVKAADPGGGPSSRLTWRVQRSQNPLKIRLTREAP

SEQ ID NO: 1564 - protein, 1462 aa, unidentified
  source 1..1462: note = Description of Unknown:Human T-cell leukemia virus 1 sequence
MGQIFSRSASPIPRPPRGLAAHHWLNFLQAAYRLEPGPSSYDFHQLKKFLKIALETPARICPINYSLLASLLPKGYPGRVNEILHILIQTQAQIPSRPAPPPPSSPTHDPPDSDPQIPPPYVEPTAPQVLPVMHPHGAPPNHRPWQMKDLQAIKQEVSQAAPGSPQFMQTIRLAVQQFDPTAKDLQDLLQYLCSSLVASLHHQQLDSLISEAETRGITGYNPLAGPLRVQANNPQQQGLRREYQQLWLAAFAALPGSAKDPSWASILQGLEEPYHAFVERLNIALDNGLPEGTPKDPILRSLAYSNANKECQKLLQARGHTNSPLGDMLRACQTWTPKDKTKVLVVQPKKPPPNQPCFRCGKAGHWSRDCTQPRPPPGPCPLCQDPTHWKRDCPRLKPTIPEPEPEEDALLLDLPADIPHPKNLHRGGGLTSPPTLQQVLPNQDPASILPVIPLDPARRPVIKAQVDTQTSHPKTIEALLDTGADMTVLPIALFSSNTPLKNTSVLGAGGQTQDHFKLTSLPVLIRLPFRTTPIVLTSCLVDTKNNWAIIGRDALQQCQGVLYLPEAKRPPVILPIQAPAVLGLEHLPRPPQISQFPLNPERLQALQHLVRKALEAGHIEPYTGPGNNPVFPVKKANGTWRFIHDLRATNSLTIDLSSSSPGPPDLSSLPTTLAHLQTIDLRDAFFQIPLPKQFQPYFAFTVPQQCNYGPGTRYAWKVLPQGFKNSPTLFEMQLAHILQPIRQAFPQCTILQYMDDILLASPSHEDLLLLSEATMASLISHGLPVSENKTQQTPGTIKFLGQIISPNHLTYDAVPTVPIRSRWALPELQALLGEIQWVSKGTPTLRQPLHSLYCALQRHTDPRDQIYLNPSQVQSLVQLRQALSQNCRSRLVQTLPLLGAIMLTLTGTTTVVFQSKEQWPLVWLHAPLPHTSQCPWGQLLASAVLLLDKYTLQSYGLLCQTIHHNISTQTFNQFIQTSDHPSVPILLHHSHRFKNLGAQTGELWNTFLKTAAPLAPVKALMPVFTLSPVIINTAPCLFSDGSTSRAAYILWDKQILSQRSFPLPPPHKSAQRAELLGLLHGLSSARSWRCLNIFLDSKYLYHYLRTLALGTFQGRSSQAPFQALLPRLLSRKVVYLHHVRSHTNLPDPISRLNALTDALLITPVLQLSPAELHSFTHCGQTALTLQGATTTEASNILRSCHACRGGNPQHQMPRGHIRRGLLPNHIWQGDITHFKYKNTLYRLHVWVDTFSGAISATQKRKETSSEAISSLLQAIAHLGKPSYINTDNGPAYISQDFLNMCTSLAIRHTTHVPYNPTSSGLVERSNGILKTLLYKYFTDKPDLPMDNALSIALWTINHLNVLTNCHKTRWQLHHSPRLQPIPETRSLSNKQTHWYYFKLPGLNSRQWKGPQEALQEAAGAALIPVSASSAQWIPWRLLKRAACPRPVGGPADPKEKDLQHHG

SEQ ID NO: 1565 - protein, 1143 aa, unidentified
  source 1..1143: note = Description of Unknown:Human spumaretrovirus sequence
MNPLQLLQPLPAEIKGTKLLAHWDSGATITCIPESFLEDEQPIKKTLIKTIHGEKQQNVYYVTFKVKGRKVEAEVIASPYEYILLSPTDVPWLTQQPLQLTILVPLQEYQEKILSKTALPEDQKQQLKTLFVKYDNLWQHWENQVGHRKIRPHNIATGDYPPRPQKQYPINPKAKPSIQIVIDDLLKQGVLTPQNSTMNTPVYPVPKPDGRWRMVLDYREVNKTIPLTAAQNQHSAGILATIVRQKYKTTLDLANGFWAHPITPESYWLTAFTWQGKQYCWTRLPQGFLNSPALFTADVVDLLKEIPNVQVYVDDIYLSHDDPKEHVQQLEKVFQILLQAGYVVSLKKSEIGQKTVEFLGFNITKEGRGLTDTFKTKLLNITPPKDLKQLQSILGLLNFARNFIPNFAELVQPLYNLIASAKGKYIEWSEENTKQLNMVIEALNTASNLEERLPEQRLVIKVNTSPSAGYVRYYNETGKKPIMYLNYVFSKAELKFSMLEKLLTTMHKALIKAMDLAMGQEILVYSPIVSMTKIQKTPLPERKALPIRWITWMTYLEDPRIQFHYDKTLPELKHIPDVYTSSQSPVKHPSQYEGVFYTDGSAIKSPDPTKSNNAGMGIVHATYKPEYQVLNQWSIPLGNHTAQMAEIAAVEFACKKALKIPGPVLVITDSFYVAESANKELPYWKSNGFVNNKKKPLKHISKWKSIAECLSMKPDITIQHEKGISLQIPVFILKGNALADKLATQGSYVVNCNTKKPNLDAELDQLLQGHYIKGYPKQYTYFLEDGKVKVSRPEGVKIIPPQSDRQKIVLQAHNLAHTGREATLLKIANLYWWPNMRKDVVKQLGRCQQCLITNASNKASGPILRPDRPQKPFDKFFIDYIGPLPPSQGYLYVLVVVDGMTGFTWLYPTKAPSTSATVKSLNVLTSIAIPKVIHSDQGAAFTSSTFAEWAKERGIHLEFSTPYHPQSGSKVERKNSDIKRLLTKLLVGRPTKWYDLLPVVQLALNNTYSPVLKYTPHQLLFGIDSNTPFANQDTLDLTREEELSLLQEIRTSLYHPSTPPASSRSWSPVVGQLVQERVARPASLRPRWHKPSTVLKVLNPRTVVILDHLGNNRTVSIDNLKPTSHQNGTTNDTATMDHLEKNE

SEQ ID NO: 1566 - protein, 1416 aa, Bovine leukemia virus
MGNSPSYNPPAGISPSDWLNLLQSAQRLNPRPSPSDFTDLKNYIHWFHKTQKKPWTFTSGGPTSCPPGRFGRVPLVLATLNEVLSNEGGAPGASAPEEQPPPYDPPAILPIISEGNRNRHRAWALRELQDIKKEIENKAPGSQVWIQTLRLAILQADPTPADLEQLCQYIASPVDQTAHMTSLTAAIAAAEAANTLQGFNPKTGTLTQQSAQPNAGDLRSQYQNLWLQAGKNLPTRPSAPWSTIVQGPAESSVEFVNRLQISLADNLPDGVPKEPIIDSLSYANANRECQQILQGRGPVAAVGQKLQACAQWAPKNKQPALLVHTPGPKMPGPRQPAPKRPPPGPCYRCLKEGHWARDCPTKATGPPPGPCPICKDPSHWKRDCPTLKSKNKLIEGGLSAPQTITPITDSLSEAELECLLSIPLARSRPSVAVYLSGPWLQPSQNQALMLVDTGAENTVLPQNWLVRDYPRIPAAVLGAGGVSRNRYNWLQGPLTLALKPEGPFITIPKILVDTSDKWQILGRDVPSRLQASISIPEEVRPPVVGVLDTPPSHIGLEHLPPPPEVPQFPLNLERLQALQDLVHRSLEAGYISPWDGPGNNPVFPVRKPNGAWRFVHDLRATNALTKPIPALSPGPPDLTAIPTHPPHIICLDLKDAFFQIPVEDRFRFYLSFTLPSPGGLQPHRRFAWRVLPQGFINSPALFERALQEPLRQVSAAFSQSLLVSYMDDILYASPTEEQRSQCYQALAARLRDLGFQVASEKTSQTPSPVPFLGQMVHEQIVTYQSLPTLQISSPISLHQLQAVLGDLQWVSRGTPTTRRPLQLLYSSLKRHHDPRAIIQLSPEQLQGIAELRQALSHNARSRYNEQEPLLAYVHLTRAGSTLVLFQKGAQFPLAYFQTPLTDNQASPWGLLLLLGCQYLQTQALSSYAKPILKYYHNLPKTSLDNWIQSSEDPRVQELLQLWPQISSQGIQPPGPWKTLITRAEVFLTPQFSPDPIPAALCLFSDGATGRGAYCLWKDHLLDFQAVPAPESAQKGELAGLLAGLAAAPPEPVNIWVDSKYLYSLLRTLVLGAWLQPDPVPSYALLYKSLLRHPAIVVGHVRSHSSASHPIASLNNYVDQLLPLETPEQWHKLTHCNSRALSRWPNPRISAWDPRSPATLCETCQKLNPTGGGKMRTIQRGWAPNHIWQADITHYKYKQFTYALHVFVDTYSGATHASAKRGLTTQTTIEGLLEAIVHLGRPKKLNTDQGANYTSKTFVRFCQQFGVSLSHHVPYNPTSSGLDERTNGLLKLLLSKYHLDEPHLPMTQALSRALWTHNQINLLPILKTRWELHHSPPLAVISEGGETPKGSDKLFLYLLPGQNNRRWLGPLPALVEASGGALLATDPPVWVPWRLLKAFKCLKNDGPEDAHNRSSDG

SEQ ID NO: 1567 - protein, 1220 aa, Bovine foamy virus
MPALRPLQVEIKGNHLKGYWDSGAEITCVPAIYIIEEQPVGKKLITTIHNEKEHDVYYVEMKIEKRKVQCEVIATALDYVLVAPVDIPWYKPGPLELTIKIDVESQKHTLITESTLSPQGQMRLKKLLDQYQALWQCWENQVGHRRIEPHKIATGALKPRPQKQYHINPRAKADIQIVIDDLLRQGVLRQQNSEMNTPVYPVPKADGRWRMVLDYREVNKVTPLVATQNCHSASILNTLYRGPYKSTLDLANGFWAHPIKPEDYWITAFTWGGKTYCWTVLPQGFLNSPALFTADVVDILKDIPNVQVYVDDVYVSSATEQEHLDILETIFNRLSTAGYIVSLKKSKLAKETVEFLGFSISQNGRGLTDSYKQKLMDLQPPTTLRQLQSILGLINFARNFLPNFAELVAPLYQLIPKAKGQCIPWTMDHTTQLKTIIQALNSTENLEERRPDVDLIMKVHISNTAGYIRFYNHGGQKPIAYNNALFTSTELKFTPTEKIMATIHKGLLKALDLSLGKEIHVYSAIASMTKLQKTPLSERKALSIRWLKWQTYFEDPRIKFHHDATLPDLQNLPVPQQDTGKEMTILPLLHYEAIFYTDGSAIRSPKPNKTHSAGMGIIQAKFEPDFRIVHLWSFPLGDHTAQYAEIAAFEFAIRRATGIRGPVLIVTDSNYVAKSYNEELPYWESNGFVNNKKKTLKHISKWKAIAECKNLKADIHVIHEPGHQPAEASPHAQGNALADKQAVSGSYKVFSNELKPSLDAELEQVLSTGRPNPQGYPNKYEYKLVNGLCYVDRRGEEGLKIIPPKADRVKLCQLAHDGPGSAHLGRSALLLKLQQKYWWPRMHIDASRIVLNCTVCAQTNSTNQKPRPPLVIPHDTKPFQVWYMDYIGPLPPSNGYQHALVIVDAGTGFTWIYPTKAQTANATVKALTHLTGTAVPKVLHSDQGPAFTSSILADWAKDRGIQLEHSAPYHPQSSGKVERKNSEIKRLLTKLLAGRPTKWYPLIPIVQLALNNTPNTRQKYTPHQLMYGADCNLPFENLDTLDLTREEQLAVLKEVRDGLLDLYPSPSQTTARSWTPSPGLLVQERVARPAQLRPKWRKPTPIKKVLNERTVIIDHLGQDKVVSIDNLKPAAHQKLAQTPDSAEICPSATPCPPNTSLWYDLDTGTWTCQRCGYQCPDKYHQPQCTWSCEDRCGHRWKECGNCIPQDGSSDDASAVAAVEI

SEQ ID NO: 1568 - protein, 900 aa, Avian myeloblastosis virus
RATVLTVALHLAIPLKWKPNHTPVWIDQWPLPEGKLVALTQLVEKELQLGHIEPSLSCWNTPVFVIRKASGSYRLLHDLRAVNAKLVPFGAVQQGAPVLSALPRGWPLMVLDLKDCFFSIPLAEQDREAFAFTLPSVNNQAPARRFQWKVLPQGMTCSPTICQLIVGQILEPLRLKHPSLRMLHYMDDLLLAASSHDGLEAAGEEVISTLERAGFTISPDKVQREPGVQYLGYKLGSTYVAPVGLVAEPRIATLWDVQKLVGSLQSVRPALGIPPRLMGPFYEQLRGSDPNEAREWNLDMKMAWREIVQLSTTAALERWDPALPLEGAVARCEQGAIGVLGQGLSTHPRPCLWLFSTQPTKAFTAWLEVLTLLITKLRASAVRTFGKEVDILLLPACFREDLPLPEGILLALRGFAGKIRSSDTPSIFDIARPLHVSLKVRVTDHPVPGPTVFTDASSSTHKGVVVWREGPRWEIKEIADLGASVQQLEARAVAMALLLWPTTPTNVVTDSAFVAKMLLKMGQEGVPSTAAAFILEDALSQRSAMAAVLHVRSHSEVPGFFTEGNDVADSQATFQAYPLREAKDLHTALHIGPRALSKACNISMQQAREVVQTCPHCNSAPALEAGVNPRGLGPLQIWQTDFTLEPRMAPRSWLAVTVDTASSAIVVTQHGRVTSVAAQHHWATAIAVLGRPKAIKTDNGSCFTSKSTREWLARWGIAHTTGIPGNSQGQAMVERANRLLKDKIRVLAEGDGFMKRIPTSKQGELLAKAMYALNHFERGENTKTPIQKHWRPTVLTEGPPVKIRIETGEWEKGWNVLVWGRGYAAVKNRDTDKVIWVPSRKVKPDITQKDEVTKKDEASPLFAGISDWAPWEGEQEGLQEETASNKQERPGEDTPAANES

SEQ ID NO: 1569 - protein, 1448 aa, Simian immunodeficiency virus
MGARNSVLSGKKADELEKIRLRPGGKKKYMLKHVVWAANELDRFGLAESLLENKEGCQKILSVLAPLVPTGSENLKSLYNTVCVIWCIHAEEKVKHTEEAKQIVQRHLVMETGTAETMPKTSRPTAPFSGRGGNYPVQQIGGNYTHLPLSPRTLNAWVKLIEEKKFGAEVVSGFQALSEGCLPYDINQMLNCVGDHQAAMQIIRDIINEEAADWDLQHPQQAPQQGQLREPSGSDIAGTTSTVEEQIQWMYRQQNPIPVGNIYRRWIQLGLQKCVRMYNPTNILDVKQGPKEPFQSYVDRFYKSLRAEQTDPAVKNWMTQTLLIQNANPDCKLVLKGLGTNPTLEEMLTACQGVGGPGQKARLMAEALKEALAPAPIPFAAAQQKGPRKPIKCWNCGKEGHSARQCRAPRRQGCWKCGKMDHVMAKCPNRQAGFFRPWPLGKEAPQFPHGSSASGADANCSPRRTSCGSAKELHALGQAAERKQREALQGGDRGFAAPQFSLWRRPVVTAHIEGQPVEVLLDTGADDSIVTGIELGPHYTPKIVGGIGGFINTKEYKNVEIEVLGKRIKGTIMTGDTPINIFGRNLLTALGMSLNLPIAKVEPVKSPLKPGKDGPKLKQWPLSKEKIVALREICEKMEKDGQLEEAPPTNPYNTPTFAIKKKDKNKWRMLIDFRELNRVTQDFTEVQLGIPHPAGLAKRKRITVLDIGDAYFSIPLDEEFRQYTAFTLPSVNNAEPGKRYIYKVLPQGWKGSPAIFQYTMRHVLEPFRKANPDVTLVQYMDDILIASDRTDLEHDRVVLQLKELLNSIGFSSPEEKFQKDPPFQWMGYELWPTKWKLQKIELPQRETWTVNDIQKLVGVLNWAAQIYPGIKTKHLCRLIRGKMTLTEEVQWTEMAEAEYEENKIILSQEQEGCYYQESKPLEATVIKSQDNQWSYKIHQEDKILKVGKFAKIKNTHTNGVRLLAHVIQKIGKEAIVIWGQVPKFHLPVEKDVWEQWWTDYWQVTWIPEWDFISTPPLVRLVFNLVKDPIEGEETYYVDGSCSKQSKEGKAGYITDRGKDKVKVLEQTTNQQAELEAFLMALTDSGPKANIIVDSQYVMGIITGCPTESESRLVNQIIEEMIKKTEIYVAWVPAHKGIGGNQEIDHLVSQGIRQVLFLEKIEPAQEEHSKYHSNIKELVFKFGLPRLVAKQIVDTCDKCHQKGEAIHGQVNSDLGTWQMDCTHLEGKIVIVAVHVASGFIEAEVIPQETGRQTALFLLKLASRWPITHLHTDNGANFASQEVKMVAWWAGIEHTFGVPYNPQSQGVVEAMNHHLKNQIDRIREQANSVETIVLMAVHCMNFKRRGGIGDMTPAERLINMITTEQEIQFQQSKNSKFKNFRVYYREGRDQLWKGPGELLWKGEGAVILKVGTDIKVVPRRKAKIIKDYGGGKEMDSSSHMEDTGEAREVA

SEQ ID NO: 1570 - protein, 1603 aa, Rous sarcoma virus
MEAVIKVISSACKTYCGKTSPSKKEIGAMLSLLQKEGLLMSPSDLYSPGSWDPITAALSQRAMILGKSGELKTWGLVLGALKAAREEQVTSEQAKFWLGLGGGRVSPPGPECIEKPATERRIDKGEEVGETTVQRDAKMAPEETATPKTVGTSCYHCGTAIGCNCATASAPPPPYVGSGLYPSLAGVGEQQGQGGDTPPGAEQSRAEPGHAGQAPGPALTDWARVREELASTGPPVVAMPVVIKTEGPAWTPLEPKLITRLADTVRTKGLRSPITMAEVEALMSSPLLPHDVTNLMRVILGPAPYALWMDAWGVQLQTVIAAATRDPRHPANGQGRGERTNLNRLKGLADGMVGNPQGQAALLRPGELVAITASALQAFREVARLAEPAGPWADIMQGPSESFVDFANRLIKAVEGSDLPPSARAPVIIDCFRQKSQPDIQQLIRTAPSTLTTPGEIIKYVLDRQKTAPLTDQGIAAAMSSAIQPLIMAVVNRERDGQTGSGGRARGLCYTCGSPGHYQAQCPKKRKSGNSRERCQLCNGMGHNAKQCRKRDGNQGQRPGKGLSSGPWPGPEPPAVSLAMTMEHKDRPLVRVILTNTGSHPVKQRSVYITALLDSGADITIISEEDWPTDWPVMEAANPQIHGIGGGIPMRKSRDMIELGVINRDGSLERPLLLFPAVAMVRGSILGRDCLQGLGLRLTNLIGRATVLTVALHLAIPLKWKPDHTPVWIDQWPLPEGKLVALTQLVEKELQLGHIEPSLSCWNTPVFVIRKASGSYRLLHDLRAVNAKLVPFGAVQQGAPVLSALPRGWPLMVLDLKDCFFSIPLAEQDREAFAFTLPSVNNQAPARRFQWKVLPQGMTCSPTICQLVVGQVLEPLRLKHPSLCMLHYMDDLLLAASSHDGLEAAGEEVISTLERAGFTISPDKVQREPGVQYLGYKLGSTYVAPVGLVAEPRIATLWDVQKLVGSLQWLRPALGIPPRLMGPFYEQLRGSDPNEAREWNLDMKMAWREIVRLSTTAALERWDPALPLEGAVARCEQGAIGVLGQGLSTHPRPCLWLFSTQPTKAFTAWLEVLTLLITKLRASAVRTFGKEVDILLLPACFREDLPLPEGILLALKGFAGKIRSSDTPSIFDIARPLHVSLKVRVTDHPVPGPTVFTDASSSTHKGVVVWREGPRWEIKEIADLGASVQQLEARAVAMALLLWPTTPTNVVTDSAFVAKMLLKMGQEGVPSTAAAFILEDALSQRSAMAAVLHVRSHSEVPGFFTEGNDVADSQATFQAYPLREAKDLHTALHIGPRALSKACNISMQQAREVVQTCPHCNSAPALEAGVNPRGLGPLQIWQTDFTLEPRMAPRSWLAVTVDTASSAIVVTQHGRVTSVAVQHHWATAIAVLGRPKAIKTDNGSCFTSKSTREWLARWGIAHTTGIPGNSQGQAMVERANRLLKDRIRVLAEGDGFMKRIPTSKQGELLAKAMYALNHFERGENTKTPIQKHWRPTVLTEGPPVKIRIETGEWEKGWNVLVWGRGYAAVKNRDTDKVIWVPSRKVKPDITQKDEVTKKDEASPLFAGISDWIPWEDEQEGLQGETASNKQERPGEDTLAANES

SEQ ID NO: 1571 - protein, 1465 aa, Human immunodeficiency virus 2
MGARGSVLSGKKTDELEKVRLRPGGKKKYMLKHVVWAVNELDRFGLAESLLESKEGCQKILKVLAPLVPTGSENLKSLFNIVCVIFCLHAEEKVKDTEEAKKIAQRHLAADTEKMPATNKPTAPPSGGNYPVQQLAGNYVHLPLSPRTLNAWVKLVEEKKFGAEVVPGFQALSEGCTPYDINQMLNCVGEHQAAMQIIREIINEEAADWDQQHPSPGPMPAGQLRDPRGSDIAGTTSTVEEQIQWMYRAQNPVPVGNIYRRWIQLGLQKCVRMYNPTNILDIKQGPKEPFQSYVDRFYKSLRAEQTDPAVKNWMTQTLLIQNANPDCKLVLKGLGMNPTLEEMLTACQGIGGPGQKARLMAEALKEALTPAPIPFAAVQQKAGKRGTVTCWNCGKQGHTARQCRAPRRQGCWKCGKTGHIMSKCPERQAGFLRVRTLGKEASQLPHDPSASGSDTICTPDEPSRGHDTSGGDTICAPCRSSSGDAEKLHADGETTEREPRETLQGGDRGFAAPQFSLWRRPVVKACIEGQSVEVLLDTGVDDSIVAGIELGSNYTPKIVGGIGGFINTKEYKDVEIEVVGKRVRATIMTGDTPINIFGRNILNTLGMTLNFPVAKVEPVKVELKPGKDGPKIRQWPLSREKILALKEICEKMEKEGQLEEAPPTNPYNTPTFAIKKKDKNKWRMLIDFRELNKVTQDFTEVNWVFPTRQVAEKRRITVIDVGDAYFSIPLDPNFRQYTAFTLPSVNNAEPGKRYIYKVLPQGWKGSQSICQYSMRKVLDPFRKANSDVIIIQYMDDILIASDRSDLEHDRVVSQLKELLNDMGFSTPEEKFQKDPPFKWMGYELWPKKWKLQKIQLPEKEVWTVNAIQKLVGVLNWAAQLFPGIKTRHICKLIRGKMTLTEEVQWTELAEAELQENKIILEQEQEGSYYKERVPLEATVQKNLANQWTYKIHQGNKVLKVGKYAKVKNTHTNGVRLLAHVVQKIGKEALVIWGEIPVFHLPVERETWDQWWTDYWQVTWIPEWDFVSTPPLIRLAYNLVKDPLEGRETYYTDGSCNRTSKEGKAGYVTDRGKDKVKVLEQTTNQQAELEAFALALTDSEPQVNIIVDSQYVMGIIAAQPTETESPIVAKIIEEMIKKEAVYVGWVPAHKGLGGNQEVDHLVSQGIRQVLFLEKIEPAQEEHEKYHGNVKELVHKFGIPQLVAKQIVNSCDKCQQKGEAIHGQVNADLGTWQMDCTHLEGKIIIVAVHVASGFIEAEVIPQETGRQTALFLLKLASRWPITHLHTDNGANFTSPSVKMVAWWVGIEQTFGVPYNPQSQGVVEAMNHHLKNQIDRLRDQAVSIETVVLMATHCMNFKRRGGIGDMTPAERLVNMITTEQEIQFFQAKNLKFQNFQVYYREGRDQLWKGPGELLWKGEGAVIIKVGTEIKVVPRRKAKIIRHYGGGKGLDCSADMEDTRQAREMAQSD

SEQ ID NO: 1572 - protein, 1437 aa, Human immunodeficiency virus 1
MGARASVLSGGELDKWEKIRLRPGGKKKYKLKHIVWASRELERFAVNPGLLETSEGCRQILGQLQPSLQTGSEELRSLYNTVATLYCVHQRIDVKDTKEALEKIEEEQNKSKKKAQQAAAAAGTGNSSQVSQNYPIVQNLQGQMVHQAISPRTLNAWVKVVEEKAFSPEVIPMFSALSEGATPQDLNTMLNTVGGHQAAMQMLKETINEEAAEWDRVHPVHAGPIAPGQMREPRGSDIAGTTSTLQEQIGWMTNNPPIPVGEIYKRWIILGLNKIVRMYSPTSILDIRQGPKEPFRDYVDRFYKTLRAEQASQDVKNWMTETLLVQNANPDCKTILKALGPAATLEEMMTACQGVGGPGHKARVLAEAMSQVTNPANIMMQRGNFRNQRKTVKCFNCGKEGHIAKNCRAPRKKGCWRCGREGHQMKDCTERQANFLREDLAFLQGKAREFSSEQTRANSPTRRELQVWGGENNSLSEAGADRQGTVSFNFPQITLWQRPLVTIRIGGQLKEALLDTGADDTVLEEMNLPGKWKPKMIGGIGGFIKVRQYDQIPVEICGHKAIGTVLVGPTPVNIIGRNLLTQIGCTLNFPISPIETVPVKLKPGMDGPKVKQWPLTEEKIKALVEICTEMEKEGKISKIGPENPYNTPVFAIKKKDSTKWRKLVDFRELNKRTQDFWEVQLGIPHPAGLKKKKSVTVLDVGDAYFSVPLDKDFRKYTAFTIPSINNETPGIRYQYNVLPQGWKGSPAIFQSSMTKILEPFRKQNPDIVIYQYMDDLYVGSDLEIGQHRTKIEELRQHLLRWGFTTPDKKHQKEPPFLWMGYELHPDKWTVQPIMLPEKDSWTVNDIQKLVGKLNWASQIYAGIKVKQLCKLLRGTKALTEVIPLTEEAELELAENREILKEPVHEVYYDPSKDLVAEIQKQGQGQWTYQIYQEPFKNLKTGKYARMRGAHTNDVKQLTEAVQKVSTESIVIWGKIPKFKLPIQKETWEAWWMEYWQATWIPEWEFVNTPPLVKLWYQLEKEPIVGAETFYVDGAANRETKLGKAGYVTDRGRQKVVSIADTTNQKTELQAIHLALQDSGLEVNIVTDSQYALGIIQAQPDKSESELVSQIIEQLIKKEKVYLAWVPAHKGIGGNEQVDKLVSAGIRKVLFLNGIDKAQEEHEKYHSNWRAMASDFNLPPVVAKEIVASCDKCQLKGEAMHGQVDCSPGIWQLDCTHLEGKIILVAVHVASGYIEAEVIPAETGQETAYFLLKLAGRWPVKTIHTDNGSNFTSTTVKAACWWAGIKQEFGIPYNPQSQGVVESMNNELKKIIGQVRDQAEHLKTAVQMAVFIHNFKRKGGIGGYSAGERIVDIIATDIQTKELQKQITKIQNFRVYYRDNKDPLWKGPAKLLWKGEGAVVIQDNSDIKVVPRRKAKIIRDYGKQMAGDDCVASRQDED

SEQ ID NO: 1573 - protein, 1124 aa, Feline immunodeficiency virus
KEFGKLEGGASCSPSESNAASSNAICTSNGGETIGFVNYNKVGTTTTLEKRPEILIFVNGYPIKFLLDTGADITILNRRDFQVKNSIENGRQNMIGVGGGKRGTNYINVHLEIRDENYKTQCIFGNVCVLEDNSLIQPLLGRDNMIKFNIRLVMAQISDKIPVVKVKMKDPNKGPQIKQWPLTNEKIEALTEIVERLEKEGKVKRADSNNPWNTPVFAIKKKSGKWRMLIDFRELNKLTEKGAEVQLGLPHPAGLQIKKQVTVLDIGDAYFTIPLDPDYAPYTAFTLPRKNNAGPGRRFVWCSLPQGWILSPLIYQSTLDNIIQPFIRQNPQLDIYQYMDDIYIGSNLSKKEHKEKVEELRKLLLWWGFETPEDKLQEEPPYTWMGYELHPLTWTIQQKQLDIPEQPTLNELQKLAGKINWASQAIPDLSIKALTNMMRGNQNLNSTRQWTKEARLEVQKAKKAIEEQVQLGYYDPSKELYAKLSLVGPHQISYQVYQKDPEKILWYGKMSRQKKKAENTCDIALRACYKIREESIIRIGKEPRYEIPTSREAWESNLINSPYLKAPPPEVEYIHAALNIKRALSMIKDAPIPGAETWYIDGGRKLGKAAKAAYWTDTGKWRVMDLEGSNQKAEIQALLLALKAGSEEMNIITDSQYVINIILQQPDMMEGIWQEVLEELEKKTAIFIDWVPGHKGIPGNEEVDKLCQTMMIIEGDGILDKRSEDAGYDLLAAKEIHLLPGEVKVIPTGVKLMLPKGYWGLIIGKSSIGSKGLDVLGGVIDEGYRGEIGVIMINVSRKSITLMERQKIAQLIILPCKHEVLEQGKVVMDSERGDNGYGSTGVFSSWVDRIEEAEINHEKFHSDPQYLRTEFNLPKMVAEEIRRKCPVCRIIGEQVGGQLKIGPGIWQMDCTHFDGKIILVGIHVESGYIWAQIISQETADCTVKAVLQLLSAHNVTELQTDNGPNFKNQKMEGVLNYMGVKHKFGIPGNPQSQALVENVNHTLKVWIQKFLPETTSLDNALSLAVHSLNFKRRGRIGGMAPYELLAQQESLRIQDYFSAIPQKLQAQWIYYKDQKDKKWKGPMRVEYWGQGSVLLKDEEKGYFLIPRRHIRRVPEPCALPEGDE

SEQ ID NO: 1574 - protein, 1145 aa, Equine infectious anemia virus
TAWTFLKAMQKCSKKREARGSREAPETNFPDTTEESAQQICCTRDSSDSKSVPRSERNKKGIQCQGEGSSRGSQPGQFVGVTYNLEKRPTTIVLINDTPLNVLLDTGADTSVLTTAHYNRLKYRGRKYQGTGIIGVGGNVETFSTPVTIKKKGRHIKTRMLVADIPVTILGRDILQDLGAKLVLAQLSKEIKFRKIELKEGTMGPKIPQWPLTKEKLEGAKETVQRLLSEGKISEASDNNPYNSPIFVIKKRSGKWRLLQDLRELNKTVQVGTEISRGLPHPGGLIKCKHMTVLDIGDAYFTIPLDPEFRPYTAFTIPSINHQEPDKRYVWKCLPQGFVLSPYIYQKTLQEILQPFRERYPEVQLYQYMDDLFVGSNGSKKQHKELIIELRAILQKGFETPDDKLQEVPPYSWLGYQLCPENWKVQKMQLDMVKNPTLNDVQKLMGNITWMSSGVPGLTVKHIAATTKGCLELNQKVIWTEEAQKELEENNEKIKNAQGLQYYNPEEEMLCEVEITKNYEATYVIKQSQGILWAGKKIMKANKGWSTVKNLMLLLQHVATESITRVGKCPTFKVPFTKEQVMWEMQKGWYYSWLPEIVYTHQVVHDDWRMKLVEEPTSGITIYTDGGKQNGEGIAAYVTSNGRTKQKRLGPVTHQVAERMAIQMALEDTRDKQVNIVTDSYYCWKNITEGLGLEGPQNPWWPIIQNIREKEIVYFAWVPGHKGIYGNQLADEAAKIKEEIMLAYQGTQIKEKRDEDAGFDLCVPYDIMIPVSDTKIIPTDVKIQVPPNSFGWVTGKSSMAKQGLLINGGIIDEGYTGEIQVICTNIGKSNIKLIEGQKFAQLIILQHHSNSRQPWDENKISQRGDKGFGSTGVFWVENIQEAQDEHENWHTSPKILARNYKIPLTVAKQITQECPHCTKQGSGPAGCVMRSPNHWQADCTHLDNKIILHFVESNSGYIHATLLSKENALCTSLAILEWARLFSPKSLHTDNGTNFVAEPVVNLLKFLKIAHTTGIPYHPESQGIVERANRTLKEKIQSHRDNTQTLEAALQLALITCNKGRESMGGQTPWEVFITNQAQVIHEKLLLQQAQSSKKFCFYKIPGEHDWKGPTRVLWKGDGAVVVNDEGKGIIAVPLTRTKLLIKPN

SEQ ID NO: 1575 - protein, 1475 aa, Bovine immunodeficiency virus
MKRRELEKKLRKVRVTPQQDKYYTIGNLQWAIRMINLMGIKCVCDEECSAAEVALIITQFSALDLENSPIRGKEEVAIKNTLKVFWSLLAGYKPESTETALGYWEAFTYREREARADKEGEIKSIYPSLTQNTQNKKQTSNQTNTQSLPAITTQDGTPRFDPDLMKQLKIWSDATERNGVDLHAVNILGVITANLVQEEIKLLLNSTPKWRLDVQLIESKVREKENAHRTWKQHHPEAPKTDEIIGKGLSSAEQATLISVECRETFRQWVLQAAMEVAQAKHATPGPINIHQGPKEPYTDFINRLVAALEGMAAPETTKEYLLQHLSIDHANEDCQSILRPLGPNTPMEKKLEACRVVGSQKSKMQFLVAAMKEMGIQSPIPAVLPHTPEAYASQTSGPEDGRRCYGCGKTGHLKRNCKQQKCYHCGKPGHQARNCRSKNREVLLCPLWAEEPTTEQFSPEQHEFCDPICTPSYIRLDKQPFIKVFIGGRWVKGLVDTGADEVVLKNIHWDRIKGYPGTPIKQIGVNGVNVAKRKTHVEWRFKDKTGIIDVLFSDTPVNLFGRSLLRSIVTCFTLLVHTEKIEPLPVKVRGPGPKVPQWPLTKEKYQALKEIVKDLLAEGKISEAAWDNPYNTPVFVIKKKGTGRWRMLMDFRELNKITVKGQEFSTGLPYPPGIKECEHLTAIDIKDAYFTIPLHEDFRPFTAFSVVPVNREGPIERFQWNVLPQGWVCSPAIYQTTTQKIIENIKKSHPDVMLYQYMDDLLIGSNRDDHKQIVQEIRDKLGSYGFKTPDEKVQEERVKWIGFELTPKKWRFQPRQLKIKNPLTVNELQQLVGNCVWVQPEVKIPLYPLTDLLRDKTNLQEKIQLTPEAIKCVEEFNLKLKDPEWKDRIREGAELVIKIQMVPRGIVFDLLQDGNPIWGGVKGLNYDHSNKIKKILRTMNELNRTVVIMTGREASFLLPGSSEDWEAALQKEESLTQIFPVKFYRHSCRWTSICGPVRENLTTYYTDGGKKGKTAAAVYWCEGRTKSKVFPGTNQQAELKAICMALLDGPPKMNIITDSRYAYEGMREEPETWAREGIWLEIAKILPFKQYVGVGWVPAHKGIGGNTEADEGVKKALEQMAPCSPPEAILLKPGEKQNLETGIYMQGLRPQSFLPRADLPVAITGTMVDSELQLQLLNIGTEHIRIQKDEVFMTCFLENIPSATEDHERWHTSPDILVRQFHLPKRIAKEIVARCQECKRTTTSPVRGTNPRGRFLWQMDNTHWNKTIIWVAVETNSGLVEAQVIPEETALQVALCILQLIQRYTVLHLHSDNGPCFTAHRIENLCKYLGITKTTGIPYNPQSQGVVERAHRDLKDRLAAYQGDCETVEAALSLALVSLNKKRGGIGGHTPYEIYLESEHTKYQDQLEQQFSKQKIEKWCYVRNRRKEWKGPYKVLWDGDGAAVIEEEGKTALYPHRHMRFIPPPDSDIQDGSS

SEQ ID NO: 1576 - protein, 873 aa, unidentified
  source 1..873: note = Description of Unknown:Avian leukosis and sarcoma virus sequence
TVALHLAIPLKWKPDHTPVWIDQWPLPEGKLVALTQLVEKELQLGHIEPSLSCWNTPVFVIRKASGSYRLLHDLRAVNAKLVPFGAVQQGAPVLSALPRGWPLMVLDLKDCFFSIPLAEQDREAFAFTLPSVNNQAPARRFQWKVLPQGMTCSPTICQLVVGQVLEPLRLKHPSLRMLHYMDDLLLAASSHDGLEAAGEEVISTLERAGFTISPDKIQREPGVQYLGYKLGSTYVAPVGLVAEPRIATLWDVQKLVGSLQWLRPALGIPPRLMGPFYEQLRGSDPNEAREWNLDMKMAWREIVQLSTTAALERWDPALPLEGAVARCEQGAIGVLGQGLSTHPRPCLWLFSTQPTKAFTAWLEVLTLLITKLRASAVRTFGKEVDVLLLPACFREDLPLPEGILLALRGFAGKIRSSDTPSIFDIARPLHVSLKVRVTDHPVPGPTVFTDASSSTHKGVVVWREGPRWEIKEIADLGASVQQLEARAVAMALLLWPTTPTNVVTDSAFVAKMLLKMGQEGVPSTAAAFILEDALSQRSAMAAVLHVRSHSEVPGFFTEGNDVADSQATFQAYPLREAKDLHTALHIGPRALSKACNISMQQAREVVQTCPHCNSAPALEAGVNPRGLGPLQIWQTDFTLEPRMAPRSWLAVTVATASSAIVVTQHGRVTSVAARHHWATAIAVLGRPKAIKTDNGSCFTSKSTREWLARWGIAHTTGIPGNSQGQAMVERANRLLKDKIRVLAEGDGFMKRIPTGKQGELLAKAMYALNHFERGENTKTPIQKHWRPTVLTEGPPVKIRIETGEWEKGWNVLVWGRGYAAVKNRDTDKIIWVPSRKVKPDITQKDELTKKDEASPLFAGISDWAPWKGEQEGL

SEQ ID NO: 1577 - protein, 9 aa, unidentified
  source 1..9: note = Description of Unknown:LAGLIDADG family peptide sequence
LAGLIDADG

SEQ ID NO: 1578-1582 - skipped (5 entries)

SEQ ID NO: 1583 - protein, 4 aa, synthetic construct
  source 1..4: note = Description of Artificial Sequence: Synthetic peptide
SGGS

SEQ ID NO: 1584 - protein, 4 aa, synthetic construct
  source 1..4: note = Description of Artificial Sequence: Synthetic peptide
GGGS

SEQ ID NO: 1585 - protein, 1367 aa, synthetic construct
  source 1..1367: note = Description of Artificial Sequence: Synthetic polypeptide
DKKYSIGLDIGTNSVGWAVITDEYKVPSKKFKVLGNTDRHSIKKNLIGALLFDSGETAEATRLKRTARRRYTRRKNRICYLQEIFSNEMAKVDDSFFHRLEESFLVEEDKKHERHPIFGNIVDEVAYHEKYPTIYHLRKKLVDSTDKADLRLIYLALAHMIKFRGHFLIEGDLNPDNSDVDKLFIQLVQTYNQLFEENPINASGVDAKAILSARLSKSRRLENLIAQLPGEKKNGLFGNLIALSLGLTPNFKSNFDLAEDAKLQLSKDTYDDDLDNLLAQIGDQYADLFLAAKNLSDAILLSDILRVNTEITKAPLSASMIKRYDEHHQDLTLLKALVRQQLPEKYKEIFFDQSKNGYAGYIDGGASQEEFYKFIKPILEKMDGTEELLVKLNREDLLRKQRTFDNGSIPHQIHLGELHAILRRQEDFYPFLKDNREKIEKILTFRIPYYVGPLARGNSRFAWMTRKSEETITPWNFEEVVDKGASAQSFIERMTNFDKNLPNEKVLPKHSLLYEYFTVYNELTKVKYVTEGMRKPAFLSGEQKKAIVDLLFKTNRKVTVKQLKEDYFKKIECFDSVEISGVEDRFNASLGTYHDLLKIIKDKDFLDNEENEDILEDIVLTLTLFEDREMIEERLKTYAHLFDDKVMKQLKRRRYTGWGRLSRKLINGIRDKQSGKTILDFLKSDGFANRNFMQLIHDDSLTFKEDIQKAQVSGQGDSLHEHIANLAGSPAIKKGILQTVKVVDELVKVMGRHKPENIVIEMARENQTTQKGQKNSRERMKRIEEGIKELGSQILKEHPVENTQLQNEKLYLYYLQNGRDMYVDQELDINRLSDYDVDAIVPQSFLKDDSIDNKVLTRSDKNRGKSDNVPSEEVVKKMKNYWRQLLNAKLITQRKFDNLTKAERGGLSELDKAGFIKRQLVETRQITKHVAQILDSRMNTKYDENDKLIREVKVITLKSKLVSDFRKDFQFYKVREINNYHHAHDAYLNAVVGTALIKKYPKLESEFVYGDYKVYDVRKMIAKSEQEIGKATAKYFFYSNIMNFFKTEITLANGEIRKRPLIETNGETGEIVWDKGRDFATVRKVLSMPQVNIVKKTEVQTGGFSKESILPKRNSDKLIARKKDWDPKKYGGFDSPTVAYSVLVVAKVEKGKSKKLKSVKELLGITIMERSSFEKNPIDFLEAKGYKEVKKDLIIKLPKYSLFELENGRKRMLASAGELQKGNELALPSKYVNFLYLASHYEKLKGSPEDNEQKQLFVEQHKHYLDEIIEQISEFSKRVILADANLDKVLSAYNKHRDKPIREQAENIIHLFTLTNLGAPAAFKYFDTTIDRKRYTSTKEVLDATLIHQSITGLYETRIDLSQLGGD

SEQ ID NO: 1586 - protein, 672 aa, Murine leukemia virus
TLNIEDEYRLHETSKEPDVSLGSTWLSDFPQAWAETGGMGLAVRQAPLIIPLKATSTPVSIKQYPMSQEARLGIKPHIQRLLDQGILVPCQSPWNTPLLPVKKPGTNDYRPVQDLREVNKRVEDIHPTVPNPYNLLSGLPPSHQWYTVLDLKDAFFCLRLHPTSQPLFAFEWRDPEMGISGQLTWTRLPQGFKNSPTLFDEALHRDLADFRIQHPDLILLQYVDDLLLAATSELDCQQGTRALLQTLGNLGYRASAKKAQICQKQVKYLGYLLKEGQRWLTEARKETVMGQPTPKTPRQLREFLGTAGFCRLWIPGFAEMAAPLYPLTKTGTLFNWGPDQQKAYQEIKQALLTAPALGLPDLTKPFELFVDEKQGYAKGVLTQKLGPWRRPVAYLSKKLDPVAAGWPPCLRMVAAIAVLTKDAGKLTMGQPLVILAPHAVEALVKQPPDRWLSNARMTHYQALLLDTDRVQFGPVVALNPATLLPLPEEGLQHNCLDILAEAHGTRPDLTDQPLPDADHTWYTDGSSLLQEGQRKAGAAVTTETEVIWAKALPAGTSAQRAELIALTQALKMAEGKKLNVYTDSRYAFATAHIHGEIYRRRGLLTSEGKEIKNKDEILALLKALFLPKRLSIIHCPGHQKGHSAEARGNRMADQAARKAAITETPDTSTLLI

SEQ ID NO: 1587 - protein, 660 aa, Murine leukemia virus
TLNIEDEHRLHETSKEPDVSLGSTWLSDFPQAWAETGGMGLAVRQAPLIIPLKATSTPVSIKQYPMSQEARLGIKPHIQRLLDQGILVPCQSPWNTPLLPVKKPGTNDYRPVQDLREVNKRVEDIHPTVPNPYNLLSGLPPSHQWYTVLDLKDAFFCLRLHPTSQPLFAFEWRDPEMGISGQLTWTRLPQGFKNSPTLFDEALHRDLADFRIQHPDLILLQYVDDLLLAATSELDCQQGTRALLQTLGNLGYRASAKKAQICQKQVKYLGYLLKEGQRWLTEARKETVMGQPTPKTPRQLREFLGTAGFCRLWIPGFAEMAAPLYPLTKTGTLFNWGPDQQKAYQEIKQALLTAPALGLPDLTKPFELFVDEKQGYAKGVLTQKLGPWRRPVAYLSKKLDPVAAGWPPCLRMVAAIAVLTKDAGKLTMGQPLVILAPHAVEALVKQPPDRWLSNARMTHYQALLLDTDRVQFGPVVALNPATLLPLPEEGLQHNCLDILAEAHGTRPDLTDQPLPDADHTWYTDGSSLLQEGQRKAGAAVTTETEVIWAKALPAGTSAQRAELIALTQALKMAEGKKLNVYTDSRYAFATAHIHGEIYRRRGLLTSEGKEIKNKDEILALLKALFLPKRLSIIHCPGHQKGHSAEARGNRMADQAARKAA

SEQ ID NO: 1588 - protein, 672 aa, Murine leukemia virus
TLNIEDEYRLHETSKEPDVSLGSTWLSDFPQAWAETGGMGLAVRQAPLIIPLKATSTPVSIKQYPMSQEARLGIKPHIQRLLDQGILVPCQSPWNTPLLPVKKPGTNDYRPVQDLREVNKRVEDIHPTVPNPYNLLSGLPPSHQWYTVLDLKDAFFCLRLHPTSQPLFAFEWRDPEMGISGQLTWTRLPQGFKNSPTLFNEALHRDLADFRIQHPDLILLQYVDDLLLAATSELDCQQGTRALLQTLGNLGYRASAKKAQICQKQVKYLGYLLKEGQRWLTEARKETVMGQPTPKTPRQLREFLGKAGFCRLFIPGFAEMAAPLYPLTKPGTLFNWGPDQQKAYQEIKQALLTAPALGLPDLTKPFELFVDEKQGYAKGVLTQKLGPWRRPVAYLSKKLDPVAAGWPPCLRMVAAIAVLTKDAGKLTMGQPLVILAPHAVEALVKQPPDRWLSNARMTHYQALLLDTDRVQFGPVVALNPATLLPLPEEGLQHNCLDILAEAHGTRPDLTDQPLPDADHTWYTDGSSLLQEGQRKAGAAVTTETEVIWAKALPAGTSAQRAELIALTQALKMAEGKKLNVYTDSRYAFATAHIHGEIYRRRGWLTSEGKEIKNKDEILALLKALFLPKRLSIIHCPGHQKGHSAEARGNRMADQAARKAAITETPDTSTLLI

SEQ ID NO: 1589 - protein, 33 aa, synthetic construct
  source 1..33: note = Description of Artificial Sequence: Synthetic polypeptide
SGGSSGGSSGSETPGTSESATPESSGGSSGGSS

SEQ ID NO: 1590 - protein, 1369 aa, synthetic construct
  source 1..1369: note = Description of Artificial Sequence: Synthetic polypeptide
SMDKKYSIGLAIGTNSVGWAVITDDYKVPSKKFKVLGNTDRHSIKKNLIGALLFDSGETAEATRLKRTARRRYTRRKNRICYLQEIFSNEMAKVDDSFFHRLEESFLVEEDKKHERHPIFGNIVDEVAYHEKYPTIYHLRKKLVDSTDKADLRLIYLALAHMIKFRGHFLIEGDLNPDNSDVDKLFIQLVQTYNQLFEENPINASGVDAKAILSARLSKSRRLENLIAQLPGEKKNGLFGNLIALSLGLTPNFKSNFDLAEDAKLQLSKDTYDDDLDNLLAQIGDQYADLFLAAKNLSDAILLSDILRVNTEITKAPLSASMIKRYDEHHQDLTLLKALVRQQLPEKYKEIFFDQSKNGYAGYIDGGASQEEFYKFIKPILEKMDGTEELLVKLNREDLLRKQRTFDNGSIPHQIHLGELHAILRRQEDFYPFLKDNREKIEKILTFRIPYYVGPLARGNSRFAWMTRKSEETITPWNFEEVVDKGASAQSFIERMTNFDKNLPNEKVLPKHSLLYEYFTVYNELTKVKYVTEGMRKPAFLSGEQKKAIVDLLFKTNRKVTVKQLKEDYFKKIECFDSVEISGVEDRFNASLGTYHDLLKIIKDKDFLDNEENEDILEDIVLTLTLFEDREMIEERLKTYAHLFDDKVMKQLKRRRYTGWGRLSRKLINGIRDKQSGKTILDFLKSDGFANRNFMQLIHDDSLTFKEDIQKAQVSGQGDSLHEHIANLAGSPAIKKGILQTVKVVDELVKVMGRHKPENIVIEMARENQTTQKGQKNSRERMKRIEEGIKELGSQILKEHPVENTQLQNEKLYLYYLQNGRDMYVDQELDINRLSDYDVDAIVPQSFLKDDSIDNKVLTRSDKNRGKSDNVPSEEVVKKMKNYWRQLLNAKLITQRKFDNLTKAERGGLSELDKAGFIKRQLVETRQITKHVAQILDSRMNTKYDENDKLIREVKVITLKSKLVSDFRKDFQFYKVREINNYHHAHDAYLNAVVGTALIKKYPKLESEFVYGDYKVYDVRKMIAKSEQEIGKATAKYFFYSNIMNFFKTEITLANGEIRKRPLIETNGETGEIVWDKGRDFATVRKVLSMPQVNIVKKTEVQTGGFSKESILPKRNSDKLIARKKDWDPKKYGGFDSPTVAYSVLVVAKVEKGKSKKLKSVKELLGITIMERSSFEKNPIDFLEAKGYKEVKKDLIIKLPKYSLFELENGRKRMLASAGELQKGNELALPSKYVNFLYLASHYEKLKGSPEDNEQKQLFVEQHKHYLDEIIEQISEFSKRVILADANLDKVLSAYNKHRDKPIREQAENIIHLFTLTNLGAPAAFKYFDTTIDRKRYTSTKEVLDATLIHQSITGLYETRIDLSQLGGD

SEQ ID NO: 1591 - DNA, 76 bp, synthetic construct
  source 1..76: mol_type = other DNA; note = Description of Artificial Sequence: Synthetic oligonucleotide
gttttagagctagaaatagcaagttaaaataaggctagtccgttatcaacttgaaaaagtgggaccgagtcggtcc

SEQ ID NO: 1592 - protein, 30 aa, synthetic construct
  source 1..30: note = Description of Artificial Sequence: Synthetic polypeptide
MDSLLMNRRKFLYQFKNVRWAKGRRETYLC

SEQ ID NO: 1593 - protein, 28 aa, synthetic construct
  source 1..28: note = Description of Artificial Sequence: Synthetic peptide
PKKRKVEGADKRTADGSEFESPKKKRKV

SEQ ID NO: 1594 - protein, 22 aa, synthetic construct
  source 1..22: note = Description of Artificial Sequence: Synthetic peptide
RKSGKIAAIWKRPRKPKKKRKV

SEQ ID NO: 1595 - protein, 18 aa, synthetic construct
  source 1..18: note = Description of Artificial Sequence: Synthetic peptide
KRTADGSEFESPKKKRKV

SEQ ID NO: 1596 - protein, 17 aa, synthetic construct
  source 1..17: note = Description of Artificial Sequence: Synthetic peptide
KKTELQTTNAENKTKKL

SEQ ID NO: 1597 - protein, 19 aa, synthetic construct
  source 1..19: note = Description of Artificial Sequence: Synthetic peptide
KRGINDRNFWRGENGRKTR

SEQ ID NO: 1598 - protein, 16 aa, synthetic construct
  source 1..16: note = Description of Artificial Sequence: Synthetic peptide
KRPAATKKAGQAKKKK

SEQ ID NO: 1599 - DNA, 50 bp, synthetic construct
  source 1..50: mol_type = other DNA; note = Description of Artificial Sequence: Synthetic oligonucleotide
  misc_difference 1: note = a, c, t, g, unknown or other
  misc_difference 2: note = a, c, t, g, unknown or other
  misc_difference 3: note = a, c, t, g, unknown or other
  misc_difference 4: note = a, c, t, g, unknown or other
  misc_difference 5: note = a, c, t, g, unknown or other
  misc_difference 6: note = a, c, t, g, unknown or other
  misc_difference 7: note = a, c, t, g, unknown or other
  misc_difference 44: note = a, c, t, g, unknown or other
  misc_difference 45: note = a, c, t, g, unknown or other
  misc_difference 46: note = a, c, t, g, unknown or other
  misc_difference 47: note = a, c, t, g, unknown or other
  misc_difference 48: note = a, c, t, g, unknown or other
  misc_difference 49: note = a, c, t, g, unknown or other
  misc_difference 50: note = a, c, t, g, unknown or other
nnnnnnnatgatgatgatgatgatgatgatgatgatgatgatgnnnnnnn

SEQ ID NO: 1600 - protein, 29 aa, synthetic construct
  source 1..29: note = Description of Artificial Sequence: Synthetic peptide
PKKKRKVEGADKRTADGSEFESPKKKRKV

SEQ ID NO: 1601 - DNA, 26 bp, Homo sapiens
  source 1..26: mol_type = unassigned DNA
ctgacccttctctctctcccccagag

SEQ ID NO: 1602 - DNA, 15 bp, Homo sapiens
  source 1..15: mol_type = unassigned DNA
tttctctcccacaag

SEQ ID NO: 1603 - RNA, 47 nt, synthetic construct
  source 1..47: mol_type = other RNA; note = Description of Artificial Sequence: Synthetic oligonucleotide
gggaaataagagagaaaagaagagtaagaagaaatataagagccacc

SEQ ID NO: 1604 - RNA, 110 nt, synthetic construct
  source 1..110: mol_type = other RNA; note = Description of Artificial Sequence: Synthetic polynucleotide
tgataataggctggagcctcggtggccatgcttcttgccccttgggcctccccccagcccctcctccccttcctgcacccgtacccccgtggtctttgaataaagtctga

SEQ ID NO: 1605 - DNA, 12 bp, Homo sapiens
  source 1..12: mol_type = unassigned DNA
ctggggctgggg

SEQ ID NO: 1606 - DNA, 12 bp, unidentified
  source 1..12: mol_type = unassigned DNA; note = Description of Unknown:Myoclonic epilepsy of Unverricht and Lundborg repeat sequence
ccccgccccgcg

SEQ ID NO: 1607 - DNA, 133 bp, synthetic construct
  source 1..133: mol_type = other DNA; note = Description of Artificial Sequence: Synthetic polynucleotide
tcccctccaggccgtgcatagttttagagctagaaatagcaagttaaaataaggctagtccgttatcaacttgaaaaagtgggaccgagtcggtcctcgtcgatggtcagcacagccttatgcacggcctgga

SEQ ID NO: 1608 - DNA, 20 bp, synthetic construct
  source 1..20: mol_type = other DNA; note = Description of Artificial Sequence: Synthetic oligonucleotide
tttgttgaacttgacctcgg

SEQ ID NO: 1609 - DNA, 118 bp, synthetic construct
  source 1..118: mol_type = other DNA; note = Description of Artificial Sequence: Synthetic polynucleotide
accattaaagaaaatatcatgttttagagctagaaatagcaagttaaaataaggctagtccgttatcaacttgaaaaagtgggaccgagtcggtccaccaaagatgatattttcttta

SEQ ID NO: 1610 - DNA, 20 bp, synthetic construct
  source 1..20: mol_type = other DNA; note = Description of Artificial Sequence: Synthetic oligonucleotide
aaagatgatattttctttaa

SEQ ID NO: 1611 - DNA, 118 bp, synthetic construct
  source 1..118: mol_type = other DNA; note = Description of Artificial Sequence: Synthetic polynucleotide
gtaacggcagacttctccacgttttagagctagaaatagcaagttaaaataaggctagtccgttatcaacttgaaaaagtgggaccgagtcggtccgactcctgaggagaagtctgcc

SEQ ID NO: 1612 - DNA, 20 bp, synthetic construct
  source 1..20: mol_type = other DNA; note = Description of Artificial Sequence: Synthetic oligonucleotide
tggtgaggccctgggcaggt

SEQ ID NO: 1613 - DNA, 118 bp, synthetic construct
  source 1..118: mol_type = other DNA; note = Description of Artificial Sequence: Synthetic polynucleotide
ttggtgactgccacgcccaagttttagagctagaaatagcaagttaaaataaggctagtccgttatcaacttgaaaaagtgggaccgagtcggtccacaccccttgggcgtggcagtc

SEQ ID NO: 1614 - DNA, 20 bp, synthetic construct
  source 1..20: mol_type = other DNA; note = Description of Artificial Sequence: Synthetic oligonucleotide
ggccagcagtgaacacccct

SEQ ID NO: 1615 - DNA, 118 bp, synthetic construct
  source 1..118: mol_type = other DNA; note = Description of Artificial Sequence: Synthetic polynucleotide
actcaggaacactgctggttgttttagagctagaaatagcaagttaaaataaggctagtccgttatcaacttgaaaaagtgggaccgagtcggtccttcactgaaccagcagtgttcc

SEQ ID NO: 1616 - DNA, 20 bp, synthetic construct
  source 1..20: mol_type = other DNA; note = Description of Artificial Sequence: Synthetic oligonucleotide
ttggttgaaaatgattttgt

SEQ ID NO: 1617 - DNA, 129 bp, synthetic construct
  source 1..129: mol_type = other DNA; note = Description of Artificial Sequence: Synthetic polynucleotide
ccagggaaaacgcacccacggttttagagctagaaatagcaagttaaaataaggctagtccgttatcaacttgaaaaagtgggaccgagtcggtcctcccagcggtaggtgccccgtgggtgcgttttc

SEQ ID NO: 1618 - DNA, 20 bp, synthetic construct
  source 1..20: mol_type = other DNA; note = Description of Artificial Sequence: Synthetic oligonucleotide
ctccttctttgcgctcccag

SEQ ID NO: 1619 - DNA, 118 bp, synthetic construct
  source 1..118: mol_type = other DNA; note = Description of Artificial Sequence: Synthetic polynucleotide
gccctccccttctctgcccagttttagagctagaaatagcaagttaaaataaggctagtccgttatcaacttgaaaaagtgggaccgagtcggtccggtactgtgggcagagaagggg

SEQ ID NO: 1620 - DNA, 20 bp, synthetic construct
  source 1..20: mol_type = other DNA; note = Description of Artificial Sequence: Synthetic oligonucleotide
tcaggcaacgccaggtactg

SEQ ID NO: 1621 - DNA, 188 bp, synthetic construct
  source 1..188: mol_type = other DNA; note = Description of Artificial Sequence: Synthetic polynucleotide
ctcgaagggtccttgtagccgttttagagctagaaatagcaagttaaaataaggctagtccgttatcaacttgaaaaagtgggaccgagtcggtccgtgatccccccagcagcagcagcagcagcagcagcagcagcagcagcagcagcagcagcagcagcagcagcattcccggctacaaggaccct

SEQ ID NO: 1622 - DNA, 20 bp, synthetic construct
  source 1..20: mol_type = other DNA; note = Description of Artificial Sequence: Synthetic oligonucleotide
atcacaggactggagctggg

SEQ ID NO: 1623 - DNA, 252 bp, synthetic construct
  source 1..252: mol_type = other DNA; note = Description of Artificial Sequence: Synthetic polynucleotide
accactgcactccagcctaggttttagagctagaaatagcaagttaaaataaggctagtccgttatcaacttgaaaaagtgggaccgagtcggtccgtgtctgtctgtctgtctgtctgtctgtctgtctgtctgtctgcctgcctgcctgcctgcctgcctgcctgcctggctgcctgtctgcctgtctgcctgcctgcctgcctgcctgcctgcctgtctgtctcactttgtcccctaggctggagtgca

SEQ ID NO: 1624 - DNA, 20 bp, synthetic construct
  source 1..20: mol_type = other DNA; note = Description of Artificial Sequence: Synthetic oligonucleotide
gcctcagcctcctgagtagc

SEQ ID NO: 1625 - DNA, 188 bp, synthetic construct
  source 1..188: mol_type = other DNA; note = Description of Artificial Sequence: Synthetic polynucleotide
gggggcgtgcggcagcgcgggttttagagctagaaatagcaagttaaaataaggctagtccgttatcaacttgaaaaagtgggaccgagtcggtcctgcgggcgctcgaggcccagccgccgccgccgccgccgccgccgccgcctccgccgccgccgccgccgccgccgccgccgcgctgccgcacg

SEQ ID NO: 1626 - DNA, 20 bp, synthetic construct
  source 1..20: mol_type = other DNA; note = Description of Artificial Sequence: Synthetic oligonucleotide
gctcagaggcggccctccac

SEQ ID NO: 1627 - DNA, 188 bp, synthetic construct
  source 1..188: mol_type = other DNA; note = Description of Artificial Sequence: Synthetic polynucleotide
caggcgcgcgacaccacgccgttttagagctagaaatagcaagttaaaataaggctagtccgttatcaacttgaaaaagtgggaccgagtcggtccaacccagtatctactaaaaaatacaaaaaaaaaaaaaaaagaagaagaagaagaagaaaataaagaaaagttagccgggcgtggtgtcgcgc

SEQ ID NO: 1628 - DNA, 20 bp, synthetic construct
  source 1..20: mol_type = other DNA; note = Description of Artificial Sequence: Synthetic oligonucleotide
cgcttgagcccgggaggcag

SEQ ID NO: 1629 - DNA, 221 bp, synthetic construct
  source 1..221: mol_type = other DNA; note = Description of Artificial Sequence: Synthetic polynucleotide
ggcggctgaggaagctgagggttttagagctagaaatagcaagttaaaataaggctagtccgttatcaacttgaaaaagtgggaccgagtcggtccagtccctcaagtccttccagcagcagcagcagcagcagcagcagcagcagcagcagcagcagcagcagcagcagcaacagccgccaccgccgccgccgccgccgccgcctcctcagcttcctcag

SEQ ID NO: 1630 - DNA, 20 bp, synthetic construct
  source 1..20: mol_type = other DNA; note = Description of Artificial Sequence: Synthetic oligonucleotide
cgctgcaccgaccgtgagtt

SEQ ID NO: 1631 - DNA, 214 bp, synthetic construct
  source 1..214: mol_type = other DNA; note = Description of Artificial Sequence: Synthetic polynucleotide
tgagccccggagccctgctggttttagagctagaaatagcaagttaaaataaggctagtccgttatcaacttgaaaaagtgggaccgagtcggtccacaaggctgagcagcagcagcagcagcagcagcagcagcagcagcagcatcagcatcagcagcagcagcagcagcagcagcagcagcagcagcagcagcacctcagcagggctccggg

SEQ ID NO: 1632 - DNA, 20 bp, synthetic construct
  source 1..20: mol_type = other DNA; note = Description of Artificial Sequence: Synthetic oligonucleotide
tccagttctccgcagaacac

SEQ ID NO: 1633 - DNA, 62 bp, synthetic construct
  source 1..62: mol_type = other DNA; note = Description of Artificial Sequence: Synthetic oligonucleotide
cactcctccccatcctctccctctgtccctctgtccctctgaccctgcactgtcccagcacc

SEQ ID NO: 1634 - DNA, 122 bp, synthetic construct
  source 1..122: mol_type = other DNA; note = Description of Artificial Sequence: Synthetic polynucleotide
caggacacagccttggatcaggacagagacttgggggccatcctgcccctccaacccgacatgtgtacctcagctttttccctcacttgcatcaataaagcttctgtgtttggaacagctaa

SEQ ID NO: 1635 - DNA, 43 bp, synthetic construct
  source 1..43: mol_type = other DNA; note = Description of Artificial Sequence: Synthetic oligonucleotide
  misc_difference 37: note = a, c, t, g, unknown or other
  misc_difference 38: note = a, c, t, g, unknown or other
  misc_difference 39: note = a, c, t, g, unknown or other
  misc_difference 40: note = a, c, t, g, unknown or other
  misc_difference 41: note = a, c, t, g, unknown or other
  misc_difference 42: note = a, c, t, g, unknown or other
  misc_difference 43: note = a, c, t, g, unknown or other
atgatgatgatgatgatgatgatgatgatgatgatgnnnnnnn

SEQ ID NO: 1636 - DNA, 22 bp, synthetic construct
  source 1..22: mol_type = other DNA; note = Description of Artificial Sequence: Synthetic oligonucleotide
  misc_difference 1: note = a, c, t, g, unknown or other
  misc_difference 2: note = a, c, t, g, unknown or other
  misc_difference 3: note = a, c, t, g, unknown or other
  misc_difference 4: note = a, c, t, g, unknown or other
  misc_difference 5: note = a, c, t, g, unknown or other
  misc_difference 6: note = a, c, t, g, unknown or other
  misc_difference 7: note = a, c, t, g, unknown or other
  misc_difference 20: note = a, c, t, g, unknown or other
  misc_difference 21: note = a, c, t, g, unknown or other
  misc_difference 22: note = a, c, t, g, unknown or other
nnnnnnncatcatcatcatnnn

SEQ ID NO: 1637 - DNA, 306 bp, synthetic construct
  source 1..306: mol_type = other DNA; note = Description of Artificial Sequence: Synthetic polynucleotide
tgcctgtcatacgaaaccgagatactgacagtagaatatggccttctgccaatcgggaagattgtggagaaacggatagaatgcacagtttactctgtcgataacaatggtaacatttatactcagccagttgcccagtggcacgaccggggagagcaggaagtattcgaatactgtctggaggatggaagtctcattagggccactaaggaccacaaatttatgacagtcgatggccagatgctgcctatagacgaaatctttgagcgagagttggacctcatgcgagttgacaaccttcctaat

SEQ ID NO: 1638 - protein, 102 aa, synthetic construct
  source 1..102: note = Description of Artificial Sequence: Synthetic polypeptide
CLSYETEILTVEYGLLPIGKIVEKRIECTVYSVDNNGNIYTQPVAQWHDRGEQEVFEYCLEDGSLIRATKDHKFMTVDGQMLPIDEIFERELDLMRVDNLPN

SEQ ID NO: 1639 - DNA, 108 bp, synthetic construct
  source 1..108: mol_type = other DNA; note = Description of Artificial Sequence: Synthetic polynucleotide
atgatcaagatagctacaaggaagtatcttggcaaacaaaacgtttatgatattggagtcgaaagagatcacaactttgctctgaagaacggattcatagcttctaat

SEQ ID NO: 1640 - protein, 36 aa, synthetic construct
  source 1..36: note = Description of Artificial Sequence: Synthetic polypeptide
MIKIATRKYLGKQNVYDIGVERDHNFALKNGFIASN

SEQ ID NO: 1641 - DNA, 303 bp, synthetic construct
  source 1..303: mol_type = other DNA; note = Description of Artificial Sequence: Synthetic polynucleotide
tgcctgtcttatgataccgagatacttaccgttgaatatggcttcttgcctattggaaagattgtcgaagagagaattgaatgcacagtatatactgtagacaagaatggtttcgtttacacacagcccattgctcaatggcacaatcgcggcgaacaagaagtatttgagtactgtctcgaggatggaagcatcatacgagcaactaaagatcataaattcatgaccactgacgggcagatgttgccaatagatgagatattcgagcggggcttggatctcaaacaagtggatggattgcca

SEQ ID NO: 1642 - protein, 101 aa, synthetic construct
  source 1..101: note = Description of Artificial Sequence: Synthetic polypeptide
CLSYDTEILTVEYGFLPIGKIVEERIECTVYTVDKNGFVYTQPIAQWHNRGEQEVFEYCLEDGSIIRATKDHKFMTTDGQMLPIDEIFERGLDLKQVDGLP

SEQ ID NO: 1643 - DNA, 159 bp, synthetic construct
  source 1..159: mol_type = other DNA; note = Description of Artificial Sequence: Synthetic polynucleotide
atgaagaggactgccgatggatcagagtttgaatctcccaagaagaagaggaaagtaaagataatatctcgaaaaagtcttggtacccaaaatgtctatgatattggagtggagaaagatcacaacttccttctcaagaacggtctcgtagccagcaac

SEQ ID NO: 1644 - protein, 53 aa, synthetic construct
  source 1..53: note = Description of Artificial Sequence: Synthetic polypeptide
MKRTADGSEFESPKKKRKVKIISRKSLGTQNVYDIGVEKDHNFLLKNGLVASN

SEQ ID NO: 1645 - DNA, 50 bp, synthetic construct
  source 1..50: mol_type = other DNA; note = Description of Artificial Sequence: Synthetic oligonucleotide
  misc_difference 1: note = a, c, t, g, unknown or other
  misc_difference 2: note = a, c, t, g, unknown or other
  misc_difference 3: note = a, c, t, g, unknown or other
  misc_difference 4: note = a, c, t, g, unknown or other
  misc_difference 5: note = a, c, t, g, unknown or other
  misc_difference 6: note = a, c, t, g, unknown or other
  misc_difference 7: note = a, c, t, g, unknown or other
  misc_difference 44: note = a, c, t, g, unknown or other
  misc_difference 45: note = a, c, t, g, unknown or other
  misc_difference 46: note = a, c, t, g, unknown or other
  misc_difference 47: note = a, c, t, g, unknown or other
  misc_difference 48: note = a, c, t, g, unknown or other
  misc_difference 49: note = a, c, t, g, unknown or other
  misc_difference 50: note = a, c, t, g, unknown or other
nnnnnnncatcatcatcatcatcatcatcatcatcatcatcatnnnnnnn

SEQ ID NO: 1646 - protein, 1288 aa, synthetic construct
  source 1..1288: note = Description of Artificial Sequence: Synthetic polypeptide
MASCPKPGPPVSAGAMSLESGLTTHSVLAIERGPNSLANSGSDFGGGGLGLPLRLLRVSVGTQTSRSDWVDLVSWSHPGPTSKSQQVDLVSLFPKHRVDLLSKNDQVDLVAQFLPSKFPPNLAENDLALLVNLEFYRSDLHVYECVHFAAHWEGLSGLPEVYEQLAPQPCVGETLHSSLPRDSELFVPEEGSSEKESEDAPKTSPPTPGKHGLEQTGEEKVMVTVPDKNPPCPCCGTRVNSVLNLIEHLKVSHGKRGVCFRCAKCGKENSNYHSVVCHFPKCRGPETEKAPAGEWICEVCNRDFTTKIGLGQHKRLAHPAVRNQERIVASQPKETSNRGAHKRCWTKEEEELLIRLEAQFEGNKNINKLIAEHITTKTAKQISDKRRLLSRKPAEEPREEPGTCHHTRRAAGGGSCFGCLESISQIRTATRDKKDTVTREKHPKKPFQKWMKDRAIKKGNYLRFQRLFYLDRGKLAKIILDDIECLSCDIPLSEIYSVFKTRWETTGSFKSLGDFKTYGKADNTAFRELITAKEIEKNVQEMSKGSAPGPDGITLGDVVKMDPEFSRTMEIFNLWLTTGKIPDMVRGCRTVLIPKSSKPDRLKDINNWRPITIGSILLRLFSRIVTARLSKACPLNPRQRGFIRAAGCSENLKLLQTIIWSAKREHRPLGVVFVDIAKAFDTVSHQHIIHALQQREVDPHIVGLVSNMYENISTYITTKRNTHTDKIQIRVGVKQGDPMSPLLFNLAMDPLLCKLEESGKGYHRGQSSITAMAFADDLVLLSDSWENMNTNISILETFCNLTGLKTQGQKCHGFYIKPTKDSYTINDCAAWTINGTPLNMIDPGESEKYLGLQFDPWIGIARSGLSTKLDFWLQRIDQAPLKPLQKTDILKTYTIPRLIYIADHSEVKTALLETLDQKIRTAVKEWLHLPPCTCDAILYSSTRDGGLGITKLAGLIPSVQARRLHRIAQSSDDTMKCFMEKEKMEQLHKKLWIQAGGDRENIPSIWEAPPSSEPPNNVSTNSEWEAPTQKDKFPKPCNWRKNEFKKWTKLASQGRGIVNFERDKISNHWIQYYRRIPHRKLLTALQLRANVYPTREFLARGRQDQYIKACRHCDADIESCAHIIGNCPVTQDARIKRHNYICELLLEEAKKKDWVVFKEPHIRDSNKELYKPDLIFVKDARALVVDVTVRYEAAKSSLEEAAAEKVRKYKHLETEVRHLTNAKDVTFVGFPLGARGKWHQDNFKLLTELGLSKSRQVKMAETFSTVALFSSVDIVHMFASRARKSMVM

SEQ ID NO: 1647 - protein, 1276 aa, synthetic construct
  source 1..1276: note = Description of Artificial Sequence: Synthetic polypeptide
MASCPKPGPPVSAGAMSLESGLTTHSVLAIERGPNSLANSGSDFGGGGLGLPLRLLRVSVGTQTSRSDWVDLVSWSHPGPTSKSQQVDLVSLFPKHRVDLLSKNDQVDLVAQFLPSKFPPNLAENDLALLVNLEFYRSDLHVYECVHFAAHWEGLSGLPEVYEQLAPQPCVGETLHSSLPRDSELFVPEEGSSEKESEDAPKTSPPTPGKHGLEQTGEEKVMVTVPDKNPPCPCCGTRVNSVLNLIEHLKVSHGKRGVCFRCAKCGKENSNYHSVVCHFPKCRGPETEKAPAGEWICEVCNRDFTTKIGLGQHKRLAHPAVRNQERIVASQPKETSNRGAHKRCWTKEEEELLIRLEAQFEGNKNINKLIAEHITTKTAKQISDKRRLLSRKPAEEPREEPGTCHHTRRAAGGGSTATRDKKDTVTREKHPKKPFQKWMKDRAIKKGNYLRFQRLFYLDRGKLAKIILDDIECLSCDIPLSEIYSVFKTRWETTGSFKSLGDFKTYGKADNTAFRELITAKEIEKNVQEMSKGSAPGPDGITLGDVVKMDPEFSRTMEIFNLWLTTGKIPDMVRGCRTVLIPKSSKPDRLKDINNWRPITIGSILLRLFSRIVTARLSKACPLNPRQRGFIRAAGCSENLKLLQTIIWSAKREHRPLGVVFVDIAKAFDTVSHQHIIHALQQREVDPHIVGLVSNMYENISTYITTKRNTHTDKIQIRVGVKQGDPMSPLLFNLAMDPLLCKLEESGKGYHRGQSSITAMAFADDLVLLSDSWENMNTNISILETFCNLTGLKTQGQKCHGFYIKPTKDSYTINDCAAWTINGTPLNMIDPGESEKYLGLQFDPWIGIARSGLSTKLDFWLQRIDQAPLKPLQKTDILKTYTIPRLIYIADHSEVKTALLETLDQKIRTAVKEWLHLPPCTCDAILYSSTRDGGLGITKLAGLIPSVQARRLHRIAQSSDDTMKCFMEKEKMEQLHKKLWIQAGGDRENIPSIWEAPPSSEPPNNVSTNSEWEAPTQKDKFPKPCNWRKNEFKKWTKLASQGRGIVNFERDKISNHWIQYYRRIPHRKLLTALQLRANVYPTREFLARGRQDQYIKACRHCDADIESCAHIIGNCPVTQDARIKRHNYICELLLEEAKKKDWVVFKEPHIRDSNKELYKPDLIFVKDARALVVDVTVRYEAAKSSLEEAAAEKVRKYKHLETEVRHLTNAKDVTFVGFPLGARGKWHQDNFKLLTELGLSKSRQVKMAETFSTVALFSSVDIVHMFASRARKSMVM

SEQ ID NO: 1648 - protein, 1300 aa, synthetic construct
  source 1..1300: note = Description of Artificial Sequence: Synthetic polypeptide
MASCPKPGPPVSAGAMSLESGLTTHSVLAIERGPNSLANSGSDFGGGGLGLPLRLLRVSVGTQTSRSDWVDLVSWSHPGPTSKSQQVDLVSLFPKHRVDLLSKNDQVDLVAQFLPSKFPPNLAENDLALLVNLEFYRSDLHVYECVHFAAHWEGLSGLPEVYEQLAPQPCVGETLHSSLPRDSELFVPEEGSSEKESEDAPKTSPPTPGKHGLEQTGEEKVMVTVPDKNPPCPCCGTRVNSVLNLIEHLKVSHGKRGVCFRCAKCGKENSNYHSVVCHFPKCRGPETEKAPAGEWICEVCNRDFTTKIGLGQHKRLAHPAVRNQERIVASQPKETSNRGAHKRCWTKEEEELLIRLEAQFEGNKNINKLIAEHITTKTAKQISDKRRLLSRKPAEEPREEPGTCHHTRRAASGSETPGTSESATPESCFGCLESISQIRTATRDKKDTVTREKHPKKPFQKWMKDRAIKKGNYLRFQRLFYLDRGKLAKIILDDIECLSCDIPLSEIYSVFKTRWETTGSFKSLGDFKTYGKADNTAFRELITAKEIEKNVQEMSKGSAPGPDGITLGDVVKMDPEFSRTMEIFNLWLTTGKIPDMVRGCRTVLIPKSSKPDRLKDINNWRPITIGSILLRLFSRIVTARLSKACPLNPRQRGFIRAAGCSENLKLLQTIIWSAKREHRPLGVVFVDIAKAFDTVSHQHIIHALQQREVDPHIVGLVSNMYENISTYITTKRNTHTDKIQIRVGVKQGDPMSPLLFNLAMDPLLCKLEESGKGYHRGQSSITAMAFADDLVLLSDSWENMNTNISILETFCNLTGLKTQGQKCHGFYIKPTKDSYTINDCAAWTINGTPLNMIDPGESEKYLGLQFDPWIGIARSGLSTKLDFWLQRIDQAPLKPLQKTDILKTYTIPRLIYIADHSEVKTALLETLDQKIRTAVKEWLHLPPCTCDAILYSSTRDGGLGITKLAGLIPSVQARRLHRIAQSSDDTMKCFMEKEKMEQLHKKLWIQAGGDRENIPSIWEAPPSSEPPNNVSTNSEWEAPTQKDKFPKPCNWRKNEFKKWTKLASQGRGIVNFERDKISNHWIQYYRRIPHRKLLTALQLRANVYPTREFLARGRQDQYIKACRHCDADIESCAHIIGNCPVTQDARIKRHNYICELLLEEAKKKDWVVFKEPHIRDSNKELYKPDLIFVKDARALVVDVTVRYEAAKSSLEEAAAEKVRKYKHLETEVRHLTNAKDVTFVGFPLGARGKWHQDNFKLLTELGLSKSRQVKMAETFSTVALFSSVDIVHMFASRARKSMVM

SEQ ID NO: 1649 - protein, 1288 aa, synthetic construct
  source 1..1288: note = Description of Artificial Sequence: Synthetic polypeptide
MASCPKPGPPVSAGAMSLESGLTTHSVLAIERGPNSLANSGSDFGGGGLGLPLRLLRVSVGTQTSRSDWVDLVSWSHPGPTSKSQQVDLVSLFPKHRVDLLSKNDQVDLVAQFLPSKFPPNLAENDLALLVNLEFYRSDLHVYECVHFAAHWEGLSGLPEVYEQLAPQPCVGETLHSSLPRDSELFVPEEGSSEKESEDAPKTSPPTPGKHGLEQTGEEKVMVTVPDKNPPCPCCGTRVNSVLNLIEHLKVSHGKRGVCFRCAKCGKENSNYHSVVCHFPKCRGPETEKAPAGEWICEVCNRDFTTKIGLGQHKRLAHPAVRNQERIVASQPKETSNRGAHKRCWTKEEEELLIRLEAQFEGNKNINKLIAEHITTKTAKQISDKRRLLSRKPAEEPREEPGTCHHTRRAASGSETPGTSESATPESTATRDKKDTVTREKHPKKPFQKWMKDRAIKKGNYLRFQRLFYLDRGKLAKIILDDIECLSCDIPLSEIYSVFKTRWETTGSFKSLGDFKTYGKADNTAFRELITAKEIEKNVQEMSKGSAPGPDGITLGDVVKMDPEFSRTMEIFNLWLTTGKIPDMVRGCRTVLIPKSSKPDRLKDINNWRPITIGSILLRLFSRIVTARLSKACPLNPRQRGFIRAAGCSENLKLLQTIIWSAKREHRPLGVVFVDIAKAFDTVSHQHIIHALQQREVDPHIVGLVSNMYENISTYITTKRNTHTDKIQIRVGVKQGDPMSPLLFNLAMDPLLCKLEESGKGYHRGQSSITAMAFADDLVLLSDSWENMNTNISILETFCNLTGLKTQGQKCHGFYIKPTKDSYTINDCAAWTINGTPLNMIDPGESEKYLGLQFDPWIGIARSGLSTKLDFWLQRIDQAPLKPLQKTDILKTYTIPRLIYIADHSEVKTALLETLDQKIRTAVKEWLHLPPCTCDAILYSSTRDGGLGITKLAGLIPSVQARRLHRIAQSSDDTMKCFMEKEKMEQLHKKLWIQAGGDRENIPSIWEAPPSSEPPNNVSTNSEWEAPTQKDKFPKPCNWRKNEFKKWTKLASQGRGIVNFERDKISNHWIQYYRRIPHRKLLTALQLRANVYPTREFLARGRQDQYIKACRHCDADIESCAHIIGNCPVTQDARIKRHNYICELLLEEAKKKDWVVFKEPHIRDSNKELYKPDLIFVKDARALVVDVTVRYEAAKSSLEEAAAEKVRKYKHLETEVRHLTNAKDVTFVGFPLGARGKWHQDNFKLLTELGLSKSRQVKMAETFSTVALFSSVDIVHMFASRARKSMVM

SEQ ID NO: 1650 - protein, 1265 aa, synthetic construct
  source 1..1265: note = Description of Artificial Sequence: Synthetic polypeptide
MASCPKPGPPVSAGAMSLESGLTTHSVLAIERGPNSLANSGSDFGGGGLGLPLRLLRVSVGTQTSRSDWVDLVSWSHPGPTSKSQQVDLVSLFPKHRVDLLSKNDQVDLVAQFLPSKFPPNLAENDLALLVNLEFYRSDLHVYECVHFAAHWEGLSGLPEVYEQLAPQPCVGETLHSSLPRDSELFVPEEGSSEKESEDAPKTSPPTPGKHGLEQTGEEKVMVTVPDKNPPCPCCGTRVNSVLNLIEHLKVSHGKRGVCFRCAKCGKENSNYHSVVCHFPKCRGPETEKAPAGEWICEVCNRDFTTKIGLGQHKRLAHPAVRNQERIVASQPKETSNRGAHKRCWTKEEEELLIRLEAQFEGNKNINKLIAEHITTKTAKQISDKRRLGGGSCFGCLESISQIRTATRDKKDTVTREKHPKKPFQKWMKDRAIKKGNYLRFQRLFYLDRGKLAKIILDDIECLSCDIPLSEIYSVFKTRWETTGSFKSLGDFKTYGKADNTAFRELITAKEIEKNVQEMSKGSAPGPDGITLGDVVKMDPEFSRTMEIFNLWLTTGKIPDMVRGCRTVLIPKSSKPDRLKDINNWRPITIGSILLRLFSRIVTARLSKACPLNPRQRGFIRAAGCSENLKLLQTIIWSAKREHRPLGVVFVDIAKAFDTVSHQHIIHALQQREVDPHIVGLVSNMYENISTYITTKRNTHTDKIQIRVGVKQGDPMSPLLFNLAMDPLLCKLEESGKGYHRGQSSITAMAFADDLVLLSDSWENMNTNISILETFCNLTGLKTQGQKCHGFYIKPTKDSYTINDCAAWTINGTPLNMIDPGESEKYLGLQFDPWIGIARSGLSTKLDFWLQRIDQAPLKPLQKTDILKTYTIPRLIYIADHSEVKTALLETLDQKIRTAVKEWLHLPPCTCDAILYSSTRDGGLGITKLAGLIPSVQARRLHRIAQSSDDTMKCFMEKEKMEQLHKKLWIQAGGDRENIPSIWEAPPSSEPPNNVSTNSEWEAPTQKDKFPKPCNWRKNEFKKWTKLASQGRGIVNFERDKISNHWIQYYRRIPHRKLLTALQLRANVYPTREFLARGRQDQYIKACRHCDADIESCAHIIGNCPVTQDARIKRHNYICELLLEEAKKKDWVVFKEPHIRDSNKELYKPDLIFVKDARALVVDVTVRYEAAKSSLEEAAAEKVRKYKHLETEVRHLTNAKDVTFVGFPLGARGKWHQDNFKLLTELGLSKSRQVKMAETFSTVALFSSVDIVHMFASRARKSMVM

SEQ ID NO: 1651 - protein, 1253 aa, synthetic construct
  source 1..1253: note = Description of Artificial Sequence: Synthetic polypeptide
MASCPKPGPPVSAGAMSLESGLTTHSVLAIERGPNSLANSGSDFGGGGLGLPLRLLRVSVGTQTSRSDWVDLVSWSHPGPTSKSQQVDLVSLFPKHRVDLLSKNDQVDLVAQFLPSKFPPNLAENDLALLVNLEFYRSDLHVYECVHFAAHWEGLSGLPEVYEQLAPQPCVGETLHSSLPRDSELFVPEEGSSEKESEDAPKTSPPTPGKHGLEQTGEEKVMVTVPDKNPPCPCCGTRVNSVLNLIEHLKVSHGKRGVCFRCAKCGKENSNYHSVVCHFPKCRGPETEKAPAGEWICEVCNRDFTTKIGLGQHKRLAHPAVRNQERIVASQPKETSNRGAHKRCWTKEEEELLIRLEAQFEGNKNINKLIAEHITTKTAKQISDKRRLGGGSTATRDKKDTVTREKHPKKPFQKWMKDRAIKKGNYLRFQRLFYLDRGKLAKIILDDIECLSCDIPLSEIYSVFKTRWETTGSFKSLGDFKTYGKADNTAFRELITAKEIEKNVQEMSKGSAPGPDGITLGDVVKMDPEFSRTMEIFNLWLTTGKIPDMVRGCRTVLIPKSSKPDRLKDINNWRPITIGSILLRLFSRIVTARLSKACPLNPRQRGFIRAAGCSENLKLLQTIIWSAKREHRPLGVVFVDIAKAFDTVSHQHIIHALQQREVDPHIVGLVSNMYENISTYITTKRNTHTDKIQIRVGVKQGDPMSPLLFNLAMDPLLCKLEESGKGYHRGQSSITAMAFADDLVLLSDSWENMNTNISILETFCNLTGLKTQGQKCHGFYIKPTKDSYTINDCAAWTINGTPLNMIDPGESEKYLGLQFDPWIGIARSGLSTKLDFWLQRIDQAPLKPLQKTDILKTYTIPRLIYIADHSEVKTALLETLDQKIRTAVKEWLHLPPCTCDAILYSSTRDGGLGITKLAGLIPSVQARRLHRIAQSSDDTMKCFMEKEKMEQLHKKLWIQAGGDRENIPSIWEAPPSSEPPNNVSTNSEWEAPTQKDKFPKPCNWRKNEFKKWTKLASQGRGIVNFERDKISNHWIQYYRRIPHRKLLTALQLRANVYPTREFLARGRQDQYIKACRHCDADIESCAHIIGNCPVTQDARIKRHNYICELLLEEAKKKDWVVFKEPHIRDSNKELYKPDLIFVKDARALVVDVTVRYEAAKSSLEEAAAEKVRKYKHLETEVRHLTNAKDVTFVGFPLGARGKWHQDNFKLLTELGLSKSRQVKMAETFSTVALFSSVDIVHMFASRARKSMVM

SEQ ID NO: 1652 - protein, 1277 aa, synthetic construct
  source 1..1277: note = Description of Artificial Sequence: Synthetic polypeptide
MASCPKPGPPVSAGAMSLESGLTTHSVLAIERGPNSLANSGSDFGGGGLGLPLRLLRVSVGTQTSRSDWVDLVSWSHPGPTSKSQQVDLVSLFPKHRVDLLSKNDQVDLVAQFLPSKFPPNLAENDLALLVNLEFYRSDLHVYECVHFAAHWEGLSGLPEVYEQLAPQPCVGETLHSSLPRDSELFVPEEGSSEKESEDAPKTSPPTPGKHGLEQTGEEKVMVTVPDKNPPCPCCGTRVNSVLNLIEHLKVSHGKRGVCFRCAKCGKENSNYHSVVCHFPKCRGPETEKAPAGEWICEVCNRDFTTKIGLGQHKRLAHPAVRNQERIVASQPKETSNRGAHKRCWTKEEEELLIRLEAQFEGNKNINKLIAEHITTKTAKQISDKRRLSGSETPGTSESATPESCFGCLESISQIRTATRDKKDTVTREKHPKKPFQKWMKDRAIKKGNYLRFQRLFYLDRGKLAKIILDDIECLSCDIPLSEIYSVFKTRWETTGSFKSLGDFKTYGKADNTAFRELITAKEIEKNVQEMSKGSAPGPDGITLGDVVKMDPEFSRTMEIFNLWLTTGKIPDMVRGCRTVLIPKSSKPDRLKDINNWRPITIGSILLRLFSRIVTARLSKACPLNPRQRGFIRAAGCSENLKLLQTIIWSAKREHRPLGVVFVDIAKAFDTVSHQHIIHALQQREVDPHIVGLVSNMYENISTYITTKRNTHTDKIQIRVGVKQGDPMSPLLFNLAMDPLLCKLEESGKGYHRGQSSITAMAFADDLVLLSDSWENMNTNISILETFCNLTGLKTQGQKCHGFYIKPTKDSYTINDCAAWTINGTPLNMIDPGESEKYLGLQFDPWIGIARSGLSTKLDFWLQRIDQAPLKPLQKTDILKTYTIPRLIYIADHSEVKTALLETLDQKIRTAVKEWLHLPPCTCDAILYSSTRDGGLGITKLAGLIPSVQARRLHRIAQSSDDTMKCFMEKEKMEQLHKKLWIQAGGDRENIPSIWEAPPSSEPPNNVSTNSEWEAPTQKDKFPKPCNWRKNEFKKWTKLASQGRGIVNFERDKISNHWIQYYRRIPHRKLLTALQLRANVYPTREFLARGRQDQYIKACRHCDADIESCAHIIGNCPVTQDARIKRHNYICELLLEEAKKKDWVVFKEPHIRDSNKELYKPDLIFVKDARALVVDVTVRYEAAKSSLEEAAAEKVRKYKHLETEVRHLTNAKDVTFVGFPLGARGKWHQDNFKLLTELGLSKSRQVKMAETFSTVALFSSVDIVHMFASRARKSMVM

SEQ ID NO: 1653 - protein, 1265 aa, synthetic construct
  source 1..1265: note = Description of Artificial Sequence: Synthetic polypeptide
MASCPKPGPPVSAGAMSLESGLTTHSVLAIERGPNSLANSGSDFGGGGLGLPLRLLRVSVGTQTSRSDWVDLVSWSHPGPTSKSQQVDLVSLFPKHRVDLLSKNDQVDLVAQFLPSKFPPNLAENDLALLVNLEFYRSDLHVYECVHFAAHWEGLSGLPEVYEQLAPQPCVGETLHSSLPRDSELFVPEEGSSEKESEDAPKTSPPTPGKHGLEQTGEEKVMVTVPDKNPPCPCCGTRVNSVLNLIEHLKVSHGKRGVCFRCAKCGKENSNYHSVVCHFPKCRGPETEKAPAGEWICEVCNRDFTTKIGLGQHKRLAHPAVRNQERIVASQPKETSNRGAHKRCWTKEEEELLIRLEAQFEGNKNINKLIAEHITTKTAKQISDKRRLSGSETPGTSESATPESTATRDKKDTVTREKHPKKPFQKWMKDRAIKKGNYLRFQRLFYLDRGKLAKIILDDIECLSCDIPLSEIYSVFKTRWETTGSFKSLGDFKTYGKADNTAFRELITAKEIEKNVQEMSKGSAPGPDGITLGDVVKMDPEFSRTMEIFNLWLTTGKIPDMVRGCRTVLIPKSSKPDRLKDINNWRPITIGSILLRLFSRIVTARLSKACPLNPRQRGFIRAAGCSENLKLLQTIIWSAKREHRPLGVVFVDIAKAFDTVSHQHIIHALQQREVDPHIVGLVSNMYENISTYITTKRNTHTDKIQIRVGVKQGDPMSPLLFNLAMDPLLCKLEESGKGYHRGQSSITAMAFADDLVLLSDSWENMNTNISILETFCNLTGLKTQGQKCHGFYIKPTKDSYTINDCAAWTINGTPLNMIDPGESEKYLGLQFDPWIGIARSGLSTKLDFWLQRIDQAPLKPLQKTDILKTYTIPRLIYIADHSEVKTALLETLDQKIRTAVKEWLHLPPCTCDAILYSSTRDGGLGITKLAGLIPSVQARRLHRIAQSSDDTMKCFMEKEKMEQLHKKLWIQAGGDRENIPSIWEAPPSSEPPNNVSTNSEWEAPTQKDKFPKPCNWRKNEFKKWTKLASQGRGIVNFERDKISNHWIQYYRRIPHRKLLTALQLRANVYPTREFLARGRQDQYIKACRHCDADIESCAHIIGNCPVTQDARIKRHNYICELLLEEAKKKDWVVFKEPHIRDSNKELYKPDLIFVKDARALVVDVTVRYEAAKSSLEEAAAEKVRKYKHLETEVRHLTNAKDVTFVGFPLGARGKWHQDNFKLLTELGLSKSRQVKMAETFSTVALFSSVDIVHMFASRARKSMVM

SEQ ID NO: 1654 - DNA, 320 bp, unidentified
  source 1..320: mol_type = unassigned DNA; note = Description of Unknown:R2Tg landing pad sequence
gctcacacaggaaacagctatgaccatgattacgccaagctgttgacgcgatgtgatttctgcccagtgctctgaatgtcaaagtgaagaaattcaatgaagcgcgggtaaacggcgggagtaactatgactctcttaaggtagccaaatgcctcgtcatctaattagtgacgcgcatgaatggatgaacgagattcccactgtccctacctactatccagcgaaaccacagccaagggaaattcactggccgtcgttttacaacgtcgtgactgggaaaaccctggcgttacccaacttaatcgccttgcagcacatcc

SEQ ID NO: 1655 - DNA, 320 bp, synthetic construct
  source 1..320: mol_type = other DNA; note = Description of Artificial Sequence: Synthetic polynucleotide
gctcacacaggaaacagctatgaccatgattacgccaagctgttgacgcgatgtgatttctgcccagtgctctgaatgtcaaagtgaagaaattcaatgaagcgcgggtaaacggcgggagtaactatgactctctttccaatatgatttgcctcgtcatctaattagtgacgcgcatgaatggatgaacgagattcccactgtccctacctactatccagcgaaaccacagccaagggaaattcactggccgtcgttttacaacgtcgtgactgggaaaaccctggcgttacccaacttaatcgccttgcagcacatcc

SEQ ID NO: 1656 - DNA, 320 bp, synthetic construct
  source 1..320: mol_type = other DNA; note = Description of Artificial Sequence: Synthetic polynucleotide
gctcacacaggaaacagctatgaccatgattacgccaagctgttgacgcgatgtgatttctgcccagtgctctgaatgtcaaagtgaagaaattcaatgaagcgcgggtaaacggcgggagtaactatgactctctttccaatatgattccacccatggcaaattccatggcaccgtcaaggctgagaacgggaagcttgtcatcaatggaaactatccagcgaaaccacagccaagggaaattcactggccgtcgttttacaacgtcgtgactgggaaaaccctggcgttacccaacttaatcgccttgcagcacatcc

SEQ ID NO: 1657 - DNA, 13 bp, synthetic construct
  source 1..13: mol_type = other DNA; note = Description of Artificial Sequence: Synthetic oligonucleotide
taaggtagccaaa

SEQ ID NO: 1658 - protein, 991 aa, synthetic construct
  source 1..991: note = Description of Artificial Sequence: Synthetic polypeptide
MGIHGVPAAMAERPFQCRICMRNFSYNWHLQRHIRTHTGEKPFACDICGRKFARSDHLTTHTKIHTGSQKPFQCRICMRNFSHNYARDCHIRTHTGEKPFACDICGRKFAQNSTRIGHTKIHLRGSGGGSTATRDKKDTVTREKHPKKPFQKWMKDRAIKKGNYLRFQRLFYLDRGKLAKIILDDIECLSCDIPLSEIYSVFKTRWETTGSFKSLGDFKTYGKADNTAFRELITAKEIEKNVQEMSKGSAPGPDGITLGDVVKMDPEFSRTMEIFNLWLTTGKIPDMVRGCRTVLIPKSSKPDRLKDINNWRPITIGSILLRLFSRIVTARLSKACPLNPRQRGFIRAAGCSENLKLLQTIIWSAKREHRPLGVVFVDIAKAFDTVSHQHIIHALQQREVDPHIVGLVSNMYENISTYITTKRNTHTDKIQIRVGVKQGDPMSPLLFNLAMDPLLCKLEESGKGYHRGQSSITAMAFADDLVLLSDSWENMNTNISILETFCNLTGLKTQGQKCHGFYIKPTKDSYTINDCAAWTINGTPLNMIDPGESEKYLGLQFDPWIGIARSGLSTKLDFWLQRIDQAPLKPLQKTDILKTYTIPRLIYIADHSEVKTALLETLDQKIRTAVKEWLHLPPCTCDAILYSSTRDGGLGITKLAGLIPSVQARRLHRIAQSSDDTMKCFMEKEKMEQLHKKLWIQAGGDRENIPSIWEAPPSSEPPNNVSTNSEWEAPTQKDKFPKPCNWRKNEFKKWTKLASQGRGIVNFERDKISNHWIQYYRRIPHRKLLTALQLRANVYPTREFLARGRQDQYIKACRHCDADIESCAHIIGNCPVTQDARIKRHNYICELLLEEAKKKDWVVFKEPHIRDSNKELYKPDLIFVKDARALVVDVTVRYEAAKSSLEEAAAEKVRKYKHLETEVRHLTNAKDVTFVGFPLGARGKWHQDNFKLLTELGLSKSRQVKMAETFSTVALFSSVDIVHMFASRARKSMVM

SEQ ID NO: 1659 - protein, 1003 aa, synthetic construct
  source 1..1003: note = Description of Artificial Sequence: Synthetic polypeptide
MGIHGVPAAMAERPFQCRICMRNFSYNWHLQRHIRTHTGEKPFACDICGRKFARSDHLTTHTKIHTGSQKPFQCRICMRNFSHNYARDCHIRTHTGEKPFACDICGRKFAQNSTRIGHTKIHLRGSSGSETPGTSESATPESTATRDKKDTVTREKHPKKPFQKWMKDRAIKKGNYLRFQRLFYLDRGKLAKIILDDIECLSCDIPLSEIYSVFKTRWETTGSFKSLGDFKTYGKADNTAFRELITAKEIEKNVQEMSKGSAPGPDGITLGDVVKMDPEFSRTMEIFNLWLTTGKIPDMVRGCRTVLIPKSSKPDRLKDINNWRPITIGSILLRLFSRIVTARLSKACPLNPRQRGFIRAAGCSENLKLLQTIIWSAKREHRPLGVVFVDIAKAFDTVSHQHIIHALQQREVDPHIVGLVSNMYENISTYITTKRNTHTDKIQIRVGVKQGDPMSPLLFNLAMDPLLCKLEESGKGYHRGQSSITAMAFADDLVLLSDSWENMNTNISILETFCNLTGLKTQGQKCHGFYIKPTKDSYTINDCAAWTINGTPLNMIDPGESEKYLGLQFDPWIGIARSGLSTKLDFWLQRIDQAPLKPLQKTDILKTYTIPRLIYIADHSEVKTALLETLDQKIRTAVKEWLHLPPCTCDAILYSSTRDGGLGITKLAGLIPSVQARRLHRIAQSSDDTMKCFMEKEKMEQLHKKLWIQAGGDRENIPSIWEAPPSSEPPNNVSTNSEWEAPTQKDKFPKPCNWRKNEFKKWTKLASQGRGIVNFERDKISNHWIQYYRRIPHRKLLTALQLRANVYPTREFLARGRQDQYIKACRHCDADIESCAHIIGNCPVTQDARIKRHNYICELLLEEAKKKDWVVFKEPHIRDSNKELYKPDLIFVKDARALVVDVTVRYEAAKSSLEEAAAEKVRKYKHLETEVRHLTNAKDVTFVGFPLGARGKWHQDNFKLLTELGLSKSRQVKMAETFSTVALFSSVDIVHMFASRARKSMVM

SEQ ID NO: 1660 - protein, 1003 aa, synthetic construct
  source 1..1003: note = Description of Artificial Sequence: Synthetic polypeptide
MGIHGVPAAMAERPFQCRICMRNFSYNWHLQRHIRTHTGEKPFACDICGRKFARSDHLTTHTKIHTGSQKPFQCRICMRNFSHNYARDCHIRTHTGEKPFACDICGRKFAQNSTRIGHTKIHLRGSGGGSCFGCLESISQIRTATRDKKDTVTREKHPKKPFQKWMKDRAIKKGNYLRFQRLFYLDRGKLAKIILDDIECLSCDIPLSEIYSVFKTRWETTGSFKSLGDFKTYGKADNTAFRELITAKEIEKNVQEMSKGSAPGPDGITLGDVVKMDPEFSRTMEIFNLWLTTGKIPDMVRGCRTVLIPKSSKPDRLKDINNWRPITIGSILLRLFSRIVTARLSKACPLNPRQRGFIRAAGCSENLKLLQTIIWSAKREHRPLGVVFVDIAKAFDTVSHQHIIHALQQREVDPHIVGLVSNMYENISTYITTKRNTHTDKIQIRVGVKQGDPMSPLLFNLAMDPLLCKLEESGKGYHRGQSSITAMAFADDLVLLSDSWENMNTNISILETFCNLTGLKTQGQKCHGFYIKPTKDSYTINDCAAWTINGTPLNMIDPGESEKYLGLQFDPWIGIARSGLSTKLDFWLQRIDQAPLKPLQKTDILKTYTIPRLIYIADHSEVKTALLETLDQKIRTAVKEWLHLPPCTCDAILYSSTRDGGLGITKLAGLIPSVQARRLHRIAQSSDDTMKCFMEKEKMEQLHKKLWIQAGGDRENIPSIWEAPPSSEPPNNVSTNSEWEAPTQKDKFPKPCNWRKNEFKKWTKLASQGRGIVNFERDKISNHWIQYYRRIPHRKLLTALQLRANVYPTREFLARGRQDQYIKACRHCDADIESCAHIIGNCPVTQDARIKRHNYICELLLEEAKKKDWVVFKEPHIRDSNKELYKPDLIFVKDARALVVDVTVRYEAAKSSLEEAAAEKVRKYKHLETEVRHLTNAKDVTFVGFPLGARGKWHQDNFKLLTELGLSKSRQVKMAETFSTVALFSSVDIVHMFASRARKSMVM

SEQ ID NO: 1661 - protein, 1015 aa, synthetic construct
  source 1..1015: note = Description of Artificial Sequence: Synthetic polypeptide
MGIHGVPAAMAERPFQCRICMRNFSYNWHLQRHIRTHTGEKPFACDICGRKFARSDHLTTHTKIHTGSQKPFQCRICMRNFSHNYARDCHIRTHTGEKPFACDICGRKFAQNSTRIGHTKIHLRGSSGSETPGTSESATPESCFGCLESISQIRTATRDKKDTVTREKHPKKPFQKWMKDRAIKKGNYLRFQRLFYLDRGKLAKIILDDIECLSCDIPLSEIYSVFKTRWETTGSFKSLGDFKTYGKADNTAFRELITAKEIEKNVQEMSKGSAPGPDGITLGDVVKMDPEFSRTMEIFNLWLTTGKIPDMVRGCRTVLIPKSSKPDRLKDINNWRPITIGSILLRLFSRIVTARLSKACPLNPRQRGFIRAAGCSENLKLLQTIIWSAKREHRPLGVVFVDIAKAFDTVSHQHIIHALQQREVDPHIVGLVSNMYENISTYITTKRNTHTDKIQIRVGVKQGDPMSPLLFNLAMDPLLCKLEESGKGYHRGQSSITAMAFADDLVLLSDSWENMNTNISILETFCNLTGLKTQGQKCHGFYIKPTKDSYTINDCAAWTINGTPLNMIDPGESEKYLGLQFDPWIGIARSGLSTKLDFWLQRIDQAPLKPLQKTDILKTYTIPRLIYIADHSEVKTALLETLDQKIRTAVKEWLHLPPCTCDAILYSSTRDGGLGITKLAGLIPSVQARRLHRIAQSSDDTMKCFMEKEKMEQLHKKLWIQAGGDRENIPSIWEAPPSSEPPNNVSTNSEWEAPTQKDKFPKPCNWRKNEFKKWTKLASQGRGIVNFERDKISNHWIQYYRRIPHRKLLTALQLRANVYPTREFLARGRQDQYIKACRHCDADIESCAHIIGNCPVTQDARIKRHNYICELLLEEAKKKDWVVFKEPHIRDSNKELYKPDLIFVKDARALVVDVTVRYEAAKSSLEEAAAEKVRKYKHLETEVRHLTNAKDVTFVGFPLGARGKWHQDNFKLLTELGLSKSRQVKMAETFSTVALFSSVDIVHMFASRARKSMVM

SEQ ID NO: 1662 - protein, 991 aa, synthetic construct
  source 1..991: note = Description of Artificial Sequence: Synthetic polypeptide
MGIHGVPAAMAERPFQCRICMRNFSQSSNLARHIRTHTGEKPFACDICGRKFARTDYLVDHTKIHTGSQKPFQCRICMRNFSYNTHLTRHIRTHTGEKPFACDICGRKFAQGYNLAGHTKIHLRGSGGGSTATRDKKDTVTREKHPKKPFQKWMKDRAIKKGNYLRFQRLFYLDRGKLAKIILDDIECLSCDIPLSEIYSVFKTRWETTGSFKSLGDFKTYGKADNTAFRELITAKEIEKNVQEMSKGSAPGPDGITLGDVVKMDPEFSRTMEIFNLWLTTGKIPDMVRGCRTVLIPKSSKPDRLKDINNWRPITIGSILLRLFSRIVTARLSKACPLNPRQRGFIRAAGCSENLKLLQTIIWSAKREHRPLGVVFVDIAKAFDTVSHQHIIHALQQREVDPHIVGLVSNMYENISTYITTKRNTHTDKIQIRVGVKQGDPMSPLLFNLAMDPLLCKLEESGKGYHRGQSSITAMAFADDLVLLSDSWENMNTNISILETFCNLTGLKTQGQKCHGFYIKPTKDSYTINDCAAWTINGTPLNMIDPGESEKYLGLQFDPWIGIARSGLSTKLDFWLQRIDQAPLKPLQKTDILKTYTIPRLIYIADHSEVKTALLETLDQKIRTAVKEWLHLPPCTCDAILYSSTRDGGLGITKLAGLIPSVQARRLHRIAQSSDDTMKCFMEKEKMEQLHKKLWIQAGGDRENIPSIWEAPPSSEPPNNVSTNSEWEAPTQKDKFPKPCNWRKNEFKKWTKLASQGRGIVNFERDKISNHWIQYYRRIPHRKLLTALQLRANVYPTREFLARGRQDQYIKACRHCDADIESCAHIIGNCPVTQDARIKRHNYICELLLEEAKKKDWVVFKEPHIRDSNKELYKPDLIFVKDARALVVDVTVRYEAAKSSLEEAAAEKVRKYKHLETEVRHLTNAKDVTFVGFPLGARGKWHQDNFKLLTELGLSKSRQVKMAETFSTVALFSSVDIVHMFASRARKSMVM

SEQ ID NO: 1663 - protein, 1003 aa, synthetic construct
  source 1..1003: note = Description of Artificial Sequence: Synthetic polypeptide
MGIHGVPAAMAERPFQCRICMRNFSQSSNLARHIRTHTGEKPFACDICGRKFARTDYLVDHTKIHTGSQKPFQCRICMRNFSYNTHLTRHIRTHTGEKPFACDICGRKFAQGYNLAGHTKIHLRGSSGSETPGTSESATPESTATRDKKDTVTREKHPKKPFQKWMKDRAIKKGNYLRFQRLFYLDRGKLAKIILDDIECLSCDIPLSEIYSVFKTRWETTGSFKSLGDFKTYGKADNTAFRELITAKEIEKNVQEMSKGSAPGPDGITLGDVVKMDPEFSRTMEIFNLWLTTGKIPDMVRGCRTVLIPKSSKPDRLKDINNWRPITIGSILLRLFSRIVTARLSKACPLNPRQRGFIRAAGCSENLKLLQTIIWSAKREHRPLGVVFVDIAKAFDTVSHQHIIHALQQREVDPHIVGLVSNMYENISTYITTKRNTHTDKIQIRVGVKQGDPMSPLLFNLAMDPLLCKLEESGKGYHRGQSSITAMAFADDLVLLSDSWENMNTNISILETFCNLTGLKTQGQKCHGFYIKPTKDSYTINDCAAWTINGTPLNMIDPGESEKYLGLQFDPWIGIARSGLSTKLDFWLQRIDQAPLKPLQKTDILKTYTIPRLIYIADHSEVKTALLETLDQKIRTAVKEWLHLPPCTCDAILYSSTRDGGLGITKLAGLIPSVQARRLHRIAQSSDDTMKCFMEKEKMEQLHKKLWIQAGGDRENIPSIWEAPPSSEPPNNVSTNSEWEAPTQKDKFPKPCNWRKNEFKKWTKLASQGRGIVNFERDKISNHWIQYYRRIPHRKLLTALQLRANVYPTREFLARGRQDQYIKACRHCDADIESCAHIIGNCPVTQDARIKRHNYICELLLEEAKKKDWVVFKEPHIRDSNKELYKPDLIFVKDARALVVDVTVRYEAAKSSLEEAAAEKVRKYKHLETEVRHLTNAKDVTFVGFPLGARGKWHQDNFKLLTELGLSKSRQVKMAETFSTVALFSSVDIVHMFASRARKSMVM

SEQ ID NO: 1664 - protein, 1003 aa, synthetic construct
  source 1..1003: note = Description of Artificial Sequence: Synthetic polypeptide
MGIHGVPAAMAERPFQCRICMRNFSQSSNLARHIRTHTGEKPFACDICGRKFARTDYLVDHTKIHTGSQKPFQCRICMRNFSYNTHLTRHIRTHTGEKPFACDICGRKFAQGYNLAGHTKIHLRGSGGGSCFGCLESISQIRTATRDKKDTVTREKHPKKPFQKWMKDRAIKKGNYLRFQRLFYLDRGKLAKIILDDIECLSCDIPLSEIYSVFKTRWETTGSFKSLGDFKTYGKADNTAFRELITAKEIEKNVQEMSKGSAPGPDGITLGDVVKMDPEFSRTMEIFNLWLTTGKIPDMVRGCRTVLIPKSSKPDRLKDINNWRPITIGSILLRLFSRIVTARLSKACPLNPRQRGFIRAAGCSENLKLLQTIIWSAKREHRPLGVVFVDIAKAFDTVSHQHIIHALQQREVDPHIVGLVSNMYENISTYITTKRNTHTDKIQIRVGVKQGDPMSPLLFNLAMDPLLCKLEESGKGYHRGQSSITAMAFADDLVLLSDSWENMNTNISILETFCNLTGLKTQGQKCHGFYIKPTKDSYTINDCAAWTINGTPLNMIDPGESEKYLGLQFDPWIGIARSGLSTKLDFWLQRIDQAPLKPLQKTDILKTYTIPRLIYIADHSEVKTALLETLDQKIRTAVKEWLHLPPCTCDAILYSSTRDGGLGITKLAGLIPSVQARRLHRIAQSSDDTMKCFMEKEKMEQLHKKLWIQAGGDRENIPSIWEAPPSSEPPNNVSTNSEWEAPTQKDKFPKPCNWRKNEFKKWTKLASQGRGIVNFERDKISNHWIQYYRRIPHRKLLTALQLRANVYPTREFLARGRQDQYIKACRHCDADIESCAHIIGNCPVTQDARIKRHNYICELLLEEAKKKDWVVFKEPHIRDSNKELYKPDLIFVKDARALVVDVTVRYEAAKSSLEEAAAEKVRKYKHLETEVRHLTNAKDVTFVGFPLGARGKWHQDNFKLLTELGLSKSRQVKMAETFSTVALFSSVDIVHMFASRARKSMVM

SEQ ID NO: 1665 - protein, 1015 aa, synthetic construct
  source 1..1015: note = Description of Artificial Sequence: Synthetic polypeptide
MGIHGVPAAMAERPFQCRICMRNFSQSSNLARHIRTHTGEKPFACDICGRKFARTDYLVDHTKIHTGSQKPFQCRICMRNFSYNTHLTRHIRTHTGEKPFACDICGRKFAQGYNLAGHTKIHLRGSSGSETPGTSESATPESCFGCLESISQIRTATRDKKDTVTREKHPKKPFQKWMKDRAIKKGNYLRFQRLFYLDRGKLAKIILDDIECLSCDIPLSEIYSVFKTRWETTGSFKSLGDFKTYGKADNTAFRELITAKEIEKNVQEMSKGSAPGPDGITLGDVVKMDPEFSRTMEIFNLWLTTGKIPDMVRGCRTVLIPKSSKPDRLKDINNWRPITIGSILLRLFSRIVTARLSKACPLNPRQRGFIRAAGCSENLKLLQTIIWSAKREHRPLGVVFVDIAKAFDTVSHQHIIHALQQREVDPHIVGLVSNMYENISTYITTKRNTHTDKIQIRVGVKQGDPMSPLLFNLAMDPLLCKLEESGKGYHRGQSSITAMAFADDLVLLSDSWENMNTNISILETFCNLTGLKTQGQKCHGFYIKPTKDSYTINDCAAWTINGTPLNMIDPGESEKYLGLQFDPWIGIARSGLSTKLDFWLQRIDQAPLKPLQKTDILKTYTIPRLIYIADHSEVKTALLETLDQKIRTAVKEWLHLPPCTCDAILYSSTRDGGLGITKLAGLIPSVQARRLHRIAQSSDDTMKCFMEKEKMEQLHKKLWIQAGGDRENIPSIWEAPPSSEPPNNVSTNSEWEAPTQKDKFPKPCNWRKNEFKKWTKLASQGRGIVNFERDKISNHWIQYYRRIPHRKLLTALQLRANVYPTREFLARGRQDQYIKACRHCDADIESCAHIIGNCPVTQDARIKRHNYICELLLEEAKKKDWVVFKEPHIRDSNKELYKPDLIFVKDARALVVDVTVRYEAAKSSLEEAAAEKVRKYKHLETEVRHLTNAKDVTFVGFPLGARGKWHQDNFKLLTELGLSKSRQVKMAETFSTVALFSSVDIVHMFASRARKSMVM

SEQ ID NO: 1666 - protein, 1132 aa, synthetic construct
  source 1..1132: note = Description of Artificial Sequence: Synthetic polypeptide
MGIHGVPAAMAERPFQCRICMRNFSYNWHLQRHIRTHTGEKPFACDICGRKFARSDHLTTHTKIHTGSQKPFQCRICMRNFSHNYARDCHIRTHTGEKPFACDICGRKFAQNSTRIGHTKIHLRGSSGSETPGTSESATPESGIHGVPAAMAERPFQCRICMRNFSQSSNLARHIRTHTGEKPFACDICGRKFARTDYLVDHTKIHTGSQKPFQCRICMRNFSYNTHLTRHIRTHTGEKPFACDICGRKFAQGYNLAGHTKIHLRGSGGGSTATRDKKDTVTREKHPKKPFQKWMKDRAIKKGNYLRFQRLFYLDRGKLAKIILDDIECLSCDIPLSEIYSVFKTRWETTGSFKSLGDFKTYGKADNTAFRELITAKEIEKNVQEMSKGSAPGPDGITLGDVVKMDPEFSRTMEIFNLWLTTGKIPDMVRGCRTVLIPKSSKPDRLKDINNWRPITIGSILLRLFSRIVTARLSKACPLNPRQRGFIRAAGCSENLKLLQTIIWSAKREHRPLGVVFVDIAKAFDTVSHQHIIHALQQREVDPHIVGLVSNMYENISTYITTKRNTHTDKIQIRVGVKQGDPMSPLLFNLAMDPLLCKLEESGKGYHRGQSSITAMAFADDLVLLSDSWENMNTNISILETFCNLTGLKTQGQKCHGFYIKPTKDSYTINDCAAWTINGTPLNMIDPGESEKYLGLQFDPWIGIARSGLSTKLDFWLQRIDQAPLKPLQKTDILKTYTIPRLIYIADHSEVKTALLETLDQKIRTAVKEWLHLPPCTCDAILYSSTRDGGLGITKLAGLIPSVQARRLHRIAQSSDDTMKCFMEKEKMEQLHKKLWIQAGGDRENIPSIWEAPPSSEPPNNVSTNSEWEAPTQKDKFPKPCNWRKNEFKKWTKLASQGRGIVNFERDKISNHWIQYYRRIPHRKLLTALQLRANVYPTREFLARGRQDQYIKACRHCDADIESCAHIIGNCPVTQDARIKRHNYICELLLEEAKKKDWVVFKEPHIRDSNKELYKPDLIFVKDARALVVDVTVRYEAAKSSLEEAAAEKVRKYKHLETEVRHLTNAKDVTFVGFPLGARGKWHQDNFKLLTELGLSKSRQVKMAETFSTVALFSSVDIVHMFASRARKSMVM

SEQ ID NO: 1667 - protein, 1144 aa, synthetic construct
  source 1..1144: note = Description of Artificial Sequence: Synthetic polypeptide
MGIHGVPAAMAERPFQCRICMRNFSYNWHLQRHIRTHTGEKPFACDICGRKFARSDHLTTHTKIHTGSQKPFQCRICMRNFSHNYARDCHIRTHTGEKPFACDICGRKFAQNSTRIGHTKIHLRGSSGSETPGTSESATPESGIHGVPAAMAERPFQCRICMRNFSQSSNLARHIRTHTGEKPFACDICGRKFARTDYLVDHTKIHTGSQKPFQCRICMRNFSYNTHLTRHIRTHTGEKPFACDICGRKFAQGYNLAGHTKIHLRGSSGSETPGTSESATPESTATRDKKDTVTREKHPKKPFQKWMKDRAIKKGNYLRFQRLFYLDRGKLAKIILDDIECLSCDIPLSEIYSVFKTRWETTGSFKSLGDFKTYGKADNTAFRELITAKEIEKNVQEMSKGSAPGPDGITLGDVVKMDPEFSRTMEIFNLWLTTGKIPDMVRGCRTVLIPKSSKPDRLKDINNWRPITIGSILLRLFSRIVTARLSKACPLNPRQRGFIRAAGCSENLKLLQTIIWSAKREHRPLGVVFVDIAKAFDTVSHQHIIHALQQREVDPHIVGLVSNMYENISTYITTKRNTHTDKIQIRVGVKQGDPMSPLLFNLAMDPLLCKLEESGKGYHRGQSSITAMAFADDLVLLSDSWENMNTNISILETFCNLTGLKTQGQKCHGFYIKPTKDSYTINDCAAWTINGTPLNMIDPGESEKYLGLQFDPWIGIARSGLSTKLDFWLQRIDQAPLKPLQKTDILKTYTIPRLIYIADHSEVKTALLETLDQKIRTAVKEWLHLPPCTCDAILYSSTRDGGLGITKLAGLIPSVQARRLHRIAQSSDDTMKCFMEKEKMEQLHKKLWIQAGGDRENIPSIWEAPPSSEPPNNVSTNSEWEAPTQKDKFPKPCNWRKNEFKKWTKLASQGRGIVNFERDKISNHWIQYYRRIPHRKLLTALQLRANVYPTREFLARGRQDQYIKACRHCDADIESCAHIIGNCPVTQDARIKRHNYICELLLEEAKKKDWVVFKEPHIRDSNKELYKPDLIFVKDARALVVDVTVRYEAAKSSLEEAAAEKVRKYKHLETEVRHLTNAKDVTFVGFPLGARGKWHQDNFKLLTELGLSKSRQVKMAETFSTVALFSSVDIVHMFASRARKSMVM

SEQ ID NO: 1668 - protein, 1531 aa, synthetic construct
  source 1..1531: note = Description of Artificial Sequence: Synthetic polypeptide
MGIHGVPAAMAERPFQCRICMRNFSYNWHLQRHIRTHTGEKPFACDICGRKFARSDHLTTHTKIHTGSQKPFQCRICMRNFSHNYARDCHIRTHTGEKPFACDICGRKFAQNSTRIGHTKIHLRGSSGSETPGTSESATPESASCPKPGPPVSAGAMSLESGLTTHSVLAIERGPNSLANSGSDFGGGGLGLPLRLLRVSVGTQTSRSDWVDLVSWSHPGPTSKSQQVDLVSLFPKHRVDLLSKNDQVDLVAQFLPSKFPPNLAENDLALLVNLEFYRSDLHVYECVHFAAHWEGLSGLPEVYEQLAPQPCVGETLHSSLPRDSELFVPEEGSSEKESEDAPKTSPPTPGKHGLEQTGEEKVMVTVPDKNPPCPCCGTRVNSVLNLIEHLKVSHGKRGVCFRCAKCGKENSNYHSVVCHFPKCRGPETEKAPAGEWICEVCNRDFTTKIGLGQHKRLAHPAVRNQERIVASQPKETSNRGAHKRCWTKEEEELLIRLEAQFEGNKNINKLIAEHITTKTAKQISDKRRLLSRKPAEEPREEPGTCHHTRRAAASLRTEPEMSHHAQAEDRDNGPGRRPLPGRAAAGGRTMDEIRRHPDKGNGQQRPTKQKSEEQLQAYYKKTLEERLSAGALNTFPRAFKQVMEGRDIKLVINQTAQDCFGCLESISQIRTATRDKKDTVTREKHPKKPFQKWMKDRAIKKGNYLRFQRLFYLDRGKLAKIILDDIECLSCDIPLSEIYSVFKTRWETTGSFKSLGDFKTYGKADNTAFRELITAKEIEKNVQEMSKGSAPGPDGITLGDVVKMDPEFSRTMEIFNLWLTTGKIPDMVRGCRTVLIPKSSKPDRLKDINNWRPITIGSILLRLFSRIVTARLSKACPLNPRQRGFIRAAGCSENLKLLQTIIWSAKREHRPLGVVFVDIAKAFDTVSHQHIIHALQQREVDPHIVGLVSNMYENISTYITTKRNTHTDKIQIRVGVKQGDPMSPLLFNLAMDPLLCKLEESGKGYHRGQSSITAMAFADDLVLLSDSWENMNTNISILETFCNLTGLKTQGQKCHGFYIKPTKDSYTINDCAAWTINGTPLNMIDPGESEKYLGLQFDPWIGIARSGLSTKLDFWLQRIDQAPLKPLQKTDILKTYTIPRLIYIADHSEVKTALLETLDQKIRTAVKEWLHLPPCTCDAILYSSTRDGGLGITKLAGLIPSVQARRLHRIAQSSDDTMKCFMEKEKMEQLHKKLWIQAGGDRENIPSIWEAPPSSEPPNNVSTNSEWEAPTQKDKFPKPCNWRKNEFKKWTKLASQGRGIVNFERDKISNHWIQYYRRIPHRKLLTALQLRANVYPTREFLARGRQDQYIKACRHCDADIESCAHIIGNCPVTQDARIKRHNYICELLLEEAKKKDWVVFKEPHIRDSNKELYKPDLIFVKDARALVVDVTVRYEAAKSSLEEAAAEKVRKYKHLETEVRHLTNAKDVTFVGFPLGARGKWHQDNFKLLTELGLSKSRQVKMAETFSTVALFSSVDIVHMFASRARKSMVM

SEQ ID NO: 1669 - protein, 1531 aa, synthetic construct
  source 1..1531: note = Description of Artificial Sequence: Synthetic polypeptide
MGIHGVPAAMAERPFQCRICMRNFSQSSNLARHIRTHTGEKPFACDICGRKFARTDYLVDHTKIHTGSQKPFQCRICMRNFSYNTHLTRHIRTHTGEKPFACDICGRKFAQGYNLAGHTKIHLRGSSGSETPGTSESATPESASCPKPGPPVSAGAMSLESGLTTHSVLAIERGPNSLANSGSDFGGGGLGLPLRLLRVSVGTQTSRSDWVDLVSWSHPGPTSKSQQVDLVSLFPKHRVDLLSKNDQVDLVAQFLPSKFPPNLAENDLALLVNLEFYRSDLHVYECVHFAAHWEGLSGLPEVYEQLAPQPCVGETLHSSLPRDSELFVPEEGSSEKESEDAPKTSPPTPGKHGLEQTGEEKVMVTVPDKNPPCPCCGTRVNSVLNLIEHLKVSHGKRGVCFRCAKCGKENSNYHSVVCHFPKCRGPETEKAPAGEWICEVCNRDFTTKIGLGQHKRLAHPAVRNQERIVASQPKETSNRGAHKRCWTKEEEELLIRLEAQFEGNKNINKLIAEHITTKTAKQISDKRRLLSRKPAEEPREEPGTCHHTRRAAASLRTEPEMSHHAQAEDRDNGPGRRPLPGRAAAGGRTMDEIRRHPDKGNGQQRPTKQKSEEQLQAYYKKTLEERLSAGALNTFPRAFKQVMEGRDIKLVINQTAQDCFGCLESISQIRTATRDKKDTVTREKHPKKPFQKWMKDRAIKKGNYLRFQRLFYLDRGKLAKIILDDIECLSCDIPLSEIYSVFKTRWETTGSFKSLGDFKTYGKADNTAFRELITAKEIEKNVQEMSKGSAPGPDGITLGDVVKMDPEFSRTMEIFNLWLTTGKIPDMVRGCRTVLIPKSSKPDRLKDINNWRPITIGSILLRLFSRIVTARLSKACPLNPRQRGFIRAAGCSENLKLLQTIIWSAKREHRPLGVVFVDIAKAFDTVSHQHIIHALQQREVDPHIVGLVSNMYENISTYITTKRNTHTDKIQIRVGVKQGDPMSPLLFNLAMDPLLCKLEESGKGYHRGQSSITAMAFADDLVLLSDSWENMNTNISILETFCNLTGLKTQGQKCHGFYIKPTKDSYTINDCAAWTINGTPLNMIDPGESEKYLGLQFDPWIGIARSGLSTKLDFWLQRIDQAPLKPLQKTDILKTYTIPRLIYIADHSEVKTALLETLDQKIRTAVKEWLHLPPCTCDAILYSSTRDGGLGITKLAGLIPSVQARRLHRIAQSSDDTMKCFMEKEKMEQLHKKLWIQAGGDRENIPSIWEAPPSSEPPNNVSTNSEWEAPTQKDKFPKPCNWRKNEFKKWTKLASQGRGIVNFERDKISNHWIQYYRRIPHRKLLTALQLRANVYPTREFLARGRQDQYIKACRHCDADIESCAHIIGNCPVTQDARIKRHNYICELLLEEAKKKDWVVFKEPHIRDSNKELYKPDLIFVKDARALVVDVTVRYEAAKSSLEEAAAEKVRKYKHLETEVRHLTNAKDVTFVGFPLGARGKWHQDNFKLLTELGLSKSRQVKMAETFSTVALFSSVDIVHMFASRARKSMVM

SEQ ID NO: 1670 - protein, 1672 aa, synthetic construct
  source 1..1672: note = Description of Artificial Sequence: Synthetic polypeptide
MGIHGVPAAMAERPFQCRICMRNFSYNWHLQRHIRTHTGEKPFACDICGRKFARSDHLTTHTKIHTGSQKPFQCRICMRNFSHNYARDCHIRTHTGEKPFACDICGRKFAQNSTRIGHTKIHLRGSSGSETPGTSESATPESGIHGVPAAMAERPFQCRICMRNFSQSSNLARHIRTHTGEKPFACDICGRKFARTDYLVDHTKIHTGSQKPFQCRICMRNFSYNTHLTRHIRTHTGEKPFACDICGRKFAQGYNLAGHTKIHLRGSSGSETPGTSESATPESASCPKPGPPVSAGAMSLESGLTTHSVLAIERGPNSLANSGSDFGGGGLGLPLRLLRVSVGTQTSRSDWVDLVSWSHPGPTSKSQQVDLVSLFPKHRVDLLSKNDQVDLVAQFLPSKFPPNLAENDLALLVNLEFYRSDLHVYECVHFAAHWEGLSGLPEVYEQLAPQPCVGETLHSSLPRDSELFVPEEGSSEKESEDAPKTSPPTPGKHGLEQTGEEKVMVTVPDKNPPCPCCGTRVNSVLNLIEHLKVSHGKRGVCFRCAKCGKENSNYHSVVCHFPKCRGPETEKAPAGEWICEVCNRDFTTKIGLGQHKRLAHPAVRNQERIVASQPKETSNRGAHKRCWTKEEEELLIRLEAQFEGNKNINKLIAEHITTKTAKQISDKRRLLSRKPAEEPREEPGTCHHTRRAAASLRTEPEMSHHAQAEDRDNGPGRRPLPGRAAAGGRTMDEIRRHPDKGNGQQRPTKQKSEEQLQAYYKKTLEERLSAGALNTFPRAFKQVMEGRDIKLVINQTAQDCFGCLESISQIRTATRDKKDTVTREKHPKKPFQKWMKDRAIKKGNYLRFQRLFYLDRGKLAKIILDDIECLSCDIPLSEIYSVFKTRWETTGSFKSLGDFKTYGKADNTAFRELITAKEIEKNVQEMSKGSAPGPDGITLGDVVKMDPEFSRTMEIFNLWLTTGKIPDMVRGCRTVLIPKSSKPDRLKDINNWRPITIGSILLRLFSRIVTARLSKACPLNPRQRGFIRAAGCSENLKLLQTIIWSAKREHRPLGVVFVDIAKAFDTVSHQHIIHALQQREVDPHIVGLVSNMYENISTYITTKRNTHTDKIQIRVGVKQGDPMSPLLFNLAMDPLLCKLEESGKGYHRGQSSITAMAFADDLVLLSDSWENMNTNISILETFCNLTGLKTQGQKCHGFYIKPTKDSYTINDCAAWTINGTPLNMIDPGESEKYLGLQFDPWIGIARSGLSTKLDFWLQRIDQAPLKPLQKTDILKTYTIPRLIYIADHSEVKTALLETLDQKIRTAVKEWLHLPPCTCDAILYSSTRDGGLGITKLAGLIPSVQARRLHRIAQSSDDTMKCFMEKEKMEQLHKKLWIQAGGDRENIPSIWEAPPSSEPPNNVSTNSEWEAPTQKDKFPKPCNWRKNEFKKWTKLASQGRGIVNFERDKISNHWIQYYRRIPHRKLLTALQLRANVYPTREFLARGRQDQYIKACRHCDADIESCAHIIGNCPVTQDARIKRHNYICELLLEEAKKKDWVVFKEPHIRDSNKELYKPDLIFVKDARALVVDVTVRYEAAKSSLEEAAAEKVRKYKHLETEVRHLTNAKDVTFVGFPLGARGKWHQDNFKLLTELGLSKSRQVKMAETFSTVALFSSVDIVHMFASRARKSMVM

SEQ ID NO: 1671 - protein, 1531 aa, synthetic construct
  source 1..1531: note = Description of Artificial Sequence: Synthetic polypeptide
MGIHGVPAAMAERPFQCRICMRNFSYNWHLQRHIRTHTGEKPFACDICGRKFARSDHLTTHTKIHTGSQKPFQCRICMRNFSHNYARDCHIRTHTGEKPFACDICGRKFAQNSTRIGHTKIHLRGSSGSETPGTSESATPESASCPKPGPPVSAGAMSLESGLTTHSVLAIERGPNSLANSGSDFGGGGLGLPLRLLRVSVGTQTSRSDWVDLVSWSHPGPTSKSQQVDLVSLFPKHRVDLLSKNDQVDLVAQFLPSKFPPNLAENDLALLVNLEFYRSDLHVYECVHFAAHWEGLSGLPEVYEQLAPQPCVGETLHSSLPRDSELFVPEEGSSEKESEDAPKTSPPTPGKHGLEQTGEEKVMVTVPDKNPPSPSSGTRVNSVLNLIEHLKVSHGKRGVCFRCAKCGKENSNYHSVVCHFPKCRGPETEKAPAGEWISEVSNRDFTTKIGLGQHKRLAHPAVRNQERIVASQPKETSNRGAHKACATKEEEELLIRLEAQFEGNKNINKLIAEHITTKTAKQISDKRRLLSRKPAEEPREEPGTCHHTRRAAASLRTEPEMSHHAQAEDRDNGPGRRPLPGRAAAGGRTMDEIRRHPDKGNGQQRPTKQKSEEQLQAYYKKTLEERLSAGALNTFPRAFKQVMEGRDIKLVINQTAQDCFGCLESISQIRTATRDKKDTVTREKHPKKPFQKWMKDRAIKKGNYLRFQRLFYLDRGKLAKIILDDIECLSCDIPLSEIYSVFKTRWETTGSFKSLGDFKTYGKADNTAFRELITAKEIEKNVQEMSKGSAPGPDGITLGDVVKMDPEFSRTMEIFNLWLTTGKIPDMVRGCRTVLIPKSSKPDRLKDINNWRPITIGSILLRLFSRIVTARLSKACPLNPRQRGFIRAAGCSENLKLLQTIIWSAKREHRPLGVVFVDIAKAFDTVSHQHIIHALQQREVDPHIVGLVSNMYENISTYITTKRNTHTDKIQIRVGVKQGDPMSPLLFNLAMDPLLCKLEESGKGYHRGQSSITAMAFADDLVLLSDSWENMNTNISILETFCNLTGLKTQGQKCHGFYIKPTKDSYTINDCAAWTINGTPLNMIDPGESEKYLGLQFDPWIGIARSGLSTKLDFWLQRIDQAPLKPLQKTDILKTYTIPRLIYIADHSEVKTALLETLDQKIRTAVKEWLHLPPCTCDAILYSSTRDGGLGITKLAGLIPSVQARRLHRIAQSSDDTMKCFMEKEKMEQLHKKLWIQAGGDRENIPSIWEAPPSSEPPNNVSTNSEWEAPTQKDKFPKPCNWRKNEFKKWTKLASQGRGIVNFERDKISNHWIQYYRRIPHRKLLTALQLRANVYPTREFLARGRQDQYIKACRHCDADIESCAHIIGNCPVTQDARIKRHNYICELLLEEAKKKDWVVFKEPHIRDSNKELYKPDLIFVKDARALVVDVTVRYEAAKSSLEEAAAEKVRKYKHLETEVRHLTNAKDVTFVGFPLGARGKWHQDNFKLLTELGLSKSRQVKMAETFSTVALFSSVDIVHMFASRARKSMVM

SEQ ID NO: 1672 - protein, 1531 aa, synthetic construct
  source 1..1531: note = Description of Artificial Sequence: Synthetic polypeptide
MGIHGVPAAMAERPFQCRICMRNFSQSSNLARHIRTHTGEKPFACDICGRKFARTDYLVDHTKIHTGSQKPFQCRICMRNFSYNTHLTRHIRTHTGEKPFACDICGRKFAQGYNLAGHTKIHLRGSSGSETPGTSESATPESASCPKPGPPVSAGAMSLESGLTTHSVLAIERGPNSLANSGSDFGGGGLGLPLRLLRVSVGTQTSRSDWVDLVSWSHPGPTSKSQQVDLVSLFPKHRVDLLSKNDQVDLVAQFLPSKFPPNLAENDLALLVNLEFYRSDLHVYECVHFAAHWEGLSGLPEVYEQLAPQPCVGETLHSSLPRDSELFVPEEGSSEKESEDAPKTSPPTPGKHGLEQTGEEKVMVTVPDKNPPSPSSGTRVNSVLNLIEHLKVSHGKRGVCFRCAKCGKENSNYHSVVCHFPKCRGPETEKAPAGEWISEVSNRDFTTKIGLGQHKRLAHPAVRNQERIVASQPKETSNRGAHKACATKEEEELLIRLEAQFEGNKNINKLIAEHITTKTAKQISDKRRLLSRKPAEEPREEPGTCHHTRRAAASLRTEPEMSHHAQAEDRDNGPGRRPLPGRAAAGGRTMDEIRRHPDKGNGQQRPTKQKSEEQLQAYYKKTLEERLSAGALNTFPRAFKQVMEGRDIKLVINQTAQDCFGCLESISQIRTATRDKKDTVTREKHPKKPFQKWMKDRAIKKGNYLRFQRLFYLDRGKLAKIILDDIECLSCDIPLSEIYSVFKTRWETTGSFKSLGDFKTYGKADNTAFRELITAKEIEKNVQEMSKGSAPGPDGITLGDVVKMDPEFSRTMEIFNLWLTTGKIPDMVRGCRTVLIPKSSKPDRLKDINNWRPITIGSILLRLFSRIVTARLSKACPLNPRQRGFIRAAGCSENLKLLQTIIWSAKREHRPLGVVFVDIAKAFDTVSHQHIIHALQQREVDPHIVGLVSNMYENISTYITTKRNTHTDKIQIRVGVKQGDPMSPLLFNLAMDPLLCKLEESGKGYHRGQSSITAMAFADDLVLLSDSWENMNTNISILETFCNLTGLKTQGQKCHGFYIKPTKDSYTINDCAAWTINGTPLNMIDPGESEKYLGLQFDPWIGIARSGLSTKLDFWLQRIDQAPLKPLQKTDILKTYTIPRLIYIADHSEVKTALLETLDQKIRTAVKEWLHLPPCTCDAILYSSTRDGGLGITKLAGLIPSVQARRLHRIAQSSDDTMKCFMEKEKMEQLHKKLWIQAGGDRENIPSIWEAPPSSEPPNNVSTNSEWEAPTQKDKFPKPCNWRKNEFKKWTKLASQGRGIVNFERDKISNHWIQYYRRIPHRKLLTALQLRANVYPTREFLARGRQDQYIKACRHCDADIESCAHIIGNCPVTQDARIKRHNYICELLLEEAKKKDWVVFKEPHIRDSNKELYKPDLIFVKDARALVVDVTVRYEAAKSSLEEAAAEKVRKYKHLETEVRHLTNAKDVTFVGFPLGARGKWHQDNFKLLTELGLSKSRQVKMAETFSTVALFSSVDIVHMFASRARKSMVM

SEQ ID NO: 1673 - protein, 1672 aa, synthetic construct
  source 1..1672: note = Description of Artificial Sequence: Synthetic polypeptide
MGIHGVPAAMAERPFQCRICMRNFSYNWHLQRHIRTHTGEKPFACDICGRKFARSDHLTTHTKIHTGSQKPFQCRICMRNFSHNYARDCHIRTHTGEKPFACDICGRKFAQNSTRIGHTKIHLRGSSGSETPGTSESATPESGIHGVPAAMAERPFQCRICMRNFSQSSNLARHIRTHTGEKPFACDICGRKFARTDYLVDHTKIHTGSQKPFQCRICMRNFSYNTHLTRHIRTHTGEKPFACDICGRKFAQGYNLAGHTKIHLRGSSGSETPGTSESATPESASCPKPGPPVSAGAMSLESGLTTHSVLAIERGPNSLANSGSDFGGGGLGLPLRLLRVSVGTQTSRSDWVDLVSWSHPGPTSKSQQVDLVSLFPKHRVDLLSKNDQVDLVAQFLPSKFPPNLAENDLALLVNLEFYRSDLHVYECVHFAAHWEGLSGLPEVYEQLAPQPCVGETLHSSLPRDSELFVPEEGSSEKESEDAPKTSPPTPGKHGLEQTGEEKVMVTVPDKNPPSPSSGTRVNSVLNLIEHLKVSHGKRGVCFRCAKCGKENSNYHSVVCHFPKCRGPETEKAPAGEWISEVSNRDFTTKIGLGQHKRLAHPAVRNQERIVASQPKETSNRGAHKACATKEEEELLIRLEAQFEGNKNINKLIAEHITTKTAKQISDKRRLLSRKPAEEPREEPGTCHHTRRAAASLRTEPEMSHHAQAEDRDNGPGRRPLPGRAAAGGRTMDEIRRHPDKGNGQQRPTKQKSEEQLQAYYKKTLEERLSAGALNTFPRAFKQVMEGRDIKLVINQTAQDCFGCLESISQIRTATRDKKDTVTREKHPKKPFQKWMKDRAIKKGNYLRFQRLFYLDRGKLAKIILDDIECLSCDIPLSEIYSVFKTRWETTGSFKSLGDFKTYGKADNTAFRELITAKEIEKNVQEMSKGSAPGPDGITLGDVVKMDPEFSRTMEIFNLWLTTGKIPDMVRGCRTVLIPKSSKPDRLKDINNWRPITIGSILLRLFSRIVTARLSKACPLNPRQRGFIRAAGCSENLKLLQTIIWSAKREHRPLGVVFVDIAKAFDTVSHQHIIHALQQREVDPHIVGLVSNMYENISTYITTKRNTHTDKIQIRVGVKQGDPMSPLLFNLAMDPLLCKLEESGKGYHRGQSSITAMAFADDLVLLSDSWENMNTNISILETFCNLTGLKTQGQKCHGFYIKPTKDSYTINDCAAWTINGTPLNMIDPGESEKYLGLQFDPWIGIARSGLSTKLDFWLQRIDQAPLKPLQKTDILKTYTIPRLIYIADHSEVKTALLETLDQKIRTAVKEWLHLPPCTCDAILYSSTRDGGLGITKLAGLIPSVQARRLHRIAQSSDDTMKCFMEKEKMEQLHKKLWIQAGGDRENIPSIWEAPPSSEPPNNVSTNSEWEAPTQKDKFPKPCNWRKNEFKKWTKLASQGRGIVNFERDKISNHWIQYYRRIPHRKLLTALQLRANVYPTREFLARGRQDQYIKACRHCDADIESCAHIIGNCPVTQDARIKRHNYICELLLEEAKKKDWVVFKEPHIRDSNKELYKPDLIFVKDARALVVDVTVRYEAAKSSLEEAAAEKVRKYKHLETEVRHLTNAKDVTFVGFPLGARGKWHQDNFKLLTELGLSKSRQVKMAETFSTVALFSSVDIVHMFASRARKSMVM

SEQ ID NO: 1674 - protein, 2278 aa, synthetic construct
  source 1..2278: note = Description of Artificial Sequence: Synthetic polypeptide
MAPKKKRKVGIHGVPAADKKYSIGLDIGTNSVGWAVITDEYKVPSKKFKVLGNTDRHSIKKNLIGALLFDSGETAEATRLKRTARRRYTRRKNRICYLQEIFSNEMAKVDDSFFHRLEESFLVEEDKKHERHPIFGNIVDEVAYHEKYPTIYHLRKKLVDSTDKADLRLIYLALAHMIKFRGHFLIEGDLNPDNSDVDKLFIQLVQTYNQLFEENPINASGVDAKAILSARLSKSRRLENLIAQLPGEKKNGLFGNLIALSLGLTPNFKSNFDLAEDAKLQLSKDTYDDDLDNLLAQIGDQYADLFLAAKNLSDAILLSDILRVNTEITKAPLSASMIKRYDEHHQDLTLLKALVRQQLPEKYKEIFFDQSKNGYAGYIDGGASQEEFYKFIKPILEKMDGTEELLVKLNREDLLRKQRTFDNGSIPHQIHLGELHAILRRQEDFYPFLKDNREKIEKILTFRIPYYVGPLARGNSRFAWMTRKSEETITPWNFEEVVDKGASAQSFIERMTNFDKNLPNEKVLPKHSLLYEYFTVYNELTKVKYVTEGMRKPAFLSGEQKKAIVDLLFKTNRKVTVKQLKEDYFKKIECFDSVEISGVEDRFNASLGTYHDLLKIIKDKDFLDNEENEDILEDIVLTLTLFEDREMIEERLKTYAHLFDDKVMKQLKRRRYTGWGRLSRKLINGIRDKQSGKTILDFLKSDGFANRNFMQLIHDDSLTFKEDIQKAQVSGQGDSLHEHIANLAGSPAIKKGILQTVKVVDELVKVMGRHKPENIVIEMARENQTTQKGQKNSRERMKRIEEGIKELGSQILKEHPVENTQLQNEKLYLYYLQNGRDMYVDQELDINRLSDYDVDAIVPQSFLKDDSIDNKVLTRSDKNRGKSDNVPSEEVVKKMKNYWRQLLNAKLITQRKFDNLTKAERGGLSELDKAGFIKRQLVETRQITKHVAQILDSRMNTKYDENDKLIREVKVITLKSKLVSDFRKDFQFYKVREINNYHHAHDAYLNAVVGTALIKKYPKLESEFVYGDYKVYDVRKMIAKSEQEIGKATAKYFFYSNIMNFFKTEITLANGEIRKRPLIETNGETGEIVWDKGRDFATVRKVLSMPQVNIVKKTEVQTGGFSKESILPKRNSDKLIARKKDWDPKKYGGFDSPTVAYSVLVVAKVEKGKSKKLKSVKELLGITIMERSSFEKNPIDFLEAKGYKEVKKDLIIKLPKYSLFELENGRKRMLASAGELQKGNELALPSKYVNFLYLASHYEKLKGSPEDNEQKQLFVEQHKHYLDEIIEQISEFSKRVILADANLDKVLSAYNKHRDKPIREQAENIIHLFTLTNLGAPAAFKYFDTTIDRKRYTSTKEVLDATLIHQSITGLYETRIDLSQLGGDSGGSSGGSSGSETPGTSESATPESSGGSSGGSSTATRDKKDTVTREKHPKKPFQKWMKDRAIKKGNYLRFQRLFYLDRGKLAKIILDDIECLSCDIPLSEIYSVFKTRWETTGSFKSLGDFKTYGKADNTAFRELITAKEIEKNVQEMSKGSAPGPDGITLGDVVKMDPEFSRTMEIFNLWLTTGKIPDMVRGCRTVLIPKSSKPDRLKDINNWRPITIGSILLRLFSRIVTARLSKACPLNPRQRGFIRAAGCSENLKLLQTIIWSAKREHRPLGVVFVDIAKAFDTVSHQHIIHALQQREVDPHIVGLVSNMYENISTYITTKRNTHTDKIQIRVGVKQGDPMSPLLFNLAMDPLLCKLEESGKGYHRGQSSITAMAFADDLVLLSDSWENMNTNISILETFCNLTGLKTQGQKCHGFYIKPTKDSYTINDCAAWTINGTPLNMIDPGESEKYLGLQFDPWIGIARSGLSTKLDFWLQRIDQAPLKPLQKTDILKTYTIPRLIYIADHSEVKTALLETLDQKIRTAVKEWLHLPPCTCDAILYSSTRDGGLGITKLAGLIPSVQARRLHRIAQSSDDTMKCFMEKEKMEQLHKKLWIQAGGDRENIPSIWEAPPSSEPPNNVSTNSEWEAPTQKDKFPKPCNWRKNEFKKWTKLASQGRGIVNFERDKISNHWIQYYRRIPHRKLLTALQLRANVYPTREFLARGRQDQYIKACRHCDADIESCAHIIGNCPVTQDARIKRHNYICELLLEEAKKKDWVVFKEPHIRDSNKELYKPDLIFVKDARALVVDVTVRYEAAKSSLEEAAAEKVRKYKHLETEVRHLTNAKDVTFVGFPLGARGKWHQDNFKLLTELGLSKSRQVKMAETFSTVALFSSVDIVHMFASRARKSMVM

SEQ ID NO: 1675 - protein, 2278 aa, synthetic construct
  source 1..2278: note = Description of Artificial Sequence: Synthetic polypeptide
MAPKKKRKVGIHGVPAADKKYSIGLAIGTNSVGWAVITDEYKVPSKKFKVLGNTDRHSIKKNLIGALLFDSGETAEATRLKRTARRRYTRRKNRICYLQEIFSNEMAKVDDSFFHRLEESFLVEEDKKHERHPIFGNIVDEVAYHEKYPTIYHLRKKLVDSTDKADLRLIYLALAHMIKFRGHFLIEGDLNPDNSDVDKLFIQLVQTYNQLFEENPINASGVDAKAILSARLSKSRRLENLIAQLPGEKKNGLFGNLIALSLGLTPNFKSNFDLAEDAKLQLSKDTYDDDLDNLLAQIGDQYADLFLAAKNLSDAILLSDILRVNTEITKAPLSASMIKRYDEHHQDLTLLKALVRQQLPEKYKEIFFDQSKNGYAGYIDGGASQEEFYKFIKPILEKMDGTEELLVKLNREDLLRKQRTFDNGSIPHQIHLGELHAILRRQEDFYPFLKDNREKIEKILTFRIPYYVGPLARGNSRFAWMTRKSEETITPWNFEEVVDKGASAQSFIERMTNFDKNLPNEKVLPKHSLLYEYFTVYNELTKVKYVTEGMRKPAFLSGEQKKAIVDLLFKTNRKVTVKQLKEDYFKKIECFDSVEISGVEDRFNASLGTYHDLLKIIKDKDFLDNEENEDILEDIVLTLTLFEDREMIEERLKTYAHLFDDKVMKQLKRRRYTGWGRLSRKLINGIRDKQSGKTILDFLKSDGFANRNFMQLIHDDSLTFKEDIQKAQVSGQGDSLHEHIANLAGSPAIKKGILQTVKVVDELVKVMGRHKPENIVIEMARENQTTQKGQKNSRERMKRIEEGIKELGSQILKEHPVENTQLQNEKLYLYYLQNGRDMYVDQELDINRLSDYDVDAIVPQSFLKDDSIDNKVLTRSDKNRGKSDNVPSEEVVKKMKNYWRQLLNAKLITQRKFDNLTKAERGGLSELDKAGFIKRQLVETRQITKHVAQILDSRMNTKYDENDKLIREVKVITLKSKLVSDFRKDFQFYKVREINNYHHAHDAYLNAVVGTALIKKYPKLESEFVYGDYKVYDVRKMIAKSEQEIGKATAKYFFYSNIMNFFKTEITLANGEIRKRPLIETNGETGEIVWDKGRDFATVRKVLSMPQVNIVKKTEVQTGGFSKESILPKRNSDKLIARKKDWDPKKYGGFDSPTVAYSVLVVAKVEKGKSKKLKSVKELLGITIMERSSFEKNPIDFLEAKGYKEVKKDLIIKLPKYSLFELENGRKRMLASAGELQKGNELALPSKYVNFLYLASHYEKLKGSPEDNEQKQLFVEQHKHYLDEIIEQISEFSKRVILADANLDKVLSAYNKHRDKPIREQAENIIHLFTLTNLGAPAAFKYFDTTIDRKRYTSTKEVLDATLIHQSITGLYETRIDLSQLGGDSGGSSGGSSGSETPGTSESATPESSGGSSGGSSTATRDKKDTVTREKHPKKPFQKWMKDRAIKKGNYLRFQRLFYLDRGKLAKIILDDIECLSCDIPLSEIYSVFKTRWETTGSFKSLGDFKTYGKADNTAFRELITAKEIEKNVQEMSKGSAPGPDGITLGDVVKMDPEFSRTMEIFNLWLTTGKIPDMVRGCRTVLIPKSSKPDRLKDINNWRPITIGSILLRLFSRIVTARLSKACPLNPRQRGFIRAAGCSENLKLLQTIIWSAKREHRPLGVVFVDIAKAFDTVSHQHIIHALQQREVDPHIVGLVSNMYENISTYITTKRNTHTDKIQIRVGVKQGDPMSPLLFNLAMDPLLCKLEESGKGYHRGQSSITAMAFADDLVLLSDSWENMNTNISILETFCNLTGLKTQGQKCHGFYIKPTKDSYTINDCAAWTINGTPLNMIDPGESEKYLGLQFDPWIGIARSGLSTKLDFWLQRIDQAPLKPLQKTDILKTYTIPRLIYIADHSEVKTALLETLDQKIRTAVKEWLHLPPCTCDAILYSSTRDGGLGITKLAGLIPSVQARRLHRIAQSSDDTMKCFMEKEKMEQLHKKLWIQAGGDRENIPSIWEAPPSSEPPNNVSTNSEWEAPTQKDKFPKPCNWRKNEFKKWTKLASQGRGIVNFERDKISNHWIQYYRRIPHRKLLTALQLRANVYPTREFLARGRQDQYIKACRHCDADIESCAHIIGNCPVTQDARIKRHNYICELLLEEAKKKDWVVFKEPHIRDSNKELYKPDLIFVKDARALVVDVTVRYEAAKSSLEEAAAEKVRKYKHLETEVRHLTNAKDVTFVGFPLGARGKWHQDNFKLLTELGLSKSRQVKMAETFSTVALFSSVDIVHMFASRARKSMVM

SEQ ID NO: 1676 - protein, 2278 aa, synthetic construct
  source 1..2278: note = Description of Artificial Sequence: Synthetic polypeptide
MAPKKKRKVGIHGVPAADKKYSIGLAIGTNSVGWAVITDEYKVPSKKFKVLGNTDRHSIKKNLIGALLFDSGETAEATRLKRTARRRYTRRKNRICYLQEIFSNEMAKVDDSFFHRLEESFLVEEDKKHERHPIFGNIVDEVAYHEKYPTIYHLRKKLVDSTDKADLRLIYLALAHMIKFRGHFLIEGDLNPDNSDVDKLFIQLVQTYNQLFEENPINASGVDAKAILSARLSKSRRLENLIAQLPGEKKNGLFGNLIALSLGLTPNFKSNFDLAEDAKLQLSKDTYDDDLDNLLAQIGDQYADLFLAAKNLSDAILLSDILRVNTEITKAPLSASMIKRYDEHHQDLTLLKALVRQQLPEKYKEIFFDQSKNGYAGYIDGGASQEEFYKFIKPILEKMDGTEELLVKLNREDLLRKQRTFDNGSIPHQIHLGELHAILRRQEDFYPFLKDNREKIEKILTFRIPYYVGPLARGNSRFAWMTRKSEETITPWNFEEVVDKGASAQSFIERMTNFDKNLPNEKVLPKHSLLYEYFTVYNELTKVKYVTEGMRKPAFLSGEQKKAIVDLLFKTNRKVTVKQLKEDYFKKIECFDSVEISGVEDRFNASLGTYHDLLKIIKDKDFLDNEENEDILEDIVLTLTLFEDREMIEERLKTYAHLFDDKVMKQLKRRRYTGWGRLSRKLINGIRDKQSGKTILDFLKSDGFANRNFMQLIHDDSLTFKEDIQKAQVSGQGDSLHEHIANLAGSPAIKKGILQTVKVVDELVKVMGRHKPENIVIEMARENQTTQKGQKNSRERMKRIEEGIKELGSQILKEHPVENTQLQNEKLYLYYLQNGRDMYVDQELDINRLSDYDVDHIVPQSFLKDDSIDNKVLTRSDKNRGKSDNVPSEEVVKKMKNYWRQLLNAKLITQRKFDNLTKAERGGLSELDKAGFIKRQLVETRQITKHVAQILDSRMNTKYDENDKLIREVKVITLKSKLVSDFRKDFQFYKVREINNYHHAHDAYLNAVVGTALIKKYPKLESEFVYGDYKVYDVRKMIAKSEQEIGKATAKYFFYSNIMNFFKTEITLANGEIRKRPLIETNGETGEIVWDKGRDFATVRKVLSMPQVNIVKKTEVQTGGFSKESILPKRNSDKLIARKKDWDPKKYGGFDSPTVAYSVLVVAKVEKGKSKKLKSVKELLGITIMERSSFEKNPIDFLEAKGYKEVKKDLIIKLPKYSLFELENGRKRMLASAGELQKGNELALPSKYVNFLYLASHYEKLKGSPEDNEQKQLFVEQHKHYLDEIIEQISEFSKRVILADANLDKVLSAYNKHRDKPIREQAENIIHLFTLTNLGAPAAFKYFDTTIDRKRYTSTKEVLDATLIHQSITGLYETRIDLSQLGGDSGGSSGGSSGSETPGTSESATPESSGGSSGGSSTATRDKKDTVTREKHPKKPFQKWMKDRAIKKGNYLRFQRLFYLDRGKLAKIILDDIECLSCDIPLSEIYSVFKTRWETTGSFKSLGDFKTYGKADNTAFRELITAKEIEKNVQEMSKGSAPGPDGITLGDVVKMDPEFSRTMEIFNLWLTTGKIPDMVRGCRTVLIPKSSKPDRLKDINNWRPITIGSILLRLFSRIVTARLSKACPLNPRQRGFIRAAGCSENLKLLQTIIWSAKREHRPLGVVFVDIAKAFDTVSHQHIIHALQQREVDPHIVGLVSNMYENISTYITTKRNTHTDKIQIRVGVKQGDPMSPLLFNLAMDPLLCKLEESGKGYHRGQSSITAMAFADDLVLLSDSWENMNTNISILETFCNLTGLKTQGQKCHGFYIKPTKDSYTINDCAAWTINGTPLNMIDPGESEKYLGLQFDPWIGIARSGLSTKLDFWLQRIDQAPLKPLQKTDILKTYTIPRLIYIADHSEVKTALLETLDQKIRTAVKEWLHLPPCTCDAILYSSTRDGGLGITKLAGLIPSVQARRLHRIAQSSDDTMKCFMEKEKMEQLHKKLWIQAGGDRENIPSIWEAPPSSEPPNNVSTNSEWEAPTQKDKFPKPCNWRKNEFKKWTKLASQGRGIVNFERDKISNHWIQYYRRIPHRKLLTALQLRANVYPTREFLARGRQDQYIKACRHCDADIESCAHIIGNCPVTQDARIKRHNYICELLLEEAKKKDWVVFKEPHIRDSNKELYKPDLIFVKDARALVVDVTVRYEAAKSSLEEAAAEKVRKYKHLETEVRHLTNAKDVTFVGFPLGARGKWHQDNFKLLTELGLSKSRQVKMAETFSTVALFSSVDIVHMFASRARKSMVM

SEQ ID NO: 1677 - protein, 2278 aa, synthetic construct
  source 1..2278: note = Description of Artificial Sequence: Synthetic polypeptide
MAPKKKRKVGIHGVPAADKKYSIGLDIGTNSVGWAVITDEYKVPSKKFKVLGNTDRHSIKKNLIGALLFDSGETAEATRLKRTARRRYTRRKNRICYLQEIFSNEMAKVDDSFFHRLEESFLVEEDKKHERHPIFGNIVDEVAYHEKYPTIYHLRKKLVDSTDKADLRLIYLALAHMIKFRGHFLIEGDLNPDNSDVDKLFIQLVQTYNQLFEENPINASGVDAKAILSARLSKSRRLENLIAQLPGEKKNGLFGNLIALSLGLTPNFKSNFDLAEDAKLQLSKDTYDDDLDNLLAQIGDQYADLFLAAKNLSDAILLSDILRVNTEITKAPLSASMIKRYDEHHQDLTLLKALVRQQLPEKYKEIFFDQSKNGYAGYIDGGASQEEFYKFIKPILEKMDGTEELLVKLNREDLLRKQRTFDNGSIPHQIHLGELHAILRRQEDFYPFLKDNREKIEKILTFRIPYYVGPLARGNSRFAWMTRKSEETITPWNFEEVVDKGASAQSFIERMTNFDKNLPNEKVLPKHSLLYEYFTVYNELTKVKYVTEGMRKPAFLSGEQKKAIVDLLFKTNRKVTVKQLKEDYFKKIECFDSVEISGVEDRFNASLGTYHDLLKIIKDKDFLDNEENEDILEDIVLTLTLFEDREMIEERLKTYAHLFDDKVMKQLKRRRYTGWGRLSRKLINGIRDKQSGKTILDFLKSDGFANRNFMQLIHDDSLTFKEDIQKAQVSGQGDSLHEHIANLAGSPAIKKGILQTVKVVDELVKVMGRHKPENIVIEMARENQTTQKGQKNSRERMKRIEEGIKELGSQILKEHPVENTQLQNEKLYLYYLQNGRDMYVDQELDINRLSDYDVDHIVPQSFLKDDSIDNKVLTRSDKARGKSDNVPSEEVVKKMKNYWRQLLNAKLITQRKFDNLTKAERGGLSELDKAGFIKRQLVETRQITKHVAQILDSRMNTKYDENDKLIREVKVITLKSKLVSDFRKDFQFYKVREINNYHHAHDAYLNAVVGTALIKKYPKLESEFVYGDYKVYDVRKMIAKSEQEIGKATAKYFFYSNIMNFFKTEITLANGEIRKRPLIETNGETGEIVWDKGRDFATVRKVLSMPQVNIVKKTEVQTGGFSKESILPKRNSDKLIARKKDWDPKKYGGFDSPTVAYSVLVVAKVEKGKSKKLKSVKELLGITIMERSSFEKNPIDFLEAKGYKEVKKDLIIKLPKYSLFELENGRKRMLASAGELQKGNELALPSKYVNFLYLASHYEKLKGSPEDNEQKQLFVEQHKHYLDEIIEQISEFSKRVILADANLDKVLSAYNKHRDKPIREQAENIIHLFTLTNLGAPAAFKYFDTTIDRKRYTSTKEVLDATLIHQSITGLYETRIDLSQLGGDSGGSSGGSSGSETPGTSESATPESSGGSSGGSSTATRDKKDTVTREKHPKKPFQKWMKDRAIKKGNYLRFQRLFYLDRGKLAKIILDDIECLSCDIPLSEIYSVFKTRWETTGSFKSLGDFKTYGKADNTAFRELITAKEIEKNVQEMSKGSAPGPDGITLGDVVKMDPEFSRTMEIFNLWLTTGKIPDMVRGCRTVLIPKSSKPDRLKDINNWRPITIGSILLRLFSRIVTARLSKACPLNPRQRGFIRAAGCSENLKLLQTIIWSAKREHRPLGVVFVDIAKAFDTVSHQHIIHALQQREVDPHIVGLVSNMYENISTYITTKRNTHTDKIQIRVGVKQGDPMSPLLFNLAMDPLLCKLEESGKGYHRGQSSITAMAFADDLVLLSDSWENMNTNISILETFCNLTGLKTQGQKCHGFYIKPTKDSYTINDCAAWTINGTPLNMIDPGESEKYLGLQFDPWIGIARSGLSTKLDFWLQRIDQAPLKPLQKTDILKTYTIPRLIYIADHSEVKTALLETLDQKIRTAVKEWLHLPPCTCDAILYSSTRDGGLGITKLAGLIPSVQARRLHRIAQSSDDTMKCFMEKEKMEQLHKKLWIQAGGDRENIPSIWEAPPSSEPPNNVSTNSEWEAPTQKDKFPKPCNWRKNEFKKWTKLASQGRGIVNFERDKISNHWIQYYRRIPHRKLLTALQLRANVYPTREFLARGRQDQYIKACRHCDADIESCAHIIGNCPVTQDARIKRHNYICELLLEEAKKKDWVVFKEPHIRDSNKELYKPDLIFVKDARALVVDVTVRYEAAKSSLEEAAAEKVRKYKHLETEVRHLTNAKDVTFVGFPLGARGKWHQDNFKLLTELGLSKSRQVKMAETFSTVALFSSVDIVHMFASRARKSMVM

SEQ ID NO: 1678 - protein, 2278 aa, synthetic construct
  source 1..2278: note = Description of Artificial Sequence: Synthetic polypeptide
MAPKKKRKVGIHGVPAADKKYSIGLAIGTNSVGWAVITDEYKVPSKKFKVLGNTDRHSIKKNLIGALLFDSGETAEATRLKRTARRRYTRRKNRICYLQEIFSNEMAKVDDSFFHRLEESFLVEEDKKHERHPIFGNIVDEVAYHEKYPTIYHLRKKLVDSTDKADLRLIYLALAHMIKFRGHFLIEGDLNPDNSDVDKLFIQLVQTYNQLFEENPINASGVDAKAILSARLSKSRRLENLIAQLPGEKKNGLFGNLIALSLGLTPNFKSNFDLAEDAKLQLSKDTYDDDLDNLLAQIGDQYADLFLAAKNLSDAILLSDILRVNTEITKAPLSASMIKRYDEHHQDLTLLKALVRQQLPEKYKEIFFDQSKNGYAGYIDGGASQEEFYKFIKPILEKMDGTEELLVKLNREDLLRKQRTFDNGSIPHQIHLGELHAILRRQEDFYPFLKDNREKIEKILTFRIPYYVGPLARGNSRFAWMTRKSEETITPWNFEEVVDKGASAQSFIERMTNFDKNLPNEKVLPKHSLLYEYFTVYNELTKVKYVTEGMRKPAFLSGEQKKAIVDLLFKTNRKVTVKQLKEDYFKKIECFDSVEISGVEDRFNASLGTYHDLLKIIKDKDFLDNEENEDILEDIVLTLTLFEDREMIEERLKTYAHLFDDKVMKQLKRRRYTGWGRLSRKLINGIRDKQSGKTILDFLKSDGFANRNFMQLIHDDSLTFKEDIQKAQVSGQGDSLHEHIANLAGSPAIKKGILQTVKVVDELVKVMGRHKPENIVIEMARENQTTQKGQKNSRERMKRIEEGIKELGSQILKEHPVENTQLQNEKLYLYYLQNGRDMYVDQELDINRLSDYDVDHIVPQSFLKDDSIDNKVLTRSDKNRGKSDNVPSEEVVKKMKNYWRQLLNAKLITQRKFDNLTKAERGGLSELDKAGFIKRQLVETRQITKHVAQILDSRMNTKYDENDKLIREVKVITLKSKLVSDFRKDFQFYKVREINNYHHAHDAYLNAVVGTALIKKYPKLESEFVYGDYKVYDVRKMIAKSEQEIGKATAKYFFYSNIMNFFKTEITLANGEIRKRPLIETNGETGEIVWDKGRDFATVRKVLSMPQVNIVKKTEVQTGGFSKESILPKRNSDKLIARKKDWDPKKYGGFDSPTVAYSVLVVAKVEKGKSKKLKSVKELLGITIMERSSFEKNPIDFLEAKGYKEVKKDLIIKLPKYSLFELENGRKRMLASAGELQKGNELALPSKYVNFLYLASHYEKLKGSPEDNEQKQLFVEQHKHYLDEIIEQISEFSKRVILADANLDKVLSAYNKHRDKPIREQAENIIHLFTLTNLGAPAAFKYFDTTIDRKRYTSTKEVLDATLIHQSITGLYETRIDLSQLGGDSGGSSGGSSGSETPGTSESATPESSGGSSGGSSTATRDKKDTVTREKHPKKPFQKWMKDRAIKKGNYLRFQRLFYLDRGKLAKIILDDIECLSCDIPLSEIYSVFKTRWETTGSFKSLGDFKTYGKADNTAFRELITAKEIEKNVQEMSKGSAPGPDGITLGDVVKMDPEFSRTMEIFNLWLTTGKIPDMVRGCRTVLIPKSSKPDRLKDINNWRPITIGSILLRLFSRIVTARLSKACPLNPRQRGFIRAAGCSENLKLLQTIIWSAKREHRPLGVVFVDIAKAFDTVSHQHIIHALQQREVDPHIVGLVSNMYENISTYITTKRNTHTDKIQIRVGVKQGDPMSPLLFNLAMDPLLCKLEESGKGYHRGQSSITAMAFADDLVLLSDSWENMNTNISILETFCNLTGLKTQGQKCHGFYIKPTKDSYTINDCAAWTINGTPLNMIDPGESEKYLGLQFDPWIGIARSGLSTKLDFWLQRIDQAPLKPLQKTDILKTYTIPRLIYIADHSEVKTALLETLDQKIRTAVKEWLHLPPCTCDAILYSSTRDGGLGITKLAGLIPSVQARRLHRIAQSSDDTMKCFMEKEKMEQLHKKLWIQAGGDRENIPSIWEAPPSSEPPNNVSTNSEWEAPTQKDKFPKPCNWRKNEFKKWTKLASQGRGIVNFERDKISNHWIQYYRRIPHRKLLTALQLRANVYPTREFLARGRQDQYIKACRHCDADIESCAHIIGNCPVTQDARIKRHNYICELLLEEAKKKDWVVFKEPHIRDSNKELYKPALIFVKDARALVVDVTVRYEAAKSSLEEAAAEKVRKYKHLETEVRHLTNAKDVTFVGFPLGARGKWHQDNFKLLTELGLSKSRQVKMAETFSTVALFSSVDIVHMFASRARKSMVM

SEQ ID NO: 1679 - protein, 2278 aa, synthetic construct
  source 1..2278: note = Description of Artificial Sequence: Synthetic polypeptide
MAPKKKRKVGIHGVPAADKKYSIGLDIGTNSVGWAVITDEYKVPSKKFKVLGNTDRHSIKKNLIGALLFDSGETAEATRLKRTARRRYTRRKNRICYLQEIFSNEMAKVDDSFFHRLEESFLVEEDKKHERHPIFGNIVDEVAYHEKYPTIYHLRKKLVDSTDKADLRLIYLALAHMIKFRGHFLIEGDLNPDNSDVDKLFIQLVQTYNQLFEENPINASGVDAKAILSARLSKSRRLENLIAQLPGEKKNGLFGNLIALSLGLTPNFKSNFDLAEDAKLQLSKDTYDDDLDNLLAQIGDQYADLFLAAKNLSDAILLSDILRVNTEITKAPLSASMIKRYDEHHQDLTLLKALVRQQLPEKYKEIFFDQSKNGYAGYIDGGASQEEFYKFIKPILEKMDGTEELLVKLNREDLLRKQRTFDNGSIPHQIHLGELHAILRRQEDFYPFLKDNREKIEKILTFRIPYYVGPLARGNSRFAWMTRKSEETITPWNFEEVVDKGASAQSFIERMTNFDKNLPNEKVLPKHSLLYEYFTVYNELTKVKYVTEGMRKPAFLSGEQKKAIVDLLFKTNRKVTVKQLKEDYFKKIECFDSVEISGVEDRFNASLGTYHDLLKIIKDKDFLDNEENEDILEDIVLTLTLFEDREMIEERLKTYAHLFDDKVMKQLKRRRYTGWGRLSRKLINGIRDKQSGKTILDFLKSDGFANRNFMQLIHDDSLTFKEDIQKAQVSGQGDSLHEHIANLAGSPAIKKGILQTVKVVDELVKVMGRHKPENIVIEMARENQTTQKGQKNSRERMKRIEEGIKELGSQILKEHPVENTQLQNEKLYLYYLQNGRDMYVDQELDINRLSDYDVDHIVPQSFLKDDSIDNKVLTRSDKARGKSDNVPSEEVVKKMKNYWRQLLNAKLITQRKFDNLTKAERGGLSELDKAGFIKRQLVETRQITKHVAQILDSRMNTKYDENDKLIREVKVITLKSKLVSDFRKDFQFYKVREINNYHHAHDAYLNAVVGTALIKKYPKLESEFVYGDYKVYDVRKMIAKSEQEIGKATAKYFFYSNIMNFFKTEITLANGEIRKRPLIETNGETGEIVWDKGRDFATVRKVLSMPQVNIVKKTEVQTGGFSKESILPKRNSDKLIARKKDWDPKKYGGFDSPTVAYSVLVVAKVEKGKSKKLKSVKELLGITIMERSSFEKNPIDFLEAKGYKEVKKDLIIKLPKYSLFELENGRKRMLASAGELQKGNELALPSKYVNFLYLASHYEKLKGSPEDNEQKQLFVEQHKHYLDEIIEQISEFSKRVILADANLDKVLSAYNKHRDKPIREQAENIIHLFTLTNLGAPAAFKYFDTTIDRKRYTSTKEVLDATLIHQSITGLYETRIDLSQLGGDSGGSSGGSSGSETPGTSESATPESSGGSSGGSSTATRDKKDTVTREKHPKKPFQKWMKDRAIKKGNYLRFQRLFYLDRGKLAKIILDDIECLSCDIPLSEIYSVFKTRWETTGSFKSLGDFKTYGKADNTAFRELITAKEIEKNVQEMSKGSAPGPDGITLGDVVKMDPEFSRTMEIFNLWLTTGKIPDMVRGCRTVLIPKSSKPDRLKDINNWRPITIGSILLRLFSRIVTARLSKACPLNPRQRGFIRAAGCSENLKLLQTIIWSAKREHRPLGVVFVDIAKAFDTVSHQHIIHALQQREVDPHIVGLVSNMYENISTYITTKRNTHTDKIQIRVGVKQGDPMSPLLFNLAMDPLLCKLEESGKGYHRGQSSITAMAFADDLVLLSDSWENMNTNISILETFCNLTGLKTQGQKCHGFYIKPTKDSYTINDCAAWTINGTPLNMIDPGESEKYLGLQFDPWIGIARSGLSTKLDFWLQRIDQAPLKPLQKTDILKTYTIPRLIYIADHSEVKTALLETLDQKIRTAVKEWLHLPPCTCDAILYSSTRDGGLGITKLAGLIPSVQARRLHRIAQSSDDTMKCFMEKEKMEQLHKKLWIQAGGDRENIPSIWEAPPSSEPPNNVSTNSEWEAPTQKDKFPKPCNWRKNEFKKWTKLASQGRGIVNFERDKISNHWIQYYRRIPHRKLLTALQLRANVYPTREFLARGRQDQYIKACRHCDADIESCAHIIGNCPVTQDARIKRHNYICELLLEEAKKKDWVVFKEPHIRDSNKELYKPALIFVKDARALVVDVTVRYEAAKSSLEEAAAEKVRKYKHLETEVRHLTNAKDVTFVGFPLGARGKWHQDNFKLLTELGLSKSRQVKMAETFSTVALFSSVDIVHMFASRARKSMVM

SEQ ID NO: 1680 - protein, 2278 aa, synthetic construct
  source 1..2278: note = Description of Artificial Sequence: Synthetic polypeptide
MAPKKKRKVGIHGVPAADKKYSIGLDIGTNSVGWAVITDEYKVPSKKFKVLGNTDRHSIKKNLIGALLFDSGETAEATRLKRTARRRYTRRKNRICYLQEIFSNEMAKVDDSFFHRLEESFLVEEDKKHERHPIFGNIVDEVAYHEKYPTIYHLRKKLVDSTDKADLRLIYLALAHMIKFRGHFLIEGDLNPDNSDVDKLFIQLVQTYNQLFEENPINASGVDAKAILSARLSKSRRLENLIAQLPGEKKNGLFGNLIALSLGLTPNFKSNFDLAEDAKLQLSKDTYDDDLDNLLAQIGDQYADLFLAAKNLSDAILLSDILRVNTEITKAPLSASMIKRYDEHHQDLTLLKALVRQQLPEKYKEIFFDQSKNGYAGYIDGGASQEEFYKFIKPILEKMDGTEELLVKLNREDLLRKQRTFDNGSIPHQIHLGELHAILRRQEDFYPFLKDNREKIEKILTFRIPYYVGPLARGNSRFAWMTRKSEETITPWNFEEVVDKGASAQSFIERMTNFDKNLPNEKVLPKHSLLYEYFTVYNELTKVKYVTEGMRKPAFLSGEQKKAIVDLLFKTNRKVTVKQLKEDYFKKIECFDSVEISGVEDRFNASLGTYHDLLKIIKDKDFLDNEENEDILEDIVLTLTLFEDREMIEERLKTYAHLFDDKVMKQLKRRRYTGWGRLSRKLINGIRDKQSGKTILDFLKSDGFANRNFMQLIHDDSLTFKEDIQKAQVSGQGDSLHEHIANLAGSPAIKKGILQTVKVVDELVKVMGRHKPENIVIEMARENQTTQKGQKNSRERMKRIEEGIKELGSQILKEHPVENTQLQNEKLYLYYLQNGRDMYVDQELDINRLSDYDVDHIVPQSFLKDDSIDNKVLTRSDKNRGKSDNVPSEEVVKKMKNYWRQLLNAKLITQRKFDNLTKAERGGLSELDKAGFIKRQLVETRQITKHVAQILDSRMNTKYDENDKLIREVKVITLKSKLVSDFRKDFQFYKVREINNYHHAHDAYLNAVVGTALIKKYPKLESEFVYGDYKVYDVRKMIAKSEQEIGKATAKYFFYSNIMNFFKTEITLANGEIRKRPLIETNGETGEIVWDKGRDFATVRKVLSMPQVNIVKKTEVQTGGFSKESILPKRNSDKLIARKKDWDPKKYGGFDSPTVAYSVLVVAKVEKGKSKKLKSVKELLGITIMERSSFEKNPIDFLEAKGYKEVKKDLIIKLPKYSLFELENGRKRMLASAGELQKGNELALPSKYVNFLYLASHYEKLKGSPEDNEQKQLFVEQHKHYLDEIIEQISEFSKRVILADANLDKVLSAYNKHRDKPIREQAENIIHLFTLTNLGAPAAFKYFDTTIDRKRYTSTKEVLDATLIHQSITGLYETRIDLSQLGGDSGGSSGGSSGSETPGTSESATPESSGGSSGGSSTATRDKKDTVTREKHPKKPFQKWMKDRAIKKGNYLRFQRLFYLDRGKLAKIILDDIECLSCDIPLSEIYSVFKTRWETTGSFKSLGDFKTYGKADNTAFRELITAKEIEKNVQEMSKGSAPGPDGITLGDVVKMDPEFSRTMEIFNLWLTTGKIPDMVRGCRTVLIPKSSKPDRLKDINNWRPITIGSILLRLFSRIVTARLSKACPLNPRQRGFIRAAGCSENLKLLQTIIWSAKREHRPLGVVFVDIAKAFDTVSHQHIIHALQQREVDPHIVGLVSNMYENISTYITTKRNTHTDKIQIRVGVKQGDPMSPLLFNLAMDPLLCKLEESGKGYHRGQSSITAMAFADDLVLLSDSWENMNTNISILETFCNLTGLKTQGQKCHGFYIKPTKDSYTINDCAAWTINGTPLNMIDPGESEKYLGLQFDPWIGIARSGLSTKLDFWLQRIDQAPLKPLQKTDILKTYTIPRLIYIADHSEVKTALLETLDQKIRTAVKEWLHLPPCTCDAILYSSTRDGGLGITKLAGLIPSVQARRLHRIAQSSDDTMKCFMEKEKMEQLHKKLWIQAGGDRENIPSIWEAPPSSEPPNNVSTNSEWEAPTQKDKFPKPCNWRKNEFKKWTKLASQGRGIVNFERDKISNHWIQYYRRIPHRKLLTALQLRANVYPTREFLARGRQDQYIKACRHCDADIESCAHIIGNCPVTQDARIKRHNYICELLLEEAKKKDWVVFKEPHIRDSNKELYKPALIFVKDARALVVDVTVRYEAAKSSLEEAAAEKVRKYKHLETEVRHLTNAKDVTFVGFPLGARGKWHQDNFKLLTELGLSKSRQVKMAETFSTVALFSSVDIVHMFASRARKSMVM

SEQ ID NO: 1681 - protein, 27 aa, unidentified
  source 1..27: note = Description of Unknown:R2Tg NoLS sequence
APTQKDKFPKPCNWRKNEFKKWTKLAS

SEQ ID NO: 1682 - protein, 27 aa, synthetic construct
  source 1..27: note = Description of Artificial Sequence: Synthetic peptide
APTQADAFPAPCNWRANEFAAWTALAS

SEQ ID NO: 1683 - RNA, 100 nt, synthetic construct
  source 1..100: mol_type = other RNA; note = Description of Artificial Sequence: Synthetic polynucleotide
  misc_difference 1..100: note = This sequence may encompass 96-100 nucleotides
aaaaaaaaaaaaaaaaaaaaaaaaaaaaaaaaaaaaaaaaaaaaaaaaaaaaaaaaaaaaaaaaaaaaaaaaaaaaaaaaaaaaaaaaaaaaaaaaaaaa

SEQ ID NO: 1684 - RNA, 23 nt, unidentified
  source 1..23: mol_type = unassigned RNA; note = Description of Unknown:miR-142 sequence
tgtagtgtttcctactttatgga

SEQ ID NO: 1685 - DNA, 188 bp, synthetic construct
  source 1..188: mol_type = other DNA; note = Description of Artificial Sequence: Synthetic polynucleotide
ggcggctgaggaagctgagggttttagagctagaaatagcaagttaaaataaggctagtccgttatcaacttgaaaaagtgggaccgagtcggtccagtccctcaagtccttccagcagcagcagcagcagcagcagcagcagccgccaccgccgccgccgccgccgccgcctcctcagcttcctcag

SEQ ID NO: 1686 - DNA, 26 bp, synthetic construct
  source 1..26: mol_type = other DNA; note = Description of Artificial Sequence: Synthetic oligonucleotide
  misc_difference 1: note = a, c, t, g, unknown or other
  misc_difference 2: note = a, c, t, g, unknown or other
  misc_difference 3: note = a, c, t, g, unknown or other
  misc_difference 4: note = a, c, t, g, unknown or other
  misc_difference 5: note = a, c, t, g, unknown or other
  misc_difference 6: note = a, c, t, g, unknown or other
  misc_difference 7: note = a, c, t, g, unknown or other
  misc_difference 20: note = a, c, t, g, unknown or other
  misc_difference 21: note = a, c, t, g, unknown or other
  misc_difference 22: note = a, c, t, g, unknown or other
  misc_difference 23: note = a, c, t, g, unknown or other
  misc_difference 24: note = a, c, t, g, unknown or other
  misc_difference 25: note = a, c, t, g, unknown or other
  misc_difference 26: note = a, c, t, g, unknown or other
nnnnnnnatgatgatgatgnnnnnnn

SEQ ID NO: 1687 - DNA, 26 bp, synthetic construct
  source 1..26: mol_type = other DNA; note = Description of Artificial Sequence: Synthetic oligonucleotide
  misc_difference 1: note = a, c, t, g, unknown or other
  misc_difference 2: note = a, c, t, g, unknown or other
  misc_difference 3: note = a, c, t, g, unknown or other
  misc_difference 4: note = a, c, t, g, unknown or other
  misc_difference 5: note = a, c, t, g, unknown or other
  misc_difference 6: note = a, c, t, g, unknown or other
  misc_difference 7: note = a, c, t, g, unknown or other
  misc_difference 20: note = a, c, t, g, unknown or other
  misc_difference 21: note = a, c, t, g, unknown or other
  misc_difference 22: note = a, c, t, g, unknown or other
  misc_difference 23: note = a, c, t, g, unknown or other
  misc_difference 24: note = a, c, t, g, unknown or other
  misc_difference 25: note = a, c, t, g, unknown or other
  misc_difference 26: note = a, c, t, g, unknown or other
nnnnnnncatcatcatcatnnnnnnn

SEQ ID NO: 1688 - DNA, 26 bp, synthetic construct
  source 1..26: mol_type = other DNA; note = Description of Artificial Sequence: Synthetic oligonucleotide
  misc_difference 1: note = a, c, t, g, unknown or other
  misc_difference 2: note = a, c, t, g, unknown or other
  misc_difference 3: note = a, c, t, g, unknown or other
  misc_difference 4: note = a, c, t, g, unknown or other
  misc_difference 5: note = a, c, t, g, unknown or other
  misc_difference 6: note = a, c, t, g, unknown or other
  misc_difference 7: note = a, c, t, g, unknown or other
  misc_difference 20: note = a, c, t, g, unknown or other
  misc_difference 21: note = a, c, t, g, unknown or other
  misc_difference 22: note = a, c, t, g, unknown or other
  misc_difference 23: note = a, c, t, g, unknown or other
  misc_difference 24: note = a, c, t, g, unknown or other
  misc_difference 25: note = a, c, t, g, unknown or other
  misc_difference 26: note = a, c, t, g, unknown or other
nnnnnnnatgatgatgatgnnnnnnn

SEQ ID NO: 1689 - DNA, 20 bp, synthetic construct
  source 1..20: mol_type = other DNA; note = Description of Artificial Sequence: Synthetic oligonucleotide
ggggccactagggacaggat

SEQ ID NO: 1690 - DNA, 12 bp, synthetic construct
  source 1..12: mol_type = other DNA; note = Description of Artificial Sequence: Synthetic oligonucleotide
ctgtccctagtg

SEQ ID NO: 1691 - DNA, 20 bp, synthetic construct
  source 1..20: mol_type = other DNA; note = Description of Artificial Sequence: Synthetic oligonucleotide
agagagatggctccaggaaa

SEQ ID NO: 1692 - DNA, 20 bp, synthetic construct
  source 1..20: mol_type = other DNA; note = Description of Artificial Sequence: Synthetic oligonucleotide
tcagggttctggatatctgt

SEQ ID NO: 1693 - DNA, 20 bp, synthetic construct
  source 1..20: mol_type = other DNA; note = Description of Artificial Sequence: Synthetic oligonucleotide
actccagtctttctagaaga

SEQ ID NO: 1694 - DNA, 106 bp, synthetic construct
  source 1..106: mol_type = other DNA; note = Description of Artificial Sequence: Synthetic polynucleotide
ggcccagactgagcacgtgagttttagagctagaaatagcaagttaaaataaggctagtccgttatcaacttgaaaaagtggcaccgagtcggtgctctgccatca

SEQ ID NO: 1695 - DNA, 20 bp, synthetic construct
  source 1..20: mol_type = other DNA; note = Description of Artificial Sequence: Synthetic oligonucleotide
tgggccccaaggattgaccc

SEQ ID NO: 1696 - DNA, 20 bp, synthetic construct
  source 1..20: mol_type = other DNA; note = Description of Artificial Sequence: Synthetic oligonucleotide
cccaaggattgacccaggcc

SEQ ID NO: 1697 - DNA, 20 bp, synthetic construct
  source 1..20: mol_type = other DNA; note = Description of Artificial Sequence: Synthetic oligonucleotide
ccaaggattgacccaggcca

SEQ ID NO: 1698 - DNA, 20 bp, synthetic construct
  source 1..20: mol_type = other DNA; note = Description of Artificial Sequence: Synthetic oligonucleotide
ggattgacccaggccagggc

SEQ ID NO: 1699 - DNA, 20 bp, synthetic construct
  source 1..20: mol_type = other DNA; note = Description of Artificial Sequence: Synthetic oligonucleotide
gcagaaatagactaattgca

SEQ ID NO: 1700 - DNA, 20 bp, synthetic construct
  source 1..20: mol_type = other DNA; note = Description of Artificial Sequence: Synthetic oligonucleotide
cagaaatagactaattgcat

SEQ ID NO: 1701 - DNA, 20 bp, synthetic construct
  source 1..20: mol_type = other DNA; note = Description of Artificial Sequence: Synthetic oligonucleotide
taattgcatgggcgtttccc

SEQ ID NO: 1702 - DNA, 20 bp, synthetic construct
  source 1..20: mol_type = other DNA; note = Description of Artificial Sequence: Synthetic oligonucleotide
aattgcatgggcgtttccct

SEQ ID NO: 1703 - DNA, 20 bp, synthetic construct
  source 1..20: mol_type = other DNA; note = Description of Artificial Sequence: Synthetic oligonucleotide
tccctgggatccctgtctcc

SEQ ID NO: 1704 - DNA, 20 bp, synthetic construct
  source 1..20: mol_type = other DNA; note = Description of Artificial Sequence: Synthetic oligonucleotide
tctctcatccatgcctttct

SEQ ID NO: 1705 - DNA, 20 bp, synthetic construct
  source 1..20: mol_type = other DNA; note = Description of Artificial Sequence: Synthetic oligonucleotide
cccttgcttaaaactctcca

SEQ ID NO: 1706 - DNA, 20 bp, synthetic construct
  source 1..20: mol_type = other DNA; note = Description of Artificial Sequence: Synthetic oligonucleotide
tctcatgccaagctccctgc

SEQ ID NO: 1707 - DNA, 20 bp, synthetic construct
  source 1..20: mol_type = other DNA; note = Description of Artificial Sequence: Synthetic oligonucleotide
agctccctgcaggacatccc

SEQ ID NO: 1708 - DNA, 20 bp, synthetic construct
  source 1..20: mol_type = other DNA; note = Description of Artificial Sequence: Synthetic oligonucleotide
gcaggacatcccaggccctc

SEQ ID NO: 1709 - DNA, 20 bp, synthetic construct
  source 1..20: mol_type = other DNA; note = Description of Artificial Sequence: Synthetic oligonucleotide
caggacatcccaggccctct

SEQ ID NO: 1710 - DNA, 20 bp, synthetic construct
  source 1..20: mol_type = other DNA; note = Description of Artificial Sequence: Synthetic oligonucleotide
ccctctgggacagcagctca

SEQ ID NO: 1711 - DNA, 20 bp, synthetic construct
  source 1..20: mol_type = other DNA; note = Description of Artificial Sequence: Synthetic oligonucleotide
cctctgggacagcagctcac

SEQ ID NO: 1712 - DNA, 20 bp, synthetic construct
  source 1..20: mol_type = other DNA; note = Description of Artificial Sequence: Synthetic oligonucleotide
gacgccctctggaggaagca

SEQ ID NO: 1713 - DNA, 20 bp, synthetic construct
  source 1..20: mol_type = other DNA; note = Description of Artificial Sequence: Synthetic oligonucleotide
cgacgccctctggaggaagc

SEQ ID NO: 1714 - DNA, 20 bp, synthetic construct
  source 1..20: mol_type = other DNA; note = Description of Artificial Sequence: Synthetic oligonucleotide
tgtcctgcgacgccctctgg

SEQ ID NO: 1715 - DNA, 20 bp, synthetic construct
  source 1..20: mol_type = other DNA; note = Description of Artificial Sequence: Synthetic oligonucleotide
agctgtcctgcgacgccctc

SEQ ID NO: 1716 - DNA, 20 bp, synthetic construct
  source 1..20: mol_type = other DNA; note = Description of Artificial Sequence: Synthetic oligonucleotide
gcacatactagcccctgtct

SEQ ID NO: 1717 - DNA, 20 bp, synthetic construct
  source 1..20: mol_type = other DNA; note = Description of Artificial Sequence: Synthetic oligonucleotide
gtcaaccagtatcccggtgc

SEQ ID NO: 1718 - DNA, 20 bp, synthetic construct
  source 1..20: mol_type = other DNA; note = Description of Artificial Sequence: Synthetic oligonucleotide
aaacttgtcaaccagtatcc

SEQ ID NO: 1719 - DNA, 20 bp, synthetic construct
  source 1..20: mol_type = other DNA; note = Description of Artificial Sequence: Synthetic oligonucleotide
ccagggacctccctaggtgc

SEQ ID NO: 1720 - DNA, 20 bp, synthetic construct
  source 1..20: mol_type = other DNA; note = Description of Artificial Sequence: Synthetic oligonucleotide
ccccttccagggacctccct

SEQ ID NO: 1721 - DNA, 20 bp, synthetic construct
  source 1..20: mol_type = other DNA; note = Description of Artificial Sequence: Synthetic oligonucleotide
ggtgaggctggccccttcca

SEQ ID NO: 1722 - DNA, 20 bp, synthetic construct
  source 1..20: mol_type = other DNA; note = Description of Artificial Sequence: Synthetic oligonucleotide
tggtgaggctggccccttcc

SEQ ID NO: 1723 - DNA, 20 bp, synthetic construct
  source 1..20: mol_type = other DNA; note = Description of Artificial Sequence: Synthetic oligonucleotide
ccctcctctcctggtgaggc

SEQ ID NO: 1724 - DNA, 20 bp, synthetic construct
  source 1..20: mol_type = other DNA; note = Description of Artificial Sequence: Synthetic oligonucleotide
aggtccctcctctcctggtg

SEQ ID NO: 1725 - DNA, 20 bp, synthetic construct
  source 1..20: mol_type = other DNA; note = Description of Artificial Sequence: Synthetic oligonucleotide
gggccaggtccctcctctcc

SEQ ID NO: 1726 - DNA, 20 bp, synthetic construct
  source 1..20: mol_type = other DNA; note = Description of Artificial Sequence: Synthetic oligonucleotide
gagctcgaccctgaagggcc

SEQ ID NO: 1727 - DNA, 20 bp, synthetic construct
  source 1..20: mol_type = other DNA; note = Description of Artificial Sequence: Synthetic oligonucleotide
ctgttgagctcgaccctgaa

SEQ ID NO: 1728 - DNA, 20 bp, synthetic construct
  source 1..20: mol_type = other DNA; note = Description of Artificial Sequence: Synthetic oligonucleotide
tctgttgagctcgaccctga

SEQ ID NO: 1729 - DNA, 20 bp, synthetic construct
  source 1..20: mol_type = other DNA; note = Description of Artificial Sequence: Synthetic oligonucleotide
gctgaaagccactgggctct

SEQ ID NO: 1730 - DNA, 20 bp, synthetic construct
  source 1..20: mol_type = other DNA; note = Description of Artificial Sequence: Synthetic oligonucleotide
tgctgaaagccactgggctc

SEQ ID NO: 1731 - DNA, 20 bp, synthetic construct
  source 1..20: mol_type = other DNA; note = Description of Artificial Sequence: Synthetic oligonucleotide
tgcaggtgctgaaagccact

SEQ ID NO: 1732 - DNA, 20 bp, synthetic construct
  source 1..20: mol_type = other DNA; note = Description of Artificial Sequence: Synthetic oligonucleotide
atgcaggtgctgaaagccac

SEQ ID NO: 1733 - DNA, 20 bp, synthetic construct
  source 1..20: mol_type = other DNA; note = Description of Artificial Sequence: Synthetic oligonucleotide
ttgatctctgattttcatgc

SEQ ID NO: 1734 - RNA, 114 nt, Taeniopygia guttata
  source 1..114: mol_type = unassigned RNA
ggcgggagtaactatgactctcttaagggtctagttacaactgggcatcgctgcagagatcgcacctcctcgtggtcccgctggtagcccttcgaagggtgactaagtcgatct

SEQ ID NO: 1735 - protein, 30 aa, Homo sapiens; identical to SEQ ID NO: 1592

SEQ ID NO: 1736 - protein, 6 aa, synthetic construct
  source 1..6: note = Description of Artificial Sequence: Synthetic peptide
GSSGSS

SEQ ID NO: 1737 - DNA, 152 bp, Strongylocentrotus purpuratus
  source 1..152: mol_type = unassigned DNA
aaggtggttcagttcctccgtttagaaacaggggcttaaaatttgcccatttgaatattcatagcttagttgctaagattgacgaacttagattacttctgagaaatgcatcatttgatgttattggtttaaatgaaacattttgcgactcc

SEQ ID NO: 1738 - DNA, 94 bp, Drosophila simulans
  source 1..94: mol_type = unassigned DNA
tcgagctttattgcaagaccaaccaagcagatattcttctcatatccgaaacccatttttcagacaggtcctacttcaccttaagggggtatga

SEQ ID NO: 1739 - DNA, 325 bp, Esox lucius
  source 1..325: mol_type = unassigned DNA
ctccttgaactgccaccttaacgtggtggaggggtttgagtacccgagtgaccctaggagctatgttgtctggggctatatgcccctggtagggtctcccaaggcaaacaggtcctaggcgatgggtcagactaagagcggttcaaaaccccttaatgagaaattgtgccgtgacgtcgcccggcatggcgcagccggggccccaccctggagccaggcccgaggagcgacatggggccgccctcccgtgggctcaccacccacaggagggaccataaggggccggtgcgagaggatcgggcggcagtcgaaggcgggggcctga

SEQ ID NO: 1740 - DNA, 980 bp, Aedes aegypti
  source 1..980: mol_type = unassigned DNA
catacgttgagtgactaccgttgagagcggacgtgtctgtgcttgcgtgctgttacagtggttcgagtgaaaagatcgtttttgcgattgtcgtaggaggaattgtgctggggtttttgggtttccggaagtgccgtgttggagcagttgggaggttaccgtgctgggtttccgacggattggactggatccgtgatttggccagcaactcggctgggtgaaataggcttttcggagagtagtgagaaaacgaaaaagcagctggtagtggagtgcggaggaggtagaagcctagtggaggagtgcggagggggtgaaagtgcggtgagggctgtagtcggtaaattccgcatttcagattgctgattgttagtgtcctgaagagaagactaaattcctttaattggggcagctggcgtggttaagggattgttccggggaagcggaaagggagtgtgaagtgtttggccagaggaagttggcggaaaaaaaaattggaacgccgaagaaagaaaaaagttttgaggcgagagtggcgggggggtgttgcggtcgaaagcttcaacggaagaaaacacgagtggtgtgagtgagaagaccttgatcggttttggcggtaaagctcgttgcaggagttcggaaaaaaaaaaaaagaaaattggaagcgagagtgagtgccacgtagaagcgaagtggagaaaagtggcatcgcacactgtgagaggaggaagtggagcatcgaaataggcaagcggctgagtagcgacagagagagagtaagtgagaaagcgcatctgtagcggggaggcagaaataagaagcagggctgctggtcgatccgtggcgaatgcggtggagagcacgaaggaagattccaacgcagcgagactgagtgcaccggtttcattggtggcagtattggtgagtcattcactttctcgttccaataatttttccaagtatctcgaagtttggtcctc

SEQ ID NO: 1741 - DNA, 139 bp, Solenopsis invicta
  source 1..139: mol_type = unassigned DNA
aaagatcaatgaccagctaattaaagactggttacgaaccacgggaagattcgttagggagcatcctaatattttgtttaccagagcggacaagggtaatgtaacagttgcccttgacaagaatgattatatctcgaag

SEQ ID NO: 1742 - DNA, 59 bp, unidentified
  source 1..59: mol_type = unassigned DNA; note = Description of Unknown:Virilis group sequence
ggtcgccagagccatcaataaatatcaacggaaggcacgccgtatgcacagcaaccaac

SEQ ID NO: 1743 - DNA, 144 bp, Strongylocentrotus purpuratus
  source 1..144: mol_type = unassigned DNA
ggtaaaaagtcgcctcatataactaataagtccatatcagacctattgattgtacaatggaacgcacaaggcttgacggcgcatggcgcaaactttttatcttcccttattgataacaatttgttaggtattcacccagatata

SEQ ID NO: 1744 - DNA, 1041 bp, Xenopus tropicalis
  source 1..1041: mol_type = unassigned DNA
tatccctctgctgtatactgccatataacccactatattgcagcctctttattaatggtaattctcatctgtgtatccctctgctgtatactgccatataacccactatattgcagcctctttattaatggtaattctgtcatctgtgtatccctctgctgtatactgccatataacccactatattgcagcctctttattaatggtaattctcatctgtgtatccctctgctgtatactgccatataacccactatattgcagcctctttattaatggtaattctctcatcttgtgtatctgctatgccaataactcattctattaggcctaccttgatttagtacttgccatagctgtgtcaaactcacatctgtgtccactcctcagtgccaatatttcacaagtgctaggaaaattgcagttaaacaaggcagttcatggaactaactcatatctcttctcacttctaatggtaattctcatctgtgtatccctctgctgtatactgccatataacccactatattgcagcctctttattaatggtaattgtaactcatcttgtatctgctatgccaataactttttctgttaggcctaccttgatttagtacttgtgatagctgtgtcaaactcacatctgtgtccactcctcagtgagcaagagatatttttacagccccaaaacttggttctggtgcttgtaaaagtctccccctccccacacagcctgcttactttgatccctgattgaactgattaattagtcaattagtttctggctttccccaatcagctgcatataaattcagatgcagccttggggatggcactagtgtcaggggcaggcactggtgctaccatttcctaagtgccaacatttcacaagtgctaggaagaagggaatggcagttaaacaaggcagttggacaaggcattgacaaggctacaaactatctcctatcaacactgaacaacgtggaatcgcaagaaaacaactttgcttattcatggtagtttgttatttcctatcccaaa

SEQ ID NO: 1745 - DNA, 117 bp, Vitis vinifera
  source 1..117: mol_type = unassigned DNA
ggagtgttcagtgaattattgtgggactagaaagagtgcggggttgcttcagattgctaactgaagtttgggtttgttggtccagtgaggggagaggggcttattaagatggatgtt

SEQ ID NO: 1746 - DNA, 363 bp, Schmidtea mediterranea
  source 1..363: mol_type = unassigned DNA
gtcatagggtgaactgcaattctgacacgatgaccgagctgtgtcagtttgcagctagtcgctaaagactcgatcagtccgccaagtgaggtggccgggtatctgcagcactagagccactggtatcaagagcagagatacgcgagtggaagttgagtacgactaccttcacggggtcctcctgataaccacagtggactgtgggaactaaatgtgtgctcagcgttccctactttctcgtagggtaaagggtaagataacccagagaatatcccatgggagatatccatggaaaaagcaccacgttagacaatccgatggtctaactcggctccgaggggctaactatcccaaagggcttaa

SEQ ID NO: 1747 - DNA, 102 bp, unidentified
  source 1..102: mol_type = unassigned DNA; note = Description of Unknown:Nasonia vitripennis sequence
ccattccttcgtacgggttttcgtgccggcatagccgggtgggagactcgcgcgggggaggtcatatctcaccaccatcttcgagctttttgctgcacctga

SEQ ID NO: 1748 - DNA, 209 bp, Schmidtea mediterranea
  source 1..209: mol_type = unassigned DNA
aaacgacatcatgaacgcttggccgcaacaatccagttatccctgcggtaacattgtggaactcataagacaagtactaaaagaagaattagaaaaattagaagaaaaaattgaaaataatttatttataaaatttaaaaatttaaatttaaatttaaatgaagataaaaatttatttaatccaataaataatcaagaaaatcaagaaa

SEQ ID NO: 1749 - DNA, 175 bp, Taeniopygia guttata
  source 1..175: mol_type = unassigned DNA
gtctagttacaactgggcatcgctgcagagatcgcacctcctcgtggtcccgctggtagcccttcgaagggtgactaagtcgatctctgccccaggtacggagccgttgggactcaccagtccaacgtaactcctgcctaaactcggtgaaacaaattcctcggtaaaaagcccc

SEQ ID NO: 1750 - DNA, 579 bp, Aedes aegypti
  source 1..579: mol_type = unassigned DNA
acggattaatggtgtgaatgtgaacgggaggtttcgaaagacaaatgcatgaacggagctagcgagtgataaatcgggagcggggagacgaagtgagaggttggtgcgagagagacgaagtgaaaggtgggtgatagtaaagtaggtgagatgtgtgagaggtaaatatatagacactggagtgaagtgaccattggattattagtagtagtgtaggtcaatcaagaagtggtgaaggtggtagtgacgatgacggttaggatgccatagataatatataaagcgacttggtggtgttgaagaaatgagaagggtgtagagaagagcggaaaagaaaggtgaattgaaacacaggggtgttcaactgaattgggctacgtgacaggattggagcgataagagaaaaataagtgaaaggtattaattatttaaaactaaggtaagacgactgatgactggaatgcattctaatacactgatgaattaaggtaagactagatataagcaaatatatattatgagttttctttttctttatcaattatagcataacatttataactacacaaagagtacaaa

SEQ ID NO: 1751 - DNA, 15 bp, Folsomia candida
  source 1..15: mol_type = unassigned DNA
tgcatcattgccaaa

SEQ ID NO: 1752 - DNA, 304 bp, Nematostella vectensis
  source 1..304: mol_type = unassigned DNA
aaacgggagatctaatctcatccttggcctcagtgagacgtttttggacgaatcatggacggataccgagttggctatagatggttactcgctggttagagctgatcgcacatacaactctggtgacgggctgctagttttcatacccagccatatttccttcaaaaggcgcgtggatcttgagtttgaaggtattgaagccatttggcttgagctattattccaccgatcgagcccgtgctttgcttgttttatttaccgtcgtccttcttctacctctgcatacatagctcttttggacgaa

SEQ ID NO: 1753 - DNA, 111 bp, Aedes aegypti
  source 1..111: mol_type = unassigned DNA
ggtattccaacgggaatgtcttcttacgtaaggatgaaagttctaaggcaatccatgtgagtgatgttagtgttctatcatcgattgtgtaatatttcctgattaagttaa

SEQ ID NO: 1754 - DNA, 288 bp, Caenorhabditis sp.
  source 1..288: mol_type = unassigned DNA
tttcgaagacagacgagatgcgatcaagaccctcactacattcaactcaatcaaaagccgcgtgaccggttgtcacaacgccaccattcgtcaggacatgtccaaaccggagctgtcaaaatttcgggactcgtggaagcaggccatcaagaacaacaacgaagctggacaagggatctggactgtgagaaacctcgagctggtcagaattccctacaaggacaatgaaactcctcacccttggacagtgcgaaacagaaccaagtaaagtttttctcccttgcccat

SEQ ID NO: 1755 - DNA, 516 bp, Caenorhabditis elegans
  source 1..516: mol_type = unassigned DNA
agctggttaattgcatgtaggctaatgctcgttccattgcatcgcttgaaaaacttgaatttgtccataagttcgtagcctctaatagtttagacatcttgtttgttaccgaaacatttctaagtaatgcttttactgatttctcatgctcttcacctcactatacctgcataagatctgatcggcttgagtgccatccaaaaaatgcggcggaggtactgctgtgttttttcataaaaaatgggctcttacgcctgtctcaattgcaccttccttttatctctcgcatttttgtcaaattctggcattagaccataagcaatccaaaactagatttatactgatataccgcccccatccactaccgcaagtagaaccgctgagctctttaaaaatctaaaccagcttctcgactgcccctcctatacttatgtcctcctcggtgatttcaattttgcaaacaccaagtggaattcaaattttcttcccacgggctctgagtatttctataattgg

SEQ ID NO: 1756 - DNA, 318 bp, Caenorhabditis sp.
  source 1..318: mol_type = unassigned DNA
cttcttctgtactgagcctcttcgcggcgaagaagatcaacagatgtcacacttctacaaacccggcgagttcgtcacgccgggagtgaaacatctggccaagaagtacaacgtctcacgcaggtcagaggtagcgtcgaatactctctgtgaccgggcggctttagcattggtttagcagaccatagtaaagtaatcagagacacccaaaccgctcaaaacagcaccaaaacctgcctcagtcctccgcactcggcctctgcaactgttacggtagattcagtagcacgtcgagagaggcgatctaatcccggagtt

SEQ ID NO: 1757 - DNA, 838 bp, Caenorhabditis sp.
  source 1..838: mol_type = unassigned DNA
ccaactctcatcgtattaacctacggtattcctcctagtgagtgtaataaaggttaattacgttttctcttaccaaagaaaaagaaatttcgaatcctttttgtgtaactcacaaactgacagagacctatcgaatttcttttgtttcgtatataggaatagtcactctggaccacgaagtggacagttgttggcggacttccaaagttgagagaaaaggtgtgaagagaggaggtctagaaacacttcggctgtctaggaccagttcctgagtggaaagaggaaggtctagaaacacttcggctgtctaggaccagttcgtgagatctcttgtgaagagttgaaaacagttagctgaggctactgtatttcttgatagccccgcccccaatccccctcccccccccctcgacagaattttctgtttgacctcctggaatttgcgaggagtgcgcgagaattttcgaattcttcgcgcgttttctcgaaattttccagaagattcgagcggagaatcttcgagaaagtgagccgaatttcgcgcgaatttttcgcgattttcaaattatcaatttttgtcggaaaatttattttctggcaaaatttgatttagttcacgcgggagagaaggatttggtggaaaagggtattgatttttgtggcggaggaaactcccactgaatcaataactctcaaaggagaactcatcgaacaacctcgggtgacctgaatcttgggcgaaattttcgcattgacacaagataacacaaattactgttgaaaacaaatcagaacaaactgtcaaaaagaaagacaaaaagtattgattaacaacatc

SEQ ID NO: 1758 - DNA, 90 bp, unidentified
  source 1..90: mol_type = unassigned DNA; note = Description of Unknown:Copidosoma floridanum sequence
actcctgtagccaacaacaacaatgattcaaagtggctgtttaatctttctaatgttactataccagaagaagtctataatattttgaaa

SEQ ID NO: 1759 - DNA, 932 bp, Culex quinquefasciatus
  source 1..932: mol_type = unassigned DNA
tgtgtgtgcgccgtgcacatcggtattgtttttcgtaccgttcccgcgaaagtgcaaaatttacacgaaaatacgcgttagtggggtgtgaaattcattgcatccgtgttctgaacccgtctcctggcccgggaaagtgatagtccgtgttttacgaccgcgagtgagacaaatcaatcaccagatttgaccgaatatcgcgttccgccacgggcaattgaaaaaaagtacaaagaactgctaaggcatcgtcgtcgtcgtcgcgatcgatggtcgttgtattgtgtcgcgcggcgtgtggaagtgtaccgcgaagaccatactgacgcgtgtcgtcgtcgtcctcgtcactgtgtctgttgctacgagagtcgtgtatagaagagaagccgttggtgcacggtggggtgaattgctaggaaagctacagaaaaaaaaagtgctgcaaagttttttgggtgaaattaaaaagaaggaaaaatcaagaagcgcaaccctgctgcatacacagcccccccccccccccctctagttccgtttctgggcgtctgcaccccatgttaggggcggcccaaacggactaggtggtcgattccttctatccgtgagcggctgttccccacgttaggggcggctcgaaagaagtggccgacacccccccccccccccccccacccttctttgagcgtctgttccccaggttaggggcggctcaaagaaaccggtgtcctgctctatcgtcgaggtaagcgtctgttctccaggttaggggcggcttacagcagatagagttcggaccccccaccccctccccccatcgagcgtctgttccccaggttaggggcggctcgaaacagcgtctgtaccccaggttaggggcggctgagtaaaagtccttgtgtcggcgtgggactgtaaacagtaccggcacg

SEQ ID NO: 1760 - DNA, 545 bp, Danio rerio
  source 1..545: mol_type = unassigned DNA
tgcgcaggcgcgagcttgctgcagcatgttttgactgctctgtcttgtcttagtgttttagagtttaatttgttgtctttatttttatttttttgttttagtttattagtgttagtaagcgtgccctccttaaacatgagggtagagagagccatctctgtgtttttttggttactgctctttgtttgagcttgccgcacgctgctaatgctaacacagctagcggttggtccggtttttgtttataccccggaccagctgatctcgttgaggcaggatgcttcgagcacagtgcggtctctcgggtatccccgcgggttacggagggggaagactaagagaggctgccgtggaggacaaggtgcgagggaaaagaacgaggaatgggaaattgtctgatgagcagctgagaagacggtataaacctaacctgccgtctgttgttatgggcaacgtgaggtcactggaaaataagatggacgagcttacggcacgggtcagatgcacagagaatttcgtgagtgtagtttgatgtgttttactga

SEQ ID NO: 1761 - DNA, 14 bp, Danio rerio
  source 1..14: mol_type = unassigned DNA
gacgtgtgcaaaag

SEQ ID NO: 1762 - DNA, 890 bp, Danio rerio
  source 1..890: mol_type = unassigned DNA
ggttccaaggttgtcatagccgggggcggtaatggggataagctcccactatctataaagtacccctatacggcgtgcgtctcaaatagcctctgacaaccaagtccagctcctggccttcaagtgtggtttagctaccaaacccggcggaactgttttcactgacaggagaaggggcgcaggcgggtcactggcgccttacaaccagttgcttcggggagatgatattcgttagcctgggaaggcagatcatctaggggaaggcaaccctgttttcaaacctccgctgccttgcggctatatccattcatggaaaaggcttcaggagtaaacctcgaggaaaaatccggagtcggagtccctaaggcagtttaacgctgtttgcagcctcactctggcaactcctgcgacggcgccgataccaaactgtagcagccctgctgttcctttggatttgtcgacaacgtggagaggggggacccgctacatgggcaacagcctgtcctccataatacattgccctggctagtatccgatctcgcacaccctggagaggacactccagcctcgctagcactctggcgtggatacaacacggggagcagtagtttaccggttataagccacagctcggttggcgtagagcaaggcgccagggactgctcccgacggtgggagggatcttcgggtcccactggacagtcaccgcccgcctcaagctgggcagcccccagtcaattaggtactgccccgccacagtctgctttcctcattgggtgcatggggaataggagcatttcgaacagcagactgcaaccatcgcaccagacaataaaataacacagagaaagagaccagctctaaaactgggatgctggaatgtccgtaca

SEQ ID NO: 1763 - DNA, 424 bp, Drosophila ananassae
  source 1..424: mol_type = unassigned DNA
ggggagaatgggggaggttatataaggtaaagtgtctgattgcactcaacttggtgaatgccagcatgatccttatcactgctctccccaagccgacgcactacctccacgtggttctccctggattgtcactcaacacccgttgtttgacaaactaaagcgcgcgacgagagtcctagctcttcaaactaggttgtggcgtaggacttgaaatccacccacggaaaacaaatcttcagtgaatgtagcagatgaagcctcggaacggaaccaatctaaagttgacgaccatggcacacgtaaaaaggacaatgatttgagagtatgcacttggaatgtacgcacattgtacagaccaggtgctgctcaacagctagcagataccctcaataaatgtagggctgacatcactgctatccaggaa

SEQ ID NO: 1764 - DNA, 120 bp, Drosophila persimilis
  source 1..120: mol_type = unassigned DNA
aagatatgggtctgaataatagcgtagaaggggagtcattccgtaattcgtaaatcgtaaaaatcagatcaagttgattcaagacctcctcgtggtatcttctggatgctattagactga

SEQ ID NO: 1765 - DNA, 1196 bp, Drosophila willistoni
  source 1..1196: mol_type = unassigned DNA
aatattggcttattttacttaaatatttggtctctttatgtttttccccactaaaagctaattgctctaaaacttctagcctataaagctaactcaactaaaagctgactgctctaaaacttttagcctttaaagccaagccttgctcgcaattgatgcgccaacagccaagctaaaaaactagtgttactcagacccaaaatatgggtctccctacttttttctccagtgtggaggaaaaccagttttttccccgacattaatcgccacgtttttgtagccgccttagcaccaaattcttattcgccaagtttattattaaaaaattgctacctacttgactacttatgctaaaagtaacataatcttaaatctatcatactacaaactatcttacctaaatcgctaaaaactaaatgttaatctaatgtcttattgtatattttttatttagtattaatctagttttaagataattttaatccccccgccactgctgctgtaacggccttttaaatttaaatttttgctatatacccttgtaggtgaaagggcaaaaaataaaaagcggcctcaatcgaaagactgaggccaggcggatcaaacgccttaccttaaaaagtggggtaattcaaggtcatgtaaacgcggcagaactctccttgaagtgatcggctgacaagaaactggacatcctggcgacgggtggtcctactcatttcccacacgaccggcgaaaaaatccctcagccattgactttggagtttattctggaataatcgaggacagattaacttcacaaactatatgcgaactatcctctgaccacttacctgtttatgtacacatcacgatggaccagcacccaaacttacttcctgacaatcgaagacttttgcctgtaggatctaacattaaactgttccaaaacaccctcagcgactccctccacctaaatatggaaatcgaatctggattagacattgaggacgcgattaatatcttcacaaacaatagtcaccatgctgcagccctggccactaaacctctacgaagggacctgccaaatacgaatcgtaccgaatcggaggagccatacctataaataaaaaattgcacaaattattaaaacaaaaaaattaaataaaattgatataatgcctctcacgaaactttgaacgtaaaaaaacattaa

SEQ ID NO: 1766 - DNA, 137 bp, Folsomia candida
  source 1..137: mol_type = unassigned DNA
ggtaacttacaccggagatactacttatctatcgttggaagtccctctactttcactcttgaattccgcccccgtctatatattttaagcgtggaaggaaattgccagtattgttggatacaagtcgtcagaccacg

SEQ ID NO: 1767 - DNA, 290 bp, Glycine max
  source 1..290: mol_type = unassigned DNA
gttttgggaagtaatcccaaggcccagcagagtgacaaatcaaaggagatgatgagaagtaataccaaggcccagcagactgaggaacctttcgtggactccaacccagcttctaaaggtcaccctctgtcttctttatacgaggaccctatacagctgcaatgtgacatcttgaaggaaatgggcttgtcttatgaggaagaagatagcaaggttaaggggctgctgctggatatggagaataaagatgatttgatggcagcagagaagggaattaaatctcagcaatt

SEQ ID NO: 1768 - DNA, 46 bp, Lottia gigantea
  source 1..46: mol_type = unassigned DNA
gcctcgaacggaacaggattagactcgtatctttagtactgtcgca

SEQ ID NO: 1769 - DNA, 23 bp, Nematostella vectensis
  source 1..23: mol_type = unassigned DNA
acataaactctgaaactacatct

SEQ ID NO: 1770 - DNA, 96 bp, Pelodiscus sinensis
  source 1..96: mol_type = unassigned DNA
cactacacctttttttgtcaaggaaaacatagtgatgagaaacgcctgcatggagttggttttgccattcgcaactcgctgctcaagtcaatagac

SEQ ID NO: 1771 - DNA, 291 bp, Phytophthora sp.
  source 1..291: mol_type = unassigned DNA
agacgagcaacgcgctggggcccaagacctggcatgaacgacactgcccaggctgtgaacgacgagcacgctgctaacccggcagcgcaccggcctctgggctccgctgcaccggtcaccggtgcaacacggtggggtccacgtcacggcgcgatcggggcagcggctgtagctcgcctgctcacaggcctacccacggcaccagcaccagcgacgcgccggcctgcttcggctcggcgctgcccagacccgcccgcttcccccgcggccacgacgacagcccccgatgcg

SEQ ID NO: 1772 - DNA, 150 bp, Strongylocentrotus purpuratus
  source 1..150: mol_type = unassigned DNA
ttatagtaagttgtatactaaagaagatattgatgttaaaatgcagaagattatattttttctcaaaatatttcatctctctctgacgatgaaaataaaatatgtgaaggtttattaacacacagagaatgtaaacaagctgtattcgca

SEQ ID NO: 1773 - DNA, 112 bp, Strongylocentrotus purpuratus
  source 1..112: mol_type = unassigned DNA
gggacaacggcgtctctcagaactggtgttcacatggatatattcatggtcaccacactgcggtgaggaaggcaacgggaaaccaccttcactattcttcccaagatatacc

SEQ ID NO: 1774 - DNA, 294 bp, Strongylocentrotus purpuratus
  source 1..294: mol_type = unassigned DNA
accagaaggtgttagctgcatggactcgtgatggtatgattattgcctcaattcaagcctctggtggaaaatcgacctctaaagttatacgttcagatatcgacctcgaaaacctttgatagttatgtcacgttagcgatattatgaacgatcgagctgacattttaatgacttatatttctccctggagtgagaagttttttacattttatctttttggatttttctaatactcgaacttttaaatgtaaaataccttttgtatttctaatttgttttttgtatactgcttgt

SEQ ID NO: 1775 - DNA, 131 bp, Strongylocentrotus purpuratus
  source 1..131: mol_type = unassigned DNA
ccaaaccgttttcagtcataggagtcacagaaacgtggcttaatgatacatctccatctactttatgtaatattgacaattattcgattgtacgttctgatagaaaaaccggaaggggtggtggagctgct

SEQ ID NO: 1776 - DNA, 578 bp, Strongylocentrotus purpuratus
  source 1..578: mol_type = unassigned DNA
gtgaggtgatggctacagggagcagacatggtctggttttggtgatataaaatccacttaatcttgcacttttaactgcagatcgtgtattttatttacctgattttgcttcttgaacatatcttcaagcttttgatatgattattttgttctttgataccttctggaggtagaatattgtgatagttttacagccattttctgccaaggaatttgaacacacacctgtagtcccatatggaggatcctgagtttgcttattttgcccagccttcttcatacctacactacaggcaacaataactgtaatgtatattttctgactgaattatgcttatattattcttatgatatagaagcaattactcactgggatttaaatcatttaccagatgatttagctaaccgtctactactactaatagctaacctacataaaatgggtgtagctgagtgagtgagactgctgagcttttctgacttccctttgtttgttctgaatacgtattgaatattgaatactgtcctgccaaatttaatcaccggtattcatcaccgttcgacttgcaaacgccatc

SEQ ID NO: 1777 - DNA, 551 bp, Strongylocentrotus purpuratus
  source 1..551: mol_type = unassigned DNA
tgtgtgtgtgtcgcgggagtcggatgtacactgcaaatgcttcctggaaactgcctacatcgacaccctgggatgtctttatctggaatttcttcatgaatttaggaatttcacccttccttctcatggcagattgaattttatgttcttttggaccaattctgtcaactgaaatctaagctagattttgccactcatttcattaagagtgccatcaaaatctgtagtcccacagcaagactctgatgtctacagctttcacatgggctacagtcatacatgtacagacatgtacagggaaccacctagcttctagttctacactgtacaactggcaaccatggtcaatactgtaatgtattattattattacattcctttctccactatgagttgattgaattaacatgcccaagaaacctaaatttccatgtggttcatgtgggaaaaatgtggcttggaagtcaagggcattcagtgtgaaggtgaatgtgaacagtggttccatgcagagtgtattaactttaactctacagactacagtgccctag

SEQ ID NO: 1778 - DNA, 82 bp, Strongylocentrotus purpuratus
  source 1..82: mol_type = unassigned DNA
atatatcttcactctcgatatatcggaactctcgatttttcctaccctacaactaccggcgacgaatcacctaacaaccgca

SEQ ID NO: 1779 - DNA, 93 bp, Strongylocentrotus purpuratus
  source 1..93: mol_type = unassigned DNA
ggtctgttgtattacgatatttctgaccatttaccgatatttattatttctaaagttcaccttgttaaaaaaattactaaaaataattgtgca

SEQ ID NO: 1780 - DNA, 482 bp, Strongylocentrotus purpuratus
  source 1..482: mol_type = unassigned DNA
acaaatggatacaagatgcaaaaaagtggaaacctcacgtcaggctaccaaatccaaggcagtctacacaacaatcaaacaaatcactaagaaatctagcatcagaatgcaggcagtgaaaagcaaagatggagaaatccttaccgagatgaaagatgttaaagagagatggaaagaaagctttgaggaactgtacaatcaccagaaccaaacaaatggagaagcactactcagatggccagcctcgaaccggttccagacattctgcgagatgaagtagaatttgctgtacgaaaactcgcagaagagaaaggatttgacagcatcacaggagaggaactcaaagctactgggccaacaggaatcaccatacttcacaaaatatggcgggaagaaagttttccggctgactggggaaaagccataataacaccaatctacaagaaaaaacaaatcaactgtggaaactacaggggtattag

SEQ ID NO: 1781 - DNA, 861 bp, Zea mays
  source 1..861: mol_type = unassigned DNA
gatggccctcgtctctcccgcccccgccctctcggctcccgacgcccctccccctccccagcaccagcacgcgccggttcccattccggggccggcggccaactcccttgctgccgtcgccgcagcaccctctagccctggcgcgtcggcttctatcccctccttgtctcctcccgtgtcccatgtagccagggggcgctccaagtctctaaggtggggtgacctcagtccggcctcttcggatggcgtgacgtcgctcgactcccggccttccttcaaggacgtgctggtgagaccagcgaatcctttgccgcccagccgtgtggtagtccaagagtcagccctggcagctggaacgtcctcggcgctggggaaggtgaaccatcggccgccttgctctcaccccctgtctacaaagcggcggagtcccaggcaggctccccactctacaccggctttccgcccagctccaagttttgatgatcaaggatggacaacggtggaatccaaacaaggtagaagacgccggttgagggcttcacgacgcccgagtcgagtccctgctgagcttgttggaaggtgcttcaactgcttgggctgcgatcacagggctgcggggtgtgacagtgagcctcggtgcttcctctgctcggagcttggccacaagtcttcctcctcctgccccaagaccccggtgtggaagcggctcgggcgccccaggcctgtgaagtcccggtctgggagcggctttcaccggcagttgaggggagagtccaacgagcggcaggccaccgttcggtttggcagcgtatcgctacgcccgaagctgttccgatcgccccttctgtcctggtgggaagc

SEQ ID NO: 1782 - DNA, 1716 bp, Zea mays
  source 1..1716: mol_type = unassigned DNA
cctgcatgcttgagttctccactgctatggctcgggaggaggcggctcttcgccgggctttgttcgtctctattgttggcagcagaccggagatcagggagctgaagtgcgggatgaagtggctcgggcttttggaattgacgttaattcaatatcgattcatcagtccttgccagaagatttcctattgttgttaccggatgaaagtgctgatagagtcttcagcggaggaaaattgtttaggggccctcttttcaatcttcaattcagacggtggtcgcggttggctcatgctgaggcggctaggttgccagcactggtggaagtcgaggttcatggcatcccagcccacgcatgggatcgttctacggtggagtatctgctccgtgactcttgcattatcacagacattcatccgagcacgtcattgaagaatgatctgtcttccttcaggcttcgtgcatggtgtttgacacagatttgttccctcggccgatgaagctcctcattgttgagccggggacggatgtgcaggagaaaagatgtctttcctatgatattgaggtggctgttactgctgtgatggttccgacgaatttgactccagctcattcccctggcatggacgggaggcatgaggatggcggcgggaggcattcggaatccacgtcgggcatcgcgcccaattttccagcgtctgggcccaacgttcgtggtgcccagcgctgcggcagcgggcccggctgcaggacgaggcgcgcggtcctttggacgaggaggtggctgcagcccccctgttgctgcgggcctgtgcggcggctggcggttatggcgggagtcgaggaggtggccgcacaggaaccgagggcctcgccgtccagcgcactgctggggtgctggcggaggaggttgggccactggaatgggccagggaggtgttggcccagatgtcacggcagcagatgggtcccgggacagtttcgccccgctcactcctgtgcaacaagatgatgggcagggctgtgttggctgggtcgctgaaatcgcttgggtcgggctctccccgacagaggtttgtcgggttgcagaggctgaccaaatttcgcccccttcaatgtcggcttggtcccccggctgacctcaactcaaaatctttggttgactggcggacagaacctccctgaatgtttatgctaggaggccagctgattacagattgaaaaagcagacttcagataccgcaccggttcaatcccttcggccagatgaggtgtcggcacctctggtacctgctggtattggagaggcgacccccgttattggtggctaatatccaagaacattgactgcttgcttccgcaacctccaattcaaaaaagaagaactaaacagcttccgccagattttgtcccacgtcgcagtagtcgcttgtcaaagaaaagggaaggcttaaattcaacagtcagacaagtccaggcggagctcatttgaagttgaacgtcacaaaccaaggtggctgtgactgatgaaatgctggaggaatttggcagctgtttgacaaacccctttccaactctcacatcaaggccctggcagctttgtttggatggtcggtcccagataatgtgcaagaatgcttggtgttcctttgctagggagaagcattgagtgtgcttgctgctgtagcctcacttagtggttgtatttctgttatca

SEQ ID NO: 1783 - DNA, 294 bp, Zea mays
  source 1..294: mol_type = unassigned DNA
acaaaacatggtactgcgctacgacggagccgacgggttgcaggggcaggggtggaatttaacatgcaggatctggagaacagagccacaaaacaagtaatgcggactctgagagtcatcacagagaatgcaagcatcaaccagcaagctgttaaggattatgagaatctttttcagcatcctttaactcaaagtcatgttgaagcgttagcggctctctttggatgggagactccggggaatctcttcccgtagtgtgtttttctttctgggttgtaatttataattgttgta

SEQ ID NO: 1784 - DNA, 699 bp, Zea mays
  source 1..699: mol_type = unassigned DNA
ggaccctgttgatgagccagggaccgtggagcagctggcgcccagtactgaggattctatagctgtcacctctattccttccgcgaatttacctctgcttacttgggaagaggatagacttggtgctgctgtggttccagacattgtgtctaaccagggtattcctcaccctgttgagaggcataggtctgttgagccgcaggatgctgccattaatcgcagaggtggcctcccttccaaccttcaggtatattttaggcgaaagcgtcactctaagaaatgttctgcgccggatgcgcctgctgtttctttcaatgacctggagaaaatcatcaagccagtggtacagctgctgcccatgccggttgccaagattagaagcagtaagactgttgttgctgtgcctcgtcggagtaggagggtggctggtgtcaagccttgttctccaggtccgatcatcactgaagcccaaaagaaagtcatcaggagtttgggtctcgcagccacggaagaagccattgatcaaaaagctcaagacaactattttaagctgttcgaggggcgcctgacggactctcatcttgctgcacttgctgctatttttggctggcaggctgagcgatttgatgattccagcagcccagttctcctggcaggctgttaattcctgctgtccttggtcgtgtttatttgttttca

SEQ ID NO: 1785 - DNA, 272 bp, Zea mays
  source 1..272: mol_type = unassigned DNA
ccaaaaaggaacttattgattcagtttatctaaaaaacttctgtcctaatcagtttgattcttttgcttttgttccttcggtggggaactcgggggttcaattatcatctggaaaagttcaaaataacaggaaatgtcatctttcaaaatgactatgctcagtcagtggaattcatatccaatttatcgcgtgctcttggattattacaaacatttatgcaccttgtactccagggaaaatagattttctcaactggttctataacatttct

SEQ ID NO: 1786 - DNA, 2585 bp, Zea mays
  source 1..2585: mol_type = unassigned DNA
ggcggtcatttcggcggaccgttcggctccccgccctcccgccttccctgcatgcccttccgcctcccccgcccatcgctccgttaacggcgcccgccccaccctccccgcaccacctagcccctcgccggcgctcaccccgactccggcgaccacttcctcctccccctcccgtgtggcgactttgtctcccgcggcttgtccgttctcccccgctgggcgttccaaggcgcagcggtgggcgtcttcctgcctcaccagcccgtcctcatcggccttgggcgttggtgccgttggaagcggtgcctcgcagaggactttcaaggacgtgctgctgctccctccgcccctgccgtctgcccggcagtccctcctcgacctccgcacagaccgaagtttgcggtggtgcaacgtccctggaacggtgcgcaggcctgttcctgaccgggagggctgggttagggtcgaacctcgtcgacgtcaactccccccttcgccacctccccgtcgatcgatccctgaggatctccgggtaggtgttttaactgtctggcctcctctcatcgggcggcggattgccgacgttcggtgcgctgcttcaagtgttgggggttcggacatcgtgcagttcagtgcaaggttcgtgctgcgcaggtgatcaaagcttcagttcggtgtgggatcgtcttggccctaagctggttcacaagcctttggactctcctagacgcgccatggagtggcgcagggtctcttcgccgatcccggccatccagaggtccggtgtggctgatcctaccttgggtggcacgaagaaacgccgccatcgtacgcggggtcgaaggcctaagaccgcccccgttgcacctttggaggaatccagtgaagttgcacctccacccggttcctcttccctagagccggtcagggtgcatgcccctcaaccggttgttcctgatatggtggaagccacacatctctgcattttggaccgtgcggatgcgcttgctagagaagaactgcggttgcgacggtgtgctctgttcgttgttgtcactggttcaagaccgagggtggctgctgagactcttgctgatgaggtggctgctggtttcgggctggatgcgtcgtccttctccgttcatcgttcgtgcccagaagattttgtcttaatcctgaattcggaagagttggccaatcaggtgtacaacaatggtgctgttttcaattctctttctgggtctttcaagttcctgagatggtctagacttgcccatgccgaggtggtggcctttccatctcctgttcttgtggagttcaaagggattccaattcatgcttgggatttggctactgctcagaatttgttgagggatcactgcactgatgtggagctccatcctgacacggtgaatcgacacgacttctcttccttcaaggtttttggatggtgccgacgtccacacctcattccaaatttggtggagctccttgttccggaaccgttgatgatgacgcctggctctacctctcttgagagaagattgctcgcttaccaagtgactgcccttgtgtctctgatctctccgccggtgcatagcgctgctgcacctccgtcgccggcgtttgatgatgatcaggacaacgggcctcgtcggcgcaggctcaacagttcagttcagatggggcatgctgagtccggggaagcacttgcagcgcgaaggcccgtccgtgaaaggctgggtgttgccccggtctctgttcgacatgtggaggctggattgtccgtgaaagactcggcgccttccgttgccttggttactggggacacgcatactgatgttgtggagccggtgattggctgcatggatgctgggttgagtctgcccctggagaatgttcatgggcctggcactgagactttggagattccaggtgcttgcgatggcccgggtggtgaagtcttcttgtccatgactgatgttgactcttctgttccggcggtggaaactttgagtgcattttcatccctcccgagtggccctgccatcgctacccgtgtggggactgtgttgaagccgtccatgaaggctgttggggcagggctcaggaggtggccgtgttccccaatcaaatatttcagaaggaagtgcagaggggctgctgcttcacaatcccctctctcggctgctcagtctgcgaccactgctgatttcatcgctagagtgtccaggccggccgctcgggtcctgtgtgggccgcagaagcggcagcgtcgccccagggcaccttgtgagggggctctacctcggcggagcaggcgcttggctggagcagatgttgaaaaggtaatggccccagcacaagtttcgaaaggaaaatggaggattgctaatgagctcggccttcttggtggggatccatctgaatcgctgtccctggaggttctcgataactatgccaaggttttcggtgagcggctgactgatctgcaagttaaagctcttgcggctctcttcaactggactgtcccagaagacttgcagggtgcagtggtgcaggcctgatcgcctctgtgtgtattg

SEQ ID NO: 1787 - DNA, 947 bp, Salmo salar
  source 1..947: mol_type = unassigned DNA
tacattacaacggcttgatttgtttgatctgagcaattcttcttagctagctacatagccgtctttgtatcaaagataattgtgtagtttagagtaattagagtaattatcgaggctagctatcttcgtcctcctaacgtagtcaacaccgctgctagctagctagtcatcactgctagctagccaacttctaccgactagcagcactgtagaaactattacattacaacgtaacgacttgattagtgtggtgttagtgttagttagccagctacatagttgtctttgctgtctctgtatctaagataattgtgtagtttagagtaattatcgaggtgagctagccagccgcgacgcggcgccagacttagtcaacacacctagtcatcattaacccactgctagctagccaaccgttaccgactagcagcgctgtagatactaatactttacaacggaacgatttgactagtgcagtgttagctagctagctactagttgtctttgtcatagcttgataattgtgtagtttagagtaattatcgaggttagctagccagctatttccgtcccccgcgacgccatttttcctaacccagccaactattaccgacgagcagcattgtagaaactaaatacattacaaaggaacgtcttgattagtgttatgttagctagctagctacaaagttgctttgtatcatgacaaggtgtagtactgaaactatcgaggttacctagccagctacacgttcaaacaaagtcaacaacgcagccactgctagctagcctactccaccagccagcagtactgtatcattttcgtcattttagtcaataagatttttgcaacgtaagcttaactttctgaacattcgagacgtgtagtccacttgtcattccaatctcctttgcattagcgtagcctcttctgtagcttgtctact

SEQ ID NO: 1788 - DNA, 137 bp, unidentified
  source 1..137: mol_type = unassigned DNA; note = Description of Unknown:Mesobuthus martensii sequence
taacccctcctgaatcctgctaagctgcctcaaagtggcggaggggtgtacgtgggcggaataggcgatgcaagtcagaaattattttctagtagggtcaccctgggctagaaggctattccattatgctcaactaa

SEQ ID NO: 1789 - DNA, 997 bp, Anolis carolinensis
  source 1..997: mol_type = unassigned DNA
ttgatcccagaagggcagttggttctcgcagaagcagaggcagcaggaggacatttttgctccctggcttcaggtaggatttggctaagatttggctaagattttaaactgagtgtgggcttggctcctgtggtcaaagtctaactgttgtgtgactgttgtgttgaaagagagccaggtacttaagttgattgacagcaggcattgtcccctgttaattgagtttctgggaaagctttatttgccagtgtgagtttctgccagagcctgatcccagaagggcagttggttctcgcagaagcagaggcagcaggaggacatttttgctccctggcttcaggtaggatttggctaagatttggctaagattttaaactgagtgtgggcttggctcctgtggtcaaagtctaactgttgtgtgactgttgtgttgaaagagagccaggtacttaagttgattgacagcaggcattgtcccctgttaattgagtttctgggaaagctttatttgccagtgtgagtttctgccagagcctgatcccagaagggcagttggttctcgcagaagcagaggcagcaggaggacatttttgctccctggcttcaggtaggatttggctaagatttggctaagattttaaactgagtgtgggcttggctcctgtggtcaaagtctaactgttgtgtgactgttgtgttgaaagagagccaggtacttaagttgattgacagcaggcattgtcccctgttaattgagtttctgggaaagctttatttgccagtgtgagtttctgccagagcctgatcccagaagggcagttggttctcgcagaggcagcaggaggcacctttactaactatcctttgcagtacatacaggaaacaaagcaacataaacaaatacacaaagaggtggtttgttgcagtttgcacataaagtgcgtgcatattacttaactgtacaaagatcccacttggccaccacgctcaccaagag

SEQ ID NO: 1790 - DNA, 53 bp, Pelodiscus sinensis
  source 1..53: mol_type = unassigned DNA
agaaactcgcacagatacagacagacatcatctttctatccaagtgcaagaaa

SEQ ID NO: 1791 - DNA, 120 bp, Ixodes scapularis
  source 1..120: mol_type = unassigned DNA
tctattgattgcttagtcatatctgaaacgaacataaaggactgcgacgaagcattattccaaaataaaagttttgaaacgattacaaataacaggaagaacaagcgaggaggtggaatc

SEQ ID NO: 1792 - DNA, 281 bp, Petromyzon marinus
  source 1..281: mol_type = unassigned DNA
gcctgtgcgtgtgtgtgtgtgtgtggcaaaacaaccccctacctcctcgcggtgccggacgggcaactctgtcgtggacagtgctgtggggggaggtccaattttgattggctcctcccctcatggcatatgtgtccaccacaggggctaaacgggggctctggacgggtgcgaggggctggtaacccctccaccttcaattaattaccacgaaaccacgaattaaactgaaatatgtaactaataagcttgtgccggaggccccggggggccaggcgtct

SEQ ID NO: 1793 - DNA, 2763 bp, Monodelphis domestica
  source 1..2763: mol_type = unassigned DNA
gacagagtgaaacaactttcaagaaaagaaaaacccaaaaggtaggcagagaacatctggggcactggggtgagaggagagcagagccagcaagaggcatagcaagaagtgaagagcaagccacataccccaccacaccccacatctgctgtcccaggttcatgaacctaagcccaagccaaatcagaccctgagatcctgctgggcaaatagtggtacaagccaacccataccccttgaaatttcaaacctgtggagaagtccaaggcaatctgggctgaagtgggctgatccatgtgggcccagagcaaagccaggaatcccagtctgggcttgggataaggacataattcacagtttggggtgaggtgatagtactcaaggggagcctcactgggatctttttgcctaaagctcagggcagagctccaagacagggcaatcaagggtgtgcctgattggatcaagtacacagtgagaccaaaaaacttgagcctaagcctggggctagaatttgatcagcccctgacctgatcaagatcagagtgagatcaaaagcttacacccaagcctgaggcaagtctttaagctatcagcatctcaagggtcaattgaatcagcagggggagggggctctcagagctctcagccctcagaccatcaggtaaactggtaaaaacccagaaaataagctgagaataacatcaaggaaggactgaagtttaagagggtaccccaacttcccagaaaacagagcctacctataattagataggaaaaatgagcaaacaatcaaaaaagcacctaactctaaagaattttttatggagacaaagagcaaggtacagacacagaaggggacagtgaaagcaaaggaaacacatgcaaagtccaaaagaaaaatatggattggacacagattctggaagagctcaaaaaagacttcaaaaaccaattaagagaggcagaggaaaagtggggaagagaaatgaaagtgatgcaagaagaaaagaaagtgatgcaagaagaaatgaaaagtgatgcaagaagaaatgggccaattgaaaaaggagaaccaaaaactgacagaggaaaatcaggtcttaaaaatcagaattgaccatctagaaactaatgatttcatgagaaatcaagaaacaataaagcagaatcaaaggaatgaaaaaaacagaggaaaacatgaaatatcttattgaaaaaacaactgacctagaaaatagatctaggagagacaatttgagaattattggactacctgaaagccatgatcaagaaaaaaaccttggacatcatattacaagaaattatcaaagaaaactgcccagagatccttgaacaagaaaataaaattgaaattgaaagaattcacagatcacctccagaaagaaatcctcaaatgacaacttccaggaatgtaatagctaaattcaagagccaccaagccaaggagaaaatacttcaaacagccagaaagaaaccattcaaataccatggagctacaatcaggatcacacaggacctagtagcttctacattaaaggatcaaaaggcatggaatatgatattcaggaaggcaaaagatttgggtttacaacccagagtcacctatccagcaaaactgagtatattctttcaggggaaaaaatggacattcaataagatagaagatttccaagcattcctgaggaataagccagacctaaacaaaaaatttgaagtccaaacataagacacaagagaagcccaaaaaggtaaataagaaagagaaaatttaagggactcattaaggtcaaaatgtttatatgtctacatggaaagaggatttctgtaattctcaaaaattactcttagtagtagagaagatagaaggaatttactcagaaagagggtggagaagtaagctgattatgatgatatgatgtatatgatgatatatatgtaaatgtgatgatatggaatgatatgtatgtatgatatgatatgtatgcatatgaatgatatgtaaaaaatcaatcaagggctgaaagagagggttgcactgagagaaaagggaagggagagatagaatggggtaaattatataacataaagaggcatgaaaaatcattatagagaggggaggataagggtggtgatgggcaatgcttaaactttactctcattgtaactggctcagagagggaaaaacaagtatactcagtggggtatagaattctatcttaccctacagagaagtagaaggggaataagacaagggaagggggaggtaattggagggaggggaagtgggggggtgacaaaaagcaaaatactggtgaggaggaacagagtgaaagggaatagagcaggatctaaaggggataatatgatggagggcaatacacagttagtaatcataacactgaatgtgaatgggatgaactcacccataaaatggaagtggatagcagagtggattaaaaaccagaatcctactatatgttgtttacaagaaacacatttgaggcagggtgacacacacagattcaaggtaaaaggctggagcagaatttattatgcatcatctaaagtaaaaaaaagcaggagtagcaatcatgataccagacaaagctaaagtagaaattgatctgattaaaagagataaggaaggaaattacattttgctaaaaggtactataaacaatgaagtaatatcattactaaacatttatgcaccaaatggtatagcatctagatttctaa

SEQ ID NO: 1794 - DNA, 741 bp, Petromyzon marinus
  source 1..741: mol_type = unassigned DNA
agcttagctgattggagaatatagagtttattgataacatgaaggtaatttatattttagtttttattggttcactatatagtactgtgaatagctcagatgtgtaggccttgacttcaacatagtcatttctgtgaccagtcactagcaaatcacccagttatttcaatgctaaattcgcctagttatttcaatgctaaattctcctgtttgatttgtactaagtgcctcggtgaatgtgtatgctctgacttcaacgtaactatttctgtgagcagttacaagctaatcactcagctatttcaatgctaaattctatgctaattccattgtcaaggggtgcctctgcggatgtgtatgccttaacttagctatttcaatgctaaattctatgctaattcctttaacaatgggtgcctctgcggatgtgtatgctttaacttttaacatagctatttctgtgaccagtcacaagctaatcattcagccatttcaatgctaaattttatgctaattcctttgtcaaggctctttgttcctctcacacagcttaaaagccgtgatctgaacgtggctctctcactccagcgctgtcctaccagacagtctcgctcccttcacctgatgaaggccgcttgtgttgtggccgaaacgtcgtgagaatattattgtgttattttattttatcaatttattattttattctcattctacgtgactttaccgaaagaaccaaagaag

SEQ ID NO: 1795 - DNA, 799 bp, Drosophila persimilis
  source 1..799: mol_type = unassigned DNA
ggctaatgcagcacacaaatttacttgcctgtgagatcgcaacgcacccatacattccaagaaggctggccaggccaaggtatgccgcaatgatagaagagcacaatccaaacagcaacagaagcctgacagccatccaaacaatactgctccaagtcagacgcgagaactggctgcgcaatccatttgcaacacacaatatggaaatcagccgcagtagcgctaatgcagctgctacgcaggcaaatgacggccccagcagagaacctgatgatggacggcggcagctccagaatccagatgatggcggcggctgaaaagaaactaaaaacctttttattcttccacagatacgaagccacttcacctgcacagaaattggtaatccacatccagaatgacgatgcactggacctcggccagcttcagccctgttgatgctgtcctgcagtcacagtttagcgccgacactcgcaaggattccacttcgcagccgacgacgagaccaataggcgtaatgatgttcttcacggctgcatactccacctgaaataattaaaaacaaaaacaatgtaaacaaagtagcaataagtttagtgttaccctggcatttagccaaattatcgatagctactaaaaaaaaataaataccaaataagccaataccgtaagaaatgttaccctgccaatttacagccacttctgcaactacatgtaatgtagataagcagttggcgcgaaacaatttgtaaaatatgctaattataagagtataaacaaataaaacggttctctcttc

SEQ ID NO: 1796 - DNA, 488 bp, Parhyale hawaiensis
  source 1..488: mol_type = unassigned DNA
ccgaccgccagcgggataactggcaaaccctgtctcgaccaccggcccgtgaatccatcggggcgtatgagtcagacacaggggggtgtttaaggtgaccctgttgcgaggaaatgcgcagcaaaagccggatgagccttagaacatcgaaggccaacgacaacctgccgaaagactggcggctaatccagtcaacctcctgtaggtcaccggctggtcatgctgaatctcagcttaaccaggcgtacgaacttacagttggagggtcgagcacccctgatggctgaaaaggaccatcaaagtcgaaggtagccaacgagaagaccaacggctgattcaggcggaagagtcaactcgttgaatgcgttcgacagcttggggtagatggaactcctaagccctgaaaggcagtccatcttcgcagacgctaaggtgccccgccgcctgagggttatcaggccccgccgcctgagggttaccaggcaacc

SEQ ID NO: 1797 - DNA, 39 bp, Capitella sp.
  source 1..39: mol_type = unassigned DNA
gatgaattgtataattgtgttgattatgatcgtgattca

SEQ ID NO: 1798 - DNA, 158 bp, Anolis carolinensis
  source 1..158: mol_type = unassigned DNA
cccccccgcaggtgccaccttgacgtggtgggggggcttagctgctccaatgatgactgagggctgtgctggcggtagtgtaactaccggcaggtccaaccaagccagagaggcctcagctgaggagcacaaccaagagcacctaacccattagcatt

SEQ ID NO: 1799 - DNA, 18 bp, Aedes aegypti
  source 1..18: mol_type = unassigned DNA
atcgctgttcgtacctga

SEQ ID NO: 1800 - DNA, 188 bp, Aedes aegypti
  source 1..188: mol_type = unassigned DNA
ggtgggagctcaggcaacataactcctgggcgtccatgaaaaaccaccatcttgagtaggtgggagcttgaggtaaaatatcctgggcgtccatgtaaaaccaccctcggcgagcagcggcgcttgaaccaagctattaagcactgtaattggaggaaatgccaatgcagaacccgtagcttccggga

SEQ ID NO: 1801 - DNA, 113 bp, Arachis sp.
  source 1..113: mol_type = unassigned DNA
actccgcctatgttacacttgcggtacatagccggtcccaagcccggataaaggaggagggttgtgttaggtcttcggcaaccaacataaaaatatagccgaacccccatgac

SEQ ID NO: 1802 - DNA, 367 bp, Aplysia californica
  source 1..367: mol_type = unassigned DNA
ccggagtggggcgaccatccccgacccggcgggtcccaggtggcggatagggaacggccactgttatagaggttagctgtgaatatattgaataagcagccccggaccaactggcgatgctcttaccaggacggggtgaggtggtaggtggcactaccacgtcattaaatgccctaggagtcctctgacgggagcatcatgaggaaaaggaccgcattaagtcctggctacgggggggatccggtaacaattcctccctgtgctcccagggtaggtccttggacctggagctggagtgctgaaatcggaggtattgggccgcaaggcgcactctagagaaccacaataccacgtaatactgcaatat

SEQ ID NO: 1803 - DNA, 716 bp, Aedes aegypti
  source 1..716: mol_type = unassigned DNA
ttggcgcggtaaatggctgggcatggcgtaccattggtacctcgcgtacctgcaggaataaaatagacccctttgtgcggtccttagcctcttgcccagcaactcctatccctacctcctcgtggtactggccggggtacgagtaaccttggggaagatcgggtaaccaacccccggtgggaactttggtcgtatgctgacagggaagggggggtttgcttttgcaaacctggagcgtctgtactccacgttaggagcggctcacaacagcgtctgttccccatgtcaggggcggctgatcatcgtccgagtgccagagaaggactctaagctaaactgcgcactatggccctccgaacatttagggggaatggtcctccggaaatctagggggttggtgtcaggccctgcaagccaaccgtaaaaacacatcagcacaggaacgtcaacgagagaatacggaccggaacaatcggcaaagaccacagcgacgaaaatggactagcgattggaaactcggtacgtggaactgcaaatctctcaacttcattggaagtactcgcatactctccgatgtactgaagacccgcggtttcgacatcgtagcgctgcaggaggtgtgctggacaggagcattggtgcgaacgtttagaggtaatcataccatctaccagagctgcggcaacacacgcgagctgggaacagctttcatagtg

SEQ ID NO: 1804 - DNA, 333 bp, Aedes aegypti
  source 1..333: mol_type = unassigned DNA
tgggttgtaaaatggtgagtcgacaaccaggaaggagcgtccaacatagctctggtcctcgcaagtccctacctcacgcttcctcgggtctaacgatgacaaagaccgccagctaagggttgcgtacttagctggtagtgcaacctgggcactgttgtccttctgacatcagctagagtgagggggtgcgtcccgagcgtctgttcaccaggaggtgcggctcaaacagcgtctgttctggtatccagcggctgagtatgaaatgttgtatcacgtcaactaacctaaggtggcagccccatcaacgtgatgtaggtagcgcaaccccggtaa

SEQ ID NO: 1805 - DNA, 335 bp, Aedes aegypti
  source 1..335: mol_type = unassigned DNA
tgggctgtgaaatggtgagccgacaactaggaaggagcgtccaacatagctctggtcctcacaagtccctacctcacgcttccacgggtcaaatgatgacaaagaccgccagctaagggttgcgtacttagctggtagtgcagcctgggcactgttgtccttctgacatcagctagagtgaggaggtgcgtctcgagcgtctgtccaccaaggaggtgcggctcaaacagcgtctgttctggcatccagcggctgagtatgaaatgctgtatcacgtcagctacacctaaggtggcagccccaccatcgtgatgtaggtatcgcgaccctggtaa

SEQ ID NO: 1806 - DNA, 187 bp, Aedes aegypti
  source 1..187: mol_type = unassigned DNA
accgctagcgcatgacggctcaccatagtagcatgtccgaaagaacttgaaactattgagaaccagagctacaggtccaaagccctgataaaggtggatggttgtgatggctatgaccgtggtcatcatgtaaagaacaagcggacgatgctgtatcgtgtcagcatcgaggaggcagcccctctag

SEQ ID NO: 1807 - DNA, 333 bp, Aedes aegypti
  source 1..333: mol_type = unassigned DNA
gggctgcaaaatggtgagtcgacaatcaggaaggagcgtccaacacagctctggtcctcacaagttcctacctcgcgcttccacgggtcaaatgatgacaaagaccgccagctaagggttgcgtacttagctggtagtgcagcctgggcactgttgtccttctgacatcagctagagtgaggaggtgcgttctgagcgtctgtacaccaggaggtgcggctcaaacagcgtctgttctggtatccagcggctgagtatgaaacgctgtatcacgtcagctacacctaagatggcagtcccatcaacgtgatgtaggtagcgcgaccccggtaa

SEQ ID NO: 1808 - DNA, 402 bp, Aedes aegypti
  source 1..402: mol_type = unassigned DNA
gggtggtaaatgactggacaatgcgtaccattggtacttcgcgtacctgcaggtataaaatagaccccatttgtggtccttagcctcttgtccagtaactcctatccctacctccccgtggtgccgcctgggatacgagtaaccgtagggaagatcgggtaaccaaccctggtggaaccttggtcgtatgctgacagggaaggggggctcctctcttctgagggtgtagcttatcagagcgtctgttctccatgttaggggcggctcaaaacagcgtctgttctccatgttaggagcggctgatcatcgtcctagtgccagcgtgggactctaaacagtgctgtgcacgatgatcctccggcgagacagggggttggtgcaggccttacaagccagccgtaa

SEQ ID NO: 1809 - DNA, 429 bp, Aedes aegypti
  source 1..429: mol_type = unassigned DNA
ggtaaatggctgggcatggcgtaccattggtacctcgcgtacctgaaggaataaaatagacccctttgtgcggtccttagcctcttgcccagcaactcctatccctacctcctcgcggtactggccggggtacgagtaaccttagggaagatcgggtaaccaacccccggtgggaactttggtcgtatgctgacagggaagggggggtttgcttttgcttttgcttctgcaaaccttgagcgtctgtactccatgttaggagcggctcacaacagcgtctgttccccatgtcaggggcggctgatcatcgtccgagtgccagagaaggactctaagctaaactgcgcactatggtcctccgaacatttagggggaatggtcctccggaaatctagggggttggtgtcaggccctgcaagccagccgtaa

SEQ ID NO: 1810 - DNA, 640 bp, Aedes aegypti
  source 1..640: mol_type = unassigned DNA
ttagtggctgcttgggcacgtcaggagttaatcatcaatattaacctccttttcccgagcagcctagatagccgcgtagtgtcggtagcggttgtttcaactggctaagaattaacactacggactgcctgttccggtggtaaaagtccacctcacaggtgacccctaatttatggtgtgatgcgtaccgtgcctaagaatgaatggttaggggggtctaaataaaacctaaccgcaaacggagcctgtggggtaccagggcgccctccacagtattgagtccttcctgtgctacccggagcaatggtgcaggtgaccttgtgtttctccgagataatcggctgcccttcttcagtctctatcttgaggcttaataagggtgggattatgaatatgttgacatttaatttaaattatcacctatatggattcgcattatgcgttttacacagtgtattctgtgctctttcgcctttggcgactttaaatagataccgatctggttttttcgttgctggtctttttcgtgctgagattgcaaaaagcttaatcctgcctagtttgggtagtggctacggttaggttagctcagatcaatcttcagcataaaagaacagcaacgatcaatctttgcagactc

SEQ ID NO: 1811 - DNA, 297 bp, Aedes aegypti
  source 1..297: mol_type = unassigned DNA
gggctgcaaaacggtgagtcgacaactaggaaggagcgttcaacacagctctggtcctcacaagttcctacctcacgcttccacgggtcaaacgatgacaaagaccgccagctaagggttgcgtacttagctggtagtgcagcctgggcactgttgtccttctgacatcagctagattgaggaggtacgtctcgagcgtctgttcaccaggaggtgcggctcaaacagcgtctgttctggtatccagcggctgagcaagaaatgctgaatcgcgcacagctaaatccaaggtggtag

SEQ ID NO: 1812 - DNA, 667 bp, Alligator sinensis
  source 1..667: mol_type = unassigned DNA
cctgaccgtattatgagggacttcgaggctctggggaccaggctgaaggagacgggggcgcaggtggttttttcctctctccttccggtgagggggcggggacagaggcatgggacctgcattggtgaggtcaaccagcgcttacgcagctggtgccgccgggcaggccttgggttccttgacaacgacccatgctttcgggaggggggattgctggggcgggatgggcttcatctctcccctaatggcaagcgtatcttctcttccaggttggctgatctcgtacggcgagctttaaactagactcgccgggggagggggctgcaggaagacgaggagacgccatcagggcaaggggtgcaaaggtaagtaatgggggtcttgccatcagggcaaggggtgcaaaggtaagtaatgggggtcttgccatcagggcaaggggtgcaaaggtaagtaatgggggtcttgccatcagggcaaggggctgcaggaagatggggggtcgccatcagggcaaggggctgcaaaggtaagtaatgggggtcttgccatcagggcaaggggtgcaaaggtaagtaacaggggtcctgatggtctggctaatcagggggtgggggggcacacagtcttgcaaggccttaaatgcctgtacaccaatgctcgtagc

SEQ ID NO: 1813 - DNA, 1050 bp, Anolis carolinensis
  source 1..1050: mol_type = unassigned DNA
gagaggcctgctgttgtgctgcagaagaggccagaaacatctccagccagcctgcctgttgctgcctctgggactccttgtgagtagactgcagccccaggccctttccatctgggtgtgactcagcacttcctaggaaggaccatctataaagcctgagtccacaaggccctggcagggctgagaggcctgctgttgtgctgcagaagaggccagaaacatctccagccagcctgcctgttgctgcctctgggactccttgtgagtagactgcagccccaggccctttccatctgggtgtgactcagcacttcctaggaaggaccatctataaagcctgagtccacaaggccctggcagggctgagaggcctgctgttgtgctgcagaagaggccagaaacatctccagccagcctgcctgttgctgcctctgggactccttgtgagtagactgcagccccaggccctttccatctgggtgtgactcagcacttcctaggaaggaccatctataaagcctgagtccacaaggccctggcagggctgagaggcctgctgttgtgctgcagaagaggccagaaacatctccagccagtctgcctgttgctgcctctggactccttgcctactgcccccctccctttttcccagcgctggtgagtggacataagaagggagggaagacttttaaaactccaaagccatccggaggaagaaggcagaggaactgactttaaaatcattctgtctcttgctgcaggcctactgccctcctcgctttccccagcattggctattgaactaagagtctgtcttactgaggtccactcattatttatatattgctgctataacaatctttaaatgctgttataataactattatgcactgtgaagcctggtccccctgactagtttactaagtctatcatctctaattggtcctgccctggcaccttataataccatattgcaccatattgaattagttcaccatcataatccccactgcctgccttgcactttagtcagctcagacccctatacct

SEQ ID NO: 1814 - DNA, 1034 bp, Anolis carolinensis
  source 1..1034: mol_type = unassigned DNA
ccccctcgatggattgtcaccttgccgtggtgagggggcttgcgtgttccgatgaacctgtgggcacaaccactggagtgatgcactcccaggagtggccgcaggggaggttccagaccaagcacaatccgaagacccaaagacctcaacggcggagcaggcggaggataacatggtacatgttacaacggctgtgaaggcggaagaaggctgcaacagactgagaagccactgtcgttgtgttaaccacaccactgctggaacctcactctgtgaagactgtgtgttgaccggccgtgcaccgacctccacacattaaaaaaaaatcacgcacaggcgtcttccaacaaaaataaaaacaaacctacaaaagtcccatggcgatcagcgagtggcgacgggggcaggactgtgaaatctggaagcccctagtcacagactggcacatgggcggtggatatggactcagtcgttctacctcaaggaccgaggcagttgagtagtccggcagctgtatccatgactgagcagccctttttaggatccgctctgctcaccccacacggggaaggggctagaaaaggtgccctaaacatagtctgcctctcctaccctgactggactgccgcgtccagaggggtcaccactctgcggccaaaaaagaaaaatgaactttggaacatggaacgtacggacattgttagataacactgacagcgaacgccccgaacgcaggactgctctcattgcaagggagctgggacgctttaagatcgacatagcagcccttcaggagacccggagagcaggagagggacagctgaaggaagaaaagggaggctacaccttcttctggaagggactgcctgaagaagagcgaagaatacacggagttggctttgctatcagaaacgacctggtgaagcacctgactgaagcacccactggcatcaacgaacgactttcaaccctccgaattaaccttgccaaaaaccaacaggcaaccatcatatgcgcctatgcaccaactctag

SEQ ID NO: 1815 - DNA, 109 bp, Anolis carolinensis
  source 1..109: mol_type = unassigned DNA
gggggacacggaaagagcctccccgaagattgagtgaattcagtcgggcgtcccctgggcaacgtttcttgtaagcggccgatctttccaccccaaaagcattggatga

SEQ ID NO: 1816 - DNA, 372 bp, Anopheles gambiae
  source 1..372: mol_type = unassigned DNA
tgctctgtaatgggatgggatccgaagccccattgagggataatacaggctctcccatccaactcctattccgacacgtcctcgtcgtgcagagtggtaacatgtgtcaccacatatccaagcttgggtacacgggcttgacccaaccccttgggcggatggtggcacatggcgaaccaggaggggggtgggtatcccgggaaactgggtgcctgaacgtcgggggggcaacccgacgctaaacaaaacggtcacgtgggcgcagggccagtcacccagtcccatgaatcaacgactacggaaagcaccagaaatattcgaaacggacttaacgataccgaccctacgcaatgcccccggactactctgaaa

SEQ ID NO: 1817 - DNA, 213 bp, Aplysia californica
  source 1..213: mol_type = unassigned DNA
tggctggagctaatgctcctggtagggccacccatgccagacaggtcgacgggtagaggtcagacatagcgtgatccaccggccctccaggtttcggaggttcagctcagggctagcgacccagactggtaaaaagcatatgttacggaaacagcaacaaagagaaaccatatttctgtgtgtgttggaccttcagagtcgcttgtgactcgt

SEQ ID NO: 1818 - DNA, 690 bp, Bos taurus
  source 1..690: mol_type = unassigned DNA
gcgcaggcggctgcgacgggcgcactaagcgcggccgagaggagctaccccacgtccgaggtcaggggcagaagccgggaggaccccatgcccgaagggcggcggccaagaggagttaccccacgtccgaggtcaggggcagcggccgagagtgccagactgcgacggcgcaggaacggccgagaggagctaccccacgtccgaggtcaggggcggcggccgagaggagatacccagcgtccgaggtcaggggcggcgacgagaggagttaccccgcgtccgaggtcaggggcggcggccgggaggagctaccccacgcccctaagcccgaggccaggggcggcggccgggaggagcaaccccacgcccgaggccaggggcggcggccgggaggaccaaccccacgtccaaggagccgtggctgcgcgggcgcaggagggcctagaggagctatcccacgttgaaggtcaggaagggcggcggtgaggagatacccctcgtccaaggtaaggagcagtggctgcgctttgctggagcagccgtgaagagataccccacgcccaaggtaagagaaacccaagtaagacggtaggtgttgcaagagggcatcagagggcagacacactgaaaccatactcacagaaaactagtcaatctaatcacactaggaccacagccttgtctaactca

SEQ ID NO: 1819 - DNA, 2736 bp, Choloepus hoffmanni
  source 1..2736: mol_type = unassigned DNA
gaggcggggcaagatggcggagtggtgaggtgtatgttttagttactcctccagggcagtaggtagaaagccaggaactgcgtggactggacaccgcagagcaatttgactttgggcatacttcatacaacactcatgaacacgtggaacagctgagatcagcgaaatctgtaagtttttgtggccaggggacccgcgcccctccctgccaggctcagtcccgtgggaggaggggccgtcagtgctgggaacgaggagggagaactgcagttgcagctcttattggaaactcattctactgatccaaactccaaacatagatagactgagaccagacaccagagaatctgggagcagccagcccagcagagaggagatagggatagcaaaaacagcaaagaaaaacccaaaaataaaagcagagactttttggagttctggtgaacatagaaaggggaagggcagagctcaggcagagtcaggctcatatgcaaatccagagggcgagtttccttgtctgaaaagctggtttctctgctctctggatcgttccttaatggccctaatctccttgtctcttagcatttcaatagcccattagatctgcaaggagggcccttctttttcttcttttttttttttttaatctttttctctttttctaaaacaattactctaagaagcccaatacagaaagcctcaaagacttgcaatttgggcaggtcaagacaagagcagaactaagagagctctgagacacaaggcaataagtccagtggctgagaaaattcactaaacaccacaacttcccaagaaaaggggggcgtcccctcacagccatcttcctggtgggcagggaacactcctgcccggcgccagccccacagcccagagctgccccagacaacccagtgtgacgggaagtgtttccaacaacacacgcacacaccacaaaattgggcatggacattagcctttcctgcaccctcagctgattgtcccagagttgggaaggtggagcagtgtgaaaagggggaaattaacacgccccattcagccatcctttcagcagactgggaacctccctacacagccctgcagcccagaacctccctggggggacggcactcacctgtgacatagcacagtcatccctcaacagaggacctgggggtgcacggcctggaagagggacccactcgcaagtctcaggggccatacgccaataccaaggacttgtgggtcagtggcagagacaaactgtggcaggactgaactgaaggattagactattgcagcagctttaaatctccaggaacaccagggagatttgattgttagagccgccccccctccctgaccgcccagacacacgccccatatacagggcgggcaacaccaactacacacgcaagcttggtacaccaattggaccccacaagactcacacccccactcaccacaaagacaaagtgggggagaactggcttgaggggaataggtggctcgtggatgccacctgctggttagttagagaaagtgtactccacgaagctgtagatctgacaaattagagataagggtttcaatcggtctacaaatcctaaaagaaccctatcaagttaagcaaatgccaagaggccaaaaacaacagaaaattttaaagcatatgaaaaaaccagacgatatggataacccaagcccaagcacccaaatcaaaagatcagaggagacacagtacttggagcaattaatcaaagaactaaagatgaacaatgagaccatggcacaggatataaaggacatgaagaagagcatggcacaggatataaaggacatcaagaagaccctagaagagcataaagaagaaattgcaagagtaaattaaaaaaatagatgatcttatggaaattaaagaaactgttgaccaaattaaaaagattctggatactcatagtacaagactagaggaagctgaacaacgaatcagtgacctggaagatgacagaatggaaaatgaaagaacaaaagaaagaattggggaaaaaaattgaaaaaatcgaaatggacctcagggatatgatagataatataaaacgtccaaatataagactcattggtgttccagaaggggaagagaagggtaaaggtctaggaagagtattcaaagaaattgttggggaaaacttcccaaatcttctaaacaccataaatacacaaatcataaatgcccagcgaactccaaatagaataaatccaaataaacccactccgagacatattctgatcacactgtcaaatacggaagagaaggagcaagttctgaaagcagcaagagaaaagcaattcaccacatacaaaggaaacagcataagactaagtagtgactactcagcagccaccatggaggcgagaaggcagtggcatgacatatttaaaattctgagtagagaaaaattgccaaccaagaattctttatccagcaaagctctccttcaaatttgagggagagcttaaatttttcacagacaaacaaatgctgagagaatttgctaacaagagacctgccctacttgagatactaaagggagccctacagacagagaaacaaagaaaggagagagagatacatggagaaaggttcagtactaaagagattcagtatgggtacattaaaggacattaatagagagagggaaaaaatatatatctgacaaacataaaccaaaggataag

SEQ ID NO: 1820 - DNA, 15 bp, Clonorchis sinensis
  source 1..15: mol_type = unassigned DNA
tagtcggcgagctga

SEQ ID NO: 1821 - DNA, 149 bp, Cyprinus carpio
  source 1..149: mol_type = unassigned DNA
caaaaggtaaagggggaggtgttgcttcaatttataacaatgttttcaggatttctcagagggcaggcttcaagtataactcgtttgaagtattggtgcttaatataacattatccagagaaacaaatgttaatgataaatcccctgtg

SEQ ID NO: 1822 - DNA, 1110 bp, Danio rerio
  source 1..1110: mol_type = unassigned DNA
gcaggagaagcactttagcagcatctagaacagcagcctgtaagtacatttaagatttgtttcagttgttgtgtatggtttgaggacttgtttccagctgtttgtgtaaagttgtaggacatttaaacttgctttcagttgtgtataatactagaagttgtttagccactgtttccttggttactataagagcttgtgtagcgaacgcagacgcggttcgcgtcgtccgcctcagtttcggcccttgttttgactcgggaggcgtgtccaaacgccaggtaaccactatatagtgagcacggtagcattagtcggcaggagaagcactttagcagcatctagaacagcagcctgtaagtacatttaagatttgtttcagttgttgtgtatggtttgaggacttgtttccagctgtttgtgtaaagttgtaggacatttaaacttgctttcagttgtgtataatactagaagttgtttagccactgtttccttggttactataagagcttgtgtagcgaacgcagacgcggttcgcgtcgtccgcctcagtttcggcccttgttttgactcgggaggcgtgtccaaacgccaggtaaccactatatagtgagcacggtagcattagtcggcaggagaagcactttagcagcatctagaacagcagcctgtaagtacatttaagatttgtttcagttgttgtgtatggtttgaggacttgtttccagctgtttgtgtaaagttgtaggacatttaaacttgctttcagttgtgtataatactagaagttgtttagccactgtttccttggttactataagagcttgtgtagcgaacgcagacgcggttcgcgtcgtccgcctcagtttcggcccttgttttgactctcgaggcgtgtccagctgaattcaatcagctagtgctttggggttatataaacaactagttcaccgcggcagcggtcgcggcagcctcgtgtgaagaccgacgagggtaaagaccatcgactctacctgcgcgactccaccgagcaaagacaccgacaaagcacttgagtactttactgtattgttttactttacacttattttttgttgtcagtgcacttttatt

SEQ ID NO: 1823 - DNA, 89 bp, Dendrobium sp.
  source 1..89: mol_type = unassigned DNA
gttgccaggtcccaagtcctggatgagaaaagtggagggttgcgttaggtagtcgacagccagcgtaaaacttgtcgaacaataatgac

SEQ ID NO: 1824 - DNA, 1033 bp, unidentified
  source 1..1033: mol_type = unassigned DNA; note = Description of Unknown:Locusta migratoria sequence
tttcaccagaatattgggggactaaagaataaaatagatgagcttttggtttgtttagatgatatagaaactgataatgtaatagatatactatgcctgtctgagcatcacattgtcactggtatggaaaatgtgaatgtcagtggatataaattagctgcaaatgtaagtagagataataaggtaagaggaggagttgccatatatgtcaaaagctatcacagtgtaaaaaatttagaaacaaaaaagttttgtgtagagcaacatattgaagcatgtgcctgtcagcttaaactcaatgatgattctcttataattgtaacagtatataggtccccttcaggaaactttcattatttctggaaaacttggatgccttgttgtgctatctgtcagatagggggaagcaaattattatttgtggtgatttcaatgttgattcactgaaagagtgtaataggaagaatgacctggaagtcttacttggctctttcaatttgacatctgttattgattttcctactcgggtagtaaaggacagcagtacattgatagataattttttatagaccaagataagtttaacaacataaatgcttgtcctgttgagaatggtctttctgatcatggtgcacagctagtaacagtatatgacatagctcctttcagtaattcgaaacagtcctccagagttgtgcgctcaattaatgatttaacaactagaaatttcaaagaaagtctacagcagttagactgggatgaggtttataaggaacctgatgctaatttaaaatataacttatttcatgatacatttgtaagggtatttgaaaactgtttccccaagaaattagttaaatataattgtaagaaaccatgcaaaaaaccatggcttactaaaggaataaaaatatcttgtaaccgaaaaagggaactatatctatcagcaagaaagagtaataacccagaaacaatcaaatattataaaaactactgtgctacattaagaaaagttattaaaaaatccagaagc

SEQ ID NO: 1825 - DNA, 313 bp, unidentified
  source 1..313: mol_type = unassigned DNA; note = Description of Unknown:Locusta migratoria sequence
ccacccccatgaaccacagacattgccgaggtggggtggcttgcgtgcctcaacgatacagatagccgtaccgtaggtgcaaccacagcggaggggtatctgtggagaggccagacaaacgtgtggttcctgaagaggggcagcagccttttcagtagttacaggggcaacagtctggatgattgactgagctggccttgtaacatcagctaacatggctttgccatgcagttactgcgaacggctgaaagcaaggggaaactacagtcgttacttttcccgaggacatgcagctctactgtatgaatatatg

SEQ ID NO: 1826 - DNA, 136 bp, unidentified
  source 1..136: mol_type = unassigned DNA; note = Description of Unknown:Locusta migratoria sequence
caaaatagtgaagcaagacctacaaaaaatccttggatatcacagaaatttaattagaaaatataaaaatgcagtatgaaggcaaaatgagtacagacgactaaaaatgagattgacaggaagtcaaaatggctaa

SEQ ID NO: 1827 - DNA, 104 bp, unidentified
  source 1..104: mol_type = unassigned DNA; note = Description of Unknown:Locusta migratoria sequence
taactaaaacctctaggacagcaattgataatatttttatagacaaatcaaaggaacaaaatcatatcataaaaccaataataaatggcctatcagatcatgat

SEQ ID NO: 1828 - DNA, 710 bp, Monodelphis domestica
  source 1..710: mol_type = unassigned DNA
gggtgtatggggtgctcagggaggggtagtatctctggtatggagggcttgtcgtgccctcctagggcagctctccagcctctgacccccacctgacacccagctctcacttgtggctcccagtagctgctagcatgtggcagcggccacaccccgggcaacggcttcgacaggccggctaaaccttgtgagggtagccatcgggtcatcgacccctggtgaaccagggctttgctcacccagcatgtgaagactgcttcggctgaacagacggaagaaaccaataagaaggttcaacggctgagagggcgacgcagcaaagcactgtggagtgcttagggcgtgttggagcacaaaggacaacacggccatccaatgcagctgaggaagtctccagatgtaacaatttttcgtgccactggacccaggcttccaacgccgagagagtgggactgtctctgtgcatcggcttttccacttaaatctctttcacgcacaagtatctttgtgcacactcatctatcctaaccccgtccaccctcttcaagacctgcggcgatgggggagtggcgacgcaacaggtggaggtgaccactggcagttgtagtcacgatcctgcacgtaggcggcccacggaccagtggtcgctcggccctgtgggcagcagggacgttcggcagcatcctgggcgactgagcagccctctctag

SEQ ID NO: 1829 - DNA, 742 bp, unidentified
  source 1..742: mol_type = unassigned DNA; note = Description of Unknown:Nasonia vitripennis sequence
atggcggagtactagcatcgggtaacttcacgtacctgtatgggagtgggggatctctaggcaccggatttctcgtaagcaaaagcatcatacattcggttaaaagtttcaaatccgtcaatgataggctctcgtacatcattatcgaaggtgaatggtatagatatgtatttattaatgtacactgtcctacggaggacaaagaagaagaagctaaggatctctattacgaaactttagagcaggtaatcgaccagttcgcgtcttacgacacaagaatagtattaggcgatttcaatgctaaaataggtagggaggaaatgtttaggcctactatagggaaggaaagcctgcacgaagccagcaatgataacggtattagggtcataaatttcgcggcggcaaaagatcttataatcaaaactacgtgttttaagcacaaggacatacacaaggcaacgtggacatcgccggacggggccacacagaaccaaattgatcatttcctcattgaaaaaagacgtaagggcttacagaggggcagatagcgactcggaccacttcctagtagtagccaaattaagagctagactagtagcgaatcaaaatagtaagcgagcaaacaaggtagaaagcttcgatattgagaagctacgagatagaacagagcgaattaggtaccagatagaaattaataacaggtttcaggcacttgaagaagcaaacacatcgccggagggga

SEQ ID NO: 1830 - DNA, 776 bp, Nicotiana sylvestris
  source 1..776: mol_type = unassigned DNA
tactgtcagggctacaccagtggtagcggtgacagccctttttggtttttgggtcgtggtattttctgtgttttcagggaaattctcgaagttgttggagacaagttgggcgcacgagcactagcaaaggagagcaacctggacgagcgtcagcaaagggcggtgggaagcggtgcgtgagcgtacaactacatcgagtacagcaaatcaacacaggtttggttctcgggagttggtacctcccgttctactgtttcccttttggtgttagctaaattgatgttactttagttcacaatagttcaatcattcaactagtgtacttgtagtcacttgtttccttctagtttgattcgttgtccgttgtgcactagcgagtcttctttagatttgtcgtaggtgtagtggctgcagtctgggatgatagattaagggcatgtcctcgggtggggcagagtgtggggccggggtcagggtgtgggacgggaggcaggggaggtagagggggcaagggagcctataggttgagaatcgggtcatggaacataggttcgctaacgagtaagtctatagagttggcgaagatccttcagaagaggaagattaatatagcgtgtgtccaggagactaggtgggttggatcgagggcgaaaaacgcggatgggtataagttgtggtactctggagtcctgaggggtaagaatggagtgggtatcctggtagatagccatcttagagagtcggtggtagaggtcaggcgggtgaatgatagacta

SEQ ID NO: 1831 - DNA, 59 bp, Orycteropus afer
  source 1..59: mol_type = unassigned DNA
actcgtctgtcagtttgtcatactgtggtggcttgcgtgttgctgtgaggctggaggct

SEQ ID NO: 1832 - DNA, 112 bp, Oryzias latipes
  source 1..112: mol_type = unassigned DNA
atctagccacaggggttgcaagccagttacttctgtgccggtcccaagcccggataaatagagagggttgcgtcaggaagggcatccggcgtaaaaaattgccaaaataacc

SEQ ID NO: 1833 - DNA, 151 bp, Oryzias latipes
  source 1..151: mol_type = unassigned DNA
tgtgaaccgccaccttaacgtggtgggggagtttgagagctcgggtgatcccaggagctaagctgtctggggcttaagcccctggtagggtctcccatggcagacaggtcctgggtgacgagccagacaaagagcggttcagaaacccctg

SEQ ID NO: 1834 - DNA, 202 bp, Oryzias latipes
  source 1..202: mol_type = unassigned DNA
aattcacacatcagtcacaaaacctacgacatgcacacatcagattttacccacaaccatgaagatggctcttttaaatgtcagatcacttttaaataagtcttttatcattaatgatctgatttagaccatgatttaacctgtttgtttttaactgaaacctggcttggctctgcagctctactgagttctacctttttaa

SEQ ID NO: 1835 - DNA, 383 bp, Parhyale hawaiensis
  source 1..383: mol_type = unassigned DNA
gcgtggcctgcgcgttatcaggccgcccccattgtccggccaccggacgcctctttgtttgtatgagctggctttgggtttggggctctgggtagcccctgagttggaggaaatgccactctaaaggcggatgagacctcttttggtccaacggcatccctgagaggagatgaacaggctggtgccatagctgggtactcagtcttccgcagtctgctcctctctctcttccatcaggtagtaccacctgatgctcttttcctttcctttctcttcttcttcttttcggccaaagcctgtactggtgatggcagggtctggggcgcgtagatagctggccgctttcgtagctatcgttactgtcgatttgtttttgctttatt

SEQ ID NO: 1836 - DNA, 678 bp, Pelodiscus sinensis
  source 1..678: mol_type = unassigned DNA
tggtacgctaagagcacggcaagacatgaaagatgccctggtcaaccactgcgcccagcccatctccaaccgtctcgactttagtcctgccattggagtaagatggaatctgggaagagagagtgaggctgactatgcgcacctctccctcactttaatccaattcacgcgcaagtcttgacatctcgacatctcctaagtcctgtggcgacgggcgagcgacgaagcagcaggtgtggatacactgggagctgtagccgcggacctgcacacaggcggctcaggtctaatggtcgtcttcttgctggtggaagcaacagctggattcggcgtctacctgagtgactgagcagccctctttaggattgcactgctcacctccgtagtaagaggaaggggctagaaaaggtgccctaaacattgtttgcttcacagaaccctggccagcttaccgcggctggaggggatcccatctcatgcggtcgaacaataaaatttcgaacaaaatgcaaggtgacaccactcactattggcacatggaatgtacgcacgcttcaggacaacccttcagcagaccgcccagaaagaagaacagccctggtcgccagagagctcacaagatttaacatcgatattgcggcactgtgtgaaactcgtctagcaaatgaaggtcagctc

SEQ ID NO: 1837 - DNA, 98 bp, Petromyzon marinus
  source 1..98: mol_type = unassigned DNA
atattggtcgcgaaagcctacgtgttaaactgactaacctctatggggaggatacttttcttaaaaccagaaaattggagaagcttcgcattaagcgg

SEQ ID NO: 1838 - DNA, 1143 bp, Petromyzon marinus
  source 1..1143: mol_type = unassigned DNA
agatggcgccgatgatggcagcctcggccggttggtgcgccctgttttgtccagttttgtcgttttgtcttgagaggggcctgctgttcaacacactcgtgctggtgagagaggcctgctgttcatcacacccgtgctggtgagagaggcctgctgttgaggggcctgctgttcatcacacccgtgctggtgagagaggcctgctgttcagcacacccgtgttgaggggcctgctgttcagcacacccgtgctggtgagagaggcctgctgttcaacacacccgtgctggtgagaggggcctgctgttcagcacacccgtgctggtgagaggggcctgctgttcagcacacccgtgctggtgagagaggcctgctgttcagcacacccgtgttgaggggcctgctgttcagcacacccgtgctggtgagaggggcctgctgttcatcacacccgtgttggtgagaggggcctgctgttcagcacacccgtgctggtgagagaggcctgctgttcagcacacccgtgttgaggggcctgctgttcagcacacccgtgctggtgagaggggcctgctgttgaggggcctgctgttcagcacacccgtgctggtgagagaggcctgctgttcagcacacccgtgttggtgagaggggcctgctgttcagcacacccgtgctggtgagaggggcctgctgttcaacacacccgtgctggtgagaggggcctgctgttcagcacacccgtgctggtgagaggggcctgctgttcaacacacccgtgctggtgagaggggcctgctgttcaacacacccgtgctggtgagaggggcctgctgttcaacacacccgtgctggtgagaggggcctgctgttcatcacacccgtgctggtgagagaggcctactgttcatcacacccgtgctggtgagaggggcgtgctgttcatcacacccgtgttggtgagaggggcctgctgttcatcactcccatgctggtgagagaggcctactgttcatcacacccgtgttggtgagaggggcctgctgttcaccactacccatgctggtgagaggggcctactgttcaacacaccagtgctggtgagagagtcctgctgttcagcacacccgtgctggtgcgaag

SEQ ID NO: 1839 - DNA, 226 bp, Procavia capensis
  source 1..226: mol_type = unassigned DNA
ggtaagcagggtaacaccatcaggtaaggagggagtgagcagcccccacttgtctgtcagtggaggcttgcttgttgctgtgatgcaggaagctatgccactggtatttaggtaccagcagggtcaaccatggtagacaagtttcagctgagcttccagactaagacagactaggaagaaggacccagcagtctacttctgaaaggaattagccagggaaaacctt

SEQ ID NO: 1840 - DNA, 975 bp, Salmo salar
  source 1..975: mol_type = unassigned DNA
tccaagatggcgtagcagtcagacgtctttgtcctcctcttgtcgtgtcccgtgtatatatttttatatcttttttcttcgcatatctttttaatatttttcttaacctcaacttcaaaacactctcctgcaacccgcctcacccaatgtggaatagatatgctattttatttacctcgaactggaatccacaacagaagctagccagctaactagctactagctagtagtcagctagccacggttagcggtcatcagctatcctttagctcgaaaagctatcgccagtttgtacagcgcgactcagaccagagcataccggacctatttttctccatatccccggatttctaccgcaagctctggacatttacacctggatcattgcagctagctagctgcatccgagtgactactattggctaacgtttcggtcccgaagcaagcaccaattatcctggagctagcccatgctaggcccatctcccggctagctgaagagttccatcagccactccttgggctacaatacctattttgccaactgacctggacccgttttactgccgtgcggagccccaccgagccttcacgactggactaccgacgttatctgcccgagggagttatccaactggcccctccgtcgcgacgtaacctgaacgcccatctgctggcctgctaaccgcggatcgttagctgtctagagcatatcggactgctatctgaataggtctatcggacaatttcttgggccactatacctattttgccaattggactggtcccctctaccacacggaaccctactaatccatcacgactggtctaccgacggaaacgcacgaggtggctaaaacagacttcttccgtcgcgacgtccctctaaggcccttctgccagcttgctacctatggcccgctagctgtctgaatcgccgtgtccccagccagcccaactactcactggacccct

SEQ ID NO: 1841 - DNA, 18 bp, Salmo salar
  source 1..18: mol_type = unassigned DNA
cttccggcgccgacagag

SEQ ID NO: 1842 - DNA, 334 bp, Salmo salar
  source 1..334: mol_type = unassigned DNA
ctatcagttagcatgtggaacattcagggcctaaactcatcaacctttggactgaagagtttagcactggagttcaacaaaaatcttaaagatgttgacgtcatcattctgcaggagacatggtgtaaggctgacattgtcactcactgtcccacaggctacagagaggtcattgtgccatcacagaaacacagctctgtcaatagaggcagagactctggaggattgatcatttggtacaaatccgaactacaaaatctaattgatcccctcaaaattggcaaatatcacatttggttaaaactgaaaaaagaacttgtactgacagaaaaag

SEQ ID NO: 1843 - DNA, 1074 bp, Salmo salar
  source 1..1074: mol_type = unassigned DNA
ccaagatggcgtagcagtcagacgtctttgtcctgtcgtgtcccgtgtatatatatttttacatctttttcttcgcatatctttttaaaatattttcctaaaactcaacttcaaaacactctcctgcaacccgcctcacccaatgtggcgtggatctttttttttactaaagtatttctatttacctcagatctggaatcccacaacagaagctagccagctaactagctactagctatcagtcagctaaccacggctagcggtcatcagctaacctttagctcggaaagctatcgccagtttgtacaacgcgactcagaccagagcataccggacctattattatttttattctttttctctccatatccccggatttctaccgcaagctctggacattttcacctggatcttcgcagctagctagctgctatcccgagtgactactcctggctaacgtttccgtcccggagcaagcaccaattagcctgaagctagcccggccagggctcctgagctaccaccgaagcccactcctgggctacaatatccggaccccttttactgccggtacggggcacggagccccgccgatcctccacgactggactaccgacgttatctgcccgaggattccaactggcccctccgtcgcgacgtaacctgaacgcccattctgctaaccgcggcctactagctatctagagctacttggaaccctactaattccacgactggtctatcgacgtcaccgcacgaagaggcaaaaacagacttacccccatcgcgacgtcccccaaaggctaacttgcttgccccggtctgttaactgctagcttgcttgccccggtctgctaactgctagcttgcctgccccggtctactaactgctagccccggtctgccaactgcttgcttgctaacccggtctgctaactgctagcttgccagccccggtctgctaactgctagcttgtttagccccggcctactaactgctagcttgctagcatcggcctgctagctgtctgaatcgccgtgtccccagccagcccaaccactcactggacccat

SEQ ID NO: 1844 - DNA, 413 bp, Salmo salar
  source 1..413: mol_type = unassigned DNA
gttccggaactccaatttgagcagcagcagctgaaaaatgagctcctacaaatattgaaatttacatggtttttagagtgaagtacatcggaaaaaagcaaaagaaaactgcaagactgaataggagaaaaaacaagcaacaaacaaagaagataggcttttgaaaaataactatttttcataaaattgtagttatcttagctagctgaattgtttaccagttgctaagcagttgctagggactcttttggaagaagctagctagctaacgaagaacaacaaagaatatctagttaacagaagaaaagaaagagaaaatcaggacagaagaaaaaggatatcaaagtgaaacagttctctaaagacacaggagacaataatacaagaaacaacacttctgtagcttgtcaact

SEQ ID NO: 1845 - DNA, 692 bp, Schistosoma mansoni
  source 1..692: mol_type = unassigned DNA
cccaaatgccctggtacggccgagagtggggagagtccactctccctctcgaaatgctctcacatggccacgcgtatatagcctctgccagggaagtcctactcactgccttctcgtggcgggggtgttgtttacgaaagtgagaggacgaaaagcgaatgtccggcgctttaaccgggttggtggacacggagggtccacctaggggagttggaaaaccctgattccaaaccaatggtgcacatgggctccagtatcctgatggaacgaatggcgaatgaacctgtcattggtcaccggctaccatgggactgcatctcctcacgatgctccactgccttgtggatcagacctttaggtcaaaggctcggggtgtggccccctaagaaaaccacctgcttcggtttgggcacccgggcagtatcacagcccacacacaaataaatgaaatgatgaattctattgacgatactattctcgctcatactagaagcaagacaatttacattattattattattattaccattattattattattattattattactattatttactacgtcgctaattcaccccctttatccccaatttgtgtaaccttacttttcaacttatgcagcagctcgcccatggtggaaaatctgtcctatctaaacgatctccagtcactgtctggttgaaagtga

SEQ ID NO: 1846 - DNA, 1814 bp, Strongylocentrotus purpuratus
  source 1..1814: mol_type = unassigned DNA
caatcccttgatatgtgtattgtggaaaagaactgttgtgagaacttttgtttttgcattaacgaattctccaaacgtcgaaaattcaggaatgtaaagtgaagaaaaaaaattccccgccatatcgtacttggaggtatagattttaagactcaagaatgtaagccttgtgacattccatgagatgtaatctggttggaagtaccatgcaatttaaagcaccagtcaaaactcatgaatgtaaagagaaaatagtacccgccaatttgtactaatataggcataggtttgccttattgcattccatgagatgtctagcttgttacttaatctttaaaatgtgtcattagaggaatgtgaacactgtacaacgcaaattatagaacgggttccttttaaagatatttacaaatggagagggggagtggtttggtgtgcatgtgtgtgtgtgtgtgtaacttacatacatacatgtacatcgcatttctctttccttttccatttggtgagcaaagtaatccaactaatcaatagccatgaacacgtgagaggcttcctcagctatgattggtccgcgagagctggagggcgaaagtgtttcttttgttcttttcgtcaccggcttctcgtggtcaccaacgccggacatgctgattggctgaatggtctttgcggcagcaggagggcgggacgtgttttgagacaagtctcgtctccagctggtcctagacatttcagttgatcgagataaatggcatctgaaatatacaacataattgtcgatttgtttctgctctccccccccccccctttaatagtaaatatccatgtaatcttacaatcttagcaggaggattaacgttagtgccttgtgaagcaagcataattagatctcgtcaccggctgcttgtggtcactgtctatgacggcaggtgggcgggacgttgttcttttatttagaaaagtctcgtccccagccagttttagacaccagcgaggtctttaaatcaactataaattttatatctagactctgttttgagagaaattaaaaggggaaaataaataatgcccttttacggttaccttaagccggtcgttaacagtgaaaaaaagaaagaaaaaaagaagaggaatagttcaaaagttaattaattcgttttcttaaaataaaaataaaataaaagatgggaggggaagaaactccttatatactgtaaagtttataatggtatcaaaagccatttggtggggtacaagctgttgaagcttaaagtatgcacggggtttatttattacgttcgtttattacgttttttttcttttaaaatattatatatagccgtttgagcctggggctaaagtatcattagttacacattatctgaatccgttaattatgaggtcaagttatatcgtctggagttatgataaattgctctgttttattttcggtgttggtttttttttttttttttttttgtcacagtaagaagactgtattaatactttgtgtaaaaggctgccacgccatgatttagaataagtgatgggaggggtttcgaacatgccagcatatattatgcttatgtgtatgaatgtggttgatagtgttgaagggtggggtgatggtatgtgtggtatgttttccggttccgatgtctgcctgtacttgtttaatttgcaatctaacttgaaagcgtttgtttttcctagagttggaaatgcatcaagcttcccatctactgtgaaactgtcaccactatgtacatttctaaaggttctttgttacaggtatagattcatagttcttg

SEQ ID NO: 1847 - DNA, 374 bp, Daucus carota
  source 1..374: mol_type = unassigned DNA
catgaggtgatagtcatgaatccaaatataatagataaataagatatttttttaaggtgcagttctgctccctaactaatagtagaaataaagtaatggttataagggttctctaaaacatgacccaagttaataaatgtctctaaccaaaaaatgtctacatttttaatgtgttttttatacgcaataaattataactaattgaacatcactaaaattatagacacaattgggataaaaagttaggcacatttgaaaactttacaaatataaggacaaatccgacagtggcttaaaaatccaaatttggaccaattctagcctaaatcttctcaacgggggcctgaattacggtccaaatttaggccacttag

SEQ ID NO: 1848 - DNA, 1495 bp, Lottia gigantea
  source 1..1495: mol_type = unassigned DNA
tacgatatatagacacagctttatggaacaacaatcactggttaaagttttatgcaacgtttcgacgtgtttcccccgtcgtcctcaggcacataatgagaagaagtgatgggcaaactatatatacattaatgcttattattaagaacacacaagagataaatggtttattgatacattacattaaattttaacaggtacaataagaggtatataattcttaaaataacatacaggctgattaagtaaaataattgaaataaagtaaatgaattaaaaaagattaattgaagattaaataaacaactattgctggtattggagtcttttattaatagaaattacattgttcatataactaactatgcttaaagttggaaattgtttattaaatacatttatgaatatgatgataagtttatcatatgcatgcgataaacgaacaccttcatctctgttaaggtcaggctgatatcttctgatgtggatagcttcatgaagtctcctggttttatctatgtgcttattgattgtcagtatgttggtgttgtcaaagttgactttatgtcctgttttccttcccatagcaagatgttcagccacagcagatgttccttcattgccgggcttgtcttgatggtctttgagtcgaacatcaaggggtctctttgtttcccctatataagaacttccacaggagcactcaacttggtagacacatcccttaggtttttggttgttggagggattcaatttaccactggctctgagcaaatctttaagcgttgagttgccagagaacactgtttcaatgccgactgactttttcaggatcttcttgatttggtatgatgcctttccgatgaatgggatagctaagcgggttgatggtctgttgggattaggctgttggttggttggttttgccattaatacggatcgaaaagcttgatgtacaaaggctggagggtagttgttgtgcaagcaaaatactttcttgatgtgttgtaattcttgttgaaagtattctgggtcacaaatcctttttgctcttctgaccagcgctgtgatggctgcccttttgacatgttgaggggtgttggaatggtagttcacatactgatctgtatgtgtaggtttcctatacacgcatgtcttcaactgaccgcctaaccgcttaattctcacatccagaaagggtatagagtcatcttcttctgcttccatggtgaaattgatcctcttatgctgagcattaagatgctgaagtagagctgatgggtcatcttcagctctaagcatgacaaaggtgtcatcaactttccggaaccagcagattggtgagatcggagaggtttccatggtcttttcctcaaaggctgtcatatagatttcagtaatcaatggtgacaaggggcttcccataggtagaccgtggatttgttcatagatctcatctccccatgtgaagtaggtagaggacatacacatctga

SEQ ID NO: 1849 - DNA, 791 bp, Strongylocentrotus purpuratus
  source 1..791: mol_type = unassigned DNA
tccgtttctgcttaataaatgtgttaatatatttccagagttttgtctggggctgtcgtattatcaagcaatatgcttacaacgacagcccttcttccacatataattttataatgtgtcataatgtttgataatccatgaatgcagaagaaatcaaatcaaaatcaaatcaaaattcatgtatattgcatactttaacttctggccaatcagcgtagttggccttttattgtcaacgataacatcatccctggactacatttggcggcagatggcgtgcatcttaacaaccatggaatacgcgtaatggcgcgaaacctcatcactcgtctccgagatcagtcaagcgtcactagaagtagcccgccgtctgacccactgcccaatcagcgcccgcgatctccgaatacaatgaggaccgatccattctcgaatcggcaagactccgaaagctcctcgcacgccatggctgctgagaatgataactcagcttttcggagacgccaacatcgcaaattccgcaaaaagccgaaggggagagttttcccccgagactggctcgactgtctccagacggcccgcacgctcctgaatcgtcaagctcagcaatagatgatagcgataatttaagtcttcacgcggaggatcttaatgtaaacgctacaaatgtaataaacatcaatgagaaacaaacgcaaattgaaaaaactacagcttccaaggatgaaagtgaactaaatgaaggacacaatgtgacaaatacacaaggatattatgaacttgttgatggc

SEQ ID NO: 1850 - protein, 30 aa, Spumavirus sp.
PKDLKQLQSILGLLNFARNFIPNYSELVKP

SEQ ID NO: 1851 - DNA, 57 bp, Hydra vulgaris
  source 1..57: mol_type = unassigned DNA
atggcggcgtaaagatggcagcctagttgagcacgtgttttgaaataatttttaata

SEQ ID NO: 1852 - DNA, 199 bp, Strongylocentrotus purpuratus
  source 1..199: mol_type = unassigned DNA
tattgtgaatgaatttaatgacttttttgtaaatattggaccgaatttagcagatgaattgccgaatacagatgtagcatatggtgattttttggggcagaatatagagcaatctttattttggaaaccaataactgcagttgaagttaagagtcaagttctgctacttgataccaaaaaggcttgtggtcacgataac

SEQ ID NO: 1853 - DNA, 109 bp, Strongylocentrotus purpuratus
  source 1..109: mol_type = unassigned DNA
tccatttaagttcttctttacattttgtacatagttgttgttgttgtttgctttttactactttgttttaagtgtagaattcatattcctttgcttttttggttttcaa

SEQ ID NO: 1854 - DNA, 910 bp, Schmidtea mediterranea
  source 1..910: mol_type = unassigned DNA
cctttttacggtataattataaacatttatcataacatactttctgtatcaactatatatatgagtataaatctggatcttctgagaaggactcatatatataagataatctataaaactggaaggtaatgacgatgattcagaggtccagtgactattcctcgagagaggaactagttacgcagttctgaatcggcaatcactaactcaacaggctgatgtcaggatatggaaaggggtctaatagtggtcttaaaactctcttttgaaagtgacttcttattggacacctttttattgtataattataaacattaattataaatcatatcatactttctgtatcaactatatatatgagtataaatctggatcttctgagaaggactcatatatataggataatctataaatctggcaggtagtgacgatgattcaaaggtccagtgactattcctcgagagaggaactagttacgcagtgctgaatcggaaatcactaactcaacagtctgatgtcaggatatagaaaggggtctaatagtagtcttaaacctctcttttgagagtgacttcttattagacacctttttattgtataattataaccatttatcatatcatactttctgtatcaactatatatatgagtataaatctggatcttctgagaaggactcatatatataggataatctataaaactggcaggtagtgacgatgattcaaaggtccagtgattattcctcgagagaggaactagttacgcagtgctgaatcggcaatcactaactcaacagtctgatgtcaggatatggaaaggggtttaatagtggtcttaaaactctcttttgagagtgacttcttattaaacacctttttaatgtataattataattaaatataagcag

SEQ ID NO: 1855 - DNA, 499 bp, Strongylocentrotus purpuratus
  source 1..499: mol_type = unassigned DNA
aggctctgtataagcttggcttgttagagctcttgtgagttgtgtgccgcggggtttcatatccttaaactgctggcgaacagagcaacaagaccaagctctgtaattgttaggtttctccaatggtaggtttgtccaataatgccgagtttgtgccacggaacctagtcggacatttcgattatattctttttatgtcatacgtctttatcttttttttttttaaatattttttatagtttagtctaccttgctgatacctcctcaaaatatatacgatagactatcattaattctgctgcattaccatatagcttacttagaggttactgcagatcaatcacctgtactgtatctagagtatagttaagtgtaggagaacagtaaaaacagtggggccattgaaggagcgttcacgtcgcggtccgtcagatgaaaatctgcgaatccttcaaccacactactcaagtttcttttagtaactaccacaaccaacacc

SEQ ID NO: 1856 - DNA, 297 bp, Drosophila persimilis
  source 1..297: mol_type = unassigned DNA
actctgatatcgactcagaaatagacagtaaacaccctatcaaattcccataaaaacagcacaacctctaacattgtaaaaattctaccactaactacctctaagcgcagactagcagcaattaaggctgcggacaaattaaaaagctcaagcagcaaaaaaacaagacagaagaaccccaatactgacgccttgagtagcaacaactgctcaatggaaatagaatccgactaaaactaacagatcaagtaaaaacaacccaaataaccagcactcaagagataaaaactcaaaaaa

SEQ ID NO: 1857 - DNA, 1128 bp, Drosophila sp.
  source 1..1128: mol_type = unassigned DNA
tggctggcaaaaatcctccagctgaaccctccacgagggagccggctaggcaatgggcactgtattaccgcgtacaatggtaatgcagtggcgcatgctctgtccggggtaatgcagtgtctagctaaggcttcgattcaatttctcccgcctaaacgccatggttggaggtgcctggcggcaggcataaaacgcaagtgggtggttccccggaaataaaccaatttttcacaggatggagacaggagaggcaaccggggctgggatgtcagcccaaacgtcggtggaaggcgtgactgctaccaccggcgggcacgaaggggagcaatcctctctgcgtgtcaccagcggtcacacctctgatttgacgggagcaggtcaagtcagttgtagcgctaatgccaaataacgacgaaaagaaggctaagccgcacgggtgccgttgtctatacagactcggacctggagagcgtgcagctttcgaaagaagaggaagaaagccttcttcgctcgccagaaccaggcaccagctccccgcgaatagacgggccgaagcgttcaagcgaggggaagaaggctaaggcgtagtataaagctgccctccgaatccagagccggctccggacaaaagctgccctaaccgaagaggagaacgtaaaggtcaactgacaggatcgatgagagcaggctgcacttcgccaagcttcctagcttggcatcaacggccgggttcgccaacaaagtgtaggtgatgcttgccaccaagcggcaacgctcggccgagagtgccataaaggacattccggcgagcaagcggggactcgtgcgcaaggaagcaggccccccctggaaggcgaaaaccaaatccagattaacaagaaggcagaggacatcctgtatcccagacacgggaagatggcatgggtagcgtctacctgcgcctcaaaaagcgccatcctggggataaggatgaccacaccctgaaggcaggcgagatggaaaaggacctaggtctggaaaccatttttgacgccgcccaggaactaacgctggatgagtccgaagaggaggaagacggtgacctgacgatagtagtcaacccgtcgagtggagttgagcccagtaccc

SEQ ID NO: 1858 - DNA, 114 bp, Acropora digitifera
  source 1..114: mol_type = unassigned DNA
tttcatctctcccaccgacgcagcaccacagtttctttagaaactagaaattcatttactacttaaccgctgcgacctcattcattcctcgctaccgcgacgctgaaactcacg

SEQ ID NO: 1859 - DNA, 372 bp, Acropora digitifera
  source 1..372: mol_type = unassigned DNA
  misc_difference 86: note = a, c, t, g, unknown or other
gcctcttcgcttgaatctctgctggcccacagacgtgcaaaaaaagccgctcgttcccgcggtattattaaccacaatctcaccgncgataacctcaatcaacacatcaataacactaatgccagtactaatgacatactatctaatgttacacataacgcctctacctcaactgtcacacgcaaacgctctcgccgcgaaaccaaacatgccaacattcatttggatcattcttctgttatcaacctatccagttgctctttatctaccgacgagatatctatcctttcacgtggactcactttctgccctactccacgacatatcaactggccggaagtttcagccgacatttacgacttttctcggcgc

SEQ ID NO: 1860 - DNA, 3199 bp, Aedes aegypti
  source 1..3199: mol_type = unassigned DNA
cagttgacagccgaccgccgtcgcgtacagtcgcctttcgcattgttccgtactgttaatatcaattaacagcgcatcagccaactcgatcgttgtctgacggggtgctccacagcggggcgagtgtgcattgttttattccggatcagtgcagcacccagtggtgtggtgagaagtgaggttaaatagactcggtagcgtggttcgagtactgtataktattatttcgggcgcgagtgtatgtgttagtaacttgtgagtggtataaataaaattatcttcaaattaaaaagcggttcagtggttttcaactgtagtgtgactgaccaaccaaaacaggtgagtcttccacgagtgcctccttccggcccgccggcgccatgctggcgaacggccatcccctccacccaggggacccagggggccccggaggaggatttggcaaagtaggcaacagagttctcggcgactacaccggtgcattgctaccggagtttatggaccgtgaaggtactgcaggacaactgcagtatctaagaatggaagcgactgctggaaccatgccccaggatccgtttcttcttcggctatccgtcgaaaaggccattggaggtcccattttcggggccttcaaggaaaataaaggcatgtcctacgtgttgaaggtgcgcagtcaagaccaggtmaataagctcctccgcatgagccaactgcaagataamaccccaatccggatcgctgagcacccgcggctmaatcaaagggaatgtgtggtgaccaaccatgacacaatcggactatcggatgactacctgcttcaacagctctcctcccagggaatcaagggmstgcgaaggatcacgcgacgcggaccggcatggccaaagccgtggtaaacaccgccaccatcgtactcaccatcaagggcaccgttattccggagcatgtcgttttcggttggtcacggtgcaagacgacgtcttttctacccatctcccatgctatgcttccgctgctgggagtatgggcataccggtaagcgttgcacaagcccccagcagcatctgcggacgctgctgcgaggtacacccggaagaacaaacccccgatcctacaaacacccaggaaggagccgccagtgcccacgttgcgtcgaaaacgcggtaccagtgcaccgcagagccgttgctgcaagaccagtgcaaaacaggagacagcactcagtctcaagccgcaagtgtccggtgtacwwgaaggaacaggccatacaacaccttcgcgtcgacgtggacattccgtatccgcaggctcgacgtgaatacgaagcccaacaagcgagcaagtcgaagtggtgccaacttctgccggtgtggtcagtgccagcaaggacgctgaaatcgacagtctgaaggccatggtggctgcaaaactccgcggacggagaagaaaagaggatggctgaaatggaacgggctctgcagagccgcaccgtcagcgaccgcctcgaggcggttaaagaacacggcaccatcggagagctggtcaagcaagtggcaaccctaactgaaacggttcagaacctccaaaatgctctagcagtaaggacaaacaaatcccggatcaaagtcgcaccatcgctgagcttctaggcaggcaatcagctgccgtccaacgacaaacccgcgacaagctttggcttaccgcgcaagasgatcaaacgcaaaccgccccaagtcgccagaggttcccgtcatgaaaccgcccagtctgaaccccaaagtggacgtacaggtgtccaaatggatttcaaatataacaccggacctcaagaaactctcacaggcgatgaaaccaacgatggaaatgcgtctgatcatagcatgatgtcagccacatccgaagccactggaatctccaacacgtctcacgtttcgaaccctacgaaaagaatgcactcaacctcggatcacagttgcccatccggcgattcaaatgcctcatccaccaactcgaagcggaaaaacaagcaccgcaaaagaggtggtagaaccaaacagtaaaacagtaatttacgctcagtcctcttcaagcacatggtctaaacaattcgacaatattttcttcccgtcatcttcactccgcaaattagcgttgagacagtcaaatcacaagagtcgactgagcaaataccgatgaacacactacagcctccgaacgaagtactcacggacaactcagcgacaacaggggtcacggacagccggggccccgtcagtgcggacgctacaccccaaccggaactggcggacaacccccggcatccgggcgtaactgttgttatcgggacgcaaaagggacacagtgcctatcccccgaaagtcccaactagctgtatgggtacgccagggccccgtcggtgcggaagttttggaagaaccggaaccggcggacaacctctggcgcccatatacggtctggaagagggacgcaaaagggatcaacatcctattcccctkaggacagcgtgggaagcaagccacaggaaaccttttttctgcccctgccaacacacagagggtgaaggtcgggacgcccaataccccgaaggacaacgagggaagcaagcctccgtcgagtcgaaacccccccggaasagaaaaccgccggaccactacacctccaactggcacaaccaccccggtcagcgacaagctgaatcccccgacttcccgggcagccttgggacccggaagcaagcgacgccaggttgtatgacctgttacacaacgctcgttacaatcgctcagcccgccgacttcagcccgggtattccggaaccgtttccagacttcaactccaaacgcggaagcatacgaaaaccgatcgccatccgcgataatkatagctcaacccgctgctggcccctcaagccaaacagcctccccagatccctatcaggatcgccctgggcacctcggactcaacaatccgagcggtaaggccgaccctttcccgctgggcctccacccggtgaatcttcgtccgccacaacaacctatgtcaacccatttttcgacgcggctcccagtcttcttcgctctcaaactcacagcagcactccttgataaggtttcctagcagccctgttggaaacgactgtcttgccgcagctcccgaagttccggcagtagtaggtccc

SEQ ID NO: 1861 - DNA, 482 bp, Aedes aegypti
  source 1..482: mol_type = unassigned DNA
gggctgcaaaatggtgagtcgacggagtcctcacaagttcctacctcatgcttccacgggtcgacggatgacaaatgaccgccagctaagagttgcgtgcttagctggtagtgcagcctgggtcctgtagtccttctgacttcagctagattgaggaggtacgtccaccgagcgtctgttcaccaaggaggtgcggctcaaacagcgtctgtctggcatccagcggctgaataagaaatgctcttccccggaagctacacctaagatggcagccccatcacggcggatagggaaccttaggctaacaacctactgtccccgaaacatcaaaaaatgttcaagaaaccgatagagaaagattacgaactgatttaacggcaacgacttttagcgcgaaacaacggacacgaattggaacatggaacgtactaaccctagcccagcagggtaaactggcacaactcgccaacgaggcgtgtcgc

SEQ ID NO: 1862 - DNA, 332 bp, Aedes aegypti
  source 1..332: mol_type = unassigned DNA
agttagggatttgtataattattattatcccccttttcaatttttgaccaagacatgacaggtatactcctgtcgaaattttttcctaggtagtttgattgtgtaggtacttatctggtgttagtatttaaggtagagagatgcgacgatttcttcagtggatacgagtaactgacactgaagaagactgcaagtggtagtcgaaatacgcgtatctgtcaaagataagcatttaggagcggaattaaaaggtacacggtactccatctactttaaagtttctctatttgagattctgctcagaggattcgaacattcattaaagagttgta

SEQ ID NO: 1863 - DNA, 467 bp, Aedes aegypti
  source 1..467: mol_type = unassigned DNA
atgaactgttccactcctaaaagttatattgggaagctactgtttccccttctgctgctgttgttgctgtgtgctgttgatgctactgctgttgctgctgggaggcgttgctgtcgaataagatttttctgctgctctcgattgtggtgaattagatcaaattagactttttcgttttcggcatattagcagacattatttagctgttttttctttgtaatgtgcttttctctaatgtcaaatgaacttcagactaaaagttaatcacaatgaacatattagtagttagtagttttgcttttcctgatttctacactgcatgttgcttgggttcgatgggtagactgcttttgaagcctatactgttcaacatttagatatggatgacttttcccttgataatgcttctccgaacaatgtaattccacgtgttgttcttaatgctgcattaaaacatgactgtttga

SEQ ID NO: 1864 - DNA, 103 bp, Aedes aegypti
  source 1..103: mol_type = unassigned DNA
ctcccagcctgcacttccaggcaagtatgcgtgttataccagacgttctttscgtgatgaattgccaaatttcagctctctatccgccgctgatgtaacatca

SEQ ID NO: 1865 - DNA, 1656 bp, Aedes aegypti
  source 1..1656: mol_type = unassigned DNA
  misc_difference 321: note = a, c, t, g, unknown or other
aattctggcaccactgcgtgttttcgtttgtgttgtttataacgtcgccctaaaatcctgtgaatattcgtgcaatcaactctataaatcagggtttattgctaaactgcctcgttccgcttctgttagccgcaagcatcaggttttcgcatcacttttggcaaggtaggacagtgatttgtgatctaaatccgagcaggctagagagtggaagcatccgccatcgcccgataacatatttcccacctcgccgctctccaccttccaaccgatcgaaagctgcaacaagatcaaaaatcaacccgcccccatttgccccancgccccaccaacgccctactaytgtttgctgcaccgaacgaaatcaaaacaagaaatcgtcctgtaatactccgcttcatattggaaataaactacttacgctgcctcgtctttcattccaacgctccgaaagggaccaacgaacgatcatcatacagcctcaatcgccgtccaaagccaacccgttgctaccaaggattaatcgccaaactctgcatccgtagtatcatccattcacgtaaggaaattctgttttggttctgcactttgtttatgtattgaactgtgaagctcaccgttgacaagccaccgtttgtgacagagaacacacgcgcagctcgtggtcattccgagaatcaatagttcacagtatatcaccccttcgtaactgggagcttgtttctcgcagctaaaatgcagggtgtttgtgaaaaatgcgcttccgaactatccgctgatttttggagctgtggtggattttgttctggtcgcttttgcttcaggtgtaccggaatgagtcctgatatccaagctgccgttgcgaataacgggtgccttcactggatgtgtaacgcctgtagcggaataatgattaaagctcgctttactaaggcaatcacatcagtgaatgctgcctatgaaggcataatcgaatcaatgaaaatccgaaattcgagacaacattttgtccgaaatccgctcggaattgcagaataaccttaaacgaattccggagattgttgcaaacacaccgattcgaaatattcaacgtcgcacatttgattcggctgtccgtaatcctgcaaaacgtcttcgtgcaaatgatgatgtgcctctcgacccgcctaaaaaactggtctgtggcactgatggccacagtactagttcttcagacgtcatcgcagttcctgaacgaacggatgaaaacacgttttggctttacttatcaggagtgtccccgaaagcgcctgatgagaaggttatcgaaatggtcaagaataggctcgmaacagacgacttaactgtcgttaaacttgttcctcgtggaaaggatacaaacaatctcacgtttgtatccttcaaaataggaatgaagcttgatcttagggcaaaagcaatgacttcatcaacctggccagttggaattcgttttcgcgaattcgagaaccacagttcctcaagggcggggttctggaatccctcggagaaccagcccgaaccacagatcgtaacagtattgaactagtatccccatcgtgtcccatagatcttcattctcctcgtgatgagaccgttttaagccatttgacaatctactaccaaaacgtgcggggt

SEQ ID NO: 1866 - DNA, 82 bp, Alligator mississippiensis
  source 1..82: mol_type = unassigned DNA
tcagaacaagacacatgctcgggtgggatgggcttcacctctcccccaaaggtaagcatgtgttctctttcaggttggctga

SEQ ID NO: 1867 - DNA, 200 bp, unidentified
  source 1..200: mol_type = unassigned DNA; note = Description of Unknown:Amborella trichopoda sequence
taattagtgcttatgcaccacaagtaggattagatgatagaattaagagacaattttgggaggacatagatggaatagtccaagacataccaaatggagagaggacctttttaggaggggacttaaatggtcatgtagggaaggatagtagaggatatgaaggggtacatgggggatatgggtttggggaaagaaatgag

SEQ ID NO: 1868 - DNA, 399 bp, Anguilla japonica
  source 1..399: mol_type = unassigned DNA
cagtgtgcatctgattgtgtcgtcgcttctgccgtcccccgcgattcagataagcgtatcttaacttgatttgtctctgctgttgctagttagagaacatagttgtgcgtaatttagataatcttttttaaacgtgtctttactgttgctagtcagcgaacttagttgtgcgttagctgagaatctctgtagttgactcactgttgttagttagttaaacgcgttagtgaaactgtgtgtgggggttggtgtttaactgcccggtattgttgagctaatttcaagtagcttcacctggtgcttatctgccttaatgaaggtgatgcaagcacgtaattgtcacccggtatttatagctccagcggaggctgccataggcagcctcgtcgtcagtttgtg

SEQ ID NO: 1869 - DNA, 108 bp, Anolis carolinensis
  source 1..108: mol_type = unassigned DNA
atgmtgttgagagctgtgctggcggtagtgtaaactaccagcaggttcaaccaagccagagtggtctcaactgagaagtagaactaagtgcacccaacccatttaaat

SEQ ID NO: 1870 - DNA, 165 bp, Anolis carolinensis
  source 1..165: mol_type = unassigned DNA
atgcattacagaaacctggatacgagaaggagataatattcccttgcatgaactaacaccgtcaggtttccagatgtttcaaagatctcgaaaggggggtcgaggggggtgggaatagtggctcgcgatcatttctccattagaactattcctacccctgatatt

SEQ ID NO: 1871 - DNA, 159 bp, Anolis carolinensis
  source 1..159: mol_type = unassigned DNA
gggggacatgagagaagcctccacgcaggatcgtgacacatccgggcgtcccctgggcaacgtctttgtagacggcagattctctcacaaccagaagcgacgtgcaacttgcaacatgcaagcaaacaaaccaaccaacggaccttttcaggaccaact

SEQ ID NO: 1872 - DNA, 229 bp, Anopheles gambiae
  source 1..229: mol_type = unassigned DNA
ttgacagttgacagctgacgacwgagtgtgttttctcactgtgctccgcgtaaatccgtgaattattttgtcgtttcggcctwattttcgtcaaactgccgcttagctgtgacttaagctgtccctggtagtcctgccttcaatcgttcgtcacaaccattcctgactttgctgtatttcctgcgtttgttcctgagtcctgtggcatctatctgcaacggcaactaaa

SEQ ID NO: 1873 - DNA, 128 bp, Anopheles gambiae
  source 1..128: mol_type = unassigned DNA
tatatatcttcaatcgaaaggcatccccgaaaattttggcgcttcatggacagcagacgacgctccaagcacaatcatgggcacgtcacccgaagatatttgcaacattttcgctgaacgattttccg

SEQ ID NO: 1874 - DNA, 243 bp, Aplysia californica
  source 1..243: mol_type = unassigned DNA
ttagccgtgcagtctcggcattgagaagaataggactgacgtggtgctagcgtgtcgtacgaggcgactaaatggcgaaccaggtagtgactcctgaaacagagtcatcctgcctccaggtcgggggttgagtcacgaggctaacaacctctctcgtaaaaagaacctgttacagaaacacatacaagcaaaaaccattatctctgcttggctgatcgtggatcttctccaaatggagagttt

SEQ ID NO: 1875 - DNA, 662 bp, Aplysia californica
  source 1..662: mol_type = unassigned DNA
aattgaacaaattatggaggaactgggagtgactcgcaaaccctttgatatcaggagattatttggtaggaacagaacagaggatagcagagacagcggtaatgaccggggaagcgagaaaaggccaagacctacactactgaaatttgaaactgaagaagcaagtgctaatacgatgaggaaatttattgaggcaagaaaagacgcagcaaaggacaaaaatgaaggagaagaggacaagttatacttgactattgggatgcgaagagatatkacaaagcaggagagagaggaggactatgccctctaccaggagttgaaggctaagaaagagaggtaaaaaaacttgggggacaatttcgctcactgggtgaggagagacggcaaaattcggaacattgggaaatacccaacggaacgtcagaaagagagggagacaatacaagaataaagccaaagacagcaaagaatgtaaatagttttggccattgttcgcctttttcatattttaattattgctcatctcgttcctgacgtwcagaatagaagtttcacttcattttcttctttttcacctacatttcattccaatcggaatgcacatactttagagaattgtacttgcttgtatacaaatgcagatcaattgttgaacaaaagaa

SEQ ID NO: 1876 - DNA, 433 bp, Aplysia californica
  source 1..433: mol_type = unassigned DNA
  misc_difference 233: note = a, c, t, g, unknown or other
tcaagcgacaatccgtgaggctaacgctgacacacaggcggagacacaggcagagacacacaccctgcgtgccgtaaggcaaacaaatatggactcttttttcccgcagcctgaccgctcccgccccccagtacgctcaccccgaagccaggacacaaggtctccaagtgtcaagacgaggagacataaaagacaggtgagcgacgagccagctcggtcaccgagcgtgaaanctcgaaaacaggaggtgagtggcacgagaagaaggcaagacacggtagattattttgattatgaggagccagtgactaccgaaacgtgtgagcacgaagaggtcggtgcgtgagtggtgtgtacacgtttcggtagccattggtaacgacttggactggtaaaaggactttgagtttggttttgcgtctgactgttttgg

SEQ ID NO: 1877 - DNA, 341 bp, Aplysia californica
  source 1..341: mol_type = unassigned DNA
  misc_difference 257: note = a, c, t, g, unknown or other
  misc_difference 274: note = a, c, t, g, unknown or other
gtagagaggaagagcccgaaacagcgacgcattctctcctgatgatctccatgctagagtccgggatacggagcgttcggcggtgagcagtgcatacggctgtttagactacgtacctaccagtagcaggtgtatgctacggacatcctggaaagacagcacgacaacccggagtgacgggtggacatcgggaaagaccgaggacgtcgggaaagaccgacggtggcaggggctaactacccaggtcactgcaaatntaagttacgtcaaccantagaaaagacagccccgggatcccccgagaggggggagtagaggatggatccacaaggacggattca

SEQ ID NO: 1878 - DNA, 776 bp, Aplysia californica
  source 1..776: mol_type = unassigned DNA
ccccccccaaatagacccacctcttcgtggtggggggggggattagtactcttcgaataggaaaagaaaaagaggaagctaacgggtcaaggggtgaccccgaaaagagacatattactttactatgtttcttactctttctatttattgtttttattgttttactttattacatttattaacttttcttttctcctctctccatcgacaacctttctttgacctggagttgggacgggtattggtggggtggaaagcagaggttcattgtcagcactgtactggatgtgactttacgtagggaatacccagctacatacatgtattaagcatgcacttatcggagagccctatgactgcggagaaggtgcagagaccatttgcgtcttgcttgttgacaacattaaccctctgggatctgccatgccttcccctgcccccatctctcggatgagaggacttggttgctctgggagggggggggggggaatctagcttccaattggtattattattactattagtattattattattatattataatttttgtatttcagcaacacacagcaactatgctcttaatagcgtctttctcttctttatctcctcaaacaacttctcaatataatacaacagacaccaacatacccattcatttttcttacaatctctctgtgatggagttgggtttttgtttgtggcattgcacctacagccactgctttatctcctaccccgggatggaaggaaaatcacagaaccaccagttttag

SEQ ID NO: 1879 - DNA, 346 bp, Aplysia californica
  source 1..346: mol_type = unassigned DNA
gtaaagctggggcgaccatccccgacccaccgcgtccacaggtggcggatagtggaacggcctacattatgtagggtagctgcgaataaccaataagcagtcgcggaccaactggcgacagtcttggagagcgaggtgggacagggtggtggcaaccctgtctctataaaatacctcatgtgctcagtaaagagactgtcaggcgagagggaggcgccgaaacctgccacctgcccccactgccttgtgggttagtccttttggacaaaggctagcggagtaaaccgtacaaaaatccagcagaaggcaaggggaaaccactgctgtattctttccctagaacatt

SEQ ID NO: 1880 - DNA, 873 bp, Aplysia californica
  source 1..873: mol_type = unassigned DNA
  misc_difference 170: note = a, c, t, g, unknown or other
gggctgtaagggttgagggtgaaaccccagacgctctctggcaagccagcctcaaccaagtcaactccccgtccttgtcgagcagcctggggacccctgctctgtgcataggagcaggggttgcagacggagctctggccaggaggtaccatagccctgtgaggtgcgangtgagcaacgacccttcggctcgtagaagggtccgtacacatccaccattatggtaggtctggcgtcacagcaggccgacctgttcattcaggaactcactgtcgacatcttcttccctccctctcgtgggagctctacagacggggcatggtacccacagactgccagatgactcatcgtgagatgtctccgcggacccagaaggccttgtagctgtaaggaataggctgcctggaaacagatgacgtccctacagatatcctggcaaatgctcgctgacccatgacgtgacgatcctctgtctgagtagatttggccacccctcggattattctgccccatgaacggaaatgttaatagcagatagccaggagacagcaggtggcggggattgggcaaacgcaagctacgcttggtgatgtagacgactcactgtggaaggaacgcgttaccccttactcaatgggaccccttactggactgctcagacgatcacttgtcattggttgcactttgtggctcccatctctcagaactagagtgtgcctacaccccctatggttgtctactgtctaagaaatccccgtgaaggttgatggaaaacaggacagcgaacattgcacctttgttctcttgtggcaagatgtttgggcacaagccagtgtcaggacaagactaccacctacctgagatcctacaggg

SEQ ID NO: 1881 - DNA, 243 bp, Aplysia californica
  source 1..243: mol_type = unassigned DNA
ctcccctgctggtggggggccccgtagttttactatgggggagcaaagaatacacctgccgtgatactgcgtgtcgtaagaggcgactaaaagtgcataggtctggtcgcccgaaaagtgccagtttgcggagggccaactacccaacccagtaaaaaacagtaagttacagaaacacggacaaacacagctttttatttttcgatcttgggagacggaggagcttctgcatcagcaggaaca

SEQ ID NO: 1882 - DNA, 513 bp, Aplysia californica
  source 1..513: mol_type = unassigned DNA
gtcaggtcagccttagtgctgctaccataatgacagtagatggtactacctgcagctgttcctactgccttgtaggtgcatacgggagtatgaaaggttaagggagtaaaccctaaacaaatccggagggagggcccctaaggcagtcgacagggaggaacgatccgaactatcttctggcagcccctgcaactttactggttccaaatgtattgacctcgtctctcctttggactaaatcagctaagtcgagagggggttcgtgcaaattgggcaaggcacgttctccatatagtcaggcccaggcatttagcttagtcaagatttcaagatttctgggaggacgctgcaaaagagcaaatacagcggatcagacccacagctcaaccacagctacaacagcatttatatgattatggagaggacacttcatccttgttgtgacgagcaagggaaaaaacacgggaggtggcagtttacgggttataagacatccttatttggcgaaacagg

SEQ ID NO: 1883 - DNA, 109 bp, Aplysia californica
  source 1..109: mol_type = unassigned DNA
ggtgtatgcaccgtgcaacgactcctactcagacgaagaaaaggactctttcttcgaacaactctcggacttaattagcaacatcccagacgaggaagacctttatgta

SEQ ID NO: 1884 - DNA, 1958 bp, unidentified
  source 1..1958: mol_type = unassigned DNA; note = Description of Unknown:Blumeria graminis sequence
acatccacattccgaaaagtcgaccccatagatttttatccataaagttgacagcaaatcgtaatcgtgatgacgagtattcctacgagaggaattaatggtggaacgccttgcgcgggctctagaggtggtagcgtcgcgtcaaaggcgccacaagacacagacgcgtccctgaaaagattcaaggacgcaactaaaggcgaagagctctccagtagagcgtacaggagaatgattgaagaggccattcaggttatcgaaggccttcagaaagcgaaagtcaccccccccatccccgcccagacaggccatagtgatgataattctgcaatggctaagatcctacaggagataaaggacatcaaagcctccatagcccaaaatagcccaccaatgcaagccccaggccgctcctgggcaaaagtcgcaagcaagggagagtcgtacggaactactatccgaatacaggatgaacaggaaaagagagaatagccaagctctcgagcgaagagttagtcaaaaaaatcggagtacagcaaatagtaggtgctagacaaatgacaaatggtcaagtgaaggtctacttcgccggtgaaggaacgaaagaattatggagcgtcacaaggactggacaacgaagctggctgcttctgcgaaagttgccggccctgtttaccaagttctagtgcatgacatgccgctctcctttgagccacaaaatgcagaacatctgaagctgctacaaaaagccaaccatgttatatacaaggcatggtaatmcaaagagccgcatggcttaagaaatctcagcagccagggaaaaagtctggatcttaatcctgtggattgatcaggccgtacacgcagatatggcgataaaaaagggcttgatgtggcaatatgagctcaagtcaacagaaatattcaggagtggcttccgcatgatgcaatgcttcaattgccaaaagtacggacatattgcgaaaatctgctccgcagactcgaagtgtggccactgtgcaggagagcacaacactcgaaactgtacaggaaaacaagacgtcagatgcagcaactgtggaaaaggccacaaaacatgggaccagagctgtccagttagggcagctgcaaaaaatagggctgtccaaaacaggacccaagacccaggaatgttcttgaccgacgaaaaatcgacaagaaatcaagatggcgaatggcagattgcaggaagcaggaaaagaagagcagtaatgactgcaccacttgttggggccgatggtagtatagatggtcgtaggcgtccaggcagaccaccaaagatcccatcagctgtccccacagtcgcagggctcttcgcaaatctcagcgaggtgccatcaaaaatgacaccccggcctgtgacacggggaaatcaagcagatgagactgagagcgaaatggattcatgaaggacaaatcaatcctttcaatcatacagtacaacgtcaacaggagtaagaataaagtgcagcacgatttcctccaagctttgaatccactgaagcaccacatagtggccctgcaagaaccatggcgtcaccccacmgaacaacacgaccgtcacccaccctgcctaccacctggtcttcccaagtggccacaaaggcaggacatgcatctatatcagcaaaagtctggctattagcaaatggagaagagaaagagtgccagaggaatcgcaaggagacatcacatckgtcagcctcgataccgaccttggtaaaatttggatacatagcgtgtacaatccacccccattacaccacagcagcctagaagaaggaacactcaagtggctcccgcaaatcctatctcaagagggggaacacattctagtcggagactttaatgtgcaccatccgcattgggggggacagtcagtacttaggcaccataagatcgcagacagcttcatcgaa

SEQ ID NO: 1885 - DNA, 186 bp, Caenorhabditis elegans
  source 1..186: mol_type = unassigned DNA
ctctttctgtactaagccttttcgtggcgaaagggatcaacagataaccacttcaacaaactcgatgatttcgtcacatcgagagtggcttggtttggaaccaagtgcaaattatctggccaagaagtacaccgtctcacgcaggccagaggtagtgtcgaatactctctgtccgggcggctctag

SEQ ID NO: 1886 - DNA, 401 bp, Caenorhabditis elegans
  source 1..401: mol_type = unassigned DNA
agtgacgggtctcagtaatcaatactctgtcttccgtacggatcgtgctaaaggtaaacgaggtggaggtgtttgtaatgtggtaaaagtagaaatcccatgtgaaacagtagtttcagttgaaaacgcttaacgcttatgaaattctcgtaaatgacctgaacattgacgtagttccctttagaatcataaacatatatcgtgctccttcttgcacttatcaaaatactgttagattaattagtaaaattgaagaccttgtggaacatcaaggcaaagttgtagttgtgggagatcttaatattggaggtatcgactggggcctcaacgactctaaaactaaattaggttctttattagtagatctgtgcaaaaactataatctggaacaatatgtcaaa

SEQ ID NO: 1887 - DNA, 277 bp, Caenorhabditis sp.
  source 1..277: mol_type = unassigned DNA
tgcttgctggatacctcctcgcggtgcaaactgggcaatgctgtgctcctacgacaggggaaattggacaccactgttaggcacagtagccaaaatccactctttgccacggtagtgtccgatactcgtgaagaaggggcttcacgccggcctagtaagcctgctgaagtacaaacctaaacttactaaaaagctgaatcaaaagaatgtaaaggacccgtccaggaattcaccagctcggccacggtgctcgccgagttgtcttggtcggaagaaa

SEQ ID NO: 1888 - DNA, 79 bp, Caenorhabditis sp.
  source 1..79: mol_type = unassigned DNA
ggcggtcggcctatttttctccgaccgtccatgtcgcgtgaagaattggtgcaataccacgacaaccgccgcaagaact

SEQ ID NO: 1889 - DNA, 47 bp, Caenorhabditis sp.
  source 1..47: mol_type = unassigned DNA
tgcctctcagactttagaacttttcaaatcccttaccgcacttctag

SEQ ID NO: 1890 - DNA, 265 bp, Caenorhabditis sp.
  source 1..265: mol_type = unassigned DNA
cactaaaataaaggacctgaacgtgtacattaaaacgaaacaaacacacacttgcacgaaatgcgaccaagtcactaaccgccaccgccacaccwctagcaagaccaaagaccagcaawgggacgwgcagactcaggccaatcccaccacgwcgcgctcaatacacaatcaaacgtgtgaagattctgacatggaacgtaaatggctgggccagaagaaacagtgwgctcggtgctatcattagcaaggagaagccggacgttkt

SEQ ID NO: 1891 - DNA, 500 bp, Caenorhabditis sp.
  source 1..500: mol_type = unassigned DNA
cttctacacgtaatgagcctctccgtggcgtagaagatcaacacctggatcttttcttcaactccggcggatttcgtcaccccggcaaagattcaagtggctaatcattacacactgcctcgctcaggtcggatgtagtgtcgaatacttcctccctgcgcacattcctcggtttagcaggccgttgaagagtaggcatacccgctacgaacagcaccaacaactgcctcagtcctccgcatccggcctctactcttgttacggcagattcaagagtatgtcggaagaggcgatctaatcacggagtatcgaacgtctgccacactggacggaacaagaacacccggccaaaaacaagaagaatcgactacagagtgtgtacgttcaactgcagatcggttgccaccgatgaccgacttgcagagctgctagaggagacaaaaacgatcaagtacgacattatcggactgtcggaaacgaagagagcagctgaaacacac

SEQ ID NO: 1892 - DNA, 797 bp, Calypte anna
  source 1..797: mol_type = unassigned DNA
ccctccacgggcacccccttgtcgtgggggaggagcttgcgtgcccttgtgaggttgggagctctgctggcggtggcatatgcctccagtagggtctcccatgccagacaggtcacaactgaagggtcagacaaagtgtgtccatgggcaggatgggctcagtagccttcaggcaaccatcctaggagaaggacaactctaactccaaacccgggcagatggagctcgtttagccctgtaaggccatccatctaagagaaggatactctaactaaacctacgtcctgaggacttcgctgtcactgtccaagcttgctgggccctggcagatgaaccttaggagtaaagggtggggccagttccgtgcacgctgcgcctcacctaaaaaagccacagcgcaggctcgaagggtgaacccacacttgtaaagcccctgcagcgacaggcgagggwcgaaacggcaggggaaaggtgcactggaagccgcagacccaaccctgcatgcaggcggctcaggacattggtcgctcgagactgacccaggagatgacagtcttgttcggcagcatcctgagtgaccaagcagcctttttcaaggagagcactgcttgctccacatggagaggggcctagaaaaggtggcctaaccaaagctcatctccaccccccacccggttggctasccacggtcaacgggcatcttctgatgcagtcgaacaaagacaaagagacaaaggcatacacctgcctctaaaggtgtgttcagattgacactcgcatgttggaacatcagaacc

SEQ ID NO: 1893 - DNA, 36 bp, Capitella sp.
  source 1..36: mol_type = unassigned DNA
cacgcggcggtgcaaccgcaccagcgaaagacgacg

SEQ ID NO: 1894 - DNA, 687 bp, Capitella sp.
  source 1..687: mol_type = unassigned DNA
  misc_difference 173: note = a, c, t, g, unknown or other
gaacaggagaaagatgccatgagaaagagaaatgtcatcatacacggactgccagaaaagaagaccaacaacagagaggagagaaagaaagaagatgagcaacacaatcgagaggattatggacgcattggaactgaacctagaaattgaaaacttctaccgactgggaaaantacccaatgaagacgccgacagggaacatactactagcagacccctgaagttgtgcttcaatagtgaagacaaggtgaagatgttcatggggaggctgaacaaattaagagatgcagaggaagatatcaaacgaattagagttcaacacgacatgaatttacaagaaagagcagagattagagaactggtacaggaagcaaaaaacttaacattaacagagagtggagactttgtacacgtcgtgagaggaaaaaagataatcagagtgaaagccagaaagaacggtcagagcaggagagagacccaagaggactcaacatctggatcacgaacatagacacccttacaatagcaaaatttaacgaattaaaaaccataataaaggaatcgccaccggatatcatagccctacaagaagttaaaccgaaaaacgcacgtacaaactgggaggcaaagaattatataataccaggatacaatatagaagaaaggataagagaagatggaagagga

SEQ ID NO: 1895 - DNA, 171 bp, Capitella sp.
  source 1..171: mol_type = unassigned DNA
gcggcggagattaaatagatatggtgtcttagatcccgatgccattgatccttctcttgaggaggacatggccgtggatgtgcctccttccacttccctgacgagcccagggaagatgcaatccacaaaggagggacccagccctgaaaagggcccctcctaatagacaag

SEQ ID NO: 1896 - DNA, 103 bp, Capitella sp.
  source 1..103: mol_type = unassigned DNA
agatcaggtagcaccctccggtagcacctaaaatttgctccgaccattttgctgttttccgatatcttccactccgcggattgcagcgaatcttggtcaagac

SEQ ID NO: 1897 - DNA, 383 bp, Capitella sp.
  source 1..383: mol_type = unassigned DNA
ggtgtacaaacttcgtcatcaaacacacttcgtgcacagctgatgttgagatcctatgtgtgcagtgtcgaccattttatctaccgcgtgagatcagctgtgtcgtcttcatcgtgatctacatccctcccagtggcgatgccaacagagccacggaagcgatagcgtctgttgctttggacatacaacaaacaaagccagaggcagctatcgtcatcacaggagactttaatggagcttcgttacatgacgccctcccgacctacgtacaatacgtaaatttcaacacaagaggtcgcagctgtctcgatctactgtacagcaacataaaagatgcctacaagaccacaagcctgccacccatcggcagatctgaccacacg

SEQ ID NO: 1898 - DNA, 66 bp, Capitella sp.
  source 1..66: mol_type = unassigned DNA
gacttcaattttcaacaacatgtgactgatgcaacacatgtcaatggtcacacaatcgacctaatc

SEQ ID NO: 1899 - DNA, 278 bp, Capitella sp.
  source 1..278: mol_type = unassigned DNA
gcatcaaggaaggtgtgcaagggaggacgaatattgttgatggtcgagtaggggaatctgagatctgtgatgtgttccatgatggctatgagcatctgtatcagtctgtgccttctgatcagagtgaactcgaggaactccagcgcgaactttctgcgggagtagatcgcacatgtaaagtaggcttatgttactgtgatcacgtgatcagcccacgtgatattgagtttgccgttcgtaaactgaaaccaggtaaatctgatgcctgtccgcagtta

SEQ ID NO: 1900 - DNA, 171 bp, Capitella sp.
  source 1..171: mol_type = unassigned DNA
agcacatatctgttgcgacccatcactccggacacactcttgacctggtcattacgcgagagaatgaccttgtattgaactcaactgtcaaggattccctgatctcagaccataaggtgatccagctcagcattaacattgctcgtccccgagcagaacagaagagaatga

SEQ ID NO: 1901 - DNA, 315 bp, Capitella sp.
  source 1..315: mol_type = unassigned DNA
gcaacctttttgtggaagctaagaccacggaaggcctcgacgagcttcgaaacaagatagcccctctcacaagcgatctctttggggaagcggcttcattgcgcctgatggacgacagcaagaccaggccaaaacacgtcatcatcagaaatgttcctgcccactatgacgcggacaccatcctggaggaggcccgagtcgaatacagcagcgcctcatccgtcattaacttgaccaagccagggagcaccgccagaaggaggcccataaagctgagccttgacgacagcaatcaattggagcgacttctcaacc

SEQ ID NO: 1902 - DNA, 420 bp, Capitella sp.
  source 1..420: mol_type = unassigned DNA
cgatgtactctttgcgaattcttttctgccaacaatcaacaagccaactagaatcacagggtcgtctgcgactattattgataacattttcatcaataatctaacaagagcatcaactacatccggaatccttgccaactcaatctctgatcactgtcctgtattctgcttcacaccattccacaataataagagcaaccaaaataacttcatcacaaaaggctattcactgaccgaaataaaaataaattccacgacctcataagctccacgcaatgggatcaagtactcaatgaagcaaactgccgaacagcattcacatcattctacacacaattcaccaccatttttgatcaaagttttccattaaccaaaataaaacttggatataaaaatcgaaaaccatggctaacagatgca

SEQ ID NO: 1903 - DNA, 317 bp, Capitella sp.
  source 1..317: mol_type = unassigned DNA
tccttgacaccagcaacaaggtcgtgtctatcaccagtgagaacgacctaagggactactgacacagatgactgcctaatatcacggactccgatctctcacaatcattcaacctctttctgttcttgttcttgctatgttacaacccccatccctacctttacttgcacaaagcacctatctgcacgtcttccactctggtgagttcctatccaactttcttcattcctacccatcatgcgagtatctcataccttcgccataccttacctacctgtatctgaccctagctgcgcgaacagaaacctcactacgaa

SEQ ID NO: 1904 - DNA, 459 bp, Chlamydomonas reinhardtii
  source 1..459: mol_type = unassigned DNA
ggcggcggcggaggcggcggcggcggcggctgccctggcggcggcgggtgcggcggcgcctggtggtgcggcacccggtgccgcggaggcccccgctgccccggccgccgggccggcgatggcacccggtggcgccgccgcggccaccgccccggcagtggcgaccgacgcggcgcctgcggccgctgcagccgcggtgacgctgccgcccgcgtccgcccctctggctctggcgctggcgcccggcgctggtgccggtgccgccgcatctgcggcggccgccacggatggcagcggcagcggaactggcagcggcagcggcagcggccacggcggcggcggcggagtggcggcggcggcgacggcagctgcggcggccgcggccatgacaatggggatggtgggcggcggcggcagtggcggcggcggcgacggcagctgcggcggccgcggccatga

SEQ ID NO: 1905 - protein, 30 aa, Spumavirus sp.
PKDLKQLQSILGLLNFARNFIPNFAELVQP

SEQ ID NO: 1906 - DNA, 51 bp, unidentified
  source 1..51: mol_type = unassigned DNA; note = Description of Unknown:Copidosoma floridanum sequence
tccaatgctttaaaacgctggaaggacctgcacatacaactatcaaccagt

SEQ ID NO: 1907 - DNA, 439 bp, Crassostrea gigas
  source 1..439: mol_type = unassigned DNA
gaggagcaatcaatcaatccagtcttttgtacatttattttcggtgttattgatttttcattacaccacctgttttatataactcatatttttttcattttctttcatatttactacattctaacgcaatacgtttatgcgttatttaactacctttgtatattgttatttaccttttgttttgtcattgtgcacatacattttttatgctattactttcacccctacgttttgtttatctcttttgttgaacaatattttgtcaattgtcatattgaggtatcgtcattttcatttgaataccttcattcagctgtaagtttactactagtggtgtatcttccggtttttggtcttattcattacccatatacgacacattatacagattgcagccatcatttcccccctattgttatcaaaaagttaatcattgaca

SEQ ID NO: 1908 - DNA, 609 bp, Crassostrea gigas
  source 1..609: mol_type = unassigned DNA
gagagagagttgttagacgagatgaagagaaacatcaaatctttgcaaaaagaaaaaaagacattaggcaactaaaakattcaatcgttgatctgcaatgtcgctctatgaaawacaatctagtgtttacggggctgggtggcgaaacaaaggaagaggacacaggggcaagctgcgggactctatatattttgaactgggaattgactggaaagtggagttctgtagggtgcatcggttcggtcgatttcagcasaacaggagcasacctactgtagcgaaattcctttatgaaaaagacagctgcaggtctgtagctcccggtctgaaaaaagttgaatggatcccaggtcgtccatccgaatttkttcagaccggkagctacagacctkcagctatgaaaaagacagattaaststccttgaaasagcctatcaattaaawkgamgtggattcggtatcaatgaacaattcccgcacgcttttgaggaaagacggaaacagctttatccttaacaaaaatatgttagacatgaacatatcacttgtagaccaattttgtagtactgttgtctggatacgttttgaacataaaagcaaacagggtaa

SEQ ID NO: 1909 - DNA, 326 bp, Crassostrea gigas
  source 1..326: mol_type = unassigned DNA
gatgataactctgtattacctcaagaaatatttatgtgtcacagtatgtttgasagtatgtgtattaatgaacaagaaataattgatatactatctattcttcctgtaaacaaggccataggtgcagaccttattagtcacaaaatgttgaaagctactaaacttaccattgtcaaaccattatttctattgtttaaccgctcacttagagaatctgtttttcctattatgtggaaacaagctaacgttattccactcttcaaaaaagatgacccttctgttttgtcaaactatagaccagtttcgttattaagttgtgttggtaa

SEQ ID NO: 1910 - DNA, 430 bp, Crassostrea gigas
  source 1..430: mol_type = unassigned DNA
tgcgcatgcgtgaaagtatcgacatggcgtaaaattcagctgcgagaattttctgtttattccaaaatttwggtwgttgttatgtcaacaaaaactccgacaaaagtcccgactaacgtgccaaataaatctggacctggagctgatgttgggaagcgaaggctctcgtcggacggtcaaaccccaaagccaacacccaagcaagtcaaaatggcgacgaacagctcaccgaacacacccggcaagtccggtaggtcaaacatttctcatgccgattatgaaacatttgtggaaaaaatgactattattgctgatgctgttgataagttacagaaagggcaatcgacactacaatcaattgttgaaagcaaattagacaagttcaaaaatgagttcgttcagggcatcaatgaaaaattcaaagccatga

SEQ ID NO: 1911 - DNA, 141 bp, Crassostrea gigas
  source 1..141: mol_type = unassigned DNA
atcacgtgatatgtatggaggtggacgtgtttttaccggagtacgacctacgggaatttcataccatatatagcgaagtttagttaaaggttgcggtaaatgtgatacaccattgatacgtgagtattatactctgttcct

SEQ ID NO: 1912 - DNA, 427 bp, Crassostrea gigas
  source 1..427: mol_type = unassigned DNA
tataattgtatttcatgaacattaatatatctcacataattttggtatgatttttataatatgctgtcatattaacaagctcaaatcatcagaaaatcaaggtactttttttttaaacacatagtatgcgcagcatagggtttaaggtttttaaaaaaacagacaataagttatacatataaaactcctcacgaccgattctaattatttatactattgtacgatttttttttttaagttgacaaaaaaaaggttgtttttggtcaacttcatgcagtcaactattttttagtgtttgtaaaattagcaagcgtgatgtgctttcgcaattccaaacttctgccttttaactgttttttctcccttttatttgccccctttctattcttttcgggaaccgtaaaccttataaagcatttatatagac

SEQ ID NO: 1913 - DNA, 559 bp, Crassostrea gigas
  source 1..559: mol_type = unassigned DNA
aaaaatcgagcggcwatgacaacatcatcaacgagatgctcagtgcagatgtgtcgacccttgaaccagtgttaaatgtgttatttaattcgatatttgatagtggttattatcctttaaattggaaattgggtataattgtgccgattttcaaaaaaggagataaaatggatccacagaactacaggggcataaccctacactctaagctgcctggcgaagcttttctcccgtatcctaaacaatagattacaaagatgggcagaagaaaatagtgtgatatctgatgcgcaatatgggttaaagaaaggttgtagtactattgatgcattatatgttttaaaaagtatcgttgactttaaaattgcaaatggcagtaagctcttttgtacatttgtagattttcggagagcgtttgacacggttgatagaaatgcattgtattataaaatgtttaagttaggtatagaaggtaaaatgttacgcataatcaaatctatgtatgatgatgtgaaaagttgtgtacgagtcaatggtaatcttacagatttttttttga

SEQ ID NO: 1914 - DNA, 839 bp, Crassostrea gigas
  source 1..839: mol_type = unassigned DNA
gaatcatggaaaaggatctggtgtcaataaaagaagctaatgaaagtctacaaaactctgttacagacctaaaggctcgttcaatgcgcgacaatctgatattttctggaatcccggaggagagacatgaagacaccgaagctgtcctacaagaatttatccaaaaaaagtataaactggattacgaagtcccattcgaaagggtccatagaatgggtaaatggaaggagtacagttcccatcccagaaatattgtcgccaaatttacctattttaaggatagagaattaatccgtacacgtgccccccagaagctccacaaatccaacgtttgggtaaacgaacaatttccccctgaaatcgaggaaaagagaaggaagctatatcccgtcctccgccaggcaaagaaagaccacaagaaagtaaaactggtccgggacgtgctttacattgacggacaggaatatatccctcctataggatccgctccgagagcatttccaacgcccacgccagctcagacgcgatccgccagcaatcaaacagccgagcgacaatacaccccgcaaaacccgaccaaagacgaccgacaggcttttaaacgacaacgtcaaggatcaacccccgaccgaattggatagggagacgcaggagaacaactctcgcgaacaaacagctacacgtctctgaaatttctctcgcttaacgtatgcggtgtcaaacaaaaactaaattaccccgaattttgtgattttattgcaaactatgatatcattggactatctgaaacaaaaactgatgattcggacaatattcaaatacccggttacgtcacttac

SEQ ID NO: 1915 - DNA, 981 bp, Crassostrea gigas
  source 1..981: mol_type = unassigned DNA
ccaaattccaacaacagcacagacagtattattaaagatatttgcagagaaaaactggggatccaaataaccgaaaacgatatttttcgttcccatcccattggaaacagaaacaaccatgggggcatccaaattatttgtcgtttccaaaattggaaaacaaagaacgcagtgtacaaagcaaagagtaaactaaaaaattccgatatctttgtgaccgaggacctcaccagataccgacaaggaatcatacatgaactgtcagctgctaaacgcttgcgtaaagttcactctttctggaccaacgacgggagaattttcactaaactgtccgaaaatggtcaaaaatatttgatcaaatccatcagtgaactgcacgaaatcgcgccgctaccgagtgacgaacaacaaggctaaaacgcaaatcccgtactctcttctgaaccacaaacccatgtgagcaatgtatagtataaattagatacaatgttcaatcagttatgtgtgatattctaagtatcgtgtcttcaaaagtagatacatgtatttgcagatgtatgaaaataatttttagttatatgtacaccaatctaatagttgtggttaaattacatagctacatttttgtttgttatatagtagtattataactgtgtaaacctatgaatttatatttcccattttttctcaaatgcaatcaatttggtttttaccaatattgtacttgatgccataatgttttttttttctacattttcttgtttttgttcatttgttcctttcttgtttttcactttgcattctttatttgtttgcatacactttttcaagtgtttgcttactgtgtttttaccttcaacttttgtcttgatgttacgcaacgaaggtcatggtcgttcagtacatgtatgaattcacacctgtcttttcaatcgcagtgctctctcatagtttcaataacgttaatcaacatgtctttca

SEQ ID NO: 1916 - DNA, 36 bp, Culex quinquefasciatus
  source 1..36: mol_type = unassigned DNA
cacgtggcctcgcggtcttgtgatccgagaatttga

SEQ ID NO: 1917 - DNA, 22 bp, Culex quinquefasciatus
  source 1..22: mol_type = unassigned DNA
atactaccagaacgtcggaggc

SEQ ID NO: 1918 - DNA, 24 bp, Culex quinquefasciatus
  source 1..24: mol_type = unassigned DNA
tagggctccttaggctagccactt

SEQ ID NO: 1919 - DNA, 1879 bp, Culex quinquefasciatus
  source 1..1879: mol_type = unassigned DNA
gaattgtggtttggttgagcgttttagcagaatgcattactgtgaatacaaagagacgagttgttccttttaattccgctatatattttaatatcttgacagatacgtatttcgtctactacttgcagacttcatcagtgttctgttctcgactgaaggttcatcgctggtgtatccgtatttgtagttactgtaggtactacctcctcgttcttcttttgtgcctgtataggtaacagcttaaacagccacgttgagccgttacctgaatccttgttgagtaaacgtttgttgcctgccttgaagatttccaaactttcggcgacagccagcttcgatgggttagtgatgtgtcttaagatgaccgcgtcgctagctgtgatgttatgtttttcctcgatgatgtgttcggttactgctgacttgaaatgggggacaaatcctttccgtttttcctccatggcaattttgacatatgtgtgtatatgctcatccaacctggtttgcagcaatctcttagtttgtccaatgtagctcatatcacagtggccgcaggatacctcgtagatgccgggtttgcctaaagtcggtatggggtctttcgttgaacctaagatggattccaactggctgtttctactgctgaacactaaatcgatgccaaatttagccagtttttgtcgtaatgggcgtgttatcctgtagtcgaattctactgctgctcttcgcagtggctctgctgatggcgtaagggttgtgagtgaagttctgtgcagttttctttccttcttatcgatgattgcttggatagttgttctgctgtaaccgttgatttccgctgtttcaaatatgtactccaattctttctgttttcctgcttcgctgaggggtaaagttgtcatcctatgtataaaataatgatatgctgccatcttatgttggaatgaatggtttgacgtggctgggattgttcttctggtgtttgttggcttcctgtagatctcgaaagaaaacgaagatgggcaacctggttctcttaggatcaggatgtctaagaaaggtaactttccttcgacttccatttcgtaagtgaacttgatgctcctgcgtgcactgtttatggtgtccagtaccgttgttagtgagtcccttttgatgatgcagaagacgtcatctacgtatctccaccaacgttctggtagtaggtttttggtttgtagttcgtgttccaaagctgccatataaacatcgctcatgaacggtgacagtgggttacccatcgatgctcccatcctctgttggtagatgcaatccctgaactggaagtagctctgttccatgcataatttgacgaatgttatatactggatcgttttttgtctccatggttctccctcgtattgtgattgcagccaatcccgtagagttcctattgcgttttttactggtatgcttgggaacagtgctgttacgtcgaaggaaaccattatttcatcctcagctatcggtcccgactctaagagctcctttgtgaacacctgcgaactgatgatcgaacggctcgggatcactaacccatcgaagctggctgtcgccgaaagtttggaaatcttcaaggcaggcaacaaacgtttactcaacaaggattcaggtaacggctcaacgtggctgtttaagctgttacctatacaggcacaaaagaagaacgaggaggtagtacctacagtaactacaaatacggatacaccagcgatgaaccttcagtcgagaacagaacactgatgaagtctgcaagtagtagacgaaatacgtatctgtcaagatattaaaatatatagcggaattaaaaggaacaactcgtctctttgtattcacagta

SEQ ID NO: 1920 - DNA, 99 bp, Culex quinquefasciatus
  source 1..99: mol_type = unassigned DNA
ggataccatcgtagttgtaggcgattacaatctgcctcacctcaactggtctttcgattcggacatcaacggatacctgccaacaaacgcatctgctga

SEQ ID NO: 1921 - DNA, 177 bp, Culex quinquefasciatus
  source 1..177: mol_type = unassigned DNA
ttgtttggatttagatgatagtagatttgcccagcagtacaggattttttgttgttattgttattttgtttgtttaagsagtttatctgaaaaccaaaacagcactattatcttttgttttgccctgattgctcttttcctacgcgtgtttttctctacatagatttatatattttt

SEQ ID NO: 1922 - DNA, 615 bp, Culex quinquefasciatus
  source 1..615: mol_type = unassigned DNA
gtgtgtgtgcgtcgcgcgttattatcgcgcctcggtgcggctccgcgaaagtgccctcagaaccgcagaattaccgttccgtcgtggccgaaagtgtgatcaatcaacgccgaagtgcgtcgcgaaccggcgtcgtgtgttataattgacccgcaatcgacggctgggcaataaaagtgaagttatttttgccgtccatcgtcgtcgtcgcgggaaaacaggcagaacaaagcaagaagtgtggtgtagcaacaagaccagtggcagtgccgttgtgtcggttgcgtatacgcacactaatcgaaaccgcgcgcggtgtgccgagagtgcgaatttttgaaaaaagaaaacgggcaaaaagttttgaacttttttgcaaaaaataaaataaattttattattgcgaaatttggcgctagtagtgaagcgcatttacgcacgcagcggaggacgtcctcttccggatatgaagaccgttaggcttcgagataaaagccccgttacggtakcgtgagaaaaccggggctaggtctcggtagcccgtaggtggttctccaccccgagactaggtagcgcagccctgataaggctgcctaccgaaaaagaggatcgcga

SEQ ID NO: 1923 - DNA, 255 bp, Danaus plexippus
  source 1..255: mol_type = unassigned DNA
atccagagggtgtcctactaagtatttttccgatatttagccttgggcatacgggtacgcgaccccggatcctcgagccaccactttcatacctctatcctcagtccatgaaggtggtgtcctgtacctcccctcattccccttcctaacctctttccccccttctctatcttttcctttcctggttttacccgtaaaacggggttttggaggtcagacggcagtcgctccgttaaaaccactcccgccactctt

SEQ ID NO: 1924 - DNA, 205 bp, Danio rerio
  source 1..205: mol_type = unassigned DNA
ccaagatggcggcgcgcattgacgcagcggctcagagctctccttctcagtgctttgtttgtttgtttttatatgtctgtttaatttttttaacctcagccagtcaggcgaaaatattttatagtcgacaagacctcctctcagtgggattacagagcaaagagacagttacaacaatgtttattcagaaccacagcatacctga

SEQ ID NO: 1925 - DNA, 10 bp, Danio rerio
  source 1..10: mol_type = unassigned DNA
tcgatccaag

SEQ ID NO: 1926 - DNA, 190 bp, Danio rerio
  source 1..190: mol_type = unassigned DNA
attgtatagctttgaggcgtaatgaatagtgcgacaaatagagttaaacaacctctttgcttgccattttaagacttgctgtctttttttagtctctgtgtgcaaaaacgtcttgcctcctattcagcgttggcgctgtggcttagttggtcaaagtgcctgtctggtaagaaacttggctgaggccaag

SEQ ID NO: 1927 - DNA, 1752 bp, Drosophila sp.
  source 1..1752: mol_type = unassigned DNA
aggcaatcgatttgaggggaaaaaatcactctacctcaaagccacagaaaaataaaaccatacatggaactgccaaaattcgacggtamctacgtcgagttcaaaattattactactattcaatgtcaaaaaaatcaataattttatatccgctttgaaaaggaasagtaaaggcttaccaaatcamgtcgaccatgaatagggggtatgtaatccgtaatgcaagcgccatccgccgcagtgttacgatctctcttcgacgcccttactagtttttacggatttcttctctcggcaacgaaaagttggaaaaagtcatgtccaggttagatcgaaaaacgcggtcgcgatgggaagaataaaccagttaaaattctagtcagatatggaaatattcttgggaagcgattaataaacgttatcaacacttagtggctgaggattccacgacaggaaggagagcttccaagcgggagcagccaaacaagccatgctttagaaagaaggcattcgtagtttcgtgacctgmcgaagactcccaattgaaatktcaattttgtaagtcaaagttctatcaattgccaaactgtttacatttcgcccaaagtcttaagaaaggacgaaatttcaacagatgtaatatatgcaaaacatagaccgcattaaacatatattgtttcggttttcccttgcccggtttcgccttttgtttctaagaatagatcgggagttacaaaattacgatagtattgaaatattgcttacatagtcattattgcttttcggcgagccgagcagctcgattgctcaagaaatatataaacttaattatttatttataatgacaattattatttatataaaaattatacagtgtattggccagccattccattgaacaaacgtattgccgttgtgctctatccttaaattacgaactataggcaagtcaaacagtcatttcgcaacgatactgaccggttgtgttttatttgagctcttgaaattacctttcaatcgcggttacaccgaacgtatataatcttaaaattggagaataactttctcaacccccgcttaacacttcacgcaccgtatataaacattacatcgcgccaattaacatatttaattgaatcgcaattcatctgctgttgccacaagkgcttctgttccctatcgccgtcgcgtctgttctttacacccgctcgccaattgctctctcaaggccacggtcctctctccgtgcacttcactttgagcgcttcgcctctctcatcgcctggatattcgaattggctctccgaatcgacgactctcccatcaagtattctaacggtcctctctccgtttacttcgagtgggtcgcctctctcatcgccttgcttgctgcggatcttcgaattggctctccgaatcgtcgcctctcccatcgccgtatctgccactacctggtgttctgcgtgtctctttaatctcccacggcctgctcttctgcaagattctcttaactgcctcttaactgcatagtgtccaaacaatcactaaaatgagtgtcgtcatctgttccgcaaagaaatgcgagttcaattgtgttatcattggagataattatttgtcttgttggctttgcgacaattgcgctcatgtaaaatgcgcaggaatgggtcaaaacggccgtgtagttgatctgatctcgaagagaggcggcttaacttggttctgccctacctgcctcgtacttactcggag

SEQ ID NO: 1928 - DNA, 136 bp, Drosophila sp.
  source 1..136: mol_type = unassigned DNA
atgtagggccagaccaataacaatcgtgcagtgttacgccccaaccgaagacgcaaacgacgacatcaaagacgacttctataccgcccttactaccactctcactgacatacctcgaggcaacatcaccgttctc

SEQ ID NO: 1929 - DNA, 238 bp, Drosophila sp.
  source 1..238: mol_type = unassigned DNA
ggggggatgggggagagcatataaggcaaagtgtctgactgcattcaacttggtgaatgccagcatgatccttatcactgatctcctcaagccgacgcactacctccacgtggttctccctggattgccattcaacatccgttgagtggcaaactaaagcgcgcgacgagagtcctagctcttcaaactaggttgtggcgtaggacttgaaatccacccatggaaaaaccaaaattca

SEQ ID NO: 1930 - DNA, 16 bp, Drosophila kikkawai
  source 1..16: mol_type = unassigned DNA
ggaacaaaccaaccaa

SEQ ID NO: 1931 - DNA, 298 bp, Drosophila kikkawai
  source 1..298: mol_type = unassigned DNA
ggccatgcgatgcaaaaagcacaaccagctcacaggtgtttttacacgacgtggtgtggtgtacgtgaagctgagcgacggaggggaacctcgatatgtgcaaagctcacacgagctttctgagctgatcaacgatgctggcggcgccgataagagcacatttcgagattaagaagcttcactcaattttgtatctcctatgtttacacataactataatatttattagatttaaaattaatgtaggtcgctatgttttctttgtgtccttttcagtatgtttccaatgccttaattt

SEQ ID NO: 1932 - DNA, 237 bp, Drosophila sp.
  source 1..237: mol_type = unassigned DNA
gctcatttttgtctctcgccttaatcctggtgcttctgaagatgacgtcaaaaactacctgagcagcaaactgaatgtttctcgagccgaactaaccgtcttgaagttcaagtttaagcagagacgtgaaatatcttcgtttaaaattggacttcctgaggaacatcttaataaggctctcgatgtttctatatggcctaaacatgttattgttcacgagtatgtaaacatgcctaa

SEQ ID NO: 1933 - DNA, 438 bp, Drosophila simulans
  source 1..438: mol_type = unassigned DNA
caccacggaagacgagttgaagagtgccttggaggcccaggcagagatccctgcagcagtcgtggctatcaagagccttcggcaatcgcagtacggagggaagactgcggtgatagcagtcccagccaatctgacggacccgctgatcaagcgtggcaagctgagggtaggatggtcccaatgcttgatcaaggagctggagccacgccaaagatgcttcagatgcctggaagaaggccacatagcggcccactgcagaagcaccgtggacagaagccagtgctgcttcagatgcgggaccgcgggacacaaagccgccgagtgccctaacgaagctaagtgcttcttgtgcgcaagcagaggtagccaagcgaccaaccaccaaatgggcacccggaagtgcccattggcgggtaaaggagcaccaaaggcactgca

SEQ ID NO: 1934 - DNA, 904 bp, Drosophila sp.
  source 1..904: mol_type = unassigned DNA
gaaacgtcaaaaggatagattttcacaaaattaggacaatwwtggacgcaaaaagcaacaataacgaacggcagcccccccctttcaacaagaccccccacctaccatatagttccgaaatggccaaatctcggaaggaagccgccaggaaaactacatcaaacccgttccggcaaaatgcgaaggacgataggccaaaccaaacgggattctcttcacatgaagctgccatccaaaaacggctgaataaatggcgccgacacgcggacaaagcgaccacaaaaaacaggaccaactcgaaggacaaccccaagccgcgacccacaaaaacgacaaaaaacccggcacaaagacaccttgaggccttcaacgacaaactccgcaaggaaaggagggatgctatagaacacacccgcgacgaagctatgacaagccccaggaggggtgatgctggtagcccgccgacaacaagtagagccgccaaaactaatttcaagacaaggacctaaaaattaaccgccgatgggaccgaggacgtgcataagcacttgcaaagaggaccccctgacgaccacagcctaaacctggcgcaacgagtactggaaatggaaaagaaaattgacacacttatggaactcttcttcaaatgcttagaaaataacaaaaacctgaccacagcacaccccatgtcctcctaaacttctaagttcctcgcaaaaataagtagcaccatgacattaaacataaacaacacacatactatcaatacccttaaaatagggtattggaactcatgtggagttaccaataaaagagacgaactagaagcttacataaaaaaagagggtgtccagatcatgctggtaasagaaaccaagctagaacgaaattctactatgcttaa

SEQ ID NO: 1935 - DNA, 216 bp, Entamoeba histolytica
  source 1..216: mol_type = unassigned DNA
agtaatacaaaggaagataaataaactaaaagacatgctaataagaggaaactataaaaaattaagaaggatattaagaataagaagaatgatagaagaaaagataaggggagaagtaaatgaagaaataaaacaattagaatatttaaaagaaatgaggaaaaagaagtagacttaaacaaaagtgaaagaacaagaatctacagaaacaaaatc

SEQ ID NO: 1936 - DNA, 140 bp, Esox lucius
  source 1..140: mol_type = unassigned DNA
cctctccgggagccatcaccttatcgtggtggagaggtttgtgtgttcctatgaacctgagggctgtgttgtccgggccttagtgctcctggtagggtttcccatggcaaagtggtctcaggggaggagccagactaaga

SEQ ID NO: 1937 - DNA, 47 bp, Folsomia candida
  source 1..47: mol_type = unassigned DNA
aatttttcaaaaaaaaaaataaaacgcccaaaaatatagagaatgaa

SEQ ID NO: 1938 - DNA, 194 bp, Gasterosteus aculeatus
  source 1..194: mol_type = unassigned DNA
cttccgtggaattactggacattctagtcaaaggtgcgctcacctttcgtcacgcggtgagacgccgtaggagaggaaaacgggccggctcgctggtgagactccgcaggcgtggttctcgcactccgctgccaggcatctttctctccaacgtgcgctcactgtgcaacaaactggacgaaattcagctgctg

SEQ ID NO: 1939 - DNA, 156 bp, Gasterosteus aculeatus
  source 1..156: mol_type = unassigned DNA
cctctctgggaaccgtcaccttatcgtggtggagaggtttgtgtgtccctatgaacctgagggctgtgttgtcgggagccttgtgctcctggtagggttacccttggcaaagtggtctcaggcgaggggccagactaagaatggttcaagaccccc

SEQ ID NO: 1940 - DNA, 84 bp, Gavialis gangeticus
  source 1..84: mol_type = unassigned DNA
agcttagttgcctgtacactaackccakaagcatgsgaaacaaacgtactgaccaacaagcaacacgaccagctccacctmtga

SEQ ID NO: 1941 - DNA, 273 bp, Gavialis gangeticus
  source 1..273: mol_type = unassigned DNA
atacaggacctccacctaactcaggaggtgcacagtcccaccaggggaaatgccctgctggacctggtccttgccacaggcgatgacctggtgagggaattgcgggttctcggccacctgggcgatagcgatcatcgcctgctggaattcactatccagcgcagggtgtcaagggctagcagtaaggcggaagtccttgacttcaggagggctgacttcaatgagttaagaagactagtatgagaggcattgggatcccgaagttttggggag

SEQ ID NO: 1942 - DNA, 969 bp, Gossypium arboreum
  source 1..969: mol_type = unassigned DNA
gacttcgtttgtgtgtctgcctattattctttgaattttatggcagtcttgtggtgttgagtgtttctttgttgtttttggtattattttatttttttttgtgtctttcttcggtgggtttgcggtgccgggggaccgacgtgacatgttgctgttgaagtctggcgttaggtggggattttcagagggtttcttggctctgtgacgttcgttgctttgcatggccaaggagttcttgcgactttatgcgctttagcggtggcgggccattcgaggtgggacgggcgatacatacgtggctcgtcacgatcttttctagcatcgtcagaccctgttttgatgggattgtttcattggcagcaataaggttttgtcgtttcttttgtcttgttcagctattttattgattttctttacgttcagtaggttgcatgggtcttgcatgtatcttgcatggattgtttcgtcttgcacgtattccactggtggtatttcttattttctttgacttttcaacgttattcaatctgagggtttttttggtttaacaggcattatatgaatgcggaggataagttttaatgattttccctatttgttcgatttagttgtttttgttacagtagctattaggtttctgggttttcttggactgctggtgttaggttgcagttttttggtactttcttgcatgttttcctttccttgatgttcggggatgggggtttgatggggggtgtttgttcgtagcttgagtcggggtgttcctggctgttgttgttttgctgtgtttttgcaggttcttggactgtttctttgctctgctcccggtggcggttttcggggttctgtttttctctattcttggggtgtttcttgtcgaggttgggggaggcgacaagagaaaagtgttgatcagtctccctggcactcgtttaaggtagcagtctcgtgagttgtcgtttgaaa

SEQ ID NO: 1943 - DNA, 1429 bp, Harpegnathos saltator
  source 1..1429: mol_type = unassigned DNA
cgccgcgctckgcggccgtcaccataacgtgccccgacggaaaataccatgagttcatggtcgaggccaggcgccgaatcagaccggcggacctsgggataaactcttccctgagggtccgccgggccctgaacggggcaatgctgatagaggtgcctggcctcaacgtcggggcgtccgccgaccggcttgcggaggagctccgcaagctggcggcggaaaaaggccccggttatcgcatccagcggccggcaaagttcgcagcactgcgaattgctgggctggatgcgacgaccggggccgaagaggtggcggccgcggtggccctcgctgggggatgctcgcctgaggaagtttcctcgggcgtgatgagcgtctcccagcggggagtcggcgccatggtggtgcggtgtccgctggcggcggccgctaaggtcgccgccgcggagcgggttccagtgggctggacccgcgccggggtgacggcgctgcccgctcgcgcaacgctgtgcttccgctgcttagagcgggggcacgtgcgcgagcggtgcaccagcgccgtcgaccgcagcggtatgtgctaccgctgcggtaaccccggccaccgcgccaaggggtgccaggaggcggtgcgctgcccggtgtgcgccgaggcgggcaggccctccggtcacaagatcggaggacctgcctgcaaaccccctcccggaaggagaaaggggggaaagaagaaggaaggaggagagaggcagaaggggaaggaggacaccggcggggggaggcccgaaccaccaccgccgggggaggaccggacccgacgaagcctggggaggagascggaccagtctcctccccgccgagggactgagggggagccggggcggatccggcccccccctggcaagaaccccagaggaaaaggggaggagggggactcctcccccgacctaatagactgggactgggagccggagagccccgatccaggagccggaggaacctctgccccgcaggaagaggagaggggaagaagaggccaacagggacgaggacgacccggaggaggasgcccaggccgcaaaggtgaggagggtggagccctcgggcacacccccaacaggtgtagaggaaggggagtcggtgggagcgctgcccccgactcccctgcaggttgactccccctcgtacccccgagaggaggaggtcacgcaggtagggaccccccgtgtctccgcggagacacccgcgttggaggccaccatggccgaaaccccctccggggagaccgagacggcttgccgtcggaagtctcccaggaggagggggtggacgtaggcagcccggaggaggcgtgtaaggcttagccttcacgacactccgggccctacaggccaacctcggccacggcgcccgggctcaggacctctgc

SEQ ID NO: 1944 - DNA, 49 bp, Hydra vulgaris
  source 1..49: mol_type = unassigned DNA
gtgtatataaaaaccttcaaatattttcaaaataacaaaaacatacaaa

SEQ ID NO: 1945 - DNA, 117 bp, Hydra vulgaris
  source 1..117: mol_type = unassigned DNA
cgcgcgccgttaaagatggcagacgtgactttgtgaaaaaataagaataacaaaacataaacattttgtaataataactaaataataaaagataaacttatcttgtcaaatttgaca

SEQ ID NO: 1946 - DNA, 1122 bp, Hydra vulgaris
  source 1..1122: mol_type = unassigned DNA
aaacgttatcatctatggactagaagcaacccaatgttcttctcagacggaaaaactagaaaatgataaatcgcaagtaaataatttacttagtgctatcgaatgcgatagagcaaaagtgagatctattcgccgtcttaaatctaaaggaactatcgatcctttgcttatcgagcttgaagacgttaataacaaaaatatggttcttaaagcatcaattaaattaagaaaaatcaaaaaatatgaaaatgtgtatataaatcgcgatctaacagcaagtcaaagattcattctaaaaaataaattaatagaacgaaacgaaaaaaatgcgttaagaagtgaacaagaaaaaattaaatttcattacggtatgacaatcttactcgaatttttcacaaatagccactagcaaccactaatttagcaacgtcatcaaaagtatctcccccaaaaaagacaaatattgactatactcgaataaaatctcaatttattcaagatccacttctcaacataaacaaactgaacacttcttactttgattcggataaagccgctattttccttaaaagatgtgaattatatttttctaatcaattctcagtatttcatttaaatattcgtagtattactaaaaacttcgacgaactaaaagtcctactagataatcttaactttaactttagcttaatttgtttaacggaaagctggattttagatacaacatttaatcaaaattctaaatttatattgcccaactacaaagccattagttttgaacgtaagtcttcaaaaacaggcggtggtatatgtgtctatgtgcttgatgaatttacttatcaaattagatatgacctgtcgttctctgagccggattttgaatctttcactttagaaatctacaataagtcatctaaaaatattattgtgacaactacataccgaccaccaaacggatgtttaaataactttcaaaatcacttaagtgattattttgaaacagcatgcaaaaaaaataaagaccactcatttttatttcttggagattataacgtcgactatttaaaatatggtgaaaataataaagtacaacaattttacgatagctttaatgagtttgga

SEQ ID NO: 1947 - DNA, 148 bp, Hydra vulgaris
  source 1..148: mol_type = unassigned DNA
agaagctggaatgtttgcgtatatttcatacgacaagttggtggttcgcgatggtctcgaaaacccacgtaaatatttcttttaacgttactttatttttattttttatttatcaatagtttttcaaattttaatttaacttttagaa

SEQ ID NO: 1948 - DNA, 1083 bp, Hydra vulgaris
  source 1..1083: mol_type = unassigned DNA
tgcgcgatgaaggaaagatggcggtctwaattctgagttgaagtttggtatacttttattttawcgagtcgaaatttatatttatccatctattattaaatcaatgaaaaagataaaaaattaataaagtaattagtatcaaaataatttattcgtgatcaatattaatacaaagtaaccctaaagtagcaaacaaaaaaacgagccatatttcattatccatcaaacaagaagaaaagaagcaagaagaaaagtataacataaataaaatgaggagaagaaccgaaaaaaaaaatagcacgaatctattggaaagcataagatttaaagatacttaaacctccttatttttttcttttgatgatttttggttagccacatttgtttattatttttctggactatttatcaatatttgtaggttatttattttcattactttatagaattataattatatctaaatagctaatatatctgtaatataatttattcatatatataaaatattattatatacctatataactatctatatatctatatagcttttattagtgattatataaatgtcatataacttaatctttcagtttatgttaattatatatttacataactatcattatttacataactatcactatttacataactatcattatttatcatttgaactttatttattatttgtacatttctcttcatttattcttttctttgtgcttgttttaacattttatttgtatatttatttttatttattcttttcttcatgattattttaacattcttcccaagtatattattttattattatattggcttgttagtgtttttgttagttgtcaacatctatttaatctcttcaacatcatctacttgattttgtataacctacctgtactgtgttatatatactgttcttatgcaaatccattttgcctcacaattactctcttattatattattatattattataagtttatcttatttattatatccttagtcactcctttttttttcatcaccttctgtgtttatcaataataaaacataataacattctgcctatcaagtt

SEQ ID NO: 1949 - DNA, 1081 bp, Hydra vulgaris
  source 1..1081: mol_type = unassigned DNA
  misc_difference 798: note = a, c, t, g, unknown or other
aacatacaaaatggataacgataaagtaattacaatgggaatgcttcgagaactcatgtcaatacaaggagatacaattttcaaatgctttaaggaaagttcggtcagtgtcctggaaaaagttgagaacttagccaaagrcattgaagaaataaaacgtgggcttacttttgttggtgatcaaattgagacaaagtaagcaaggttgatagtaaaatggcagaaattaaagaaactattgtgtattaaatcattccacggaaaattaagcattgaaaataaaakaaaaactgtcgatcttgaaaccgacgtaacaatttaagaattgttggaatcaaagaagaawataacgaatcttttaatgatgttgtaraaaaagtaaacctactaattaaagaagatctggaaattgcgggtcyagttattatagaaagagcrcatcgtgtcggtaaatttagtggaaagcctagaactattgtctgcaaaatattaaactggcaggacaaggaaaacatcttatccaacgctcgtaaactcaaggggaaaaatatatatattaacgaagactatagtgatgaaacaatgcgaattcgtaaagaactttttgtacaagcyaaaatacatagtggtaacggaaaatacgcgaaagtcatttacagtcgattagtggtaagagaaatgataaacgagaacgaaggtgttgaaagyaagtaatttatttatttacgttttaatagttttattagatattaaattttawggtttttatttaaggataatattaacaatgaatatrtntaaaacaattcataayaatgaagcaaatttaacaaaattaatatctccaatttttgaaattttgaaatataacaaaaatgattayaattttttgactgaaatagatattaawtgcttaaataatgaatactataaaccggaagaatttaagagaaaaaaagcttaacaaagatttaaacattttaagtataaatatacggtcaatgaacatttttattattctttaaattatctttttgacgtaatatgtatatcagaaacttgggaagatgcaaacttgccc

SEQ ID NO: 1950 - DNA, 930 bp, Hydra vulgaris
  source 1..930: mol_type = unassigned DNA
aggtcatcgcaaatggcggacgtatttttctaacggtaaaaaataaataaaagaaaaaggataagataaacagttaatttttcattttcaattcgctaaaaagtttttttaaattgttaaaaatctgatttaaatcaaacgcttaaaaataaaaatcaaataaaaaaaagaacttcgaattattaaaaaaaaagaacactttaaacaaagaaaagaacgaagaaaaaaaaaaaaaaaagaaagaaagaaagagaaagtaaacaaagaagaagaaaaaaagaagaaataagtaaacaaacaagaaagagaagaacaaaaccaattttaaagagaataaagaagattggttattcatttattttcgcgatttaatttgtaattattattttttaatataattatttaacttatttgttattttattattattattattattttttttttttttcactttttcacatattttttaattatttatttatcattaattatattcattagttctagttaataaggttttcccgttatctatctaagttgtattatcacatattatttatttatttatcattagattatctatttaggaagttttgttatatattttattatatttaaattattttactatatataattttattatattttttgatcattattataactttatcattattatatattcttatacatttatttattatggatttatattattttaattttatctattgtttattattttatcttagttattaattaatattataaatctatactctttatttataatttcgataataattaactacgtactactactgattactgttgctatttatccatttactgtttattgtttgattattttctcttttaattttctatattttctgttctataaacggctttaccatctatatc

SEQ ID NO: 1951 - DNA, 460 bp, Hydra vulgaris
  source 1..460: mol_type = unassigned DNA
aaaggtctataatgaagcctattttcggaaaaaaagttgcatttaacagaaactctattgcaggcgaacgtacggtgcgagaatcttatatctttgtaggaggggtctgtaactcaatgtcggaagaagatctatctaaccacatcaaaaatgaaataggtattgagcctattaaggtagagcttaaccgggaaaataaatacaatcgttcattcaaagttatcataaaaagtactgaaaaagacataatcctaaaccctgatatttgggatactaatattatcgttaaaccattcaggcttcatcgtgttacctcaagaaacgaaacaccacagcagagtgcagttaatacgctacactctgtacaaccaactcaacaaatattttctacatctaaagaacaaccatcctttgcacagcaacattcttactcaactcgaatactaaattctaattcaaa

SEQ ID NO: 1952 - DNA, 750 bp, Hydra vulgaris
  source 1..750: mol_type = unassigned DNA
  misc_difference 38: note = a, c, t, g, unknown or other
gggaaatttttcaagaaatgttycaaaaacaacaaaangatattttaamattaataagtggaaatttaaaactgactaatgatcgaatcgatggattgctaaaagaaattactacattaaaagaawcttgtgaawctttaaaaaaagaaaacgaaaacmgaaawgccgatcaaaataaaaacaaacaagcagttaataaagtatgaaaaaatacaaaaagacattgaagaaagtctaacgttctatcaagatagccawgataaaaaagttagcgayttagaaaaaaaaaagtcatcgaatgcaaatataggtgagaatgaaaaaaataaatttagacarctggaagatcgacaaagaagaaataatcttcgaattgaaggagttaaagaaaatgataacgaaagttgggatgatacggaaataaaaataataaacatttttgaaaataatctcaatgtaaatggagtaatcatagaaagagcgcatagaactggaattattgaaaaaaaaaaaccaagaacaattgtaattaagttactaaattataaagacaaagtaaaaattytaaaaaatgccaacaaactaaaaggwtctggaatttatatcgacgaggatttttcgctagaaactacaataataagaaaaaaacttcttgaagaaagcaaaatgcataggaaaaatggtaagtattctgttgttatatacgataarcttattgttaaagaatttataaaaaaaaaataatgataa

SEQ ID NO: 1953 - DNA, 560 bp, Hydra vulgaris
  source 1..560: mol_type = unassigned DNA
gaaagtcttaacttccaagaaacaactattatggaaaaaataaataagatcacgaagcgttacgaaaaggagataaacaacttaaataagaagacactagatttggagaatcgatctcgaagaaacaacctaagattagatggaatatttgaaaagccaaatgaaaattggaatgagtgcgaaaatgcagtaaaggaaatgtttaaaaaacaactaaaaattagtaatgaaattatcatagaaagagctcatagaataggccaacctaaagaagataagaaaccaagaacgattgtcctaaagttattaaattttcaagacaaaacaaaaatacttaacgctacaaaaaacttgcgaggaactgggatatatgttaatgaggatttcgctaaagaaacgatggaaagccgaaggatgttgtgggaagaggtcaaaaagttgcgacttgaaggtaagtatgcagttataaagtatgataaaattgtttctagagaatttcgaaagtaaatgcgctcattcttaataagaactcctttttaatttatttgtgataattaatc

SEQ ID NO: 1954 - DNA, 750 bp, Hydra vulgaris
  source 1..750: mol_type = unassigned DNA
  misc_difference 396: note = a, c, t, g, unknown or other
ggctaaaggattatcatttactcaaattaaagaattactggaaattcatgaaaacacaatattaaaaatmtttarcgataaatttgataaaatggaaaacaaaatgtaagtacttaaaagmgaaaataaaattttaaaaaatgaaatagcagatattaaaagtgcaatgacttttcataaatgaaaagtatgaaaaagagactaaagaattatacgattttaaagaacatcttaaacacaacatgaaagtaaatgaaaaagctttaaacaatgatgaatttaaagacgaacttgckgaacttgaagacagaagtcgaagaaataatttaagatttaatggaattgaagaaaaggaaaatgaaacgtgggaagaaagcgaaaaaaaaattaaagaantcttaaaakaaaaacttggtattacgaacgaaatataaattgaaagrgctcatagaacaggaaaaaagaatgaagttgaaatgaaaaaacgaagaactattattgtaaaatttttaaactataaagacaaagaaaccgttttaraaaaataccgattactcaaattatggaacgaaaaactatacataaatgaagattttagcgaaagaacaatggaaatacgaaaaaatytwtttaaagaagcaaaagatttaagagccaaaggtaagtatgctaaagttgtatataataaattagttacacgcgatttttaaaagaattaatttttttatttttggatttcgaataactaaa

SEQ ID NO: 1955 - DNA, 106 bp, Hydra vulgaris
  source 1..106: mol_type = unassigned DNA
agtccctgtgtaataagcaaaactaataataataacattacaatttcactgacaggaggtaatccactgttatttagggtggtagccctcctatccagtaatccaa

SEQ ID NO: 1956 - DNA, 505 bp, Hydra vulgaris
  source 1..505: mol_type = unassigned DNA
aggagcatgtttatgaaaatgttaaggattggtgggaggctggtaaggagagagtaaaaataatctcgaaaaaatttagcaaaagattaaaacaagaaaagaacaaaaaagaatttaaattaatcaaattattaaaaaacgcatcgaaaaaaatgcatttaaattgcaatatgaaaaaactttacgacgatttaaaagttaaacttgaaaatatagaaaaagaaaaagccgtaggcgcggcaataagagcaaaaattcagtggaggttagaaggggaaaaatgctcccatttttttttcggattggaaaaacaaaaattagctaaacaatatgtctcagaaataaacggcagagacgggcaggttaaaatcgactcaaaaaaattttattagaatttgaacatttttatagaaacttatacaaattcaaagaaaacgacaaaccttctcaagaatttttgttcttaaatgctaaagttaawaaagttactaaggaagaaaataaa

SEQ ID NO: 1957 - DNA, 75 bp, Hydra vulgaris
  source 1..75: mol_type = unassigned DNA
gggaattggaagattaacaatttaagagtagatggaattgatgaaaatgaaggtgaaagctgggaagaaagcgaa

SEQ ID NO: 1958 - DNA, 804 bp, Hydra vulgaris
  source 1..804: mol_type = unassigned DNA
cttaagcctttgagccgataagacgtgtttttgtttgagcgtaagttttcaggaattttaaatttttttctttttttttttttttttttttccgtattctttatctttcttttttacttatttttctaactttttctaaccactacttctttttctacttattgctttatctaattagcttattaattacttttctacttaaaattatagtaatatattaactattcgtgtctataatacagttttttgttgtacttcgcatacctaaattaaatataattcttatattttatacctatacttatattttattatatatatctttatttatatattactattataaaaatagttataactgagatttttttttatgcttcagttcgcttaattttttttttttttttttttacagagttataaaaagttttttttttttttttttttttttttttctttttcttcgccaaaagttgcgtttgcacctgttctttgtttttagttttctgaacaataagctaaatttttgcgctctgacacaaactatattagtaaattatatatccatatattatatataaaatacatataaaaaagttatatataaacatatacaaataatataaagaaattaaatatatacaaataaatatgataacacggaaaaaaacacatactgaatctttttagtccctgtgtaataagttatttgtcataattgtaacaaataaatttgcaataattgtaacaaataaataaacataaaaacatcactgatataaaaaaaaaaaaaattcatctgtg

SEQ ID NO: 1959 - DNA, 46 bp, Hydra vulgaris
  source 1..46: mol_type = unassigned DNA
tacaagttacaatttgtgtttgtgtttacaagttcgagtaaaataa

SEQ ID NO: 1960 - DNA, 137 bp, Hydra vulgaris
  source 1..137: mol_type = unassigned DNA
ttttttggacttttatagcgatcggacatgttataagagcttttcattaaaaaaaaaatttacggaaaaattcaaataaagttaactatactttgtaactttttgtgaaaaaagtatatttgcatagcgtaccaact

SEQ ID NO: 1961 - DNA, 914 bp, Hydra vulgaris
  source 1..914: mol_type = unassigned DNA
tggtaaagatggcggagttatagatagaattgtaaatttatcaaataaagtaatatatctttacatgacagcaattaagaggaaaaatatttatagaaaaaaagactaaaaagtaaaaaaaaatatatcggaaaattaattagaaaaccaaagtacttaaagtttagagatgtgtaagaacttcatagactcaaataaatataattaaagaacaagatacattacaaaattaataaactaagagaaagtaaagaaagaatcaagttaatgaaagraaaagatcaagagttttttacatttgttttgattattttttgctttaaatattatttgtaaatttaagtattttccaggattcgtttttattattgactttttgattattattattagcagttatcattgttattattattataattaaatatttatcattattattaaataatatagcattatttatcctatatttatccattatttacctcttattacaatttacatcataatttatcttatataaatgttatttacctaatattactacttatctccttctttacttattattacttaccttattatcatcaaattatttaaataacatatattatttatattatactatgtctaaagctactagaggtattaatatatctaaatttatattctaaatcaagttaataatattctaattttatctagctgtaatacttattctcctgtgtaaagtatttaaatctcttatatcttactatcatttctttataactgatcattcctcaatatttaaaatagcaaccatttctagattaacatttcttagttttaatctctcagtttctttataaatatatagtagatatctttatttaattattttttctctatactttgtttaagcataataagtc

SEQ ID NO: 1962 - DNA, 97 bp, Hymenolepis sp.
  source 1..97: mol_type = unassigned DNA
ggggtgtgcaatagacttacctccacgtggtgcaccctgggaaacgtatactcatacggcaaaaagtctataaatcggcagttgacttcaaactact

SEQ ID NO: 1963 - DNA, 100 bp, Ixodes scapularis
  source 1..100: mol_type = unassigned DNA
catttggccggcagggtgcgtttttcgcccttttttcggcattcttaaagaactctcggacacggacacctcggtcgatgtaaacgcataatcaggtacc

SEQ ID NO: 1964 - DNA, 581 bp, unidentified
  source 1..581: mol_type = unassigned DNA; note = Description of Unknown:Locusta migratoria sequence
aggatgtcggatgtgcctttaatagccaggagatcgttctgattgtctggctgccagttagcgctagttcatttagttcacgttttacaacgctatccggggtgcaccacggggaggcgaactagcattacacccttacaaacgcccgacttatagatagcacgcttgccgcagaacattccaggtgacagtgggggaccaaatatgcccaaagaaccctaaacaacggattaccacagggctccgtcctagccccattgctattcagcatgtacatcgctgacatgccccaaacaactccagaaaatttgaatatgcagacgactgggcttagcgtcaacataagagctttgagacaatggagtgacctcgtcgtccaacttggcgactggcgcatatttccggggccgagcctacaaaacgggacgtgcttccatatctgtaataaatcagcaggcagacgacgacgtctactttgagggaactcgctccggcataacggtatccaaagtacctcggagtcacattagacagaaccctcacctataagcgacatctggagaacactgcagccaaactag

SEQ ID NO: 1965 - DNA, 157 bp, unidentified
  source 1..157: mol_type = unassigned DNA; note = Description of Unknown:Locusta migratoria sequence
cgactgttcgcgtccgtagcaatcctcaagctacacgtgtcccctgggtggtgctaaagaacagtcacttcgaggcacgaagtcagagccagaagtcacggcagccagaccacttgtggactgtcctggctatcaaacacttgggctgattaatgca

SEQ ID NO: 1966 - DNA, 1745 bp, unidentified
  source 1..1745: mol_type = unassigned DNA; note = Description of Unknown:Locusta migratoria sequence
cccctcaggggctcagcattaatttgctgagtacgggcttggcgaacccggggtcctgagccgtgggctgtgtcgcgccaacagtccgctacaccgtaagctctgtgcgtgcttcaacgaccatcgttcggcgcgacggtggaacgttgtacgtttcagagcccggggatcttggcttaatcgcccgggtcgcgaggacggtacaaacctctataaaaaaaaaacctcaatctcaaggtgtgctactgccgaggagatgcatggctgttgaggttgaacagtcgctagcgagcaacctctgaggaacctgccgcacctcagttgtataaggcttacccaggcaagcggggctctgcctgggtggacttagttccctagctgctcgtgggacgaaatgaaacgagccaaatagcgtggtggacgtaaaccaccgtctccaagcgtggaagagttgctttaatgcagcgacgtatgatccccgaacgttcccttccctggccacccctgggaggaacggcgggctaaagacagggatgagcttactccccaagtatcttgtttgcagtcgaacagatggggaaactttcatgtcgacgaagccacttttcttcgtgaaaaccttgaagataagtttggtgaagtctcggatgtcaagatgaggagcggttcggtactgatcgaaacagcgtcatccgcccaatcgaaagcattgcttgcttgcgataagctgggtgacgttccggtcagtataacaccccacaaatcgctaacatgatccagggtctgatctatcacagggaccttcttttacagtcgatgagagctacgcgccaacctagagcgacggggtgtccacttcgtccggcgcgtgcataggggtccgaaggataatagggtagccaccggtgctttcatcttggcctttgaggcgatacattgcccgaaaaggtcaaggtcatgatctaccggtgtgacgtaaagccttatatccctccccctatgcggtgtttcaaatgctggaaatttggacatatgtcctccagatgtagctccagccccacatgtagggaatgcgggcgtccatcacacccggacgctccgtgtactcctccacctatctgtgtaaactgtgggcagcaacatccaccctgttctccagactgtaccgtgctccgcaaagagcgaaagattatggaatcaagaccctggatcgactgacatatacggaggcacgtaaaaaatatgaacggcttcacccagtttccatgacgacgtctttcgctgcagttacatcgtcgccacccttctgataacacctaccgtgcaacaaccttctgtgggcccaaagggccgtcaaagctcatctgcctcctcaaggtcgggggcactcctctcactgccccccactaccacctggggggcaactccacccccaccatcggggacaccagtccccacctcccagccggagaaggagcagcctcctccggctcccctcgctcggaaggggtccctcggggcactcccttctgaggcttctcctagtgctccagcgatccagccaatggctgaaggatccaaaacctgctggtagaagggcttcccgctcttcttctacccctggcgccgctacagagaagccctcccggccctgcaaacctaagggccagcgagagggacggaagaagaagacaaaagactcttcggtggctctaagccaccgctactcatctctacatcggacg

SEQ ID NO: 1967 - DNA, 47 bp, unidentified
  source 1..47: mol_type = unassigned DNA; note = Description of Unknown:Locusta migratoria sequence
gagcgaaaattatagccttactmaaccagtagcaaacsaagtgataa

SEQ ID NO: 1968 - DNA, 523 bp, unidentified
  source 1..523: mol_type = unassigned DNA; note = Description of Unknown:Locusta migratoria sequence
atgtacatagtcagaagtgctcaactgaacagcacatgtcctcttctcaatcggaattacagttactcactatcaatatgacacgtcatcgtgatgggagaccttaacatgacttgttaagagacactccatccacaataaactaagagattgctccaacaacatgaacattctgccattagaacctactcaccatacggagcacactcttatagatgtgatcgcaacgaaaaagatcgacaaagtacagatctaagtcaaacgtcagcccgcctctcagcacacgatgcagcgccaaaagttaaatcacgttatattactcgtagaaacgtgaaacaaatagaccgtgaggctctaacagccaactgctcagaaatctcatggcatcaagtaaccagagaacccacgattgatggaaaaatttttgaacttagaataaacttatttcctatatgacaagcatgccccctacaatccgtgtaagaaaacccctgctccatggctgactaaagaattacgtcaa

SEQ ID NO: 1969 - DNA, 1080 bp, unidentified
  source 1..1080: mol_type = unassigned DNA; note = Description of Unknown:Locusta migratoria sequence
tcgtttcagaacctggtctaacagttacttcagtaaatatagaaggcatgtcacaatccaagcaacagctgcttcaagaactgtgccatgaacagaagtttgatgtactgtgcatacaagaaactcacagagatatccatcaaatgcgaccgacaatacctggtttgcagctagctgcagaagtaacccatgctaaacgtggaggtgctgtttttgtcaaaccaggaatacgagtcttgagtgcatataactaaatgacaataacatcgagatcatcaccttggaacttagtaacagtgtgatcacttcggtgataagcggtcctccttccgaaaattctccttgctcctctaaaaacttcattcaggaaaaatatcttggtaatatgggatatgaaaatgtgaacccgttatgtctcgagctgaaaccaacacccwcactctcactcacgacagcaaactacctcatccttcaaagtgaaggtggcaacgtgacctctatttgtgagtgaaactagccaacagtgttacaatcaatgtgtaatttcatacccaccacacaacacgggtaccaataatgtgtcgaattcttcccatcataagaccccaagaaactggttttagacgaagggatagtttcaaaaaggcagattggccgaaattctccaaaatgctggatgaaaaagtttatacacttagcctgtgcctgaaagtatgaacactttttgagctcttaattcctcgcgagcattatcccaagagctgcaaacaaactacctgagggcattacttcagaaacagctaccttgctcgatattatacccaatatgataatcccattcagtgatgaaacccaaaacagccagatccgtcctctcctcagtctccgaggcaaagagagtacaatgcgagaaactcatggaagactgtgatatgagtagaagtagtcacaaggctggaggcttctaaaggcttaataatgacccttcacaggaatatgcaggaatattcgatctgataaaattcatacatgaaaacacctcattcaaccaggtctggtaagaagacatgtgagagataa

SEQ ID NO: 1970 - DNA, 295 bp, unidentified
  source 1..295: mol_type = unassigned DNA; note = Description of Unknown:Locusta migratoria sequence
aagttgtttgaacattcatatgcgggaaaagttattcacattgtttttacctctacgggaggaaatgtatcggtgtttacggaagttggataaactccgcagcagtagagtaaggttatgtgcttgtcgtgttgaagtgtccatattgttccacgtttgctaaggttgtgcaccatattaattctcctgccgccacgtatcaagcaacgtgctgcttagctcttgttcgtgaaaggatccactttatcgtcgtcaattagattttgtttccaaggagttatttcggcttcattta

SEQ ID NO: 1971 - DNA, 203 bp, unidentified
  source 1..203: mol_type = unassigned DNA; note = Description of Unknown:Locusta migratoria sequence
acgagtactactaaaaggattgcaaagaatactcacggccatcccagtagaaaagccggctttcgtsccagccgaagcgtgcagaccaagtcctgctcttactacacatattgaagcagcttccaaaagaaattaaaaactctgtggcctttttgacttgtcagcagccttcgataccgcctgggacaaggcctgctctataa

SEQ ID NO: 1972 - DNA, 178 bp, unidentified
  source 1..178: mol_type = unassigned DNA; note = Description of Unknown:Locusta migratoria sequence
gtattctgaactcaattgatttagtgaacaagttaaaagacttccctatcccccctagtgccaagctaatttcttttgatgccagcagcttattcactaatataccagttggtgagtgcctaaacatcctcacagacttactggataaatcaggagttaatccacttgtcacagatga

SEQ ID NO: 1973 - DNA, 483 bp, unidentified
  source 1..483: mol_type = unassigned DNA; note = Description of Unknown:Locusta migratoria sequence
tcaaaataaaaatagtgtaaagataacagacaataaggaactcaaggcgaaaactgaagcagtgatgacgaaagaagaaattttcatattgtcaacaagtcatggtaagggttagcaaaaataatgtcgatatccaatcagaatatagtcagtggaatctcaaaacctggagctcgttgcgagaggtactgaaaaacagtgaaactactgtaaaaagtggagtgactgtgtagtaattggtggtggtaatgatgtgtatagaaatgagagcagccttgccgtgaaagcacgagagaatcactaggaaaattgtcacaagcgaaggtatttttggtaagcattcctcatagacatgaccggagacgattcatgtgtaaataaagaaatcgtcacaacaaacaggaaattcaggaagatctgcagcagttttgtgcacactacctttattgaggctactagctctatcagagaacattttagaga

SEQ ID NO: 1974 - DNA, 933 bp, unidentified
  source 1..933: mol_type = unassigned DNA; note = Description of Unknown:Locusta migratoria sequence
ccccccagggggcccacagctcttttgtgggtacgtgtgtggcgcgcacgggtccccgagccattgcggccttccttcctgtttcccaggccgcttttcctcaccccggttccctcccctccctaatccttcttcccaccctacccttctccaaccccgtctctaggtgttctcgcgatgacggcccggctatttccacggtactgctggtttcgcaattgtgtctttgtttgccgttttcaccgatttcggcccagttaggtccccctcggggtttgacctccatcaaaatttcagagtaagtgtgagccatttggggaagaactcccaacctagcccctacggcgcggattcctaccctttccttccaaatccctcttcctcgccgtagctccctcccccgctaggtcaccagcacggtagccagtccgtgtggtggggctgttatgtaccctcatggttgagccccctgaattgcacagggatcacactgccgatgcctgagctgtgacctcctcatgaatgccaaggagtcgatgcttgtctctgcggggcatcaggactcccagcaacggtcatcctgccaggtggcgttgctgtggctgggtggcgcccttgaggagagcccctgtttcggagtgggtggcatcggggcggacattccgcaatgaagaggaaacaaacctctgaaaatcctggctctaagtcaggtgtctcaagtgtggtaagtttaatttcaatgctgcaagatacgaccccaaatcgtttccttccctaactccatcatggggggaacgtgggcccacaaagcagactgaaccatactcaccacgatacctagttgttaccagacaggatggggaatctttccaggcaactaagccttccttcttcgtcgaacacctcgaagaaaggtttggagaagttgccggt

SEQ ID NO: 1975 - DNA, 347 bp, unidentified
  source 1..347: mol_type = unassigned DNA; note = Description of Unknown:Locusta migratoria sequence
gggtacgacgtgtagacaacctccccgatggtgtaccctgggcgctgtaacatgggacagcggcgaaaagtctacacaactatggcggccggacgcacaaatgcctcccggtccactcaaaggcaaatggagcaagcaaggaactttaacatgaagagactgaatgtatgtcatttcaacatagaagactacacaaggacgaagggagaaatccttgaaaaaattttaacagagaacaagtaagtgtcgtacttctacaagagacccacctcacagatgaaactatcgaccgactcaaaataccgggattcactaatgtgagctacattggccacgacaagcgtggt

SEQ ID NO: 1976 - DNA, 39 bp, unidentified
  source 1..39: mol_type = unassigned DNA; note = Description of Unknown:Locusta migratoria sequence
ggacttccctcatagccaacaccgcccagtcttcattga

SEQ ID NO: 1977 - DNA, 48 bp, unidentified
  source 1..48: mol_type = unassigned DNA; note = Description of Unknown:Locusta migratoria sequence
aaccattaaattacccatttcaggctgtaatccctccctccacaatga

SEQ ID NO: 1978 - DNA, 151 bp, unidentified
  source 1..151: mol_type = unassigned DNA; note = Description of Unknown:Locusta migratoria sequence
gccatagccggtcccaagcccggttgagaaaggaggagggggaggagtaacacctcgtaaaaaaccttggttcacctggcccgggtgatagtacctgtgagggccccttgccagggatacggtgaagacctcaacggcagtgaaggcggag

SEQ ID NO: 1979 - DNA, 158 bp, unidentified
  source 1..158: mol_type = unassigned DNA; note = Description of Unknown:Locusta migratoria sequence
cactcctagggagctaccagtttccagtttcatcagctctgtggagcaagtagtcaacactctaccatcagtgttgcagaagagatcggagagagacgcagggcgctaccagagcaggccccaaaacaaacatctcaagagacgagaggtggcgctag

SEQ ID NO: 1980 - DNA, 481 bp, unidentified
  source 1..481: mol_type = unassigned DNA; note = Description of Unknown:Locusta migratoria sequence
gccctagctaagtctggcattgcttccactacttgtgtcagacttctgctttcttcgttcctatcggcctctcttggtcaactctgctgcttcgaccccgacggtattaggttgcgaggccgagggtgctttcattttcttttctaacacatggctgttaaccgaatggctcccggtataaggagaccaaccttaccaagtgccaacggccagtaaggggggatgagcggtaaagaaggggcacctccttgtccagggatgagaaattgtccctaaaggcggaggaaccattaacatggtcaacggcaggaggatgcagaaggcaacgggaaccactgcattaacgatcccatacaggattcccaaatagaaatatggctacgtccaattcaaaattttccggagtttcaattcccccattcggatctccgagggaaatgtcttgagcaaggctgtaaggagtaaaggaataaaagaacag

SEQ ID NO: 1981 - DNA, 453 bp, unidentified
  source 1..453: mol_type = unassigned DNA; note = Description of Unknown:Locusta migratoria sequence
tttaacagatgccggaatgaaggtattgttcctaagtttgctagaatagttcactaattgattctaatgcacaagattaagaagctgccagtcttgcgctagtacgtgaacgcttcgttttactcgtagacaactggattttgtttccaaagacttatattttttgcatcttgagatttcatcacggctttcggccgcgtcatgggagtgggttgatagcgcttcttgggccttttccgactcggcacagaggggtgctgcctgcaaacagttatcaaatttgagcgactttgcactcaacagacaattctggtgacgatttccgtcggcgggttgtgtcaatcttacagataaggaactggacaacgctgcattatcggttttggaaaaaggtttaaattttgcacccacacctaaggttgtccctattacggaatttatttgtgctgttga

SEQ ID NO: 1982 - DNA, 30 bp, unidentified
  source 1..30: mol_type = unassigned DNA; note = Description of Unknown:Locusta migratoria sequence
agaggctgccgtacctcatacattccgggc

SEQ ID NO: 1983 - DNA, 888 bp, unidentified
  source 1..888: mol_type = unassigned DNA; note = Description of Unknown:Locusta migratoria sequence
ccctcaggggctcagcattaatttgctgagtacgggcttggcgaacccggggtcctgagctggggactggtaagcgccgccagtcctctagacaccgtaacctctgggcacgcttcagcgaccaccgtgtggcgcggcggtggaacgttgtgtgtaccggggaatggggatcttggcttgaccgcccgggtcgcgaggatggtacaaacctctataaaaaacccttcaatcccaaggtgtgctacgtgctgatgggatgcatggctgttgaaggggaacagtcgctagcgagcaacctctggggatactgccgcacctcagttgtataaggcttacctaggcatgcggggctctgtctaggtggacacttacttccctagctactcgtgggaccgagatggaaaaattctaatttacccatgaacctcctagtgggatgggtgtaccactggggggtaccaacacccaaccaamcaagagggctmgggtagccagtcctccggattcaggttctcaaaaaaaagtttagtttatagtaacagaacacatgctgctmmacagaatgtgtttattgtcgtgaagagaaaagagggctcgtttgagaaggtgtcgcccttctatatccagaaaggtctcgagggaattgctggtgmtttgaaatcagtaaaacggttgcgtaatggsacattgttggtggaaacatcaacttcccaacaggcggccaacctacagacggctaagtgccttggggaatatcaaatcgagacggagctgcacaacacccttaactatagcaaaggcgttgtcacctgtagggatctggtggacattccagcggatgaactgaaggatgagtgggcttcagaaggcattgttgatgtgcaaaac

SEQ ID NO: 1984 - DNA, 171 bp, unidentified
  source 1..171: mol_type = unassigned DNA; note = Description of Unknown:Locusta migratoria sequence
gttcgtaagtttcccaggaacagaatggaaacgcccattcttgtaaaatcgaacctccagccaaactgacagctgaactccgtggcttctctccgatcctctcacagtgttctgccagcgataagggatgctacctgacgccgattatgatggaaaaccgacagatgttga

SEQ ID NO: 1985 - DNA, 991 bp, unidentified
  source 1..991: mol_type = unassigned DNA; note = Description of Unknown:Locusta migratoria sequence
gacgaacaacatgttacggaatagcaatgtatgtcaggatgaacatagctgattatagagtggtttctaaggactctacagacaacatttatatcttagcagtgacgatatgtggaactactattgtcaacatctataaacccccattagtcatctggcctacgcccccattcaaactttttactgaccctgccatctatgttggagactttaatagccatcaccatgcttggggatacaagaataatgatataaatggtaacattttacatgactggctgtccttgaataatttgtatctggtctttagtgcaaaggacaaaggaacgtttcgatcagcaagatggcagaaagacacatcaccagacctatgttttacactaccagtcaagctaatggaaatcaactggcaaacaggaaagttatagattcttttccacatagtcaacatacgcccattatcattgactatggcatccagataccattagtaaattcaactgccaaagctcgttggaattttaaaaaagtgaactggcaacagtatgctgacaaacttgatgtgactgttgactcatccctgtgcaatttaataactatgacagatttgctaaagctgtcagagaggtagcaaaaagaacgatacctagagggaggaaacaaatattccaggatggtccaatgatgtgatgagctatatgaggaatacaacttacacattcaaataaaacagcagacgaacttcttcaagctttgaatgagcacagaagaaggaaatggcaagaagctacagagagcctcgacttcacccattcgagtcgtaaagcgtggcagctattgaagaaactgggtgcagactaagcctgagagatgcaccataacgtcacacaaatgaagtcgcgacacgcttattgcaaactctaaagcatctgtgaacaagaaccgcactaggctggtgaagaacagttacgatccaaacgctctcagctag

SEQ ID NO: 1986 - DNA, 340 bp, unidentified
  source 1..340: mol_type = unassigned DNA; note = Description of Unknown:Locusta migratoria sequence
aaaacggccttgactatgcaaaaatgaagttcgcaaaccagaattgctttgacgtagctaacatagttagtaataattcatcaaatgctgtgtacatgatagttaatcttaaataataagctaaagaaccgatgctttaataaccaaatctgacaaaggttgttccttggttattgctagcaattctgaatatgtctctaaaaccttagaattttttaatgaaaataatatttcggaactgcacgaggacccgaccgcagaattacaaaaagaagtcaggtcggccgtcagtgatgcaaaatatttgcttaagccatttcataaaaaaactctcgttaat

SEQ ID NO: 1987 - DNA, 59 bp, unidentified
  source 1..59: mol_type = unassigned DNA; note = Description of Unknown:Locusta migratoria sequence
tagagaaacagtaggaaatgaaaaagcctgcatgaggtgtcaaagactataactttgcc

SEQ ID NO: 1988 - DNA, 642 bp, unidentified
  source 1..642: mol_type = unassigned DNA; note = Description of Unknown:Locusta migratoria sequence
acctgttacgctgtcgtaacaggcggagaggtgatactccgacgtggcgcgtcccaggtggcggatakgggggtcctaactggcttgccagcggacttgagcgaaataaaatagctctcgcggaccaaacacaaaccctctggattaacactccagttgtatctcgagcaatcctcggaaagctccaccactccaaccttacaaatkttatggattatcagtggaaaagaaaacaaattaccccagggagtaaaatctctcgacctccggtcgcaagcaggcatttcggattctggggagcctgcactttctgctcttgttttaccaagacaacctgaaaaacttaaattcaagamgaaatacagtatcggaacactgaacattaactcgctcatcaaaacaggaaaacataaagaactgactcaagcacttgagcatcatgatatccaaattctggcactacaagaaacccgctacactgacgaaaactcttttgaaacaggcaactacagaatttataaaggaaaaccagcagagtatatctttggaaaatgccccttattaggtacagcttttattgttagaaaaaatataacggagtccgtaataaacttcaattctacgtccaacaggctctcaaca

SEQ ID NO: 1989 - DNA, 414 bp, unidentified
  source 1..414: mol_type = unassigned DNA; note = Description of Unknown:Locusta migratoria sequence
agtcgccgagtggacgtcgtccagtgcacacctgtccagcgccagcacattttcagttgtaagtgtaaccggcttctctctagaagctacatattttgacttttcagtgcgctttcccttcagttcattaaagttattgtgtgctcgcgtttttatttgattcatattcacgttaaatatctggttagtgtattattccgccgtgtgaatcgcgtcgcgacagtcgtctgtctttgttttctgattagaagcgacatatagtattttgattttcgtctgcgcgttctcgtttcagtttgtaaatttatactgtgctctcgtgcatattagattcaaatccgcgttttaacaaacagtgtagtcttcctttgagcgcatcgcgactgtagtttttgttttctcggcactgtaatc

SEQ ID NO: 1990 - DNA, 351 bp, unidentified
  source 1..351: mol_type = unassigned DNA; note = Description of Unknown:Locusta migratoria sequence
ctctgaaagtactggagattctaggaaacgccaatacggtcctagaatcaatgaaaggaaaatcctgacattcacctccacggggtagagagggggcaacgtttgcatagcaagcggctaacgaatgcagggaccgaatatcccccgggataaggggatcccctataccaagtgccaaaggcctccatgagggcggatgagcgggtataggatagggcactctcttgtccttggagtgtgaaatcgctcctaaaggcggaagaaccagcaaggtcaacggcatagaatggagaaggcaagagggaaaccactccattaaagatccttttggatatcccatgtcaagcagca

SEQ ID NO: 1991 - DNA, 848 bp, unidentified
  source 1..848: mol_type = unassigned DNA; note = Description of Unknown:Locusta migratoria sequence
gatctttggcgtgacgtcacagtgctggatgctgtgcacatcgctctcgattttttataattttaggattaatatagttattttaattgttatttcgtgataatattcaatataaaggtgttctagaaaaggatcgtcagtaattttagcgtttgtagtgccgtattgctttaagtggtgttatttgtgttcgcgtgtgcggcaccgacgtcttactgctttgtttacatctggtggcgagtggttccagccgtagcggtctccgaaagctaagttccaataagtgtttgtgttattgtagttaaattattaaagtgactagattcaggaggtgttatcacgctagttgtttattaaatttagtacttttcaacaggtgacttgctgtttttaacgtagttgaggttgggaaactttaagttacggtatttgataactcttktactctcactgtgtttagttagtttattagtgacgcttgaatttgaacttgtttatacaagcaatagtgtaaagtttcatgtggtagtgttatttgttcttttctgatactattagttgttgttacttgattttgtagagactgaggtttgttgattgctgtagttaagaggtacttcctagttcttttgtagaaacgtaacttaataacttagacgtctagttttttaaatattgtgaaattttaccatgagtgaaaaatgtgggctctgtcgtagggtcgtgcgtagtgggctgcagtgtgggatttgtagtaagtattttcatggggggagtgcagtggggaagacagtgggcattgtggtgaggttctctcctggaactgtaggatttgcagcaggaataag

SEQ ID NO: 1992 - DNA, 237 bp, unidentified
  source 1..237: mol_type = unassigned DNA; note = Description of Unknown:Locusta migratoria sequence
cacacatgtagtgatgactgacactgttatcaataagtcaaaaagagtattgctcaagacgagatttccgtccttacaaaaggtggaaactatgctataacgcctgtggaagtacagttgaggatattattgcgaatgtgaagcaggaataagaactctcccgaaagaaactgcaaatgcaattcggattgaaaccaccagagtactatgtcgcagtaacctctgaaaagtaatttg

SEQ ID NO: 1993 - DNA, 268 bp, unidentified
  source 1..268: mol_type = unassigned DNA; note = Description of Unknown:Locusta migratoria sequence
cccgtgtggagtttgctggtcttccatcgggcacctccccaggtggcggataggggaatgctcaccagatatggtgggtaccggggaaataaaatacccggggtggaccaaaaccagcaactgctgccttgtagtatgatattggcttatcaaaggctaaaggaagaaaaccttgaatacaaattacctggtcctccaggttgggggttgtgcagtgggccagctcctcactcacataaaaatataaaatgctaaaaaacctaataat

SEQ ID NO: 1994 - DNA, 147 bp, unidentified
  source 1..147: mol_type = unassigned DNA; note = Description of Unknown:Locusta migratoria sequence
aaatcacagtaaaagtagctaatgctctagaaaataaatctaactacatgtatccaagacacacagaatttttgtaatacagaacgatcaactctaaaaaataaaccacaagttaggcaaataatgttatagaaataaagctgataa

SEQ ID NO: 1995 - DNA, 520 bp, unidentified
  source 1..520: mol_type = unassigned DNA; note = Description of Unknown:Locusta migratoria sequence
ccctcggaataccaccttaacgttggtggggaggtttgtgtgtgtcagtgatccactgagctatgctggcgggagctgtgctcccggtagggtcacccatgccagacaggtcagttggtgagattccagacaaagagtattccccctagggggctcctgccttgggagtatgtgggtggcaaccacatgggcccttagctaagtctggcattacttccacttacttgtgtcaggcttcctctgcattctttcctatcggcctcccttggccaactcttgatttttccgaccccgacggtattaggtttcgaggcccgagggagtctttcattttccttcttctactcttattgtcaactgctgccttgtagttagaagtgggaacttcaaaggctaagggaagaaaccccgacagaaaatcagtaggcctggctacttagaaggcagccccttcaccaggctatgggtgctgaaggctaataacctacacacccgagattaaactattacagaaacatca

SEQ ID NO: 1996 - DNA, 174 bp, unidentified
  source 1..174: mol_type = unassigned DNA; note = Description of Unknown:Locusta migratoria sequence
ggtggtgctaaatgagtaatagcaacaagatgagacggaactgcccgaaaaggcctcccggtcaaagagtgcagagcaaacaacaagaagtccttttcaggatgcacaagttcgtagaattggaccatctattcgcatactccaactkaacatagaaggaataagcaggtcgaa

SEQ ID NO: 1997 - DNA, 623 bp, unidentified
  source 1..623: mol_type = unassigned DNA; note = Description of Unknown:Locusta migratoria sequence
cccctcaggggctcagcattaatttgctgagtacgggcttggcgaacccggggtcctgagccgtgggctgtgtcgcgccaacagtccgctacaccataagctctgtgcgtgcttcaacgaccatcgttcggcgcgacggtggaacattgtacgtttcagagcccggggatcttggcttaatcgcccgggtcgcgaggacggtacaaactctataaaaaaaacctcaatctcaaggtgtgctacgtgccgaggagatgcatggctgttgaggttgaacagccgctagcgagcaacctctgaggaacctgccgcacctcagttgtataaggcttacccaggcaagcggggctctgcctgggtggacctttagttccctagctgctcgtgggaccaatgaaacgagcaaataaagcgtggccggcgcaaaacggcgtctctaagcgtggcaaaacgagttcaatgcgtcactatgaccctaagacgtttccttccctgccaccccgtgggaggaacgaagggcccttaatagatcagagccatactcgccacaataccttgtatgtgcgcgttcagatggtgaatccttcatgaccactaagcccagttctttgttgaacagctga

SEQ ID NO: 1998 - DNA, 1043 bp, unidentified
  source 1..1043: mol_type = unassigned DNA; note = Description of Unknown:Locusta migratoria sequence
caagatggcgccaggtggaaagtactcacgtaacgacgagatttcatagtgacgtgtgtaaaatctgcgaaaaaaagttaaaagaggtatcgtatgtgttgactgcaagtcttggtatcatgataaatgtgtaaaagtaaatctaaatacataaaagagatcatgactggcatgccggcagtgcattgtgaatgccacgaaaagtgaactagtgaatacactaaagtcaaaagaagaaataatacgtgtgctgacagacgatttagtggctataaatgcaaaacaccaagaacttctgaataaatatcaagaactagtaacgaaacacaaagaagtggagcaaaatcattgccaagaacaagaaaatattattgttaatggacgttctgtgcgactaaggtggcatgtaccaaataaaaamtgcaaacaaatgataagtgcagctccggcgttaatgctttcaaataaattgccggtatagaagattttggctctgaaacagaagtcgcgaacgatctccagtgacaaattaccatcagaatgcagtacaagaaatcgaattctattgcaaaacgtgaaaaaacgggttctgatactggtgacagccacaccaggaaaatttccgagaaaataaatgaatataacacactttctatggccacaggaataacaaagccgagtgcgcctctatgtgagatactgagaaacagtaactcagtctgtgactcactaataatgattttgtcattatcatgggaggcagaatgatgtctatcgaaatgagagtaaaaatkccacacggtgtttaaaatctacactgcgtgatcttaaagtgccaaaatcatagttactagcatgcctcacagatatgacctgcaagaaaactcaattgtaaatatggaacttgcaaaaataaacagacaattccacaaaatgtgcaagtccttccaaaacktaacgttctgtgagcttccaaattcaagagatctattcacaaaacatggacaacactasaacacgctgggaagtcatacattggtaaa

SEQ ID NO: 1999 - DNA, 432 bp, unidentified
  source 1..432: mol_type = unassigned DNA; note = Description of Unknown:Locusta migratoria sequence
cccctcaggggctcagcattaatttgctgagtacgggcttggcgaacccggggtcctgagctggggactggtaagcgccaccagtcctctagacaccgtaacctctgggcacgcttcagcgaccaccgtgtggcgcggcggtggaacgttgtgtgtaccagggaatggggatcttggcttgaccacccgggtcgcgaggatggataaacctctataaaaaaaaccttcaatcctaaggtgtgctacgtgctgatgggatgcatggctgttgaggtggaacagtcgctagcgagcaacctctggggatactgccgcacctcagttgtataaggcttacctaggcacgtggggctctgtctaggtggacatttacttccctagctgctcgtgggaccagcatgaatatttctttgtttttcccctcccagtggg

SEQ ID NO: 2000 - DNA, 131 bp, unidentified
  source 1..131: mol_type = unassigned DNA; note = Description of Unknown:Locusta migratoria sequence
gagaagcctccccgcggaacatattaatacgttttggcgtctcccgggacggcggcaaattcctcaaaccagaacatcaacacagtcattaaaatgcctcataaagaacccaaaagctcttttcagaacca

SEQ ID NO: 2001 - DNA, 299 bp, unidentified
  source 1..299: mol_type = unassigned DNA; note = Description of Unknown:Locusta migratoria sequence
gggggtcacagcagaagcgttcccgttcgcgacccctgtcgagtctgataccagtctggtatcagtccgcgaattctgctacaagacgagctacatcggatcaatatgccgaaacaaaaagatagccaaaagagtggactcgttttagagcccacctgacaattatttcgctaacatcgaaggaatttcagtatccaaacaagatttaattgcagaaatctgcagaaccaacagctgcgacgtcctgtgcctacaggagacccacaggggcctctcaaaataagccaaacattgtaggt

SEQ ID NO: 2002 - DNA, 444 bp, unidentified
  source 1..444: mol_type = unassigned DNA; note = Description of Unknown:Locusta migratoria sequence
ttctcggtattgtaatcatgaatagggactgtgactgctgtgtgcggatgcagtctgagctggtgacacttcgctcccagcttcaagctggaggctgcggtcgaggggcgtcgttgttgttggccggtcgtgggacaacggatccgttccaccgatcggcctgcggcagcgacatgccctgatactgccagcaatgaggcagacaccccaccgtggttgcgtgggaggtgtccagtgcgtggcaggcggcgaagacattccgggggaccgatcgtgaggcctccccggttcgtcttgcgaacaggtttgaggcgctatctgttcggacaatgttcctgagccggatggtgtcgctcatcctgaagtcaccacgcagcctgcagatccgggctttcacagagggtgggtttgcttgtagttgggagctccaacgttaggcgggta

SEQ ID NO: 2003 - DNA, 215 bp, unidentified
  source 1..215: mol_type = unassigned DNA; note = Description of Unknown:Locusta migratoria sequence
cttgatgaagaaagacggatatataaataaaacgcttgacttctttaamtgcaaataacattacacgtatagacaaagaccctacaaaccgatttcaagctttgataaaaagagctataaaaatctgagtttcttttaacacaaaaagaacaaaacagatatatagttgtgaatccacaatgccccaagctcagagcacaaccaaaggtccataa

SEQ ID NO: 2004 - DNA, 118 bp, unidentified
  source 1..118: mol_type = unassigned DNA; note = Description of Unknown:Locusta migratoria sequence
gggggcgaagttgttcgcgtccggaagcaatcctcaaagctccacgtgccccctgggtggttctaaacggacaacaatctctggtagctggtcctgtcaccacggtgatctcccagct

SEQ ID NO: 2005 - DNA, 425 bp, unidentified
  source 1..425: mol_type = unassigned DNA; note = Description of Unknown:Locusta migratoria sequence
aatatgataaacaaattagaaaacacaaatgtaacaatagtaaatcaacctcgcgacatgacgcgtaaataaattaatagaaaaagtaaacaaagaaattgatgactatgcaaaaaatttcggtatgtaaacttgattgatgtaagcaagttagagagatctatgcataccagtcatggtcttcatctcaattacagtgggaaacagttcttagctgaagaaactgtaattcagtaaaatttaaccacaagaggtttaatctggaagctgtacaaagtactttggacaaatgggtagtaaggaaggaccaggtctcccagttgtcaaatacgtggccccagtgactgaagaaactaatgctgctgcaagacctgaagtcctgaagacgccagcccaacaccaaaatggttttctagacaaaataa

SEQ ID NO: 2006 - DNA, 610 bp, unidentified
  source 1..610: mol_type = unassigned DNA; note = Description of Unknown:Locusta migratoria sequence
ggggcccacagctcttttgtgggtacgtgtgtggcgcacggggccccgagccgaagcagccttccttcccgccccaggctgcttcagtccccccccccggtttatgccttcgcccggagacgggtgtcccgtgtgagtttaggtggtctcatgtaccagcttttttcttttctcggtttctcttctcctaacctttgcttccgcctttccctccttactgtactcttctagccttcctctcctcctttagtctccgcctcggcgtttgagactcaacctttcccacttccttcttctttccttctttcctctttcttcctccctgtgcgttcctgaaggccgcccacgcactcgctgcgtaacaggtgactgggtaatgcgtaagtcccagccccgggttggcatgtagggcccgcacgtaccccctggtaaaggccaggcccagggaggggtgattacccgagctgataccttccgaccgtgccgattggtccctccgtccgtttctcgggaggtgtgacctgaggtgtggacaatcacctaaggcgggtgagccctcagtgagggttccccattaggaaggagcgcgccatcggagacgccggtaatc

SEQ ID NO: 2007 - DNA, 176 bp, unidentified
  source 1..176: mol_type = unassigned DNA; note = Description of Unknown:Locusta migratoria sequence
ccaaaccatcactggaacaacaaccccactagaagcaactccataattgaagtacacagtcaacaaaaactgaactaccagcatcagaggcaactgctatgcctcagcaccactgacagcagcaacaggaccaactgcaacaccaacccaacattatcaccagtaacagcagctaa

SEQ ID NO: 2008 - DNA, 605 bp, unidentified
  source 1..605: mol_type = unassigned DNA; note = Description of Unknown:Locusta migratoria sequence
caaaacggcggacgactatagggccatcacagcgaagtttggggcgcttgataagcccttctatacatttccttctgccgccgacaaaacattgaagattgttttccgtggcctgcccagtaattacagtctggaacacataaaacaacaattgtcggacatggggtatggttttcgactccgctccgtgactcgggtgaattctggacgaacgaggaaagagacaccactggtcttggttgtcacctgtgacatacctcataacaggggtctctggcaagttaccaggatcgctgcgacgcctgtcaccacggaaaaactcagatcaaagcggggtgaaccacagtgctacaactgccaagctgtgggacacgtcgcccgattttgctaattacctccgcgctgtgtgaagtgcgcgggagaacacgccagccgagattgcacacggaagaaagaagacggcccacccaagtgcgttggttgtggtggggaccacgtcgcctcctaccgtggatgttctgtattcctccgggctgctgtaaagagccgcggacaacgtcctggggccactaggaaaccagcgacagtacgcccaggagtaagtt

SEQ ID NO: 2009 - DNA, 248 bp, unidentified
  source 1..248: mol_type = unassigned DNA; note = Description of Unknown:Locusta migratoria sequence
gggggatggtgttattcgcgtccgcagcattcctcaagctgcacgtatcccccggatggtgccaaacgaataacaattctggtagctggactgtcacaccagtgatctcccagctatgtcagctacccaccaaaatccaaatggaccttctcaggaccaacataattttaagaatatagtccagttctcagtgtttgtcattttaacgccgagggtttgagcaaatcaaaatgtgagtgtctaagtaa

SEQ ID NO: 2010 - DNA, 65 bp, unidentified
  source 1..65: mol_type = unassigned DNA; note = Description of Unknown:Locusta migratoria sequence
gggcgaaacgtcaggggaaagtttcatgtatggaccacggcatctcagcccggaagctttaagta

SEQ ID NO: 2011 - DNA, 420 bp, unidentified
  source 1..420: mol_type = unassigned DNA; note = Description of Unknown:Locusta migratoria sequence
accaaggtgctgctgcacagcaacaagtatgcaagtaaacctacaatgaatagtccttttcaggaccaaccaagctcagaacacccagctcatggtaacaacttaagaatatgtcacttgaacatgagtcgatttcatctgctaagactcagatctttcacgcctgatgctgaatcggtgtgcaattcaggaaccaaccaatctacagaaaagaaatcttttggatatgttctggctgggctataaatgtgacagtaggcattgcaacatatgtcagatccatttctctacaaaatcatcataagacaaacatcagagtctgtcttggctatagagatgcaggcacactattgcgaatatctacaaacctccgcttatttggcctaatccactgttaggtccttcatcccccagttgtgt

SEQ ID NO: 2012 - DNA, 539 bp, unidentified
  source 1..539: mol_type = unassigned DNA; note = Description of Unknown:Locusta migratoria sequence
cttcccaggggacacagccttgtagtaggcaccttcagtgccgggcgggagggcttgcgtgcttccgtgaagttgagagctgtgccggcagtagcgtagctactggcagggtcacccaagccgtattggtctcaactgagaagccagacgaagagtgtcccacaacatagggcagggagggctctagaggcgtagtgaagccagcttccctaggggaggaaaccttatacaaatcccggtcctccaggttgggggttgggcttgaggctaacaacctcttcctgtaaaaaaagtcaggttatgaaaacccaaagagcagaagcggacagatcaatagacgacgacatggcacggatattggacaacgaatggttaaaaagctgaaaactgatcttgaattggtacctggaatgttcgatctttatatagcccaggcgctctaaagaagttattagaccagcaggggaagctcaaggagagcattattgccatccaagaaattcgatggacagggacggggtattggaaaagaaggcact

SEQ ID NO: 2013 - DNA, 129 bp, unidentified
  source 1..129: mol_type = unassigned DNA; note = Description of Unknown:Locusta migratoria sequence
gggtgcaatgaaggagcctccccaaagattgcgacagcaagataaaaaaaaaaccgcaatcgggcgcaccccgggcaacgttgatcatcagcggctaatccttcaacaaccggaacggacttctgagaa

SEQ ID NO: 2014 - DNA, 458 bp, unidentified
  source 1..458: mol_type = unassigned DNA; note = Description of Unknown:Locusta migratoria sequence
ggcggctagcgtgaaaatacggaatgtgactccgcgaaaaaacgtgaattttagtgttaaaaataaacagtgtgtaaattgtaaagccgaaattcaaagctaaatgaacgtgtgtccagtttacagcttattatcagcgcactgaagatggatattacgaaacttaaagatgaaatcagtgaactaaacacatcaagatcgcgccatgatatttcgactctgtcggaaaagttggcggaagtaaagttaaaggatgcaaacaaaaagtgaaaaagcaagaaaacagtgaaacaaagaaaaktgtagtgcacgaaaattacttccaggttcttacagatacggtttgtgatatcgctgtgacaaatgcaagtaggccaaaacaacataaaaaacaaaacgaatccgtaaaaaacaatcaaagtgcaaataaacaaaatstaatacaagtgacagaaaag

SEQ ID NO: 2015 - DNA, 435 bp, unidentified
  source 1..435: mol_type = unassigned DNA; note = Description of Unknown:Locusta migratoria sequence
cagggacaagcatcttgcgtgacgtggtggcgagcatggggacccaagctggcctggcattgcttccccttacctgtgccaggtccctcctgttatctttcctatcgaccaccctcggtcaactcttgttcatttccgaccccgacggtattaagctatggagtcttcattttcctctctcagtgcaaggtaacaggaaaccaccactgacattattttctctagacgctcatggggtgacctctttgtaaaagatttggaggtaaagcttcccctcaatcggatctccgggaggggaatacaacgaggtttccagacataaggagagatggaacaggaaggaaggagaaggaaaaagaagaattattgaggataggaacgtggaatgttttgacccttttgcaggaagggaaattagaaaacgctaaacatgaa

SEQ ID NO: 2016 - DNA, 94 bp, unidentified
  source 1..94: mol_type = unassigned DNA; note = Description of Unknown:Locusta migratoria sequence
ggggacacagaaggagcctcctagaagatcgaaagatcgggcgtccctggaaacggcacacagccggmtaatccttctaacaccagaacaccag

SEQ ID NO: 2017 - DNA, 142 bp, unidentified
  source 1..142: mol_type = unassigned DNA; note = Description of Unknown:Locusta migratoria sequence
cctggtcaacggtctcaaaggcggaagaggaatcttagttcccaaggagaagagcggaagaactaatggagaaaaccatgaaaaataatcatttcggactaacaatccgatcttatcttggaatttacttcctccctgtaca

SEQ ID NO: 2018 - DNA, 421 bp, unidentified
  source 1..421: mol_type = unassigned DNA; note = Description of Unknown:Locusta migratoria sequence
gctaataagcataaacattgagcgcttggccaacgataagcaggagctgctctcggaatgtgcagaaatacaaatgtcacattctgtgcatcagagacccagacaccaattaacctcgtccaacataccaggaatgaagcttgtaattgaggtatcacacaaaaaaatatggtagtacaatctatgtagaaccggaccaaattataacatcagtgggctcaacaaacatgacaatttagaaattctaacagtggaaactgacaatgcacaataacaagtgcgtacaagcccctagccaaaaattcatattaatgaacacataattttagaacaaaataacaactgcttcatcctgggtgattttaacagccatagcactacatggggatatgaagaactaacaccaatggaagtcttgtag

SEQ ID NO: 2019 - DNA, 248 bp, unidentified
  source 1..248: mol_type = unassigned DNA; note = Description of Unknown:Locusta migratoria sequence
tcttaaacgaaaatggctaaaaactacggccaacataaatttcaacaaggcttgtgtaaagaataaatgtatcccgaactatatcaagtttaagatatgtaatccaaagtccaatgtaggtagggcagtggttgataaagcgcggaaattttggttgaattccgaaattaaattcctccataagaaaaaagattgtattagtgggcaattacttaaggcgcatttagaagcagctagtgcggtacaca

SEQ ID NO: 2020 - DNA, 411 bp, unidentified
  source 1..411: mol_type = unassigned DNA; note = Description of Unknown:Locusta migratoria sequence
cccctcaggggctcagcattaatttgctgagtacgggcttggcgaacccggggtcctgagccgtgggctgtgtcgcgccaacagtccgctacaccgtaagctctgtgcgtgcttcaacgaccatcgttcggcgcgacggtggaacgttgtacgtttcagagcccggggatcttggcttaatcgcccgggtcgcgaggacggtacaaacctctataaaaaaacctcaatctcaaggtgtgctacgtgccgaggagatgcatggctgttgaggttgaacagtcgctagcgagcaacctctgaggaacctgccgcacctcagttgtataaggcttacccaggcaagcggggctctgcctgggtggacctttagttccctagctgctcgtgggacgagaatgaaacgagcaaata

SEQ ID NO: 2021 - DNA, 783 bp, unidentified
  source 1..783: mol_type = unassigned DNA; note = Description of Unknown:Locusta migratoria sequence
tctcctggcgaataacaacttcgaaaaactacgggtatgctgccaggtatcaaaatcgacgtcaaatttttcgaagctgttattcgccaggagaaattaaggaatccattactctacggggaggaaatgtatcgtttttgcggaagtcagataagcttcgtagcagcagggtcaggttgcaatgtgcatgtcgtctttgttggaatgtcgtgataatagtgttgttccaacttttgccaaagttgtgcacatatcaattctcctgccgctggtcgcattaaacaacgtgcaggcttagctcttgtccgcgagaggattcattacacccgccgagaattggattttgtgtccaaggaattatttcggcttcatttgtacattgcctctgaaatttcggaattttcttgggactggttggacggtgcttcctggtcacaatccgattgggaatttcaaactgtaacggcccggcattcggcgaagtttgaacggttccgtagctcagggtctgcttttacaactcgacgttctgtgattaatctcacagagaaaacctttgacgacgcagctctatccgttctggggaaaggtttgaattttgcaccgacgcctaaacgtttacctgttgttgattttattagttctatcgaacaggctgtttttaaactaccttctgacattaaagaggaggttaggagggaagcttgtcgtgtgttgactagggcacgtccgcctgtgagtaatataacagcagctgaggcagctgccttacgttcacttagg

SEQ ID NO: 2022 - DNA, 299 bp, unidentified
  source 1..299: mol_type = unassigned DNA; note = Description of Unknown:Locusta migratoria sequence
tgcatgaacagtgtaatactttaagagcaatatttttggacctaaattcatttacagtaagtgtctagcacaagatggactgcatctaaataggctaggcacaaatacttgtagcaaagtattggagatgtatgtgtgtgataaaaacaagggaaactaatgtataggcagggggtgaaaatccagacaagaatacaaaaagactacaacctctgtgaactagagcatgtactagagatatttaaggaaaacaaagtaagtgccaaccaagtaatcagaaaaaagtgtattattatttt

SEQ ID NO: 2023 - DNA, 338 bp, unidentified
  source 1..338: mol_type = unassigned DNA; note = Description of Unknown:Locusta migratoria sequence
tcacatcagaaacctctacggggaggagatggttgaatcgtgggaagactggataaacttcgcaagaagaagggtaagctgctgagcgctcttgcttttttattgagatgtcgtagtgaaagtatcataccgaagttcgccaagtttgtgcattacattgatcgaaagtggccaataacatcaaaaaacgtgctagtcttgccctaataagggagcgcattcgttttactagaagacaattggatctcgtatccaaggacttattttatttacatctagaggtatcttcacggctgtcggctgcatcttgggaatgggttgatagctcttcgtgggct

SEQ ID NO: 2024 - DNA, 261 bp, unidentified
  source 1..261: mol_type = unassigned DNA; note = Description of Unknown:Locusta migratoria sequence
ttgcttgtctcctaccgagcgcctccccaggtggcggatagggggatgctcaccagatatggtgggtaccggggaaataaaatacccggggtggaccaaaactagcacaagggcacgacggatccatatgtcagtggcggtaccccaacagcgtctgttccacatgtcagtggcggctgatcagtatcctctgtggctaactaccatagttgtaacacggagctcgctccactcaaggttgatagcctctgacagtcaatc

SEQ ID NO: 2025 - DNA, 600 bp, unidentified
  source 1..600: mol_type = unassigned DNA; note = Description of Unknown:Locusta migratoria sequence
caagatggcgtcaaaagttcagtgcagtgacacttcgatctcctcaaagaagcagttatacaactcttctgcttgtaaaaagtgcgataaacgcgtaataaaaggtattctgtgcgtcacatgcaaattttggatgcatgaaagatgtgctaaagtgaaccttaagttcgtaaatgacgagttkccatggtcgtgtggcgaatgtttatgtgatgaacggaatgaactgttaaacacaataaactcgaaaaatgaaatcatcaagatactaaataatgacgttgaagaacttaaaaaggtaatagttgcgttgaaagaagaaaatgcgaaacttgcaagtgatggaaatacacaaaagtgcgaaaagaatgtatcactgtgtggaaaaaaccaagaaaatccaagtgtttctaattctggaaatgatgcaacagtaaacaaatcgggtaggcctagcgtggaaaagtgacaaacaatgccacttatgcggatacaacaaaccaatacaaatggactgtcgtacagcacaaaaagagggacaagcaggaaaagaaagaaaaagagaacactaaaaacgacttcttaataatcggtgattcc

SEQ ID NO: 2026 - DNA, 90 bp, unidentified
  source 1..90: mol_type = unassigned DNA; note = Description of Unknown:Locusta migratoria sequence
ggggtacatgaaaggaacctccamgaagattgcaataatagaagaacaagaaatgaacagcaatcgggtgtacctgggcaacgtcagaag

SEQ ID NO: 2027 - DNA, 133 bp, unidentified
  source 1..133: mol_type = unassigned DNA; note = Description of Unknown:Locusta migratoria sequence
gggggacttgaaaggagcctcccagcagaatgtgctgttaagctagcatcacattcgggcgtcccctgggcaacggttttttcttgccggccaatcctttcaaatccagagacatcaaggcatagctagtgta

SEQ ID NO: 2028 - DNA, 545 bp, unidentified
  source 1..545: mol_type = unassigned DNA; note = Description of Unknown:Locusta migratoria sequence
tggcggcctgtatagatgtactaataagtggctctgtgaaaaacgattatgttgtaaatataaagtgtattttgtgcagtgaaaatgttctcagtggcattaggctgtgttcagtgactcaaaagtgggtacatacgaagtgcatagcatattttgacactataaacacaaaatgtaattgtggcgtaattcattgtgatttgcaattggtagctttagcaaaatatgatgctgagcgggaagaaaatgtgctatttacgatagaacatgacatattgatcgttaaaaagtactcaaacaacttggaaacattggcaataactcttaacgaagaacaaaacacgaaagagcatccatttattaggcctaaatggagctggtgttcgaaacagaacgagaaagaaaaacatcttggaaaaacaaatgctttagcagtagaagcagttgcgcctaaacaagcaaaaacaagaagtatttcgaagaaacaagaaaaagcaaagctcctacaaaatgaatccatcaacacagaaaaagagaaggaagag

SEQ ID NO: 2029 - DNA, 209 bp, unidentified
  source 1..209: mol_type = unassigned DNA; note = Description of Unknown:Locusta migratoria sequence
gtggagttgctagtctcccatcgggcacctccccaggtggcggataggggaatgctcaccagatatggtgggtaccggggaaataaaatacccggggtggaccaaaactagcacctactgccttgtagttaggtattggattaccaaaggctaaaggaagaaaaccttgatcaaaaattacctggccctccaggttgggggttaatgca

SEQ ID NO: 2030 - DNA, 1068 bp, unidentified
  source 1..1068: mol_type = unassigned DNA; note = Description of Unknown:Locusta migratoria sequence
gccatagccggtcccaagcccggttgagaaaggaggagggggaggagtaacacctcgttaaaaaaccttggttcacctggccctggtgatagcacctcgtgagggcccctgccagggtacggtgaagacctcaacggcagtgaaggcggagatgaagatcatcggtacggcggaactggcggaagaggcagccctaatccactagcgtctgccctggaatccagcggttagtggtcagcgtctgttcacctagttggtgcggctgctcctagttcttcttgatctcaacaatcaagtcgtaaacatgtgaccttcgtagaagatcaccaaaacaagtttcaacttgaataagcatgatggaacaaaaggaaagaattccactaccccaggcatcagtctctagactgaattctcctggtcatcggatctgggggaccaggaacttcatgcgcagaagagtcggagcttctcaaaatctctaagaccaaaacagaaaaacttcataggaactctcaacacaaacacactctcaaaagtaggtaaacttaaacaactcacaaacactgtggaaaaattccacataaaaatccttgcgattcaagaaacacgatttaccgacgaaaatcattttgtacaggaaacttcagaatctacaaaggaaaacctgmaatccagttgaacaaaggacccaaacaatttggcacagcttttgttgtgcataaatcaattacagactcaataataaacttccattcaacatcagaaagaatatccacaatctcattaaaatctggaaacaaggcatacacactgataaatgcacacgctcccacaaatgattacaatagaaaagacccacaggtaatagaggacttctgggaactactggaggaaacctcaaataaaattcctgcacatcatgtgaaaattcttttaggagatttcaatggacaactcggcaaagagaaaaaattcaggaaaacaacgggaattcatacagctcacaagaggacaaataaaaacggcgagagactgataaacttctgtgaaaattttgatcttaaaatc

SEQ ID NO: 2031 - DNA, 376 bp, unidentified
  source 1..376: mol_type = unassigned DNA; note = Description of Unknown:Locusta migratoria sequence
ctggttcactttaggatagtgctgttttactattaatctcatacttacattattaattacggtaccatattaggtttaaattcaattttatatagcgttggtctcacgcatcattggcaattgctcgctctactatcgatattgttatctttatttagtgttgttccgtgcagattacttttactgtgcttggcgagattctcccccccccctcagcgccccgccctcggcgaacggccggcgaccttggctgcagcgcctccctgtccctcccctgtcctgaacccacctgacctgcttcgctctctctctctgctgtcctgcactcctcccccgaccccccggaccgctagccacccagccacgccacattcca

SEQ ID NO: 2032 - DNA, 1764 bp, unidentified
  source 1..1764: mol_type = unassigned DNA; note = Description of Unknown:Locusta migratoria sequence
tagttattctcgcatatttgataaatactgtttgatagccttgtctgtggctggttttcaaaacaagtcagagaccttactacagtcgttatcagtcagtccagtgccagctgttgccagtgtcacatcgtaaacagcgctaagtatctaatttaatttgtgtcaaatttaatttgccagtctagttcttcattttcgttagtacttctgttttaagaggtttattctcgcgtacttggcagatttcgtttgtgctactgttttaatagtttattctcgcgtatttgataagtactgttgggcgcgtcagcagcacacagtcagcagcaccagcagagttacagctaagcaggagcgaactattgtgacttatttgtgggctgagcagtgtcaatttctataaactcgcgctagtaacaagatacttaactctctacaggcaattgttgatttgttaggatggataggatgtgtgactgctgcgtacggacgcaggaggagctggccgctgttcgcgagcagctgagcgtgctgttggccgcggtcagccgtcttcaggctgctgcctcggagtgttgcggcagtgggggctctggtgcgtcgcatgggacaccacaggtgttacatgcttcacccacggtccctgctgtcgggacatcttcgcgcgtgccggacgcggttgagccaccctctcctcaaggggtgtggcgggttcaacggcgttcgcgtcgctcggggcgaaaggtcaatgtggaggctggccgtgcggcgtcgcccgctctgcctgtgagtggacatgtggccgctccttcagcagggtccgagcaggcacacggggggaggggtwtattagtgattgggagctccaatgttaggcgggtgatggagccccttagggaaatagcggaaaggtcggggaagaaggccagtgtgcactctgtttgccggggggtctcatccgagatgtggaggaggcccttccggcggcgacagagagcactgggtgcacccgactgcaaattgttgctcatgtcggcaccaatgactcctgccggctgggttcagaggtctcctcagttcatacaggcggttggcggagttggtgaaggctgaaagcgtcgctcgcggggtggaatctgagctaactatttgtagtgtcgttcccagaaccgatcgcggtcctctggtttggagccgagtggaaggcttaaaccagaggctcagacgattctgcggagatctaggctgcaaatttctcgacctccgctatcgggtggagaaatgtagggttcccctgaataggtcaggcgtgcactacacgcaggaagcggctacaagggtagcggagtacgtgtggagtgcacatgggggttttttaggttagagaattccctccctaggcccgacaagacgcctcctgagccgcgacaaggtagcagtaggcagaacacaacagggaatgaaaagatcaatgtagtagtagttaactgcaggagcgtctatagaaaggtcccagaactgctctcattaataaacggtcacaatgcccacatagtactagggacggaaagttggctgaaaccagatgtaaacagtaatgagattctaaactcagactggaatgtwtaccgcagagataggctgsacagtgaagggggaggcgtgtttatagcgataaaaagtgcactagtatcgaaggaaatagacggagatccgaagtgtgaaataatttgggtgaaggtcacggttaaagcaggctcgaac

SEQ ID NO: 2033 - DNA, 1259 bp, unidentified
  source 1..1259: mol_type = unassigned DNA; note = Description of Unknown:Locusta migratoria sequence
agtttttctggmtggatcaaatgatgtagcgasaaatgaaggaaaagacttgttgttatcattaaggaagaagctgcaggaactacaaaatacaaaaatcctcatcttttcaacaccatttcggcatgatcttaaatcctggtcatgtgtgaatgtctaagtaacgagagtaaatgaagaaaatttgtaaacacgttaaattgttgcttttgtaaacataattaacttaggtgaaatatttcatacagstcatkgcttccatctaatcactggaaagaagatgtgagtaatgaatcataaatctagccatgagttattatacacaaatcgataggtcagatcaataccacttagatttaagggaaattcttttttagaggtagaaaaagggctgagccaactggtttgcccagattcacactggaagaccagattaaagataagaataatctaataaatgtttgtaatattagagagaaatatagcagtaatgatgattgccctcataacaacaattattcatcaactttgtcatttaagataggctatctcaatattgaaggtatgagtggaaaacacgcaattttaaacgattttgcaaatgagaacttatttgatgcattatgcttaagtgagtatgggtgtaaaggaaatgaaatatcttttcatgtattagatgatttccatttagttaacagttttagcagagagcagcatattcctggggggtgtgtcaatttacattaagaaagcattaataaattgtagtagtgaactagatctagggttcttgtgcagtgagatacattttgaagccacaggtgtatgtatggatmatttaaaattgtattgtagctctttatagatcacctagtggtgatccactaatatttttaagaaaaacttgagaatttattcaatttctttctcagacctcagtggaagaaatatagttagtgattggtggtgacatcaagctgtatttgatgtaaataaagatgcacacactgtaaatatttaaaaccgttacgacaattcaacttcaattttacaaactgcaacagtctgcttgtcttgacaactacttacaaatgtaatagagagttactgtcctcagatgtagctgtttttgatttctcggaccatgacccagtttgggtaaaaataagtaccgataggcctaatatgcagtataaggagttcaaagagcctaaatagtcatcacaagaccaataacacaggaaaaactttcctaattc

SEQ ID NO: 2034 - DNA, 1314 bp, unidentified
  source 1..1314: mol_type = unassigned DNA; note = Description of Unknown:Locusta migratoria sequence
catgggctcagcattaattgctgagtatgggcttggcgaacccggggtcctgagctgtgggctgtgtcgcgccagcagtctgctacaccgtaagctctgtgcgtgcttcaacgaccatcgttcggcgcgacggtggaatgttgtacgtttcagagcccggggatcttggcttaatcgcccaggtcgcgaggacagtasaaacctctattaaaaaaaacctcaatctcaaggtgtgctacgtgccgaggagatgcatggctgttgaggttgaacagtcgctaggagaactctgaggaacctgccgcacctcagttgtataaggcttacccaggcaagcggggctctgcctgggtggacctttatatccctagctgctcgtgggaccaagatgaaacgagctataaactatgccaatggcgtctctaagcgaggaagatcaaatttcaatgccacgaaatatgacccccgatcgttcccttcccttggtacatcacgggaggaacatcgggctaaagatagggatgagttatactctccaaaatatctcatatgcagcagaacagacggggamagtttcatgacgacaaaacctcttttcttcgtagaaaatctggaggataagtatggtgaagtcgcgggaatgtcaaagatgaggagtggttcagtgctgatagaagctgcatcatccactcagtcgaaagcattgcttgcttgcgacaagctgggtgatgtccctgtaagcataacaccccacaaatcactgaacatggtccagggtctgatttaccacagagaccttcttctacagtctgatgacgagttacgcaccaacttagagcgacggggcatccacttcgtccggcgcgtgtataggggtctgaaggattgtagggttgccaccggtgctttcatcttggcctttgagggcgatacattgcccgaaaaggtcaaggtcatgatttaccggtgtgacgtaaagccttacatccctccccctatgtgatgcttcaaatgttggaaatttgggcatatgtcatcccgctgcamctctagccccacatgtagggaatgcgggtgtccatcccatccggacgctccgtgtactcccccgccaatatgtgtcaactgtgggcagcaccatccaccctgttcaccagactgtaccattctccgcaaagagtgtaaaatcatggaaattaagaccctggacagactgacatacactgaggcaaggaaaaaatatgaaagactccacccagtccgcagacaacttcctatgcgacagttacgtcgtcgccagccaccctggcgacg

SEQ ID NO: 2035 - DNA, 806 bp, unidentified
  source 1..806: mol_type = unassigned DNA; note = Description of Unknown:Locusta migratoria sequence
cccagggggctccaactaggaggcgcccgcgggaccccgagctgagtctgacattgcttccacttacttgtgcaggcccctgcttttatctttcctgtcggcctcccttggccaactcttgtttcttcgaccccaacagtattaggtttcgaggctggagggtgtctttcattttccaaacccttcttctacaactggagagtaaactccaaaaacaaaaaaatcctggtcctccaggttgggggttggcaacaggctaccaacctgttccagaaaactaacaaggtaaaaacgatataacaaggcctcggataggacggatgaatggaaatcgacccaagcaagtgaacggacagaatactggactacggattggaacctggaatgttagaagcttgcatcaagcaggagcaatacggagtatgacaagggaagtagaaaggtacaaaatggatgtagtagctctacaagaaattagatggccgaactgctcaaccgatgtgaaaactcaacattctgtatggagtttcagaagaaaccatacactggggacaggttttaagtaaggaaagccttatgtaaccagtactagacttcagtcagtaaactcaagaatctcttttttgactatagtactgggggacacaagcttgtcctgatcaactgaattcgaaggacgccttttatgatgactgagactgcaagtgacagtgtccaaaggatcacttaaggtgctgttaggtgacttaaatgccaaaattggaaaagaacaaatttttttgtggactccatgatgtaagcaatga

SEQ ID NO: 2036 - DNA, 228 bp, unidentified
  source 1..228: mol_type = unassigned DNA; note = Description of Unknown:Locusta migratoria sequence
cgtaccctgggcgttaggagaaatcctwacggcagatccttccatcacmaggaccaaaatcaagacgtatctcawccacaacggcttttctcaaagcmakmtctcgmagkaatatcactgaataaagaagtsmtactmtccgacagctgcagtaacacagcttgtkatattttactgctacaggagacccacagagggccacaacagcaaaggccaaaagtaaatgga

SEQ ID NO: 2037 - DNA, 682 bp, unidentified
  source 1..682: mol_type = unassigned DNA; note = Description of Unknown:Locusta migratoria sequence
ccccagggggcccacagctcttttgtgggtacgtgtgtggcgcgcacgggtccccgagccattgcagcctttcttcttacattcctgggctgcattacctcccccagttcctctcctcctccccatcctaattcctccccgtccctctcatctccccccctctctcggtggtttcctttaaaacggcacggctattcctatggttccgatgatggttgtagcaattttgatcttcgtcgttttcctctgttttcggcatagttcggtccccctcggggtttgacctccacaaaaattcacagttactagtgtgagccatttggggaagaactcccgacctagcccctatggcgtggatcccaatcctttcctttcccacttccttccttgccatagccccctcccccgctaggtccccagcacgtgtagccagtccgtgtgggggggggggggggctgttatgtacccttatggctgagccccctgacaacgcagggatcacactgctggtacctgagctgcaacctccccatgcaggccaaggagtcgatacccgtcctcgtggggtatcagggctcccggcaatggccatcgtgccaggtggcctttgctgtggctgggtggcgcccatggggagagccccggatcggagtgggtggtaccagggcggacgtttcgcacg

SEQ ID NO: 2038 - DNA, 335 bp, unidentified
  source 1..335: mol_type = unassigned DNA; note = Description of Unknown:Locusta migratoria sequence
ggtagggtttcaccctatcccacaatctaaacccacgcaactaccatgatggcacaactacggaaactagtaccccagccggttcaatccggggccaaaattttggttcaagtagggcaatggattctgggggccctacaccatcatgtttggatcagtcagaggatccttcatcccgcaaactcagaacgaaggagaaacatttctttggtacacttaacgtgaacaccctattgaaaattggaaaacaaaaggaactgtcaaagtacttgatgaatacaaaataaacttctggcagtcaagaaacaagattcacaacagatgaagtgtcagct

SEQ ID NO: 2039 - DNA, 134 bp, unidentified
  source 1..134: mol_type = unassigned DNA; note = Description of Unknown:Locusta migratoria sequence
ggggacaaggaaggagcctcccagaagattgtaccgtacatgtacagtcgggcgtcccctgggcaacggtaaacaccggcaaatccttccacacactgagctacgtctaaaccgacattgtattcagaatctga

SEQ ID NO: 2040 - DNA, 515 bp, unidentified
  source 1..515: mol_type = unassigned DNA; note = Description of Unknown:Locusta migratoria sequence
gaagatggctgccgatcagtatactcattttgtgcgcgccgttgtgaatagtaaaaatcgcgtgttcaagtgttctctgtgcgagaaatacaatgctatatgtgataatttatgcgtgccgtgtcacatcttaataaaaaacagtggaaaaaatgaacaggtaaatcctcgtgtaggtctttgtacaagtcttagtgatcagcgtggtaaacatggacatctgcatcaaaatgtggacgaaattctgagtgaattagcaacgaaagaaaaaattatcaacatcctgtgtgacgacatagcaaagttgcgacaggaatatcatattttcaatcaacaaacagtgtgaatacatcgccaaatataaattgtgctgagtttattaggcctaaaaagttcacgagtggtaaactacacgaaacggtcgcgcaagtgccttcaaataaccgtttcagtgtccttgaagakaacactgatactgttgatttgtattgaaaaacaaaagtttgtctacaaat

SEQ ID NO: 2041 - DNA, 331 bp, unidentified
  source 1..331: mol_type = unassigned DNA; note = Description of Unknown:Locusta migratoria sequence
ctcagtgaccgccggccagtgcacacgtgacagcagcagctctacattgtaaggtaaccggcttcttaatagaagcgacttattttcatttcgtgtgtgctttcttttacagttcttcaaactttagtgtgctcgcgtgtttatttattaagaatcgcgtttagttgtcagttcagttgttgatattttgatttattagctcgcgtatatatttttcagattcgccgttaataaacagtttagtgttaggttcatatttttcgaagctcactgtttatcaaacttctgtgtcctcagacgtacttacttggaacatacataggtttttaga

SEQ ID NO: 2042 - DNA, 416 bp, unidentified
  source 1..416: mol_type = unassigned DNA; note = Description of Unknown:Locusta migratoria sequence
ttaagacggccactgcacggaagattatggagaagggagccatgctattgtgagagagaattagttatacaggcaaaggttggatacatttcaggaactgttcccttgacatcgaagattgcagcctttccccccgggactgggttgatggagttacttcgccaactttgattgggaattttggatgcaagttcgggatgtcaaaattgatcgcatggtgccacaacaagcttcaacacaggaagttactgtacaacgttccattttaaatttcggagagaatttggacgttgcaactgtctgttttgggcaaaggactgaagttttgtacctacacccagtgactgggttgaagaagctgtacgacattcctatggcactgctgaagaaatgggaaacttgccgtgttctcttga

SEQ ID NO: 2043 - DNA, 427 bp, unidentified
  source 1..427: mol_type = unassigned DNA; note = Description of Unknown:Locusta migratoria sequence
gtctcccacaaggccaacccctcgtccacgtcgtgggagacgggcaacggcgcgaagtaagggattgtctgtaagggtgaagtacagtggagactatgcgagttccgcgaccgctacggcagctgtgaaggccttacaggaaccctgaaaagcggcggctaacggggctctggtgaagccgtgttaggcgtagctggccagcggtggattaaagcgtgctttcaagactaaaacaagcctcggatgtataaaagaaattactggacatgacacctctccagggacctcacgaaagtatgacggccaaaaacctgaagcatattggagacscctgaagacacaaaaaccaacaaagaaacaaaaactcagacttggaactctaaacatcctcacgctcactggtaaatgtgaagagcttgttgaccta

SEQ ID NO: 2044 - DNA, 306 bp, unidentified
  source 1..306: mol_type = unassigned DNA; note = Description of Unknown:Locusta migratoria sequence
ccaggcacaacattaccagacgtgaaagggcgcgctgcggtcgctgcgtgatgatccagacgtcgtcgtcctgccggcggataaggggaacataaccgttctgctaacagctgcggaatacaaggagaaaatgtataagctcctagatgaccctgcttacaggaagatcacgacggatccaaccagccgaatacagcgcaagacaattgaacttcttcggagtactttcacagacgaaacagctaagaaactccgtcctcgtgcggccgcaccaccaagactctagggcttccaaaggtacacaag

SEQ ID NO: 2045 - DNA, 464 bp, unidentified
  source 1..464: mol_type = unassigned DNA; note = Description of Unknown:Locusta migratoria sequence
aacacctacataccaagaaacaagaataaatgttgaactttacaaaattcatctggaactaggcaaccacatctctcagacatactcaatgatttaatgaatacagtcaaacaaaatacagaacaactaatcaaaatgggagaaacaacaacaaaaaataaacacactcctcaaacatagcaacactgttaaagatagaaacacacaaccaaaccacactttcacaaacgctagtcaacctgactgacatacaattcaccaaacaggaaacaaacctcttagaaaaaggacccaaatataatgtcaacacacatattacacacagaacaatagagaaccttgtcacagaaagtgaattcataataaaacaacaagaaagaaacacaaatttcaatgcaggcctcacaagagaattaattgcagaggaaattagatgcataataaaagaaaacagaaatgacata

SEQ ID NO: 2046 - DNA, 191 bp, unidentified
  source 1..191: mol_type = unassigned DNA; note = Description of Unknown:Locusta migratoria sequence
tattggtggattgagtaaccctgaagtgctgctgccggtcccaacccggataaaggaggagggttggcagccaaagaagccgtaaaagaaaagccgggtcacatctcaaggcacctctgaggctaactaccccagttgtaatcacgttgacgcctaggcgtcaaccsccaatataaatcattcgtttcagc

SEQ ID NO: 2047 - DNA, 321 bp, unidentified
  source 1..321: mol_type = unassigned DNA; note = Description of Unknown:Locusta migratoria sequence
gaaaccgttgcaacaaatcgaaaatttaggacgatttgtagcagttttgtaaacacacattcattgaagcaaccagttctgccaggagcactttaccggacatggactgcacagaaaccacctgggcaaggatgtgttggccaaagaaattctccatgtgataaaagctgcaggaatgaacagtcacgtaaaaattgcactgcctgcaatatgttcattgccaattacaaamgaaaagaagacggtaccaacagcatatgaagaagaaacacctatggctwcatctaataagtagaaagtacatcagcaccagcacatgaa

SEQ ID NO: 2048 - DNA, 1103 bp, unidentified
  source 1..1103: mol_type = unassigned DNA; note = Description of Unknown:Locusta migratoria sequence
ggggtacgaagaaggagcctcctagtagactgtgaaccaataagctgaaggacacagtcgggcgtaccctggaaacggtgaaaaacttcaccggctaatccttctaacaccagatcaagttagagccaaaaggaacatcaaagatgcaacggcctttatcaagaccaaccctcgtgataatctctataaatattgagggattttctagtcataagagtattttattagcagacatatgcaataagcataaatgtgatgtattattggtgcaggaaacacatcgggaaaccaccagccacagacctaaaattgcaggaatggagttagtcatcgaaagacctcatgacaagtacgggagtgcgattttcgttagacctgggctcaatgtaatatcagctgcattgacagagataaataacattgaagtacttaccatccgggcccagaagttctctgtgacgactgtgtacaaaccaccagatatggactttgttttcaatgaacctaacaattttacatatgaccatattaattttgtaatgggcgacttcaactgccatagtgaagcgtggggatacaatgagactgatgaaaacgggatacagcttgaatcctgggctgacagtaatgacctgcaacttattcatgacccaaaactcccagcatcgttcaatagcggaagatggaggaggggatataatcctgacaacatctttgtgagtaggaagttggcaatgcagtgtgtgaagcttgttgatcatcccatcccaagtacccaacacagacccattatttgtgttgtgaatgccatcgtgaagccagatgaggtgccctttcgaaggcggtttaatttcaaaaaagcaaactggcaacaatttcaagagcaattggatgaagagattgagaaaattcctcctcgaccagatgagtatggtagatttatcgatctttgaaagaggtttcaaggaaaaatatcccaagagttgccacacccgtacatccaaggactgactggcagcagtaaagccttgcttgacaggtaccagaagttgttcaatcaggaccctttcagcgaagatacgttggaggctgcggaagaccta

SEQ ID NO: 2049 - DNA, 554 bp, Lottia gigantea
  source 1..554: mol_type = unassigned DNA
ttaagtttaaccacctcaccctcatctccagcctgtaaaccacgacgtcataataatgagaaggataaatccaaatggtctattcccacactcaccaaaccaacagttatcattggatcttccaacatcagcaacatcccgttcctacatccagatacccaagccgaatcttaccctggtgcccgaattcagcatatcaatacattactctccaagatctctccaacaaccattccgaaaaaggtgttatttcatgttggcctaaataataaacaggaatcaggagaatccatacacagaagaatgctggaactcctcaaacttgccaagtcgaaatttccgtctgctaccctttacgccacacagattccttactcaaaggagctacaattagctgaacctcatttagtcaataacctccagaagttcaacagtctattatatcataaaccgtctaccaatgcccatactattcctcgcttcaatggagtggtcagtgtcatttcggataacatccactggatgtcccccactgcaaaaagtatttatttttc

SEQ ID NO: 2050 - DNA, 882 bp, Medicago truncatula
  source 1..882: mol_type = unassigned DNA
taatcctgccaaggccggtcccaagcccggataaaaggagggttgtgttaggcctcgacagccaaagtaaaactttgtcgaatctctatgacatggaccaaatgcaaaatagcgtgaatgctaggtcgttgcccggaagcaacgcgttgtatggctcgagtacagtgtcaaatgagcaagagccgctgcatcaccacctggatgtagtgaaaattaagcaagggttcccgcatcttcgtgaacgggtgcgggtaaagaagctagttcatgagaataggattcgttttggaacttgaaatataggtacacttacaggaaaatctatggaagtagtagacacaatgactaggaggaagatcaatttcatgtgcctacaagaaactaagcgggtggggaaaaaggcgaaagaattagatagttcaggatttaagctttggtatactggtgaagttagatcgagaaatggggtaggcatctttgtggataaggagtggaagaaagatattgtagatgttaaaaggataggagatcggattatagccctaaagattgtagtggaacaagacacctttaatgtaattagcgcttatgcacctcaggtagggttagaagcacaccttaaagtgaagttttgggaggagctagaaggcttaattcaggatatcccgttaggagaaagatttttctaggaggggatttaaatgggcatgtagggagtgtttcgagaggtttcgagggtttgcatggggggtatggtctcggggagattaatgcggagggtaaatccatcttagatgtttcatcggcttttgatcttactatagctaatacttgtttcaggaaaagagaggagcatcttatcactttcaagagtggggtctc

SEQ ID NO: 2051 - DNA, 694 bp, Melopsittacus undulatus
  source 1..694: mol_type = unassigned DNA
tctctttcacggacacccccttgtcgtggggaaagagcttgcgtgcccttgtgaggttgggagctatgctggtggtggcatatgcctctagtagggtctcccatgccagacaggtctcaactgaagggtcagacaaagtgtgtccatgggcaggatgggctcactagcctttgggcaaccatcctaggagaaggacaactctaacttcaaacccaggcagatggagctcgtttagccctgtaaggccatccatctaagagaaggatactctaatcaaacctatgacctgaggactttgctgtcaccgtccaagctcgctaggccctggcagataaacctcaggtgtaaagggtggggccagttctgcgcatgctgtgcctcacctaaaaaatccactgcacaggcccgaagggtttacccacacttgcaaagccctgtagcgacaggcgagggacgaaacggcaggtgataaggtgcactggaagycgcagacccaaccctgcatgcaggcggttcaggacattggtcgctcgagactgacccaggagatgacagtcttgtttggcaacatcctgaatgaccaagcagccttttttcaaggagagcactgcttgctccatatggagagaggcctagaaaaggtggcctaaccaaagctcatctccccctccacctggttggctagccgcggcca

SEQ ID NO: 2052 - DNA, 167 bp, unidentified
  source 1..167: mol_type = unassigned DNA; note = Description of Unknown:Mesobuthus martensii sequence
gccttagaggaaccgactaagatcaaaacctagtgtccaatccgtaccttcacgtggtgcagctgttagtactcaatgtttctttaacatgaggaacggacacggatgggctcacaccaacccgcattggccagcgtggtgtgttttggctaaaaccttcaagcata

SEQ ID NO: 2053 - DNA, 111 bp, unidentified
  source 1..111: mol_type = unassigned DNA; note = Description of Unknown:Mesobuthus martensii sequence
aactccgcccaagaagccatatagctgactggccagtcccaagcctggataaaggaggagggttggcgtcaggaagggcatccggccgtaaaaacaccctgccaagtcttt

SEQ ID NO: 2054 - DNA, 53 bp, unidentified
  source 1..53: mol_type = unassigned DNA; note = Description of Unknown:Mesobuthus martensii sequence
ggaacgtccagacactatgggccccagggaaactcgaactgttacgacatgaa

SEQ ID NO: 2055 - DNA, 61 bp, unidentified
  source 1..61: mol_type = unassigned DNA; note = Description of Unknown:Mesobuthus martensii sequence
  misc_difference 60: note = a, c, t, g, unknown or other
ttcttcgagaagaaagaacagtgaaaatggacatggatcagccccaacggacggacaaana

SEQ ID NO: 2056 - DNA, 142 bp, unidentified
  source 1..142: mol_type = unassigned DNA; note = Description of Unknown:Mesobuthus martensii sequence
tggggaaagcaatggtgaactaccctgtaaaaacctcacctcgaaattctatggatcaagaccaaagtgttatcgatatggtgttggacggtgggcccccgggctggacaacatcgaccatgctactggggaagagcaaagg

SEQ ID NO: 2057 - DNA, 2726 bp, unidentified
  source 1..2726: mol_type = unassigned DNA; note = Description of Unknown:Nasonia vitripennis sequence
agaaaagtaagaaggaaagaactggagaagaggcagaagaaagaaacgcatttgcaaaaggagggaatgtgaaaagatcaccaattgagaaagagaagatggaagaggaggcaatcgggtcgttaaagtgcactatgaatataatcctacaaaaagtggagaagatgagtatgaaaatggataaggaataggtagaaagggataagatgatcgagaactgggaacagaaatatattggactggaggaaaaaatgaacagaaaaatagaggaagggctaaaaggtatggaaggaagactgtgagaagaaggagaataaaggaaaagaattagaagagaatgcaaggaggcgagagaaaaggaggaaagagagatggaaagaaagaatgggaatgagaatgcgaaagaaaagaagaaaaaaagaaattgaggagatattagggaagatagaaagtctggaaaaaggggaagagatagacaagggtagagagagtcaaccaggggagagagaggataagggaaaggtaacggaaaaggagagggacagaaagcagatagaagaaatggaatggaggatcgaggaaggagagaggataggaaaaagaataatattataatagcagggtggaaagaagaaaaatgggatagaaagacggtagaagactggatgaaaaaactcgaagtataggttacgttgaggaaaacggtcattgaacgggaagatctaaagaataggggcggaatgtagaaactgggaagaaaaaggagatatcatgagagagaaggctaggttacaagggtctgatatatttatagacaacgatctaacatggaaagagagaagaaataaagaaaaactgagagaatacgcgacaaaggaaagaaaagaaggaaaagaggtcaagataggatacaacaaactatggataaaaggcgtagagtatttatggaaggaaagagaacaggaattttttcggagaaagaaaaggacaggagaggaagaaaagaggggagcaaaggaacttaaggataattaattggaatgtagcgggaataaagtgagtagatgagaggacctggggctatctaaaagggtttgatgtaatttgtctgcaggaaacatggctggaagataaagaaggaaatttctgggaaaagaaattaggaggttatgaagtcagaattagaaatgcaaagaaagggggagaaagagggagagtgaaagggggaatagtgatggcggtaagacagggaacgaaaacagagagaatagagtggatagaagaaaagacaaacgaattcataggagcaagaatattaggaaggagagatatatggtggataggtacggcatacatgagagaggaaaaacaagaaaactttaaggagatagaagggatgacggaaaacgccagaggtgagaaattgatatggtgcggagacatgaatgcaagaacgggataggaaggaggaggagtcgacgaggaagaaaacgaagagaacagggaatcgaaagatgaaaagataaacagagaaggggaagaacttctggaaaaaacaagagaaatgggacacagtatattgaatggaaataccgaaggagacaaaacaggagaatacacgtacataggaggagcaggatgctcagtgatagattatgtgataacaaatgagcaaggaaaaagagaggtacaacgcaatagagatagagctgggaaaaacactcgggaaaacagatgaagagaaagacaaaatcacagaaagagctatatggactgaaaaagcaataggtcaattccgagaagaactaaataaaggggaagaggaaacagaatggacagaactaaaaagaaaactagaaaaagcaatcagaaggaaaaagggaagcggcagaaaaagaaagaaaaacacgtggtgggatgaaaaatgcagactcagaaagcagaggtaaggaagttaggcaaggcgattaagaagggagcgggaaggaaagaatacgtcaaagcaaagagagactggggaatattagtagaaagaaaaaagcaggaagaaatggaaaaaagaataaaagaggctggagatagtaaaaccgggagaaaattctgggaggtggtaaaaagtaggagaagaaaaaagaggacaagatgcagcagtaaaataaagaaagaggaatggttaactyacttcaaagggcaactaggagaagagacagaggaagatttgggaacaagcayacaaggagaggatgaagaaggagakagagaggataaagaagraagaataaccgaaaacgaggtgaggaaggcaattagaaaaatgaagaagggaaaagcgccaggagcagacggactacaaaatgaggtatggatacacggggaggaacaggtaataggagaaataactaaaatactgaataacatatggaaagggggaaaagtaccagaggaatggaaaacgggactaataaccccgcttttcaagaaagggaagaaggaggaagcaaagaactacagagggataactctcatggacacagggtataaattatacgcagaaataataagggaaaagatggaaagggagttagagggaagagagatgcttgacgatacacaaatgggtttcagaaaagggagaaggtacggcagacgcaatttatattttgagtaaagcaatagaaactgaactggataagaagggaggtaaagtctacgcgtttttcgcggat

SEQ ID NO: 2058 - DNA, 942 bp, unidentified
  source 1..942: mol_type = unassigned DNA; note = Description of Unknown:Nasonia vitripennis sequence
tggtgagtacagttgacagctctgctgatccatcatttttctgtactgcttttctgctgcttcttgccttcgggccctcttctgttgtagatagttgcacgctcctttttgcaaccttcacgtcgatacataaatcgccgaaggctgcaatttttctctgtcatcttttctactgcaaactttctacacggctcctaacctacaaatctgcttggcttggcttggcttgtttcctcacttgcacggcgtctctttctctccgcaatcaacatcgtggcgacatctgctgcatcgtgggagaactttcaaggcgacttcacactgatcgaggtcggtactttcacgctctttccactaacgctccatctagccgtaagagtcacaacacctactctttcactccgtcgataacttatcatcctcctacaaatatctgctttaccgactgctagtaagttatcgacgaaaaatgagtgcaaacggcgagaagagtgtggaagtgccttttcagccatgcagcagctgtaaacaacctatacagcacaaagaccccaagaagtgtgaattttgtggtctgcactaccacgtcaagtgccaaaacaccgttaacatcaaaactatcgtggtgaacgacaggcagattatagcctgtccctcatgtgcagacaacagcaacgccaagggtgccaaactgaggactaaatccacctctgccacaacatcagcaacgggagtaactgcaacaacagcagcaggcaagaatactcccaaacaacagcagccggtgaataagaagacgaggtcagcaccaccatcagccaacacgtcgagaaatccctcaccaacccgctcggccggagtaacaacacctacgccgtccgttgaggccgctttgagggacattcgcggagcactgctctcgacgacatacgcaatgctcaa

SEQ ID NO: 2059 - DNA, 77 bp, unidentified
  source 1..77: mol_type = unassigned DNA; note = Description of Unknown:Nasonia vitripennis sequence
acacagataaacttgcatcatagcaaaggcgcctcggccgcactggtcaggcgcatggctaagatgcacacaggcat

SEQ ID NO: 2060 - protein, 30 aa, synthetic construct
  source 1..30: note = Description of Artificial Sequence: Synthetic polypeptide
  VARIANT 20: note = Q, I, S, H, P, A, L, E, K, or absent
DIHATVPGPPBLLSLPPSLXWYTVLDLKDA

SEQ ID NO: 2061 - DNA, 438 bp, unidentified
  source 1..438: mol_type = unassigned DNA; note = Description of Unknown:Nasonia vitripennis sequence
tgctgtaacctaacctacaacctctcatggcttttctccttgctgcacggcgtctatttctcctcaaagcgatccacgtggagccacctgtcgggtacacggaacaccaccagcaacatcatcaatcacaggtcggtcaattctcacctctctcgattagcaccccatctggcttcgagagtattaagtctctagctctgtcgataacttaccacccgctactatcttacaacactctctacgttatcgactgccagtaagttgtcgacggagacttaacaataacatcgaaaatgagcggaattggtgtgaagaatgacgagtcgctcctcatgtgtgctcactgcaaaaaaacaaaaagagggaaaatgaagacctgcgagttgtgtgaccggcagttccacaccatatgtgtcgccttcaggtctataatggtga

SEQ ID NO: 2062 - DNA, 442 bp, Nelumbo nucifera
  source 1..442: mol_type = unassigned DNA
ggtgggagtaacagaagagataggggwtggtgaggmtgtagaagggtctaaggaggaaggggagmgaatctgggaattaatagtgatccttttcgagcagttggtagaggtggaaattcactccaggttgggatcagaagagggggctgaactkattgggactacttctaaggaaaaggagagggagattaataagagtggtgctggaactaaaaaggcaattaaaaaacttagcaagaataagaaaaaaggacaagaagtaactcagttaaaagcttcaaacaagggggagggagagaattctaaaagaagaagaaaaaagatgagtgaagtcgaaagacttaggtgtggtgtggattatgaaagaggaggcacaggaaggaaggagagaaagctgggttaaattaagctgagtcgtttgggcctttttgcttagttttcc

SEQ ID NO: 2063 - DNA, 379 bp, Nelumbo nucifera
  source 1..379: mol_type = unassigned DNA
gaagtttggggcaaaaggagakagaaggaaagggggaaagtagtggtcaagggtagaagggaagtaagaaagaagtgagaatgaagatactaagttggaatgtgagggggataggaagtgcgaggaaaagagcaacaataaaagaggtaataaagaggttcgacccagacattgtactgttgcaggagtccaagaggatggagtttaataacaggtgggcaaggagtgtatggaaagccagggggattagttgggtggctgctccctcttggggtgcttcaggggggatagtgacaatgtggaagagggaatgtggttgaaggcttggaggaactgattggaagatactcagtttccatgaagttcaaacagcaggagg

SEQ ID NO: 2064 - DNA, 249 bp, Nelumbo nucifera
  source 1..249: mol_type = unassigned DNA
  misc_difference 110: note = a, c, t, g, unknown or other
ggagatttgtagggaagattcagtggcagaatttgtgggaaagttggggcgtaaactgaagaacccaaatgatttaaaagcatttctacgaaaaaaggaggatagaaagntcgagaaaagaaaattgagcgaggttgagagattaagaagagatattgagggggataagaagtttggggccagaggggacagaaggaaagggcccaagtagattttggtggtgatagggcagattcttgcaaaattgtg

SEQ ID NO: 2065 - DNA, 72 bp, Nelumbo nucifera
  source 1..72: mol_type = unassigned DNA
agtgtttggagaggtagggggatcaattgggcgtttctgccctcatgggggtctgcagggggtgttgtgaca

SEQ ID NO: 2066 - DNA, 279 bp, Nematostella vectensis
  source 1..279: mol_type = unassigned DNA
tcctcgatgggatcgccaccttatcgtggtgagggtgtttgtgtgtcccaatgacctctagagctatgtcggcgggagtattttactcctggcagggacacccatgccgaacaggtcgaaaggtaggggccagacgaagagtgatccactggtcctccaggttgggggttgggcaaagggttgataaccctctcccataaaaaatagcttatcacagaaaccagaagcagagcaaattcacttgggaagaccgtggctgcatctcatgaaagagattgt

SEQ ID NO: 2067 - DNA, 18 bp, Nematostella vectensis
  source 1..18: mol_type = unassigned DNA
ggtcagcggtcgaccaag

SEQ ID NO: 2068 - DNA, 90 bp, Nematostella vectensis
  source 1..90: mol_type = unassigned DNA
ccaaaatggctgccacggcttttgtagctctgtgaatcttgtctctgttttcatgtgtcattgctagttgaaggcgtttgactgtcaaag

SEQ ID NO: 2069 - DNA, 519 bp, Nicotiana sylvestris
  source 1..519: mol_type = unassigned DNA
ctctcaataatgtgaaaaccttcctcactaccgctgctcctatagaacacaccttcctttacctcaatctcttcaacactttacacwcatcatgtctgactctcagcaacamctgcaacagcttaatcaagttwccgaccctccggatataggatctatgcaaatcgatgatacaagtatgcatacacaaccagctactttcctacaaactctactaacagataaataccttctgccawctctaaccaaccaaataccttccttaaacactctagatctagcagatgaagtactccataacmctactgacgatgacacatttataccaattacatcaactgataaatcacgtttatatgagccmtggaaatactctgtgatagttaagctwtttggcaaamggattacacaccaaatcatgcatgataaactgatgactctgtggaaaccaacagaggtcctcctctcattgatttgggttctgacttttttctcattaagttccaaagagaagaaaat

SEQ ID NO: 2070 - DNA, 60 bp, unidentified
  source 1..60: mol_type = unassigned DNA; note = Description of Unknown:Notamacropus eugenii sequence
aaattccttttatgatacaaatatggtwttgatacctaaactaggaagagccaaaacaga

SEQ ID NO: 2071 - DNA, 55 bp, unidentified
  source 1..55: mol_type = unassigned DNA; note = Description of Unknown:Notamacropus eugenii sequence
ggttactgcagcaggcaaggaatcccacaaaaaatgtacaaaaacatctgcaaag

SEQ ID NO: 2072 - DNA, 330 bp, Oryzias latipes
  source 1..330: mol_type = unassigned DNA
agatttgtttttattgacaattttaatcttttctggaacagaacctcattctataaaactgatgggattcaccccagtccactgggcagcaatgttttagctgcmaacatcagacactctgtccagacatcaccggcccccatcatgcccmcaccagtccagacctcctcctcatccgtgcagacatcggtctgtggaagtgactgactggatgtggtatcacccccccacattccccaaaaaactgcttcaatcgacagtgcttccttgccaccacctacaccccccccagtctatcccattaagaccattattacagacaggtcttcc

SEQ ID NO: 2073 - DNA, 99 bp, Papilio sp.
  source 1..99: mol_type = unassigned DNA
accggaggacgggcagcagcgtccctttcaaaaacggtggagaagtctgcgatcgccaacccgcctgccaagcgtggcgattatggcaaatccccccaa

SEQ ID NO: 2074 - DNA, 30 bp, Papilio sp.
  source 1..30: mol_type = unassigned DNA
gtacgtgcgactcgtgaktgctatgtatga

SEQ ID NO: 2075 - DNA, 296 bp, Papilio sp.
  source 1..296: mol_type = unassigned DNA
ggaaaagaagggagatattaaaaaataaaaggagtttgaagcaggtatatgttactgaagattttccgaaagaagtattagaaaagcgaaaagaattacaaataaaggttaaagaggagcgtgctaaagggaatatagcgtatataaaatatgataagatagtagtcaaagaaggccatttagtcaaagaaaaaaggaaaagagatcaatcaacatcaccagaaaatcaaagttatgccaaaaaactggttagcaataattcattgataaaggaaaataggaaaaacgctttcgac

SEQ ID NO: 2076 - DNA, 212 bp, Parhyale hawaiensis
  source 1..212: mol_type = unassigned DNA
ccagttaccctccgtggcggtcggttgtgacgtgtacggtgctccgctagagtagataaaatcagaaagctatagatttttctcgaaagcaataaactaattaagtgttaagcagtgtgccagcctggctataaactcgtacggaccgtgtgaccagcgggaccagtgaccacaccgtagctcgcttaataggggaagcgtagacgtcagtt

SEQ ID NO: 2077 - DNA, 404 bp, Parhyale hawaiensis
  source 1..404: mol_type = unassigned DNA
gcgtggcctgcgcgttatcaggccgcccccattgtccggccaccggacgccgctttgtttgtatgagctggctttgggtttggggctctgggtagcccctgagttggaggaaatgccactctaaaggcggatgagacctttttggtccaacggcatccctgagaggagatgaacaggctggtgccatagctgggtactcagtcttccgcagtctgctcctctcttccttccctcgggtagtaccacctgatgctcttttcctttcctttctcttcttcctcttttcggccaaagcccgtactggtgatggcagggtctggggcgcgtggatagctggccgctttcgttgctatcacgactgtcgatttgcttttttgtaatttttttgatgatttcctttgctt

SEQ ID NO: 2078 - DNA, 2175 bp, Parhyale hawaiensis
  source 1..2175: mol_type = unassigned DNA
cagaaaataatcaacatttgactgtggtgtatatacaaatacaagtgtagtgctaaaatgtgttcgattawactcttattcattgctctcgagtgctaccgctagatattttctccattgcttttggttcttttggttggattctgtggtcgaacttagaagacgctgatcctgagttactaagtaatattatattctatcaaattttcctctatcaatattttttccatcttcctcctcattgacttgcctgatcctcgccaaagggacaagtatgactcctgaacttcccgagtggctataagtttgccttactataggtgggattaaaaattgtgtgcttcggtctcaacttttttttagttttcaagtagataacaccttttcaagaacgctaatattttttttttcaaacctttctagagactaggaggtacactagcgaatatttattctcaaactccttacgttttggatcttcataaaatattattttttatttcttttttttctctcattcattttcttttctaacagactgtaggtttagttcagaaatgttctacatgaaatgaaaaaaaagagcttgaaacatatgataattgagttcattcctaacattgccaagataaacagttcggagctataggcccgatgttcgatctattgataattaccaatcttagcggcgtgaggcaaaacaaagtaacactccagagttcctggcaatttttgtttaattcttgtttctctactcctcccaaaactctcaaacgacttccaatagtcttcattttatttcaagacttttaatacatcttattgtagttttcttttattttgacatgttaaaatgcctaawtcgttgctgcaatgtacgtaaaaattagaacttgatctttttttgttcatctttctaggaacatttgtgtacggtgcaacgggttatatgttatatattatatacagttcctttgtttacctcgtcaaggaggttatgtttttctcgtgtttgtctgtcccttgtctgcctcttgtaagtcaccaagattactctaaaactaatgaacggactcttatgaaatttacagggattgttagacatgttgacagtaacagatgattaacctttggtaaaaatccgttcacctgtctgtctgcctcttttttcgtgcgccaactcaaaaggttccggacggatttttatgaagtttatatgatttgttgggtataaaacgtagagtaattgaccgaaattttggtgatatgtttgttcgactctgtgatgtgtttgttcgtctctgtgatgatatgtttgttcgtctctttgtttctcgctgtgtttgatcttgatattatgcttgttagcacaataactcgaaaagctgtggatggatcctcatgaaatttacaggacatgtagtaatgttaaaagaaataaaggattaaactttggtgaggatcggtatgttcgtttgggtgttgaacggatcttcatgaaaattacaggaatttttttaattctacagaaaggcacagctgattagattttggtgttgatacaaagaaattcatggtttcagagccaatttgaatttttcgtcaccgttgccttgcttggcggaggtatgcgctctagtttgtaatgaacttgcatgtagggcatcttattttactccttatcaaattatgtcctttcttgcatgtaggtttcttttcctttaatacattgtaacttactatagctatatctaggtagccttatttgcattttttacttgtttcataggaattgcttgggggcaggataacacgttaagatattttctttgtttttcatccttgtgtttgtaatttaactgccaagttcttatgtacactgtttaatcagttaagcatatacagtatttgcgatgtacagtatacggaggtgctactttgcatgaggaaacttattaacaaagttcattaatctagttcaaactgttcaggcgatttcgctcgaatcttgggccatagctttagtaacggccctatcgatggggcacgcgtgacgtttttgcattgatgcccctgtcccgaattcccggtaccgagtaactgttccatttctgtttttctccctttcctcttctcctttcatgtcctcttgtgccggcagcacaggcctacaat

SEQ ID NO: 2079 - DNA, 420 bp, Parhyale hawaiensis
  source 1..420: mol_type = unassigned DNA
ccacccgatgcctgtgcgtcttcgtcgtgggtggaccctgcgggagctctctgcgcggctgcgacggggacttccgcgggccaaacgcaggcactcatcgttggagtggctacgcgggtcgctgtggcgctccctttcttcctctcttactctcttctcccgctattctttctcgctgtctcgtgtttttttccttcacggacaggtcctttctgccgacgacctgcccgctcttgtctaggcagccttttccttacttgtttccccctcccgctgtcccttttctccccctatccattctactaagcggtgatcatccaccccaaccccggccccgcctgtccctgctcagtctgctcgcggaacgtcacccgccgggggtggtcttttctgtgttccgcctgcgcgcgctgggtccac

SEQ ID NO: 2080 - DNA, 568 bp, Pelodiscus sinensis
  source 1..568: mol_type = unassigned DNA
gggtggtggtggtcggggactccctcctaagagggactgagccatccctctgccgtccggacctggaatctcgagaggtgtgctgcttaccgggagctcgcattcaggatgtcactgagaggcttaccaagctgatcaaaccttcggatcgctaccccttcctgcttctccatgtgggaactaatgatacggccaagaatgaccttgagcgggttactgcggattatgtagcgctgggaagaaggatccaagaattcggagcgcaagtggtgttctcgtccatcctccctgttgaagggaaaggactgggcggggatcgtcgaattgaggacgtaaatgcgtggttgcgcaggtggtgtcgcagagagggctttggtttcttcgaccatgggactctgttccgggcgcaaggattgttaggaagagatgggatccacctaacgaagagaggaaggagcatcttcgcgggcaggcttgcaaacctagtgaggagggctttaaactaggttcgtcgggggacggtgaccaaaaccctgaggggagtgggaaagtcagataccgggaagaa

SEQ ID NO: 2081 - DNA, 458 bp, Pelodiscus sinensis
  source 1..458: mol_type = unassigned DNA
ctggtgccaagctgtactggctttcgcctttcccttgggttacatcagtggcgtggagagggggatcctgctgctgggcatcagccggttctcaacttacttgcccaggcctacgccctggagaggacactccggcatcgctttctgagcagtgacacaacacgggaagcagcggttaccggtattaagccactgcacttgattggcgtagagtgaggcgccaggggttgcttccgacggtgggagaggtcttcggatctcattgggcagctaccgcccgcctcaagctgggcagcccccagccaaataggtgctgcctcgccacggtccacttgctccattgggtgtgtggggcttagggaatcaccaacaggtggatcgttaaccttacaccaggcaaaacaaacaagcgacaaagtaatccagccttcaggctgggcacatggaatgtaaggacc

SEQ ID NO: 2082 - DNA, 395 bp, Pelodiscus sinensis
  source 1..395: mol_type = unassigned DNA
ggtttagacagttatgkgctattcctkttccgggtcctgtccccagcctcaawaactctgggaaccttaacgcctgkccatcagccctgagcgtgctgttgctgaatgccaggtcagtatcccagaagacagctgtcatccacgatttaattctgaatgaaggggctgacctggcttgtatcactgagacctggctgagagtggagggaggcgttgacctttcccaattgtgcccggctgggttctcagtacagcatcagctgtggcttaatggtcggggaggtggggtggcaattgtctatcgagataccatctcactggctagggtcttggtccaacaaagtgtcagattcgagtgtctgtacttgacgttgggtggccgggataggttgggt

SEQ ID NO: 2083 - DNA, 204 bp, Petromyzon marinus
  source 1..204: mol_type = unassigned DNA
cccaggtcgacgtagccctsagagkcttgggacacatcccggcagacgttsctagatctgaaatcgctgctaccctcaaaaacgctaagaaacccattagcaacatcagcaaggacgagcgtkttgaactctctcaattaaaaaacagagatgacataktcatcctctcagccgaaagggcaatgccactgtcatcatggataa

SEQ ID NO: 2084 - DNA, 10 bp, Petromyzon marinus
  source 1..10: mol_type = unassigned DNA
ggggaagaag

SEQ ID NO: 2085 - DNA, 344 bp, unidentified
  source 1..344: mol_type = unassigned DNA; note = Description of Unknown:Phanerochaete chrysosporium sequence
atgatctgtgcatacaaaaccttcgtacttttgccgagaaagagtcccttaaggggattcgttgctcccgacctcggggagacttttctccacaccaatcgcattacagccgacgagcgacatttcgcctctcgtcggcccgccagtcccttcgggcctggcggttgcaaggggtatatatcccagtaggaaaccgctgatgagtcttcacgacgaaagctcagcgcgacacaacagtgtcggctgccttcggttttcctgtgaagcattccgcgctcgccgctcactacgctcgcgtctcgcgccccccaaaccctaatcaaatcgagtaagcactcttcacc

SEQ ID NO: 2086 - protein, 31 aa, Gammaretrovirus sp.
DIHPTVPNPYNLLSGLPPSHQWYTVLDLKDA

SEQ ID NO: 2087 - protein, 31 aa, Gammaretrovirus sp.
TIHPTVPNPYTLLSLLPPDRIWYSVLDLKDA

SEQ ID NO: 2088 - protein, 31 aa, Gammaretrovirus sp.
DIHPTVPNPYNLLCALPPQRSWYTVLDLKDA

SEQ ID NO: 2089 - DNA, 273 bp, Rhodnius prolixus
  source 1..273: mol_type = unassigned DNA
cacgttgtcagagacgatcgtgaggatggatatggtggaagtgccatatttatcagtaaaaaattgcctttcgacccaatagtgctgaataatccattaaggggcagagttcagatatgtggggctaaaatcctatttaggagcgtcagtattacggtccttagcacttactgccgtcctgggcataaagcctcagtagaggaatggagtaatgtactaaatcaggtttcgggtcctcttattcttggtggcgactttaatgcgcttcatcca

SEQ ID NO: 2090 - DNA, 195 bp, Rhodnius prolixus
  source 1..195: mol_type = unassigned DNA
gaatccagaaatagagtatccaaagataaatttattaatagtaacggttataaacttttggattttttcgatagcttcagtcttatagtccttaacggtagatttgaaaatgatttggaaggcgagttcacctacattagcgaggttggctgttcggtaattgactattcctgcattagtattaaaggtattgac

SEQ ID NO: 2091 - DNA, 197 bp, Saccoglossus kowalevskii
  source 1..197: mol_type = unassigned DNA
aacagtggctatgcaataaacagtggctatgcaatgaatagtggctgtgcaatgaacagtggctatgcaataaacagtggctatgcaatgaatagtggctgtgcaatgaacagtggctatgcaataaacagtggctatgcaatgaacagtggctatgcaataaacagkggcagaggagacacaggctggtggaatga

SEQ ID NO: 2092 - DNA, 39 bp, Saccoglossus kowalevskii
  source 1..39: mol_type = unassigned DNA
aaagcacagataccatataattaaaaaacaatatactag

SEQ ID NO: 2093 - DNA, 48 bp, Saccoglossus kowalevskii
  source 1..48: mol_type = unassigned DNA
aagttaaatctagtgagtacttatggtgtaaaattgatagtaatttag

SEQ ID NO: 2094 - DNA, 126 bp, Salmo salar
  source 1..126: mol_type = unassigned DNA
ctctcccgagctttcgctcgcctccagcacacacacactgttggggcgagtgactctgaacttacaatggctagccccaagtcgttatatatttaattttttcttgtgcattttgctatttgcctc

SEQ ID NO: 2095 - DNA, 1034 bp, Salmo salar
  source 1..1034: mol_type = unassigned DNA
ctgtatccggtacaaagacaacaaaggaaggatggtaggcgtgcctttatcattgtggacaaactctttatagatggacagctattccgagacagctccataacaccgtggctgtactaaattctacagggacttcaggttacgaaaaaaagaaggtatgggaactgtaaaaatatctgaacattatgaagtggatatgaacacacacgtactcaattacatgcttgcttacacatacggacttatacatacacacacacacctgatctcgctctcttctctcactctctctttctctcttctctctctcttctctccctctctctctattgtcgagaactgttttataatttaatgtgtttattgtttgtctatcttttttatgtatttgtctacaagtttatatatgtttacaacaagcaaggggaagatatcagaataggggcattggggaataataacatattgtacggaatacatttgtactgtagtgaagccgtctctagagtaatgcaaggtctctttcatgatcatgtgaaacgtcaattgctatggaaatgctgggatgtgtttttcaattatgttaaaggtaattatgatgcaactatgatggtgatacgatatggattacaattatcatatgaatattaaggctatacgcactacatgttacacacatagacactcaaacatgcaaattggcagagttattatttatttggacatcacacattatagtcttactcttatacagacatcatacacactctcattatatcatatccaatatcatacacatcaacctactcagatttgctacacacataatatcttgtctcaattttctaacatctgtggcattggctcacaggcaaacaggcaagggaataaaacaaatattgctagaacctatttcttgaattctaaatatcagacatttgaaagctctagttttgaccttcataatacctctgatggcagtaactttacaagcactaattatggtcaatttagactgagaatagtatctagtt

SEQ ID NO: 2096 - DNA, 607 bp, Salmo salar
  source 1..607: mol_type = unassigned DNA
taaaaaaaatgtattttttattattattattttttttgattggggggtacgttcaatttakcaaaatccttgttccsatctcctaacccacaatatgtaattgtactgctgtctatgtcggttgctgatggtttatgtttagaccggcattgcttagcaatgtaatcttgtgatgctatatcttgcttatctcagggattgacccaagatgamgcttaagtgcgcaatatgtttaagttgcaacttattctgtttaggtttaatagatgctaattgaacactttaatcgcgggagcctcctcagttcagatgttagtagaagttctaggatagtgagaggtgaacgtacagttgggattttatttttgttttacctcttgttcgaggtcgcgccgtgcttttttggcatcggccagacaatgtgtttattatttttattttcatgtttttttctctcctatttgtgtatgcctgttaaatgtgggttgatggggggggtaaatgttggggaaagtagggggacagggtggagagtaaaggtgcttgcagggggggaggggtgggttggatactgctcgggtgtaggtgctacatatgctgatcgtga

SEQ ID NO: 2097 - DNA, 85 bp, Salmo salar
  source 1..85: mol_type = unassigned DNA
atgcttttttttgctatcgtacctaacattttaacggtttacamcgacaggagctttgtatttcattcattttttacsaggaacg

SEQ ID NO: 2098 - DNA, 133 bp, Salmo salar
  source 1..133: mol_type = unassigned DNA
agatggcgccgacagacatggcagctctgcttctagctcctaagcaactttgcagtatttgtttttttgtgtgttatttcttacattattagcccagaacgttttttgtgttattacatacagccggaaataa

SEQ ID NO: 2099 - DNA, 97 bp, Salmo salar
  source 1..97: mol_type = unassigned DNA
gcgccggaggagatggctgccgttttacggkctcctaaccaattgtgctattatgtggggtttttttcgcgttatttgtaacttattttgtacataa

SEQ ID NO: 2100 - DNA, 333 bp, Salmo salar
  source 1..333: mol_type = unassigned DNA
gcccacaggactggaaaacccacmacckgcccaggtgataggcccaggccgaggtwgctkttctggawagagccaagaacttgwgaggaacgtatatcttcctcaacgaggactgtcctgaagctgtgcgccagaagaggaaagagctgatcccagccatgaaagctgccagagtgcgtggggacattgcktacatccgctacgacaggctcattgtccaccctccctcccagaagcctggaagggatgagagagccaagcctatgggttcgtagcctcaaccccacacacacacacacacacacaccaattgattaatggactgctgaatgt

SEQ ID NO: 2101 - DNA, 650 bp, Salmo salar
  source 1..650: mol_type = unassigned DNA
tggcgccggagaagaaggcagacgttttacgtgtccccaaccgattgtgtttttttgttcgtttatttgcgttgtttgtaacttatttttttacttattttgtacataatgttgccgctaccgtctcttatgaccgaaaataacttctggacatcaggactgcgattactcaccacggactggcagaatcctttttttcctttaacgagtctgacgagcccgacgcgaacgatatactgctttctcgggaacaggcccagatccccgtgatttgcgtgaagaggaggcggagaaaaaggggccagagggcgggctgccttctgagaattcgtaggcgatcgaataaacccccacttccttccattctgctagcaaacgtgcaatctttggasaataaaatagatgacctacgcggaagattaaactaccaacgggacattcaaaactgtaatatcttatgcttcacggagtcgtggctgaacgacgacactatcaacatacagctggctggttatacgctgtaccggcaggatagaacagcggcgtctggtaagacaaggggcggcggactatgtatttttgtaaataacagctggtgcacgatatctaaggaagtctcgagctattgctcgcctgaggtagagtatctc

SEQ ID NO: 2102 - DNA, 447 bp, Salmo salar
  source 1..447: mol_type = unassigned DNA
atccaagatggtagccaatcagtctgtccgtttgtatgtgtgatccttgagatcagagttttaagagtttttatgttttaatgaccctgatcctgtttacagaagcaaatactttttatgtgaaggtggatgctgtatataacaactattatttttagatctcagtctctattttacgaaatttacttgtacaaagatttcggattgagaaggcctttatttttttctacacctttctggagttggagctcgccgagtcaggagcgtctgtctgcgcgcaaggcctgctacgcgagcgcaggtgcgcactgaaggctaggagcggagaagcggttatcggattggaaaacctgatgcaccgtgggcggtgggaaaatctacgttgttctacacaacgtctactggtcgttgcacacctgtgctgaaatacctctaaaaaccggcatt

SEQ ID NO: 2103 - protein, 31 aa, Epsilonretrovirus sp.
PLTAVVASPTTVLSNLAPSLHWFTVIDLSNA

SEQ ID NO: 2104 - protein, 30 aa, Deltaretrovirus sp.
PIPALSPGPPDLTAIPTHLPHIICLDLKDA

SEQ ID NO: 2105 - DNA, 81 bp, Schmidtea mediterranea
  source 1..81: mol_type = unassigned DNA
tatacaaacaccgataaactataccttcccaatcccgatccagaattaaattcaacactttcgaaggtttgtcgaaagatt

SEQ ID NO: 2106 - DNA, 146 bp, Schmidtea mediterranea
  source 1..146: mol_type = unassigned DNA
tttacacattgacattcgatagcaccgggccgaaatccggatctgataagttattttattcaaaacaaccattactttattttccagataataatgaattaaatgctgatcctatctttgagaaaagtttgcaagaattacgtctt

SEQ ID NO: 2107 - DNA, 10 bp, Setaria italica
  source 1..10: mol_type = unassigned DNA
aactccgcct

SEQ ID NO: 2108 - DNA, 593 bp, Solenopsis invicta
  source 1..593: mol_type = unassigned DNA
tttttgtgttctcatctttttttgtctggtcttgatcatttgtggtgatgggtgtcatttttgtattgaatagattttttattcttattttaatatatttgaaaataaattctagaggatatccgttttatagaagtagtccaataattaattccaaatttttttgttggaaagtaggatgagatagcaatagcgctctatccaccatgttatagattgttccaattttatggcatattgggtggtgagaaaaaaacgataaataacgaccagagaaagtttttttatggaaccaatcaatgatgattgtattgtcggttatttttaatgacaggtccaagaaacttaggctacggtcctgttccaattcaatggtgaattgtaatctattatgaaaactgttaaatgtctcgaggataaaattgagtgagttcggaggtgctgccataacaatgtcgtcgacataacgataatagaacggtatttctagatttattgactttaacgctttttcttctaaaccgtgcaatacgatattcgctataatgggtgataagggcgatcccattggtgtaccaaaagtctgtttgtaa

SEQ ID NO: 2109 - DNA, 371 bp, Solenopsis invicta
  source 1..371: mol_type = unassigned DNA
  misc_difference 242: note = a, c, t, g, unknown or other
  misc_difference 254: note = a, c, t, g, unknown or other
ggactttgcggcggggctcggcctggtccttctgaaccggggccgggtcagcacctacgtgggggccgggggggagtccatcgtcgacgtgacgtgggcctcccccggcgcccttaacagggtaaagggatggcaagtggagaccggctccttggaagaactgtctgatcacagacttatctccatggagctggtctcccccccccccccccgcggaggtgcgtgagcaacgccgccgcaancgggccggaaancgatgggtcctgaagaaactcgaccccgaagccctcgaggtcagtctcctcgcctccacttggccggagggaggagctgacctcggagccgaggaggaggcggagcgcctatgcgag

SEQ ID NO: 2110 - DNA, 365 bp, Sorex araneus
  source 1..365: mol_type = unassigned DNA
atccactacccagccaccgccaccctccaggtcgctctccggacacttgggccgaacctcacgcacgagtgaagccccgcaaagccaggtaagcagaactttgcgaccttgagctctaggttcaacgagacctggaaacaagatcctctgtctgcctcctccaatctccggcatctgagggaggggtccaacccagacgccccaccctacccaagataaatacctcactggccgacccccactacatccactacccagccaccgccaccctccaggtcgctctccggaccgcggacacaccataaaacacttaatacccattattcccgcaccatatttgatagggttcaaatttggtgtgaacc

SEQ ID NO: 2111 - DNA, 174 bp, Strongylocentrotus purpuratus
  source 1..174: mol_type = unassigned DNA
ggggcacgcaacaagagtcctatctcgcaccccggggcaacgtgtctgacacggccggttgtagcaactacttcgaagatcaagattaagattaagattgagaataataataatttagacttagacttagagtaatattaagattacgattaagatcaagaccaacataacata

SEQ ID NO: 2112 - DNA, 354 bp, Strongylocentrotus purpuratus
  source 1..354: mol_type = unassigned DNA
  misc_difference 50: note = a, c, t, g, unknown or other
tgaatgcgcctagcaggcagccgtctctgtttttgctctgaattttaccntgttttaccactgataatctgagtgtatgctgttttattgttgatcaactgtcatcttatgtacttgtgacactgcatgacatttttgaggtgatgtatttatatattagatactggaaactgtttttctaaattttgattcaacggatgtgtacacagtacatgcaagtaaagccattttacactgggctgttacacatgtactatactgcgtggatgtgtgaacgtcgttcgtgtgtgactgatttgcctatccgtggtgtgacattcatctacatacaatgaatagtcttgatacgcactg

SEQ ID NO: 2113 - DNA, 153 bp, Strongylocentrotus purpuratus
  source 1..153: mol_type = unassigned DNA
ggtatgcggctctttatgtaggtaaccccttttaattagctcagggaaaatccacctcccctgccttgcatagatggcattggaaggtgtagcgagcctccattgtagctatactttgaatttattcttattagcaagctaagaaacactgaa

SEQ ID NO: 2114 - DNA, 538 bp, Strongylocentrotus purpuratus
  source 1..538: mol_type = unassigned DNA
ggaataccatcagagttggaacatggaatgtgagaacactgtatcagagcggcaagctggaaaatgttaaacaagagatgatgaggctaaatgtcaacatattgggactaaatgaaacaagatggctgaataacggcgagtttgtgatagatgagtacagattgatttatgcaggaggtgaaaagcatgaaagaggtgtggggttactgctggatccagatatctcaaagagtgtgttgggacactggtgtgtaagtgatagggtgctcctagtgaaattacagggacacccttttaacatctcaatcatagtggtttatgcaccaacggcagatagtgctgacgaagttattgacaccttttatgattccttagataaagctaaatctcagtgcaaatcgaatgacattgtcattgtcctgggagacctgaacgctaaagtcggtcatggtacagagggcaagcagtaggtccgcatggaattggtgaaaggaatgaacgaggggacagatgggttcagtggtgtgagggggagaac

SEQ ID NO: 2115 - DNA, 434 bp, Strongylocentrotus purpuratus
  source 1..434: mol_type = unassigned DNA
ttctctactataatcagtgtttttatcacagcactgaatagacataatcaataaagtaaagtaatatttggttggttcaattagtactcttatcataagagtaattgtaatcgcctcattcttttattaaatgttaattgtttttgccatgcttagttgtaaccactgccttgtggttcaggttctctttagaatctaactaaggctaagggagcaaaccctaacagaaaaccatgccaccgtgacagcattgagggcgattgacgatacggaactcccgacatccttcgaccagtcactgcagggtctagtggttcacacccgtcctggcttgtcctcgccggtgtgaaactgccaccagttccccgagagagtgccgttagtaacttgcaagagctaccggtacttatccacctttgcaagcagccttcatt

SEQ ID NO: 2116 - DNA, 847 bp, Strongylocentrotus purpuratus
  source 1..847: mol_type = unassigned DNA
tagtatgtgacaattatcatgatggaaaattcgattgtccaaatgggtaaagcatttgaatcttgaaagaattgtacggttgtcactaatcctaaattgtcatgattgtattccttccaggggacatgcagtagaactttgtatcatgcaggaatgtattctttaccctcaaatgggcttgagacaagtattcgttatcctttgatcttgacgactgggattatcaagaccgaagtcctcactctttatcaatcattattatctgtatagcattccaaaaatttgagtctatctgttatattgtaattgactgaacttttttttgttttttgagcgggaatgtcaaaaccctctttgccatttaatattattgtactccgaaatgacgttattgctattaagcatcatctcagagtctgcttacatgcatacatttttctcctccgcacaacaaatctctttgttttgcaaaactcctgtgtcaatcacagaatccattgttatagactgaactagttttgatgagcgggaatgtcaaatccctcttttccatttaataatcgtactccgatttgtcattattgttatcaagcattttgtttcttcccagcccctctattttgcgtgtcaaaaatacaccctttactcgggcggtcgggctccgctctgttgctcctaagcaattattgtaactgtgaccaagatgggtcttattgtattttcatttgtattatattttgaagttacccgcacacttgcacttcgtacacacacaaacgcaccagcatcacacatgcagttgttcatcctccaaattttcggtactttacataatacgtatcgttaa

SEQ ID NO: 2117 - DNA, 101 bp, Strongylocentrotus purpuratus
  source 1..101: mol_type = unassigned DNA
  misc_difference 28: note = a, c, t, g, unknown or other
gctgtagtagtctacatgtgtactgacnctactgatctgttcctgccagcaagtaatgtatgtattattagtagtagttcttcataattagatattgtgta

SEQ ID NO: 2118 - DNA, 134 bp, Strongylocentrotus purpuratus
  source 1..134: mol_type = unassigned DNA
aactaaagcaacaatttgaagtctatcatcgcgatcttatcgccagtaggcctacatctctagccctctatcatcagaagagtttcctacgcagttcctggaagcacgtgtccttttcaggacaagccatcaag

SEQ ID NO: 2119 - DNA, 96 bp, Strongylocentrotus purpuratus
  source 1..96: mol_type = unassigned DNA
gaccatatttttgttttgaaatccctgcttgacatttacttgtctaaacggaagagaatttactgcgcttttatagactatagaaaagcttttgat

SEQ ID NO: 2120 - protein, 30 aa, Deltaretrovirus sp.
DLSSSSPGPPDLSSLPTTLAHLQTIDLKDA

SEQ ID NO: 2121 - DNA, 947 bp, Tribolium castaneum
  source 1..947: mol_type = unassigned DNA
ataatctttaacaaaaatttgctttaaaataaaatgtttgaaaaaccgaaattaaactaaattaattgtgtctaacactttagtagaggaaaaaggagaagacataaaagtcaccaaagtcttcagagtcgtttttagtactaaatttgcttatatgcaagcgcttaattaaggtaacagttttttggtttcttgcttatatctcgaaaacagttactcctatcaatttttatctttttactaaaattaaagctgataaaatttcctacaaaatagttatttgcatttttcatgtaggactaaccataagcgagatataagtttgaaaataattaatatttaaaaaaagtgctttaacagaaaatgccttgtgatttaaaatacacttaatttattgggtccaatactttattatttactttatttttttggtgctatgctaggcttgtgctaatgtgctataaataaggtgttacaattttgtgctgtaaataaggtgttgtgcattttgtgctataaacgtcagttttttaatttttcgttaattatttgtggtaataacttaataagtgactaaggtttaaggttatgttaaactgtagtcaatagcgttttgcatttcttttggactttcaaacatttatactttacacaaagagttatactgatataaatgacgtgatcaatgctcgtactataaccaataatccaattttgtgctactttttatgaacattagtttttacatgtaaatttcatatcagaggcgtacgcttctagaattgctgataataattattattctatcctctgttccttttgtgtcctttccgtggcctacctgtgcttgtttttttattttgagtcactacgaacggccgcgtagtgtgaagcgtgtgtccttgtctttattcccttgcctgattgtatttatcaactcactcata

SEQ ID NO: 2122 - DNA, 484 bp, Tribolium castaneum
  source 1..484: mol_type = unassigned DNA
attctaagcattgtaaaagtattttttatcatataatatgtatgaaatggttcaagaaaacacaagaataaccgcacgcagtaaaacaagaatagacaatgtttttacaaatatgacctttaataactttaaaatagaagttcttgaaccacacatatcggatcacatgggtatacagctaactacgagcataaaaaataatactaataatactgatgcagtaaaaaacgttagaattttaaatgtatatgcatgtaatcgcaatgatatcaatgctcagtggagcaattttataaatattttcaatgataaatttaacgaatgttttcctctaaaacaaataaaagaaaaaaaaacaagaaaatatttataaaaatgatcctaaagtaaaatattataaatattatctagatttgttatctgtgataagtaagtgtgacgataaatatgttattctttataagtatttgaaaaaaaatacgac

SEQ ID NO: 2123 - protein, 31 aa, Spumavirus sp.
NKELPYWKSNGFVNNKKKPLKHISKWKSIAE

SEQ ID NO: 2124 - DNA, 423 bp, Xenopus laevis
  source 1..423: mol_type = unassigned DNA
caccctcccccagggaagacacatctgcaagggctcccagggcactgttaaaatctgcacccatccgtgctttacaagtccccttctgccaacatctcccacaccagcagcctaaaagggacatccgctgcctaaaggaggaaaaactggctctctagcacacacagagccggagaacaaaacggggcctacctcctcgacagaagccggggactcgagtagtagaggtacccgggaccgagctggggcctgaactgcagggcagactgctggcctggtgacgtggggcacctcgggggagactgtgggcctagtggcggacaagatggcggcgcgacagtagattgcagcggcctctccggatcacaaggtgctttcttttttgtgttttttgtgcttttttactttgttttttgtgaagct

SEQ ID NO: 2125 - DNA, 927 bp, Xenopus laevis
  source 1..927: mol_type = unassigned DNA
ccccagacctgtgtgcagcagctcccagcttttactctccctatttattaagacctctttaggggagagcatttgctggggtgagcatttgcaagggtgctattcgaagtgattcatttacaagtgatctggaagagtttaacaaggagttatgaattgacatctctcttcctcttctgtttattacaggtaaatctgctaaaactgctattcccatctctgctgtggccctgttgtctgcatttttgcacctttattggtaaatctgctaaaactgctatgcattcccttccatctctgctgtggccctgttgtctgcatttttgcaccatttattggtaaatctgctaaaactgctattgcattccttccatctctgctgtggccctgttgtctgcatttttgcaccatttattggtaaatctgctaaaactgctatttccatctgcattacacctacactgtttagtgagttatatttatgcattgttcatttgccacttctaaactagtcacataatattgattataagttctccctgtagtcttgtaacttgtacattttacgaccccctataaactcctctccaaacaaactttgtaagtcaggttatctctgtattcatcctgagtcttgctctgctctcactctctgtcacagctgggtgatcagtttggtgtttgatcaattagaatcagttgtgattccccagacctgtgtgcagcagctcccagcttctactctccctatttattaagacctctttaggggagagcatttgctggggtgagcatttgcaagggtgattcgtttcgaagtgattcatttacaagtgatctggaagagtttaacaaggaaagctacaaggagagacaacacagaggactccattaaggacataacactgctaccggctagaaactgca

SEQ ID NO: 2126 - DNA, 24 bp, Xenopus tropicalis
  source 1..24: mol_type = unassigned DNA
ttgttttagacttaattctactag

SEQ ID NO: 2127 - DNA, 785 bp, Xenopus tropicalis
  source 1..785: mol_type = unassigned DNA
agtcctgtgttcaggagtggcccagcttgctctccctatatcttaagaacctcatttgggaaagcagcgcaagggtagcagcgcacaagtgaatccttccaaagtgaatcattcacaagtgaactggaaaaggagtttaacaaggagttaggaattgacaccctctctcttctgcttattctacaggtaattgctgcactatttccatctccactgtggccctgaatactgcatttttgctagtttattgggtaattgctgcactatttccatcttcactgtggccctgaatactgcattttgctagtttattgggtaatttagctagttctatttccattctcaattcccaatattgcatgccccctattcctgtgctccaccaatttgttgattttatgacccccatcgtaaactcctctaaacaaactttgtagttcagtgtatctttgggctgatcttcacttgtgcacttctctcatcctgggactcagctgattgatttaatttgttatttaactagctgcaatcagctctgattccccagtcctgtgttcaggagtggcccagcttgctctccctatatcttaagaacctcatttgggaaagcagcgcgggtagcagcgcacaagtgaatccttccaaagtgaatcattcacaagtgaactgaaaaaggagtttaacaaggagttcaacaagaggagcaacaggaggagcaacagcagaagaccggccagcctctgtccatttgaatcgggacccagtttactggatatacctgcata

SEQ ID NO: 2128 - DNA, 1348 bp, Zea mays
  source 1..1348: mol_type = unassigned DNA
gggaaaccataactgtggaacaattgcttaatccctttgctagtgttcaccaggttcatcctgacaccctggagctaaaggatgtggctgtttaccgatgttctgcttggtgtttagacccgtccttggtgcctgcttcaagggagctttggatcgtcgaacctccctttgccgttgatgggatgtcttctggcaggagaacgctgatgtatccaatccgcatcacattctcgtctgccccacggagggatggatccgatcctaagcttcatgctattacttcgggcggggatggttctggtcacgtgcagcagggatcccctcctttttcaagacctccccattcgagtgggagaaggggagaacatggtcattcgggacgtctctcagttcatgagcgtttgggcccaagagatgagaacatgcagcagcggagcattagctccggggtggcagtttcagatttgaggagaactttggaatctgatggggggaccttgtctcctaggctggtagagatgactgatgacatggttcttgtttcaccggtgaaggcgaagcagctgaaagtttattttcgtcaaagattcaagaatgtcctgaaccaggaggaagctggaactcccaattctgtcactgtgcttcctccatcccccacagacgtggcagctgctgacacagatccatctgagtatcctgtttcagatgttgacgctgtgttggcaactccgtctagaacattacctccctccctgtctgatgtggcagcagcacacgcggctccgtcggaggctaatgccttagacgttgatgctgagttggctgctccatctgaggaggacatttcagcaacaacacatgctgcgttggctgctccatctgaggaccctccagcaacaacacaagattctgtggagatttgtgctcaagagcaattcatcagcaaattgtcaaaccagatcacacgcgtattaccaatcccaaaatctgtcagacgtcagtcctctatccccctggcagttccaagacgcagccgacgtgtggcgggggttggagttgaatttaaaattcaggattggggaaaaagatctaagaaacaagctatggtggctctaaatattattgaggacaatgaaggattcagccgtcaagctttagatgactacgccaagctcttcaagaatactctttctcgtagtcatgtgcaggctcttgctgccctttttgggtggtctgtcccagataatttagaatatataactgggactggggatattaccgcaacaagcttattttagctggcgatgttgctgatattgtttgtcgatttacctctcattgtttctac

SEQ ID NO: 2129 - DNA, 353 bp, Zea mays
  source 1..353: mol_type = unassigned DNA
aatggcaagggtcttcgcatctgtctcaacgggtgcgaggggtggaagctagttgagccgactaggatccgtgtaggtagttggaacgtagggtcccttacaggtaagctaagagttagtcgatgcagcgagcaggaggcgtgttagtatcgacaaaatggaaggggcaaaaagcgaaggaggtggagaacactggtttactttggtactcaggaacagtggcaaacaaaaatgagtaggtatcctgattgataagaccctcaaggatggagtggtggacgtcaaaaggcagggagataggattatcctagtcaaacagtttggggatgtagtcttgaacattataagtgcat

SEQ ID NO: 2130 - DNA, 144 bp, Zea mays
  source 1..144: mol_type = unassigned DNA
  misc_difference 107: note = a, c, t, g, unknown or other
gtctagtcagcagaatcccccaaccctagtgaaacttgacagagtatttatgcacactggactgggtggatttgtttccaaattccttgcttcagagttctgcctcnaatgactcagaccactgccccctccttttgggcctga

SEQ ID NO: 2131 - DNA, 272 bp, Strongylocentrotus purpuratus
  source 1..272: mol_type = unassigned DNA
tgaatggctcagccgtacatacactacgtgcatgttctgtaatatttacatgtcttattcacataattgcgacttaattaatattttcctattgacattactgcttactaggttaatgatatatgttaattttgcaaacgagtattatttttgtaactgttctgtataaatgttataaacgatgtaaatatgttcattcagggccccatggaagaccactacttgctggtgaatgggctaccctgtcaaaagatcagaaataaataaataaa

SEQ ID NO: 2132 - DNA, 275 bp, Ixodes scapularis
  source 1..275: mol_type = unassigned DNA
tgatcagttgaagcgctgatgtagtatttgctttttgctctcacacctggtgatgtctctgttttgtgcttttgatttcccttgttaatctgagtgtttttcatacttgttaatatttttattctcagactggagaactacgttctccttctgcactcgtgtgtatgcgtgtttgtatgtgtgtgtttttgctcatttttttttagtgtgccagcactaagaccgattggttgttcctggacactttaataaacattgattgattgattgattga

SEQ ID NO: 2133 - DNA, 42 bp, Drosophila simulans
  source 1..42: mol_type = unassigned DNA
taaaattaaattatatacatacattattatatacatcataca

SEQ ID NO: 2134 - DNA, 428 bp, Melopsittacus undulatus
  source 1..428: mol_type = unassigned DNA
tgatgaagggagtggaacacctcccttatgaggagaggctgagggagctgggtctctttagcttggagaagaggagactgaggggtgacctcatcagtgtttacaaatatgtaaagggtgggtgtcaggatgatggagctaggcttttttcagtgatatccagtgataggacaaggggcaatgggtgtaaactggagcataggaggttccacgttaacatcaggaagaacttctttactgtaagagtgacagagcactggaacaggttgcccaggggggttgtggagtctcctacgttggagatattcaaggcccgcctggacaagttcctgtgtgatgtactctaggttaccctgctcttgcaggggggttggactagatgatcttttgaggtcccttccaacccttgggattctgtgattctgtga

SEQ ID NO: 2135 - DNA, 232 bp, unidentified
  source 1..232: mol_type = unassigned DNA; note = Description of Unknown:Blumeria graminis sequence
taagtcctggcgaaatagaggtttttcaggacaaagagttgtgaggaaggagggaatgcgcagggcgcttaattttcttggaacttatttctttatttatgttttacgtatagatttgacaagcaaactatgtacttaggttgtagtgtgtcccgagggagcatagacccgtatcacgcctattgggtgtagggcgtaagcctgatacgaaatgaaatcaaatcaaatcaaa

SEQ ID NO: 2136 - DNA, 27 bp, Esox lucius
  source 1..27: mol_type = unassigned DNA
taagcggaagatgatgcaatgcaatgc

SEQ ID NO: 2137 - DNA, 538 bp, Aedes aegypti
  source 1..538: mol_type = unassigned DNA
tgatgcgattcagaacgactggagttgaagaagagaggagagaagatcaccatattgtgcattgccagaataaaggtattgtaagtacaaatcaatgttttaaatatgtaaaatggaagtcaaacaagtatacgttatactgggaaggtttaatttaatggtaagtgaaattattacaaaacataatcaatagcaccaatcgtaattttcatatattatatatcaaacaggacacccaattgaagcaatatggatgaggagagtggaattgccaactccttatcgctaacatactgttgatagagggatggtccttaaaccccactcattgagacatccttttgtatgatgaaatgaccggtagatcggtgaccagtatctaggttataatttttggaatgccttaggtaaaccttaaataatagcaaagaactgaaacaatcaactggataacatcatataaaacggacagtctactgtctaacggctgtgccatgcaacaatgagtggttacccttacatacatacatacatacat

SEQ ID NO: 2138 - DNA, 89 bp, Oryzias latipes
  source 1..89: mol_type = unassigned DNA
taatttatatctttttactttttattatgtatactgtatttgtatcttttttctatggaccacatctgagtctgaaataaaagtgtgtt

SEQ ID NO: 2139 - DNA, 465 bp, Solenopsis invicta
  source 1..465: mol_type = unassigned DNA
taggttcatcaccccttctccttctattcctttcgttcgggccaccgaggctatctcgtttcggtctatattatttgtatctattctcaccgagatgtaacatcccatctcaaggctgtgacacgagttttggtgcttagaggtaatttgtatttgattttcgctttgacttatctcctctttttcccttttttgttgaatttacattactttatagaagtgtattttttacaattttatatctaatgacttgtacagcttccatttttattcttatttatttatttattgaattttttacttatattccgcttattcttcttttttaactatttaattttcattgttgtatgccacaagttttatagtcatcattttaacatctttctcttatttatttatttatttgttagcaaccaatcgatgttgtttcacaaaactcttgtctcggcacacgctctgtga

SEQ ID NO: 2140 - DNA, 216 bp, unidentified
  source 1..216: mol_type = unassigned DNA; note = Description of Unknown:Virilis group sequence
taaaataatgtatgtaaaatgttcgaaataatgtttaatttattgtattataattgttaattgttttttgtatcttggtgttagtgccctgaagacggtttgccgatgtgcaaccgaaatatatcggaagagaattgaataaaattgtttttcattgtttgttttaacaaacacggacctcgagccagccaacaaataaatattgaaatatggaaa

SEQ ID NO: 2141 - DNA, 322 bp, Strongylocentrotus purpuratus
  source 1..322: mol_type = unassigned DNA
tagcttttaaagctatcagggatccccttaacttatgtcgatcctgtaataatatataaaatgaagtatttgcggtttttccatgaacaattgcaactaactcccatctcgccttttatgtgcattttatgcaattttaatattgcagctttttttttttttttttttttataaaaccatatcactattaatttcatttcaccaaggaaagtcgctcgtgggcttgatttccgaagcccacgccaaagctatacacgaaattgactggcgcaaataatctttgagattgaagagcgccatctaaacgaagaaccaaccaacc

SEQ ID NO: 2142 - DNA, 243 bp, Xenopus tropicalis
  source 1..243: mol_type = unassigned DNA
tagcaataccctgtgccccacctctcacaactctggtcatgcccattcccacaccttgtgtctcaaccctttctccttgtagattgtaagctcttttgggcagggccctcttcacctcttgtatcggttattgattgctttatatgttactctgtatgtccaatgtatgtaacccacttattgtacagcgctgcggaatatgttggcgctttataaataaatgttaatgtaatgtaatgtaat

SEQ ID NO: 2143 - DNA, 150 bp, Vitis vinifera
  source 1..150: mol_type = unassigned DNA
taagggtgtggatagggtggctcttcgttccttggcaggctgctagggagcgtggggtgtttttctttctttttcttttctccttcttgtacttttagccactgcttcggtggtttttaatacaatctctttatttatcaaaaaaaaaaa

SEQ ID NO: 2144 - DNA, 257 bp, Schmidtea mediterranea
  source 1..257: mol_type = unassigned DNA
tagaagggaaacaaaggaaaaacgaaatgactggtaactatgaaggatatagctgaaagccgaaaggaaggctaagtcctgaaaccgatctacatcttcgatcccaagaggaactgtgggttaagcttgagccgacggaaaaagcgaatgcatgttagacgacgaggtacagtcacctcctcgtggtatttggcgggcaatgctcactaaattaactgtgagtagctgagaactgtatgtgtatcatgaaaaaaaaa

SEQ ID NO: 2145 - DNA, 257 bp, unidentified
  source 1..257: mol_type = unassigned DNA; note = Description of Unknown:Nasonia vitripennis sequence
tagtggggccataacacctaggccccacagtgtggcgatgtccatgtgtgtcgtccttatttatttatttatttgtcctgtcgagctgtttaatttattcacatgtatgtgttgtgtgtgtcgtccctcgtagcagttttattccgtccaaccagaggtcgaccaagattaaaataagcatggcttgaagcaggccaagcgccatgttctaaccccgttttaggggaagttacttaacctaaaaatacaacttttcc

SEQ ID NO: 2146 - DNA, 500 bp, Schmidtea mediterranea
  source 1..500: mol_type = unassigned DNA
taaaagggcaaaaagatatttcaagatgaattgtggactcatctaaaaaatgaccacctcgagcccaaataagcctagctatcatggttgctgatggaaacagtaaggcacctgatagctaactcttcaccgtgggtgtcttcagacactcacggtgacaagaaaggacaccactagtaaaaaccactagttttctgacacctcttgctacaaactctgtaaaaatcaaaaggatcgataggccgcgctttcacggtctgtattcgtactgaaaatcaagatcaaggaagcttttcccattttagtcaacaccaggtttctgtcctagttgagcttcccttgggacatctgcgttaccatttgacagatgtaccgccccagtcaaactccccacctgtcctcaaaacagttcaattgcatccaaagatcgcaattttttcactaaaaaaaattaacaaaagttaattatactgcttcattgagtaagtagaaaaacaatc

SEQ ID NO: 2147 - DNA, 328 bp, Taeniopygia guttata
  source 1..328: mol_type = unassigned DNA
taattcaggttatttagatgcttagtttatgtacctttcttgatttgtctaggattttgatagtgttattatttttatatttttgtacgattgcataatgttcttttttatacagctctgttttaataaaatagacgatacctagagacgttagggcagccacaagccagttaggtagcggatagtaggtaggaacagacttttactatttcataacgcgtcaattaccacctgatttggaccaattcacgggatttgtccaaggtggacgggccacctttacttaaccaggaaaaggaacatatataatttatgtgtgttcgataaa

SEQ ID NO: 2148 - DNA, 4172 bp, Aedes aegypti
  source 1..4172: mol_type = unassigned DNA
tagtaaataattgaagaagtatcaaaaaaaaaaaaaaacatacacaaaaacctacaaaatttacacacacgcataaacatattggaaaataacacatatgagtatgcacaaatacgaattatacatataaaaagatacgaaaacaaatatacatacacaaaaacatatgataactcacacgaaacactaatacactcaatcactcataaacacatacaaaataatcaataatgaaaattactctgaaaatacacaaaacatagatactaaaataaacacacacataaattacacataaacacatatacagtattgaacagaacatttgcaactttttcggttttccatacggaatggccggttttggtaggtttgatctcggttgtttgtgggccgaattgagtgagattttcacggagcattggatttcggcacgtgtttttgaatggtttttccgattatgggtttggatgtagtggcggtttgactgaagtgaaatttgaaatttaatacccctacacaaaaactgtcttcagcaaacttgttcatagcgtcaaaatagacaactttgctgaaaatatcatcaagctattctgttaacgtgttgagttatgtcaataaaaaaaaaatcgtaataagggtcgctttggtcaaaccattaatgcttttgaactcgtggttggggggatcagtcggaggcatgtgttgaggttcgggttgtgcctggtgttctgtgggggtttcattcggatcggtccgtggatagctggggtctggcttgccggggttggtcgtttcgtgtggggaccggggaggttgcgagtgttttgtcaaatactgtaaatacatacaagacaaaataacacaagcacatgtatatatatatgagaacacatgcagaaatagacattgacttataacacaaattaaagctgttttaaaaagataattactcaattttaataataaacacatagcattagtacaagaatgacatgcagtcatcagtcgtttgagttggttaaaagaaaataaaattgttcgatttaaaaaatgcaaggaatttgaatatcatataattaactagaaataataactacacttgtttactttcgaggaatgattagaatatctcgcgttcggtatcgtggctgtggtgatcggtttcacttcgtcgattttccttttaactaattacttggccgggcgactgtttttgactgctatttagattgagattgtccattgtcatgctaaatcgtaaagtgttaccaaaatctattgaacttcgtgtattaacccttactcgacgaagagagatcgatcactgcgggtacgcctgtatgatgctgaacgcaagttatgaatatagaaaactcttctcttcacttttgcatgggatgttttagattagcagtgtttgttcgttttactggtgattttagtgatgtcattgtgttgtgtgggtttttcttttatagccagtagattgttgcagagcgcccaaaggggttcagattatgatcatagtggaatttattattttcttgttataaataatataagaatataaagaataattacaattatcttcattgtacaatgcaaatcataaactgaactccttaataataaatgtctagttattttttatatgttaaccaattagaagttttgaagtagtacaataaagtagattagtaaatgtgtatatgccgaaaaaaagtcttaatgccaaccaaagttataacaaggttcagtcgtagcattaaaattcagaataacttgtcatgccgactgaatgttgtttataaaaatcaaagaagaataatcataataataaaaataaacatggtggagggaaatgatagcaacgagaagcatcataataattctatgagaaacttatagcaggttataaataaatatgatgattatttctactgttaacttattattcaaatctttaaaaatagttatagaatgaaacattgctattgcctgatatgaaattaaaataattgaaaaaacattaataaaatcaataattagttttgaattcaaaaaaaaaaataaataaatacaaatattaaaaataataaagatacataatgatttggatgatgtgagggaggatgggaggtcgttgctatcatttgtctgtatgtataaacataaaataaatgttaaaataaacaagtatgtataattttagtcgctattaactgatggatatactggtaagaatacatattcgtcttgtttgcgagcagtgaacagtaaattatacatctattgcagtttaacctgatgaaactacagagtataatgaccgttacataaccgaattatattaacactagtatgttaaattcaaatttctaatgaattaaatttcatttctattaaatttatagagaacaaaataggaataatcgatggatcgatgttggagctgcaaacagactaaagctgcatattgcacacggtcctctatggagttatatttcataatttcttctctctatatataaaacattttaggggcagcagcaggaaggtgtgagcatttaaatagtgttaaaattgaagctctgaaccgtatttctcttaggtacgaaaagcgttaaaaacaaaacgtaggatgtacggagtatcataatggttatattatattgtagtttattgtacgagaccttttagaacaataaatcgtcaattgggaaattcggatatgaagtggtgttgcacgaaagtaacatcagtagcaacagtgttgtcgtttcatacaagggactagtgtgtaatgttattttatgttatattgtgtagcgttgtactatatctactgttcataggtaataaataggtatacaaataattcctttggcgcataaaataacagataattcttattccttatagctactagtccagtggaggtgcacgaattacttatttataattgttttgttatactaattcattggcagaaattccagaagcgtcatggagtcatcggagatactaacataatcactgctattaatatttcagcagttctattccgaaaactgtaattcgtccttactctggagactacctaacgaggttcaattcatcacaatttaagaatggaaattctgaaacatctatattcatatcatatacaactataaattccattctatatattttattatagttatttcatttattatatgctgggtattgagagggtgcattagggcatcagagaagtcacagatggacgatgtagtagggtgtcagccgaaatctaggagaatgtgccgtaacatccttacactacatgctgctacttataaatgactttaatgtaattatctttgtttactacagtaggctatagcgaatgaaacgaagcgtcggatgtattattattttgtttgtactccatgaacatatggaagctggaattttgtttttgatgtatccggaaactttattaacatatcactgatttttttatttttattcaaattatttgtttattcttatcattcttctgtcgaccagcctaggagcatctgtagcacaaatattcaaaagaaaattatatgtcggccgatataatactgcatgctgtttcactgcgtcataatttattgtaactaccattttattttcatattttattatcatattattatatatatatacattataatcttatctactatataacatatcaatataattgaatttttcatgatttgggaagggagggagcatcagggcatcattgaaattacaactggacaatgaagtggagtgccaatcggagtcaggaggaaaagtggtagtcgttcacgtctagtacttttctctccaacagttgtgaaagatttgacgcgcccttcttctaacaaacctttccgtggaaagctcgacaagtaatgcaaattctaatactcaatctgttggatcatatggctggaaggagattctctatttcccgcgggtttcgcgtaagtgtttctacttacgggtccgccaccccccttttggcccttcatacagcgatatgttgaatgcagattggtaataaaatttgaccttactgttgagtggagccgcatgcagagcaagactcaagcaaggattggtggctacctacatacatacataca

SEQ ID NO: 2149 - DNA, 45 bp, Folsomia candida
  source 1..45: mol_type = unassigned DNA
taagtgtatttcatactttatcaatgtttatgttaataaataatt

SEQ ID NO: 2150 - DNA, 321 bp, Nematostella vectensis
  source 1..321: mol_type = unassigned DNA
taaaaccggatatccattctcatgttaattgttattgcatgttaattaatgtttgtctgtttgcacttgtttctatgttgacgtctgcctgtttttgtagttagttttgtcgttagtttttagttgctttatcaagatgtagtattagtgatgtcttgtatagtttaatttccaagtttcccctttgtatttccgtaaatgtctaacatagttttttttattattatcataggtacttagatatagggagggccatatattataaaactgtaaaaggttaatatgaaaccctcgttaaataaagtttattgtattgtattg

SEQ ID NO: 2151 - DNA, 181 bp, Aedes aegypti
  source 1..181: mol_type = unassigned DNA
tgagatgtccatattgaattactgaaatgtaatgagttaatgttagtattaagtagaaaataagaaacattgttagattatatgcttgctccctcgaaatattttacttttcgagtggctggacacagttaattatgtaacttttaaagctgcgttgttaaataaagcaaaaaaaataaaa

SEQ ID NO: 2152 - DNA, 59 bp, Aedes aegypti
  source 1..59: mol_type = unassigned DNA
taagtaaatcagtctgtaggaaatttatccaagacgttgcaaataaataaataaataaa

SEQ ID NO: 2153 - DNA, 70 bp, Caenorhabditis sp.
  source 1..70: mol_type = unassigned DNA
taacatgtaactatttgtttgatgtataagaggcctattggtctttcactcaataaactcatcatcatca

SEQ ID NO: 2154 - DNA, 219 bp, Caenorhabditis elegans
  source 1..219: mol_type = unassigned DNA
tgatctcatttcctcactcatttgtacatgatgtcatatttttttatttatttttttattattttctcatcaacttttcttggaaatcatttgtatcatctgacctcggacatgttccaatcgtgtcaccttatcattcacatttcttacctcatctcatttttattcctcattttgctcttaattttcaaggcaagaaatagtgaataaataaattaa

SEQ ID NO: 2155 - DNA, 43 bp, Caenorhabditis sp.
  source 1..43: mol_type = unassigned DNA
tgagcgaagaacggatcgactaagtaactaagtaagtaagtaa

SEQ ID NO: 2156 - DNA, 635 bp, Caenorhabditis sp.
  source 1..635: mol_type = unassigned DNA
tgaataccgtcagataagcccccaacataaaaataaaagtcggcgttagctaatcactaaaccggctcctcattgggggagagtatcattccggtgctctccgtttgggcggtagggaggagttgggtagcgacccggaagtatggatgcccaaccaccgcaatctgatctggcaatgtgtttcggatggtctctgtctctagatctgaaatagagctctggcctgaagaacacacgcgcggaccggttggatgccgacttgatctggagggtgcaaacctgaaagggaaagttgaaggccgtgaggctcctggcgggaaactccgtcatagtcagtggtgtgccaacacccgacgactatgacatagttggaggaatcctgatctgataataatcattgttcatataagggagggggatggtaaatacccagggtccgaaaccatcaaagcagctactgaccagcatagtagtgatgaacacatagaccctggggttccctgaactcgacccatctgcacaaacccactttgtacaaatgaaccaaactgatgaagagtttaatgatttcttacatcacagctagcggacctaccgtgaggtagactcccgccgctgtagcaggctcgccattg

SEQ ID NO: 2157 - DNA, 161 bp, Caenorhabditis sp.
  source 1..161: mol_type = unassigned DNA
tgatttttttttttctttctttattctccctcccccttgcccaacacctattttataattccttattcccggtttcctttctcaggtttagtctcgtgagggactgtacctgacctccagtgacattttctgtatatttaaatagttaaataaaatatcaa

SEQ ID NO: 2158 - DNA, 456 bp, unidentified
  source 1..456: mol_type = unassigned DNA; note = Description of Unknown:Copidosoma floridanum sequence
tagagcaacagatttactgtaatttaaatttgcgagttcgttgacttgtactggggtggggtggctgtagcgttgtgtgacttaaatatactcatgtacagtgtcacacttacactgaccgatagtatataagcacgatcgtaacttaagaagtgcgtatttttcgatctaccatctatcgtgatgcctatagtcgctattgtcgtggctatgtgagtgttcattattgtgcgattttcttgtaaagtattgatgacttgaaatataattgtttcatatttttatatttttataattgttatttagaaagttgtacctgatgagggccttgtaacgtggtttactgtacgggccggaacgttgtttacagcaataaacgattttgatggcatcacgaagagagtcattatttcttgataaaaattatctgcaatcacgagagccactgacgaacta

SEQ ID NO: 2159 - DNA, 153 bp, Crassostrea gigas
  source 1..153: mol_type = unassigned DNA
tgagtttcactttgtataacttttcctaactctataacctttatattaatatatgtttacctctgatcaatttatatgtatattttaatgttatttttgtcctcatgtaccatatgtttgaaatggttttgagcgaataaatgaacttgaact

SEQ ID NO: 2160 - DNA, 129 bp, Culex quinquefasciatus
  source 1..129: mol_type = unassigned DNA
taaatcatgttttgtttaaatttatgttttgataacttgactatatgtatgtttgtaaagttcttattagttttaagcaaccaaacttcattgagaccaccgggtcagatgatttcaaataaacaaatc

SEQ ID NO: 2161 - DNA, 314 bp, Culex quinquefasciatus
  source 1..314: mol_type = unassigned DNA
taattattttgttagttaattctccgattcattccctcgtttgtatttgtatccatcttgaacacatttatcttggtagttttcttttatttattttcagccgctaatcgccagaaaccgaactccttaaaaggtctacgccgatggagttctggagccagccgcatcaactttgtcgttacatttttatttaattttcaatgacatgtaatctacttaatttgtattgcacattgaaaagaaacagttttttcagtcagcactttgctggctttttctgtcaaataaaaacaatcaatcaatcaatcaatcaa

SEQ ID NO: 2162 - DNA, 64 bp, Culex quinquefasciatus
  source 1..64: mol_type = unassigned DNA
tgaagtggcatcccataggtgtggctgtgaaggagagcatgtcatgacggtcggcttctctaca

SEQ ID NO: 2163 - DNA, 27 bp, Culex quinquefasciatus
  source 1..27: mol_type = unassigned DNA
tagcgccaataaaagtaaagtaagtaa

SEQ ID NO: 2164 - DNA, 165 bp, Culex quinquefasciatus
  source 1..165: mol_type = unassigned DNA
tagatccagattagattttagttttttttttctcacccgttcagagaattgacaatttctttggctccaaatgtacaatctccttatcccttccttgccctgatacaaagtgtaaactaacaggatatcgttaccaaataaattacaattacaattacaattaca

SEQ ID NO: 2165 - DNA, 208 bp, Danio rerio
  source 1..208: mol_type = unassigned DNA
attgtgctgaacttgaattagatattggatatgtacaagtgtttactcgttgtttttggaaccaaggtgtgcagtatgaaatgtaatcttattattgtttttatatgtatgtaacttatttatctatttttagtatggagagctctgctgtgacatgtgaatttccctccggggattaataaagtcaaactaaactaaactaaactaa

SEQ ID NO: 2166 - DNA, 535 bp, Danio rerio
  source 1..535: mol_type = unassigned DNA
gaaaagagatcatatctcccctgtccttgcctcattgcactggctacctataaaatacagggttgattttaaaattcttcttttcacttataaagctttgcacaattctgccccggcctatgtcagcgagcttattaggccatatacagcttgcagattcttaagatcacatgatcagtttcttttgtctgtccctcggtctcgctgcaagtcaaagggtgatcgagctttcagtgttgcggccccaaggctctggaatagtctccctctgaatatcagaatctctccttctttggatgcttttaaatctaacttaaagacacatttttactctcttgcctttgactgatgcatgcatgttatttttgtattatttatattttagtattacttttaaatatattttattgtatttttaataccagttatttttagttttattgtctagtttattttattgtaaagcactttggatcaactacggttgtgttaaattgtgctctataaataaagtttgccttgccttgccttgcct

SEQ ID NO: 2167 - DNA, 140 bp, Danio rerio
  source 1..140: mol_type = unassigned DNA
tgtatggatgttgtatagtagtatttttttatttttattttttaatgtgtacatggaacttcgcctgtgtatggtaccttgttgcaatttagtttccctaacgggataataaagctgagtctgagtctgagtctgagtct

SEQ ID NO: 2168 - DNA, 523 bp, Danio rerio
  source 1..523: mol_type = unassigned DNA
taatttatgcaatatcttgctgctcgtgccatatattaattaattattacgggttttaatgcgtggaagtctgtgcattatgttctatgatgtgcaatagtctattaggtgcaatatttgtacgtttttttactgggtcttaaatatttttagtgcaatatctttgttttttaaatgagtgctgaatgactttactacttgaattattgtatgtgtaattgttttatgtgtaatattattggttttggttaatattattttcattacttgatatatgacttattagtattagttaccactgattcttttaagtgtaatatcttatataatagtttgtatacttatgtattgtggctgttttcttttatagattggttggatttatgtgacttatttcacttacttaatttatttattttgtcttgtggttttgtgtttctgtgttctgtgtgttatggcagtcattacataagcaatttcctgcgggataaataaagttttctaagtctaagtctaagtctaa

SEQ ID NO: 2169 - DNA, 147 bp, Danio rerio
  source 1..147: mol_type = unassigned DNA
taaaaggcttttgtaagacctatagcactcaactaattaacaaaattttaattatttattgagacatattcgcatattaatataaatgagtaaataaataaaatgaatagtataaatgaataaaatgggtattaaacaagatataat

SEQ ID NO: 2170 - DNA, 165 bp, Danio rerio
  source 1..165: mol_type = unassigned DNA
taatctttattgtggttgttgctgtaatacttttattcctattattacttttattgttatcttttactcttttagagtgtgtgctatggttttgttcagcactttggtcagtgccaaactgaagtaaatgtgctttataaataaactttacttacttacttactt

SEQ ID NO: 2171 - DNA, 46 bp, Danio rerio
  source 1..46: mol_type = unassigned DNA
taggatacgtcatccatggtcaacactgaccgacggaggcctacta

SEQ ID NO: 2172 - DNA, 492 bp, Danio rerio
  source 1..492: mol_type = unassigned DNA
gatgcaggactgccagactcaagaactctttcttcccatcagccatcagacttctaaacagataaccaacgcacataacagtctatttttctgctcagtacaacactacatactccatcccattttgcactattttattttttattctttttttttgcacataatccaattgcactaggcacttttttgcataataagcacaataaaaaacaacaaaaacaaaaaacactgtacactgtttacatctgtttcattactcaaatcaggtttacatattgtttactttcatagatatttatatacttatattttacattcaatcttcggtcacttctgtgtatatatgtgtatttatgtgtatgttgtgtatgatgtgtatgttgtgtgtttgacttcactgtggacggcaaagtaagaatctcattgtacagggagacgtgtttccttactgtgcacatgacaataaacagttgaattgaattgaattgaatt

SEQ ID NO: 2173 - DNA, 31 bp, Drosophila ananassae
  source 1..31: mol_type = unassigned DNA
tagggttgtgatggccatttatatattatat

SEQ ID NO: 2174 - DNA, 817 bp, Drosophila ananassae
  source 1..817: mol_type = unassigned DNA
tgataccacacctgacctagtctccattactacctcacagatggccataactacagaacccgacgccatgacacagcaacgccccgccaatagccgtgcagcaacagcccactaatacgacgcacagacgcccgatccagccgccactgctccgattacaaaaacaagcgactgcgtccaggcagaaaccccgctacgcagcaacggcacatcaacacgacgctcagccacccggaccagccgtcaccactctggccaccagaccaaacccccgacgacgcccagcagaaactccgccgcgcagcatcgcctcatcagtatgacgcacaaccacctgcatcagccgtcactactctggcctccagaccaagctacagcaaccaggcagcaaacccgccacgcagcaacggcttgccaacacgcacacatgatcctggaacagccgctgccgacttggcctccaaaaccaacaacggcgtccaggcagctacatcgcagcgctgcagcaacggccagccaacacgtcgcacaagaacctagaaaagcagccaccattctgaccaccagaaccaacaatggcatccaggcaaccaccccgcacaaagcacaggcccaccaaccactgaagaaaacacctgaaagcgccgccaatggattgaccaccaaactcccgacgacgcccagcagtaaccccgccgcgcagcaacggctcaccaatacgacacactgatacctggaccaaccgccactgccctggccaacagaccaaacgacggcatccaggcagcaactccgccacgcagcaaaggcttgtcaa

SEQ ID NO: 2175 - protein, 30 aa, Deltaretrovirus sp.
DLSSSSPGPPDLSSLPTTLAHLQTIDLRDA

SEQ ID NO: 2176 - DNA, 1597 bp, Drosophila willistoni
  source 1..1597: mol_type = unassigned DNA
tgaggaaaaaatcagggacaaccacttgtcattcaaaggctatcctgccccccttgggccaaacgaacaaattcaatacacggaaaatgtactactcgctctaaacatggctagtctggaatctgagttgctcaaattaattgataacagcacgaatagcactgatgctctaaaaaaaaaggaaaactgatactgcacccatgatggccctaactaacaatcactctaacaccaatactaatacttctgcaaacattcacttacctaaccataaagaaatatgattttaggcggcccctgcaaagccagaatcctgcccactattcagctgccgtcctggcctggccagagggccagtcctcgacagctgtgcctccagtagacgcgcctcctgcactctctgcctcgttctcagcgtctgcaccatctcgtccatcgtcctgtccagatttccgctcgcctgatgcaccaatacctgaaaataaaacaaatctaaaaataaaaccaactaaaaagtacaaatactcacctgaaaatacacaacagcaaacagtagctccttgtccagcgtcgtatgcatcgtctcatctgcgtcgtccagaatctcgtcaagctagtccgtctgcagctcctgtatctgaaaatatattaaaattattttctaaatcagcaataaaacacaaaaactcaccttaaaatctacgtcagagagcagcagcatcgtctgcgaatcctcgtccagcatctggccaatcatctggtccatctcgtccttcactagcgcctgcacctgaaaaaaaacacaaatcgtcagaaaaatctctcaataatcacgtaaacatacctgcaaattctcttcagtcacctgcagcaataccagctggtccttctggccctctacctaaggctgcatctgaaaaaaaacaaaatatcaacaaagaatcaagctaatttacctaaatacatatctaaaatccagccgcagccgctagcagtttcaactggagctcctcctgcatcttctgctgcaccacgtggcccgtcatctggtcctaaacgccataaagctgctcctacacctggaaaaaatataaaaatgctaaactatgctactaaatcaacaaattactcacctgccatgcaaatgccgccagtagcatcgcgtgcaaatcttcgtgctgaatctggccaatctcctggtccagctcgtccttcactagcgcctgcacctggaaaagaacacaaatcgtcagaaaaatcaatcaataatcaggtgagcttacctgcaaatcctcttcagtcacctgcagcaacaccagctggtccttctggccctctacctaaggctgcacctgaaaaaaaacaaaaaatcaacaaagaatcaagttaaattaactaaatacatatctaaaatcgagccgcagccgctagcagttccaactggagctcctcctgcatcttctgctgcaccacgtggcccgtcatctggtcctaaacgccataaagctgctcctgcacctggaaaaaatataaaaatgctaaactatgctactaaatcaacaaattactcacctgccatgcaaatgccgccagccgc

SEQ ID NO: 2177 - DNA, 49 bp, Folsomia candida
  source 1..49: mol_type = unassigned DNA
taagtgtatttcatagtttatcaatgtttatgttaataataaataatac

SEQ ID NO: 2178 - DNA, 221 bp, Lottia gigantea
  source 1..221: mol_type = unassigned DNA
taaagtagcacatcagaagagcgccccgctcctctgtaggtgtggcgatcattggggacttagttctcgatagatcgccaagaagaaacacagaagaagaacgcagtatcaagactacagaagaagatcaagaagaaaccatgggagcaacccgttccctactcaacgtctgcgatatggaatttctccgaagcggacaccatccaccaacaagaagaaga

SEQ ID NO: 2179 - DNA, 160 bp, unidentified
  source 1..160: mol_type = unassigned DNA; note = Description of Unknown:Nasonia vitripennis sequence
tcagatatatgtatctccgtattattattatttttgtacattcgaatctaatgaactatctgtcacttgttgtatatttttcaaaacttgtatttattatagtatctttctaaaggacgcgtcagccgttaaattattaaatcaataaatatataaatat

SEQ ID NO: 2180 - DNA, 234 bp, Nematostella vectensis
  source 1..234: mol_type = unassigned DNA
tagatatgattctactttatttcatcaaatcagccacatgtaaatttaataataaggattccttagtcaaatcaagaacattcatatatattttagtagagacgctacttagtctgcgacaggggtctacacctcataagcattgtgcttttagtagactcctcatcatcactattttttgcattattatcattatactattatttggtgaaataaacttgattgattgattga

SEQ ID NO: 2181 - DNA, 195 bp, Oryzias latipes
  source 1..195: mol_type = unassigned DNA
tagtgggacttgttcattttattaatttaattcttttattgttttttgcttttattgttcaattgattttattgttttattgtgattgtttctttattgcatcatattgtttgtgattttattggattttatgttaagcactttggttgccttggcttttataagtgctatacaaataataaattgattgattga

SEQ ID NO: 2182 - DNA, 266 bp, Oryzias latipes
  source 1..266: mol_type = unassigned DNA
taacctttgcacattttttttattatctctttatttagttttttctattttgcacatttcttttgcacatctctttacctgcactgttctgtaaatagctctttaaattataataccttgatgtctgcatttatcctacattttcttgttcttatttttatttatattattcttactctttttttccctctgctgtcagttgttatggtaacgaacaaatttcccacgtgtgggatcaataaagtatttctgattctgattctgat

SEQ ID NO: 2183 - DNA, 44 bp, Pelodiscus sinensis
  source 1..44: mol_type = unassigned DNA
taatgctgcatcccaccgtcttttgagacatatggaggccatga

SEQ ID NO: 2184 - DNA, 346 bp, Phytophthora sp.
  source 1..346: mol_type = unassigned DNA
tgaagctacacaagcgcgaggctcgacagctggaccttcagctgtcgagccactgcatccgcgccagccaccgcatctggggctggcactgccggcgccaccgcgaaggacaacggagcggcaacgcctcgcgaacgccgcgtgggtctgggggggccccgcggcgcacatcgcaggctcgggcacagcggtaagctggtcatttgaccaacagggcactacccaggtagggaaccgcccttcaaaaacccaggaagacacaaacaccctccctttagtgacatgcatattttagcctacatttcagttacggagaggttactaactggtaaacacgaacacacat

SEQ ID NO: 2185 - DNA, 320 bp, Phytophthora sp.
  source 1..320: mol_type = unassigned DNA
taggaacctagccgattgcagcagcacctgcgccccgccagcacgcacaagcgccccagccaagacaccaggggcagtcgggtgacggagaccggggggactccgtcgcgctccggccgccgctagacggcaaccaggcccattgcggccgacagggccacacccatgtagggaaccgccctcggaaaccctgcaccggctcacatggtccgaccccccgattggttcaacccgtacaccaactacacaccaattagggactcccaggtagtcactaccaggacgcaacggactaaccggcaggtaatacattaaccctt

SEQ ID NO: 2186 - DNA, 106 bp, Strongylocentrotus purpuratus
  source 1..106: mol_type = unassigned DNA
ataaataactgtgtattattgatgttccattgatttgctaaattgtaagcaaaattatgttactgttgaatattgaataaacacctctaagaggcaaagagaaaaa

SEQ ID NO: 2187 - DNA, 10 bp, Strongylocentrotus purpuratus
  source 1..10: mol_type = unassigned DNA
aagaagaaga

SEQ ID NO: 2188 - DNA, 140 bp, Strongylocentrotus purpuratus
  source 1..140: mol_type = unassigned DNA
taggtgttgtctattgtctcatgttattacacaacctcctccctccacaaaatagcagtaatcacggaagaatcctggatcgatgaacaggcttagacctacaacatcgtgttttaaagtaaagtaagtaagtaaagtaa

SEQ ID NO: 2189 - DNA, 425 bp, Strongylocentrotus purpuratus
  source 1..425: mol_type = unassigned DNA
taaatataacccaagtactcgcaaataagtagccactatcacaaacttcaatatttagtaaattaccaattgcagatcactgtatttctcataaatatcctacaaattacaaataattatgtttagacacactgtcacctcaatataatattttttcttcttcaaaatttgtttatgtatgatttcttgatgacttgatttttttggattttttttgtttacttgctgagtttaaatttacatttgagatttaatctgtaattctttctggtatgtttactactcaccatgtgatgatgttttcatgtatatgtatgtcttatatatctattttatgttatgtagggcccccaagaataacagtattttaactactggtggggctaccctgttgaaataaaacgaaataaataaataaataaata

SEQ ID NO: 2190 - DNA, 282 bp, Strongylocentrotus purpuratus
  source 1..282: mol_type = unassigned DNA
taactcaccaggctctttaccccccccccttgttttccctctttttgtcatgcttccaatcgtacaacaattaatttaccttttatttacattatactgagggatgggctctagcataaggaccacactcctttttagctcatcccttcactcccattatgttatgttattttgttgttgttgaatgtatgatattttatgtgtgattattcctcatttaattgtatatgttcttgtatttttaatgatgagtgtaaataaacgaacttgaacttgaacttg

SEQ ID NO: 2191 - DNA, 413 bp, Strongylocentrotus purpuratus
  source 1..413: mol_type = unassigned DNA
tgacaaatctcttaaattaacacatgatatcatatatgtttgtcagcatttccttgatatagcaggaaaatccccctcccatgcaccctctatcccattttttttttttttggttgcaagtcactgtttattttttgttattttcccccaattatgttctgtaatttactttactttacaatcgttatgattttaaatgtttctgggctgcaagcgtatcaagctgtcacgcttaggctgtagcccttctgtatcatcacctcttcgagcgtatgtatctatgatttactgaatgtggaaatgtaatttaacttatgttttatactcatgtaaagacattgtcacattattgttataacctatgatgattcagtaaccaataaatatttcaactatttcaactatttcaacta

SEQ ID NO: 2192 - DNA, 187 bp, Strongylocentrotus purpuratus
  source 1..187: mol_type = unassigned DNA
taagcttactagcttggtttttacttgcactggacttagcatattttactgtaaattgacaagtgctttgtccacacaccattccagcaattcatgacactccttgtagtcacttgcctcacctaccatcccagtatagcttcctgagtgagctgccaaagggattacccaaccaagtaccaagtaa

SEQ ID NO: 2193 - DNA, 303 bp, Strongylocentrotus purpuratus
  source 1..303: mol_type = unassigned DNA
tacctgttcataagagaataatctataaagtttcactatttgtttataaatccatgtataaccttatcccatcctatatttctagtctgttttgtcccatccagcaatcaagatatccattacgttcaaggtcagacccccttcttctgcaaatcccccgcatcaattcaaagaagggtcaacaaaatataattttttctggtcccactatttggaatagtctccctttaagcattcgttcttgcacctcagtcgcattatttaagaaacatttaaaaacccatttgttttctttgtaattgt

SEQ ID NO: 2194 - DNA, 313 bp, Strongylocentrotus purpuratus
  source 1..313: mol_type = unassigned DNA
caagaccctccaggacctgcccatgcacatagctaccaagtcctccgttcaagaactgagcagcataagcagtccttctttcccaggactgtgagagtggaacaacctccatcagaaacagtatggcctcatccgtcaatgccttccgtcaatgcctgacgggaggcagcaactaagtccgggaactttttacttgcaccatgtaaatagcattgcaccatgcaccttgctctcgtaagcacacacacactcatcagtctgcaagaatcttcaactgtgaaggaggtagacttaacccaaagaagaagaagaa

SEQ ID NO: 2195 - DNA, 421 bp, Strongylocentrotus purpuratus
  source 1..421: mol_type = unassigned DNA
tgatgttacttttaataattactgtcgatgttcaaactgaatgtttcttttagtttgctgttgttaccctgtgaattgccattgcgtacgggtagtgaaaatgttatacaaatattgctaagtgtatgaatattgtttatttttcttcataataagtttcaacttaattaaattacgtttttttaatatacacaagactatgtcattgttgtaactttcggagcctatgacctacaagcattgctttctctttaggctccatcatatttcttcccttattcaacttagtcttatgtatcattctttttttttttttgtataaacgcatcctaaaatgagttcaaaatgtaacatgctatatgtaatgatgtactatacaacatgtgagaaatatgaaaataaactgaaactgaaactgaaa

SEQ ID NO: 2196 - DNA, 289 bp, Strongylocentrotus purpuratus
  source 1..289: mol_type = unassigned DNA
tttatatatacattaatttttcatatttgttttgaacttgtaaccattctgtaccaaaatgacaatatttaacgtaatacgcaatttatctcgattcaattatacactattcatttatgtatcatgtatggggatcttctagcttcctcaccataatgttacaatcttcttcttttaccctgttctgtactataccacttctgttttcctctccttttctccttttctccttttcacatccttttccctctctctttatcccggtgctccttgttatcacatatattat

SEQ ID NO: 2197 - DNA, 650 bp, Strongylocentrotus purpuratus
  source 1..650: mol_type = unassigned DNA
tttcaacatgcagtaggcaattgtcaaatttcggtcacattgcaactcagttttgcaaattttgttttctatttcgtatttcttaatttcctttattgtaaaggctgtatttgtttctactcgactataccacacagagctacgtacacttccactatttgttacaaacacatacaaacacgcacgctcgcgtgcacgtgcacacacacacacacacacccacacacgcacacacgcacacacacaatatatatatatatatatacacttgcacaacacactcaccaactcatacacaaagatcgcttgaacactttttcattttaagttttaccttaagatttttttttgttttgttcttgtttttttttaggccgccatccttgtcaagctttgcttatgattgcggtctcctgcacttttccaccagaatagttaggataatactttaaatttatgataatatgttatggaaataataagtttcgttattataattatgtacatatattatgtaaaaaaacattttgacatgaagaaattattgtttgtttatgttgtattataccttacatgtatattatgttatttgttattcagttatattttatttggaaaaaatgcagaaataaaatcaaatcaaaatcaaa

SEQ ID NO: 2198 - DNA, 17 bp, Strongylocentrotus purpuratus
  source 1..17: mol_type = unassigned DNA
gtcaagtaagtcaatta

SEQ ID NO: 2199 - DNA, 305 bp, Xenopus tropicalis
  source 1..305: mol_type = unassigned DNA
tgacattctgcccaaaccaacacacactccccataactactggactcttcgcagtgtcactttaagcaaagccactttaaatcctcactgcacaatttcaaatattgcattgcattttattattgtaaatacttgtacctttattgcacacttttattatatttaatatttgtattttttttttttttgttttttgttttgtttgtctatgtaaagttgggaggaacacgggtcaaaaaaatgtcattacagtaatgatgcttcattgttatttgtatatgacaataaacttgaaacttgaaact

SEQ ID NO: 2200 - DNA, 277 bp, Zea mays
  source 1..277: mol_type = unassigned DNA
tgagctcaggatgtggtgtagtgccggggcaaaagggttgaacctgctttcaactcttatgtttatgcttgacccagggggatagtctagtggcttgttcagagtggttgtgtgtggttgctgtgttgcgtcttttggtatgttgtgtcttgtgatgtgtgtgtcgtgtcaggtggtatgttgtgtgcggcgtgtgtgtgtgtgtgtgttgtaccttcttctatctatctattaatggaatgatacgcagatctcctgcgtgttcgagaaaaaaaaa

SEQ ID NO: 2201 - DNA, 2231 bp, Zea mays
  source 1..2231: mol_type = unassigned DNA
taattctccagggggactcttccaagctttatctccttaactcggcgtatgtgactctcttaccaaaaaagctgaggctgtggaggtaaaagacttcagaccgattagtttaattcacagttttgccaagattctcaccaagattctggccaataggcttgctgcaatcctccctactttggtctcccccaatcagagtgcattcatcaagggaagaagtattcatgacaattttatgatggttagagaaactgcaaaagcgattcacaggcagaaaattcctagaatcttgctgaagttagacattggcaaggccttcgactcagtttcgtggcctttcctccttgaagttctggaacatgtgggatttggtctattctggcgtaatttaattgctaagctattgtgttcctcctctactcgagtgctagttaatggggaaccaggagatctcatttgtcaccagcaaggcctgcggcagggagatcctctctccccaatgctctttatattagtaatggatgtgctgaactctctttttcagaaagcaaatgagttgggctcttgggacctttattaagaaggggagggggccagcgggtctctctttacgccgatgatgttgtattatttgttcagcctaacagaaatgagctgagtgtggtcaaggagctgttgagggtgtttggcaaggcatcagggctgattacaaacataaataagtgcagtatgacacctattcagtgcaacgagcatatcattgctgctgctcgacagatgttactctgcaatgttgttccttttccatgtaaatatctaggtcttcctctctctgttaaaaagctccctagaagatcctttctggagcttattgataaggtggcagcaaagcttcctggctggaaagctgctaatcttaacctggccggaagggcaactttggttaaagctgtgctcactgctattcccatttatcatctaattgcttcaatgtccaaggtgggtaatcaaggcaatagacaagattcgcaggggttttctttggaaaggaagaactgacattagaggaggacattgtgtcgttgggtggtccaaggtctgtcgtcccctctctcttggtgggttgggaattcacaatttggaagttatgggatggtctttaaatttgagatggctttggctccagaaaactgaaccagctaggccttgggcagattttaaaataaaggtgcacagatgcttcagctctcttcgcagcctctgtgtgttcggtggttggtaatggggcaaacactctcttctggacagataaatggcttcagggccaatctttctcagattgcccccgctctaataaatcgggtgcccgcgaatataagaggcgcagatctgtccaagccgccttaacagccaatggttgggtgcatgatatctctggaagccttacggcgcaggtgctgtttgaatttttattggtttgggatttactccaagaggtgcaactgtaccctaatgtggaggatcaacatcggtggttgccatcctcctcggggctgtattccgccagctctgcttatttgcgcttccatggtggtgcaacaacctttgagcctgctacaagaatctggaagacttgggcccccccgcgctgcaagtatttcatttggcttgcatctctcaaccgatgttggacggctgatcgactggcacgtcatggaatggatcatccagatagttgtcccttgtgtgatcagcaggatgagtcagtgcatcacttgctggtggattgtgtttttacgagggaagtttggtttacaacactaagcaggctaggtttgcaacatcttgctcccacgtctgatgctacagggtttcaagattggtggagtgaggcagaaagacaagtgtctaagcataagaaaaaaggtttcaactctattgtaattttagtagcttggcagatttggaagcatagaaatgcgtgtgtgtttgacaatgcttccccaaacattcacgcaattttgctgtccatccatgatgaggctttattatggggtcttggaggggctgctgctcttaggcaggtttggttgtagtttttttatttttggtttttttaattttttggggtgcttcctgggcacctttgtactgggtcttttctagaccctttttcttatcttcttaatatatttgatgcgtggttctcccacgtgttcgagaaaaaaaaa

SEQ ID NO: 2202 - DNA, 112 bp, Zea mays
  source 1..112: mol_type = unassigned DNA
taattacgtaacctctatgtacccttcctgcggtgtctcttgggcactgcttcactctcttctttattaatagaaacgtgcacaatctcgtgccgttcgttcaaaaaaaaaa

SEQ ID NO: 2203 - DNA, 181 bp, Zea mays
  source 1..181: mol_type = unassigned DNA
tagctctggttttgttttcaggatctgtttgctcttgtttttgtttttttcctcttcttttttctttggtttttttatcccctccggggaggtcttttgtactatggtctattttggaccctctttttcctctacttaatataatgatgcgcagttctcctgcgctttcgagaaaaaaaaa

SEQ ID NO: 2204 - DNA, 199 bp, Zea mays
  source 1..199: mol_type = unassigned DNA
tagcagttttcctgctggtagtcgtttttggtcgggttgttaccttgtgtgtgtgtgtggtgcgttgtgttattgccggaggggtctcggcctaggggcctttgtaattaggggttgacaagtcttgtctctcctatgttctttttttcttcttaatataatgacacgcagctctcctgcgtttgttcaaaaaaaaaaa

SEQ ID NO: 2205 - DNA, 354 bp, Zea mays
  source 1..354: mol_type = unassigned DNA
taacgttcctttttctatggaggtcattattctcatgacatggagcatttggaaaagtcgaaatgaatggttgtttgaaaacaaagacccttcagtgcatcactgtacgaatgaattcagtaaggaactacggttggttattcacagagcgcgagggaaatacgacatctccattccaagctggttggatcagtggcagtcataagatttgttttgctctgaccaatctttgtaacttttcaattagatcttaccagctaacctctaactcttgtaatcaagtcgagttgtaccttttcatatttaataaaattttacagtaggggtttcccctcctgatctttcaaaaaaaaa

SEQ ID NO: 2206 - DNA, 1528 bp, Zea mays
  source 1..1528: mol_type = unassigned DNA
taatgtttttcctatccgatgttctgaggcggatcttgcttgtgttcaggagctccttccatgttccatttcggaatttccctgtcagtaccttggcctcccgctttctcttggaaagcttaagagaagtcaaattcaagcaattgtcgataaaactgcagcacagttacctgggtggaaagctgatctgatgacaaaggctggtagagccatttatgttcaatttgtgatgacatcaagaatgatttatgctgctctggcgttggacatcccttcttgggcttttaaagcaattgataagcttagacgaggctttctgtggagagggaggaaggaggtgaatggtggccattgtctgctgacttggcccaaagtcactagacccaaggacctggggggtctgggtattagtgatcttcggatcatgagctgggcactgcgggctaggtggccttggctgcaaaaatctgataggactaagccatggtcggacttccagattcaaacttgcgacattgtgcaaagcttgttggctgcggctgttatcactcatttgggagatgggtctgatactctgttttggaaggatcgttggctgaatggcaaatgtattaaggaggtggcacctgctgtcttcggtatggtgcccaagcgtattgcttctagacgcctggtcaaggatgccttgcctgatctcaattggttggctgatctgagaggggctatttctgttacagcccttgctaatctcatggacctttgtgacttactcgaggggatggttctgcagccggatgttcctgatgtgcatacctggaggttcagtgaatcgggtgaatactcggctagttcagcttacagggctttgcttcttggctctgttagctttgagcctgctgaacgcatttggaaatcctgggctccaggaaagtgtaaattcttcctctggcttgtggagcacgatagatgttggacggctgacagacttgctaagcgtggcctggatcacccagagtcctgccctttatgcgaccagatggaagaaactatcaaccatttgctggttcagtgcagttttgcaaaacagttttggttcagccttctgcggtcgggtggtttccaggagctctgcccttcccatgatgacgtctgttttgaaacctggtggaggaatagtgctgccagggtgggcatgcctttatccaagggattcaattctcttgtcattttgggtgcatggactttgtggaagcatagaaataggtgtgtttttgataactgtaaccctagcgctgcggtggtgttggcagctgcaagggaggagttgatgggttggcgtatggctggagccaaagcgctctctttctttcatttagaagaggtgtcttaggtgtcttagttgtttggggagtgttttttggttttggtttgccaaatgtaacacctttgtactggggttttttctccccattttattcttcttcttaatacaaaaatacgcagctctcctgcgtattcaagaaaaaaa

SEQ ID NO: 2207 - DNA, 154 bp, Salmo salar
  source 1..154: mol_type = unassigned DNA
taggataaagtaatccttctaaccccccccccccttaaaagatttagatgcactattgtaaagtggttgttccactggatattataaggtgaatgcaccaatttgtaagtcgctctggataagagcgtctgctaaatgacttaaatgtaaatgt

SEQ ID NO: 2208 - DNA, 121 bp, unidentified
  source 1..121: mol_type = unassigned DNA; note = Description of Unknown:Mesobuthus martensii sequence
taactcacaattaaacatcacaagtagctatgtcttgactcttgtccgacatagcactttgccccggagttattccgtgctcacattgatgtaccataatataataataataataaataca

SEQ ID NO: 2209 - DNA, 147 bp, Schistosoma mansoni
  source 1..147: mol_type = unassigned DNA
tgatttaccaaattctttttttccctctattatcgttcatatacctaggttcttgcctggaggtattggtgatccactgctaccagacacggaagcccgttaagcgaaagcttcttctattccgtcctcaaccatttgaaccatttg

SEQ ID NO: 2210 - DNA, 102 bp, Anolis carolinensis
  source 1..102: mol_type = unassigned DNA
tgaatgcgatttcctgcttcttagcagggggttggactagatggcccatgtggtctcttccaactctactattctatgattctatgattctatgattctatg

SEQ ID NO: 2211 - DNA, 388 bp, Pelodiscus sinensis
  source 1..388: mol_type = unassigned DNA
taacaagtctttgaactttctcacccattatcaagacagtttccccaattatcacctgtaataccattaactcacaaacatcccactctccctacctctaatatcatcaattcacagacacttaccttccttcctcccccttcccacccccccgcctcctccttctgttctgcaatgtgatttgtccttttcatatttgttcattttttttaattgtatcctttggtatatatggttgtgactactttcttccactatttgatctgaggaagtgggtctggcccacgaaagctcatcatctaataaaccatcttgttagtctttaaagtgctacattgtcctgcattttgcttcaactaccccagactaacacggctacatttctatc

SEQ ID NO: 2212 - DNA, 56 bp, Xiphophorus maculatus
  source 1..56: mol_type = unassigned DNA
taagcggaagaagatggatggatggatggatggatggatggatggatggatggatg

SEQ ID NO: 2213 - DNA, 142 bp, Ixodes scapularis
  source 1..142: mol_type = unassigned DNA
tgaacaagtgtaaaaaaagggtttgttataagtgactagagctctgtcgctgccctacgcacaagccgcttaggcttatgtggggtatgaatctctgtaaaattgtatgtggaaaagatgaaataaagattattattattat

SEQ ID NO: 2214 - DNA, 241 bp, Schmidtea mediterranea
  source 1..241: mol_type = unassigned DNA
tttacgtatgttaaatcatgtttgtttttttaatattattaaaataattgaaaattttaaattgcattaatttttaaaaaattagaatataagtaaaaaatttaaaatttaaaattaatttaaagtgaattgaatatattttaaaaatatttatttattaaaaaattaaattaataaaaaataatttgtttaaattaaatgttaattcataatatttttagttggttttgagtacctgaag

SEQ ID NO: 2215 - DNA, 1348 bp, Monodelphis domestica
  source 1..1348: mol_type = unassigned DNA
taattattaagaactattttgcccaattatatggcaataaatatgacaatctaggtgaaatgggtgaatatttacaaaaatataaattgcctagattaacaaaagaggaaatagaatacttaaataatcccatctcagaaaaaagaaattgaacaagccatcaaggaacttcctaagaaaaaatccccagggccagatggattcacaagtgaattctatcaaacatttaaagaacaactaatcccaatactatacaaattatttgacaaaataagcaaagaaggagtcttaccaaattctttttatgacacaaatatggtactgattccaaagccaggcagaccaaaaacagagaaagaaaactacagaccaatctccttaatgaacatagatgcaaaaaatcttaaataaaatactagcaaaaagactacagcaagttatcacaaggattattcactatgaccaggtgggatttataccaggaatgcaaggatggtttaatattaggaaaaccatccacataattgaccatatcaataatcaaaccaacagaaatcacatgattatctcaatagatgcagaaaaagcctttgacaaaatacaacacccattcctattgaaaacactagaaagtataggaatagaagggccattcctcaaaataataaacagtatatatttaaaaccatcagcaagtatcatctgcaatggggacaagttagaagccttcccaataagatcaggagtgaagcaaggatgcccattatcacctctattatttaatattgtactagaaatgctagcagtagcaattagagaagaaaaagaaattgaagggattaaagtaggcaatgaggaaactaaactatcactctttgcagatgatatgatggtatacttaaagaatcctagaaaatcaactaaaaggctagtggaaataattaacaactttagcaaagttgcagggtacaagataaacccacataaatcatcagcatttctatatatttccaacaaaactcagcagcaggagttagaaagagaaactccatttaaaatcactctagacaatataaaatatttgaatctatctgccaagacaaacacaggaattatatgaacacaactacaaaacacttttcacacaattaaaactagatctaaataattggaaaaacattaattgctcatgggtaggatgagctaatataataaaaatgacaatcctacccaaattaatctacttattcagtgccatacctatcaaactaccaaaaaacttttttatagaattagaaaaaaatataacaaagttcatctggaagaacaaaagatcaagaatatcaag

SEQ ID NO: 2216 - DNA, 348 bp, Petromyzon marinus
  source 1..348: mol_type = unassigned DNA
tgattgattgttcacgcttacagtggctttcagacagcatacataaaaaatttcgtctcccccctcctcttttcaaaaaatagatggactagtcctgctgggcaaactgccaaatcgttgcgcgtgacgcaaacgttttttttaaataaataaatatgccgttttcaaataaataaatttatgcaaaccgacacacctgatgatgaccgtttgagttatggtcgaaacgtcgtgagaatttttattgttttatatatattttgttattttgttgtttctcttcaacgtgactttaccgaaaaaactaagaatatgaattactgcagtcacgaaagctttaaatcaaaa

SEQ ID NO: 2217 - DNA, 1053 bp, Petromyzon marinus
  source 1..1053: mol_type = unassigned DNA
taattaattgtattttacgatgaccttcagaccgcagctctttcgccagcattgcctcttaatacctctcacaccacggttaatggtatggtttacaacatggagtatactagggcttcgcagctgtctctctccccctcctctgttccgaccatggacgaactcgtccgtctgaacggggcccgtagctatccgtggtacgaaatttgagggtaagaatccacccatttttttcgccatatagcattgtgatatataacgacttatggttggtagcttagctgattggagaatatagagtttattgataacatgaaggtaatttatattttagttttttattggttcactatatagtactgtgaatagctcagatgtgtaggccttgacttcaacatagtcatttctgtgaccagtcactagcaaatcacccagttatttcaatgctaaattcgcctagttatttcaatgctaaattctcctgtttgatttgtactaagtgcctcggtgaatgtgtatgctctgacttcaacgtaactatttctgtgagcagttacaagctaatcactcagctatttcaatgctaaattctatgctaattccattgtcaaggggtgcctctgcggatgtgtatgccttaacttagctatttcaatgctaaattctatgctaattcctttaacaatgggtgcctctgcggatgtgtatgctttaacttttaacatagctatttctgtgaccagtcacaagctaatcattcagccatttcaatgctaaattttatgctaattcctttgtcaaggctctttgtttcctctcacacagcttaaaagccgtgatctgaacgtggctctctcactccagcgctgtcctaccagacagtctcgctcccttcacctgatgaaggccgcttgtgttgtggccgaaacgtcgtgagaatattattgtgttattttattttatcaatttattattttattctcattctacgtgactttaccgaaagaaccaaagaagatgaatcattgcagtcacgaaagctttaaatcgaaa

SEQ ID NO: 2218 - DNA, 776 bp, Petromyzon marinus
  source 1..776: mol_type = unassigned DNA
taaactaattttcaatggtacagtaaattatttttcaagtagtggtaccccaaactttcgcagctgcttataaatctcccctctttcacaccactcaataggtaaactcactcccctccctccccccccccgcgccacacgccaactccacgcacgtactccacgcactcactctctcactcagtcaatcaatccaatcaatctgctaatttatttatgccactttctttttcactccacccattcgttgctctcactcagtccatttactaggtgcgctcggtgactggatttactgctctgactgtcttaactagctgatttcactgagtgcactcagtgaatgtaatcactcactaacttcactaattctactaattcctgtcagtccactcagtctactaactcactcaattcaatctaaattcaattctaattcctcaaggggtacctctgcggatgtgtcatgctacatacccgcttatggtccatcatggcccattcacctcccagtttcatcatgctaaattatatgctaattcctttgtcaaggcgctttgtttcttctcacacagcttaaaggtcgtgatctgagcgtggcttttttcactccagcgctgtcctccagacagctcggtcccttcacctgatgaaggccgcttgtgttgtggccgaaacgtcgtgatttttgttattttattttttacctacgtgactttacccaatagaaccaaagagtatggatccttgcagtcacgaaagctttaaatctagaa

SEQ ID NO: 2219 - DNA, 388 bp, Petromyzon marinus
  source 1..388: mol_type = unassigned DNA
taactggctgtgatgtttccatcctacctaccgatgttagcagttattttcgactctctgagttacattcactaacacagccaaccgttagctgtgttagtaaatggcggcttgccactgcctcgtccatgccctggccgagcttggccccctccgatcttacatttacatgcaaatttctctcctactagccccgcccactcgctcctacatgacccttggctgctacacccatctctaaacctttataaacagcctgcctcagcagctttccctcttttttcacctgatgacgattgcttgtgttgcgatcgaaacgtcgtgatttttaatttttattattttttctatctacgtgactttaccgaaagacccaaagaatatgaat

SEQ ID NO: 2220 - DNA, 293 bp, Anolis carolinensis
  source 1..293: mol_type = unassigned DNA
gatacggtcgatataatctgatgtattcgctggattaatgtgtaattgaatacagactggctctgacttttggcccaatgctactggccctgttgtaatggccacacagtgctttactgttttaaatggggtataatattggtttttaagtgtgtttttacgatcgtttgttttactatattttgtattatatgtggcattaatcttgccattatgtaagaccgctctgggtccccctgggggagaagagcggtatataaattaaataaataaataaataaataaataaataa

SEQ ID NO: 2221 - protein, 30 aa, Deltaretrovirus sp.
TLTSPSPGPPDLTSLPTALPHLQTIDLTDA

SEQ ID NO: 2222 - DNA, 114 bp, Capitella sp.
  source 1..114: mol_type = unassigned DNA
tgattaagctacctttatgttgcagttttgatttgtttgttcgtttgtttgattttctttcacctactataatcctgtatatttatttatacgaataaattattattattatta

SEQ ID NO: 2223 - DNA, 94 bp, Anolis carolinensis
  source 1..94: mol_type = unassigned DNA
tagacacttgggaagtgttcgacttgtggttttgtgaaacgaaatccagcatatctatcttgtttgctgtgtcatacaacgtcgttgtgttgat

SEQ ID NO: 2224 - DNA, 94 bp, Aedes aegypti
  source 1..94: mol_type = unassigned DNA
tagatttttatgttttttttttcattaagacaaacagatgtcagatgaataacaacttcaataaataaataaataaataaataaataaataaat

SEQ ID NO: 2225 - DNA, 153 bp, Aedes aegypti
  source 1..153: mol_type = unassigned DNA
tgagaagctcatccagcagactcattaggataagttaaaccgaccaatgagatccacagagcctaatcccctttggcatacagattgcccggggtaggtgaaagtttccagcattttttgctgagaagtgccaaaactctataataataataa

SEQ ID NO: 2226 - DNA, 27 bp, Aplysia californica
  source 1..27: mol_type = unassigned DNA
tgatgcgatcgagaagaaaaagaagaa

SEQ ID NO: 2227 - DNA, 39 bp, Aedes aegypti
  source 1..39: mol_type = unassigned DNA
taattgatgtaaagccaaataagtaagtaagtaagtaag

SEQ ID NO: 2228 - DNA, 55 bp, Aedes aegypti
  source 1..55: mol_type = unassigned DNA
tagattcaacgcaatagcaaggaattgttgcccatcaagtatcaagtaagtaagt

SEQ ID NO: 2229 - DNA, 46 bp, Aedes aegypti
  source 1..46: mol_type = unassigned DNA
tagattcaacgtagcggattgtagcccatcaagtatcaagtaagta

SEQ ID NO: 2230 - DNA, 39 bp, Aedes aegypti
  source 1..39: mol_type = unassigned DNA
tgatgctacgctgtagccatcaaggtatcaaggtaggta

SEQ ID NO: 2231 - DNA, 25 bp, Aedes aegypti
  source 1..25: mol_type = unassigned DNA
tagcccatcaagtatcaagtaagta

SEQ ID NO: 2232 - DNA, 35 bp, Aedes aegypti
  source 1..35: mol_type = unassigned DNA
tgaaggacgtagagccagcaaaagtaaagtaagta

SEQ ID NO: 2233 - DNA, 24 bp, Aedes aegypti
  source 1..24: mol_type = unassigned DNA
tagatgttaactaaataaatgaat

SEQ ID NO: 2234 - DNA, 266 bp, Aedes aegypti
  source 1..266: mol_type = unassigned DNA
taggctctctttacgctcatgcgttttgcagtgccctttttagggcgctgttcgaacccattgtggtatggagctacatgctctcatttcgcttatgcgatcttccctcttcaagggaccccactcctatttcctcccatctttcccttccctttcctctcccatcgggtagatgatgaaataggctcaaatatggcgatggcacaaatctcccaactggtggggaacgtgcctttggagccggccttctgatacctgatacctga

SEQ ID NO: 2235 - DNA, 18 bp, Aedes aegypti
  source 1..18: mol_type = unassigned DNA
tgactggtaaggtaagta

SEQ ID NO: 2236 - DNA, 94 bp, Alligator mississippiensis
  source 1..94: mol_type = unassigned DNA
tgacccccagttgtctttcctgcctagtgcagggggctggacccgatgatcttccaaggtcccttccagccttacaatctatgaatctatgaat

SEQ ID NO: 2237 - DNA, 130 bp, Alligator sinensis
  source 1..130: mol_type = unassigned DNA
tgagtcccgtttttgtttttagggtgagtggttttgtttgtgtttttgggttgttctcccgccctggcggggggtcgggctagaagatctattaggtcccttccgaccctgaaactatgaaactatgaaa

SEQ ID NO: 2238 - DNA, 250 bp, Anolis carolinensis
  source 1..250: mol_type = unassigned DNA
taagaatatatgacctcaactgacagacccagtcacatgaacatggaaagcgccttaaatgtatatttaaatgtataattatgtatattttaatggctattcttaattttattgtaatttttaatcttgatggatttttaaatttgatgaaaactgtttttaatgtgtatggttatactgtaagccgccctgagtcccctgatgggtgagaagggcggggtagaagtgatgtaataaataaataaataaa

SEQ ID NO: 2239 - DNA, 91 bp, Anolis carolinensis
  source 1..91: mol_type = unassigned DNA
tagttgcttgtgatttcttttcttttttattttatttccattatttgaaatgtatttgttgtagcaatgcttttgacacgaaataaataaa

SEQ ID NO: 2240 - DNA, 26 bp, Anopheles gambiae
  source 1..26: mol_type = unassigned DNA
tagcgccggataagtaagtaagtaag

SEQ ID NO: 2241 - DNA, 18 bp, Aplysia californica
  source 1..18: mol_type = unassigned DNA
tagtaagtaaataagtaa

SEQ ID NO: 2242 - DNA, 13 bp, Bos taurus
  source 1..13: mol_type = unassigned DNA
tgaactgaactga

SEQ ID NO: 2243 - DNA, 1975 bp, Choloepus hoffmanni
  source 1..1975: mol_type = unassigned DNA
caatagtacagacagcccaattataaaatgggcaaaagatatgaaaagacagttctctgaagaggaaatacaaatggccaagaaacacatgaaaaaatgttcagcttcactagctattagagagatgcaaattaagaccacaatgagataccatctcacaccaattagaatggctgccattaaacaaacaggaaactacaaatgctggaggggatgtggagaaattggaactcttattcattgttggtgggactgtataatggttcagccactctggaagtcagtctggcagttccttagaaaactagatatagagttacccttcgatccagcgattgcacttctcggtatatacccggaagatctgaaagcagtgacacgaacagatatctgcacgccaatgttcatagcagcattattcacaattgccaagagatggaaacaacccaaatgtccttcaacagatgagtggataaataaaatgtggtatatacacacgatggaatactacgcggcagtaagaaggaacgatgtcgtgaaacatatgacaacatggatgaaccttgaagacataatgctgagcgaaataagccaggcacaaaaagagaaatattatatgctaccactaatgtgaacattgaaaaatgtaaaacaaatggtttataatgtagaatgtaggggaactagcgatagagagcaattaaggaagggggaacgataatccaataagaacagataagctatcgtgggtaaatttaacgttctgggaatgcccaggaatgactatggtctgttaatttctgatgggtatagtaggaacaagttcacagaaatgttgctatattaggttactttcttggggtagagtaggaacatgttggaagtaaagtagttatcttaggttagttgtctttttcttactcccttgttatgagtttgtttgaaatgtttttttattgtatgttttttttaaaattttttttatatagttgatttaaaaaaaaagttaatttaaaaaaaaaaaaaacaatgaaaaaaatatgcagagcccccttgaggagctggtggagaatgcaggggtattgggcttccccacctcgatggttgctgatgtgctcacagacataggggactggtggtttgatgggttgagccctctaccacaggacttgcccttgggaagactgttgctgcaaaggagaggctaggcctccctataattgtgcctaagagcctcctcccgaatgcctctttgttgctcagatgtggccctctctctctagctaagccaacttggcaggtgaaatcactgccctcccccctacgtgggatcagacacccaggggagtgaatctccctggcaacgtggaatatgactcccggggaggaatgtagacctggcatcgtgggatggagaacatcttcttgaccaaaagggggatgtgaaaggaaatgaaataagcttcagtggcagagagattccaaaaggagccgagaggtcactctggtgggcactcttacgcacaatatagacaaccctttttaggttctaatgaattggagtagctagcagtaaatacctgaaactatcaaactacaacccagaacccatgaatcttgaagacgattgtataaaaatgtagcttatgaggggtgacaatgtgattgggaaagccatatggaccacactcccctttgtctagtttatggatggatgagtagaaaaatgggggaaggaaacaaaaaaacaaacaacaaaggcacccagtgttcttttttactttaattgctctttttcactttaattattattcttgttatttttgtgtgtgtggtaatgaaggtgtcagggattgattttggtgatgaatgcacaactatgtaatggtactgtgaacaattgaatgtacgctttgttttgtatgactgcatggtatgtgaatatatctcaataaaaatgaattaaaaaaaaaaa

SEQ ID NO: 2244 - DNA, 337 bp, Clonorchis sinensis
  source 1..337: mol_type = unassigned DNA
tgaatgtacattcttgccattgaatctcacaccagacccagtatgacggacactttgtgcctgatgtgcgagtcttgactgtgctagcgcttaccgcgccttgaagagcattcagcattgtttgtcctttcttcggttgttagactttacacgcatgtttccttaccaaaattcttacgtacgttgggattcatcctatctgactggaactgttggttgcatgacttcgaatgagacatttctttcttttatctcatattctcctgtaaccctttcgcattcatcgcttgcattcactttttatgtctgtgaccatgctcttcaaaaataaacgata

SEQ ID NO: 2245 - DNA, 797 bp, Cyprinus carpio
  source 1..797: mol_type = unassigned DNA
taacatactaatacacttctaatatccaaatccgttaaaggatttttaggctgcattaattaggtaaaccggaaccgggaacacttcccataacacccgatgtacttgctacatcgttagaagaatggcatctacgctcatattagtctgtttctctcttattccgaggtcaccgtagccaccagatccagtctgtatccaagtcagagggtcactgcagtcacccggatccagtatgtatccagcccagatggtggatcagcacctagaaaggacctctacagccctgaaagacagcggagaccaggacaactagagccccagagacagatcccctgtaaagaccttgtctcagacgaccaccgggacaagaccacaggaaacagatgattcttctgcacaatctgactttgctgcagcctggaattgaactgctggtttcgtctggtcagaggagaactggccccccgactgagcctggtttctcccaaggtttttttctccattctgtcaccgatggagttttggttccttgccgctgtcgcctctggcttgcttagttggggacacttcatttacagcgatatcgttgacttgattgcaaattattgcacagatactatttaaactgaactgagctgcatgatgacatcactgaattcaatgatgaactgcctttaactgtcattttgcattattgacacactgttttcctaattaatgttgttcagttgctttgacgcaatcttttttgtttaaagcgctatataaataaagatgacttgacttgacttgac

SEQ ID NO: 2246 - DNA, 233 bp, Danio rerio
  source 1..233: mol_type = unassigned DNA
taatctgcaattgcctctttgaatatcacactaattgtacacaaaaaaaaaaaaaaaaaaaaaaaaaataaaaaaactactaacacttcccttcttagactttacagacctgaaacttgcctttagtacttattcattgttgctcttagttgtgtaaattgcttccttgtcctcatttgtaagtcgctttggataaaagcgtctgctaaatgactaaatgtaaatgtaaatgt

SEQ ID NO: 2247 - DNA, 33 bp, Dendrobium sp.
  source 1..33: mol_type = unassigned DNA
tagtgggataaaggcttgatgttgttgttgttg

SEQ ID NO: 2248 - DNA, 232 bp, unidentified
  source 1..232: mol_type = unassigned DNA; note = Description of Unknown:Locusta migratoria sequence
taaaggaatttctgaatggcaactccttctacactttagatgaatttttagataaaaattagtaatttaggaaaaaaattaaaaataaaaaaaaaataaaataaaatattaaaatattgagtgtcaagtaataatatgtatagacacatttcactaaactgacacgttccacatcattacgaaatgtcgtatttatgatctatggaacaagtattaatctaatctaatctaa

SEQ ID NO: 2249 - DNA, 14 bp, unidentified
  source 1..14: mol_type = unassigned DNA; note = Description of Unknown:Locusta migratoria sequence
tgaagaccacaaca

SEQ ID NO: 2250 - DNA, 20 bp, unidentified
  source 1..20: mol_type = unassigned DNA; note = Description of Unknown:Locusta migratoria sequence
tgaagaccacaacaacaaca

SEQ ID NO: 2251 - DNA, 221 bp, unidentified
  source 1..221: mol_type = unassigned DNA; note = Description of Unknown:Locusta migratoria sequence
tgatgcatgcactcatactatattagtattattatattatcagcaaaaaaaacctaaaaattatgtatctgtattttattataagtgtatgtatctgtatttatattattagtattatctattattcagcttgtaaattttgtttcttgacatgttccacatccacgaggatctcctcaacatggatctacggaacgaataaactaatctaatctaatcta

SEQ ID NO: 2252 - DNA, 84 bp, Melopsittacus undulatus
  source 1..84: mol_type = unassigned DNA
taggttaccctgctcttgcaggggggttggactagatgatcttttgaggtcccttccaacccttgggattctgtgattctgtga

SEQ ID NO: 2253 - DNA, 51 bp, Monodelphis domestica
  source 1..51: mol_type = unassigned DNA
tgaaactgcacaaagacaatagtcattctcgatcaccgagagactaccact

SEQ ID NO: 2254 - DNA, 379 bp, Nicotiana sylvestris
  source 1..379: mol_type = unassigned DNA
taggggaagttgtgagatatttctacagcgcactagagtgagactagccagttaggagttagtcttaggatgctactggtcagctactgatgcagggctttatctgttggatattagtataccttccatctttttcgtatttcctatatttcttatattgctgttattttgtttttatgtattttatgttatgttatgtattttatgttattttattatgagtctattgatagtactaatatatcgtctcttgttgctttcttgagccgagggtctcctggaaacagcctctctgcccctcggggtaggggtaaggtctgcgtacatattaccctccccagaccccacttgtgggattatactgggttgttgttgttgt

SEQ ID NO: 2255 - DNA, 15 bp, Orycteropus afer
  source 1..15: mol_type = unassigned DNA
taacaacaacaacaa

SEQ ID NO: 2256 - DNA, 30 bp, Oryzias latipes
  source 1..30: mol_type = unassigned DNA
tgatgggaaaagccgaaagagaaagaagaa

SEQ ID NO: 2257 - DNA, 30 bp, Oryzias latipes
  source 1..30: mol_type = unassigned DNA
taagcggaggaagatggatggatggatgga

SEQ ID NO: 2258 - DNA, 612 bp, Oryzias latipes
  source 1..612: mol_type = unassigned DNA
tgattttaactgctaatttattctattagttttagtataggctattttatgtatttattttaattttatgcatcttattttcaattttatgttttttttttctttttatgtttttaattttagcatcttatgattttagccccagtgtttcttgaggggatcttttcctccagggattgccggcttggtcagcggttgttgctgcagttgttgcccttgctggggcggcaggggtctaattttacagcttcttggctgtgaaggggaccctggtgttgtcccggtctgggtgggcactgtggcgatgttccggtggccgggctggctcctggtatgaaaggattcccagatactgtttcctcgcagcagagctaagccatacttgtttatttatttatttatttatttatttatttaagttacatagtcatatttcattgtacgtgggagccatgggtcatgtggtttaatggaggggagtgggaagggtgaagggtgggttgggtttttattgtaatgttgtgtgtttactgtttttagtgttaaagcgcttcgagctgcacaaagtgcatgagaagcgctattttataaatttgatttgatttgatttga

SEQ ID NO: 2259 - DNA, 213 bp, Oryzias latipes
  source 1..213: mol_type = unassigned DNA
tgaaaggtcctatctgcacttttctttcctttccttcctttatttttaaatcatttttcaatttttttcttttcttttaaagtaaattttacgttgattatttctatgatgtattgtgattttaatgcatttttctgttttgtgaagcaccttgaattactttgtgtacgaattgtgctatacaaataaacttgccttgccttgccttgcctt

SEQ ID NO: 2260 - DNA, 99 bp, Parhyale hawaiensis
  source 1..99: mol_type = unassigned DNA
tagcagcgttttgggcttcccggtgttgcaagatgcttcatttgggttgtattacctgtccgtgggagctcaagcgtgaagttttaataataataataa

SEQ ID NO: 2261 - DNA, 46 bp, Pelodiscus sinensis
  source 1..46: mol_type = unassigned DNA
tagatgtcaaggtcctcttcgaatacgatggacgaacaacaacaac

SEQ ID NO: 2262 - DNA, 452 bp, Petromyzon marinus
  source 1..452: mol_type = unassigned DNA
taatacacattacattttgatttaaagaattactaatctacaactcattactaatcataaccaatgactgattactaatcgattatataattacattacccccccctccgcctctaatcactgcacctgaatgagttaagtgatgacgtcaccctgctgctctatataaaaccgggagcaagcgagggctttaccattctggcgaattgcccgatgatgctggaagtatttaccagcgaaacgtcgtactcaaactgtaaatgtggattaactcttcaacacaccggtgggctgaagtagtgaattatttgtcttttgtcaacgtgacactttttttgctgattggccgtgtcgggtggtggagggttacgacacatttataaataaacgcgatctaacccaaaaacctttattatgaataatattggtcgcgaaagcctacgtgttaaact

SEQ ID NO: 2263 - DNA, 682 bp, Petromyzon marinus
  source 1..682: mol_type = unassigned DNA
taatacacattacattttgatttaaagctttcgtgactgcagtgattcatgttcttcgctctttcggtggagtcgcgttggggggaagcaataaaataatagaatatatatgtttgttgttttgttgtttcccttcggcgtggctttgccgagggagctaagaatatgaatgcacattacaattccttataggggaaacacatactaattaacggattactaacgtagcatataatcactaacacacattacaactaattactaatctacaactcattactaatcataaccaatgactgattactaatcgattatataattacattacccccccctccgcctctaatcactgcacctgatatgagttaagtgatgacgtcaccctgctgctctatataaaaccgggagcaagcgagggctttaccattctggcgaattgcccgatgatgctggaagtatttaccagcgaaacgtcgtactcaaactgtaaatgttgtggattaactcttcaacacaccggtgggctgaagtagtgaattatttgtcttttgtcaacgtgacactttttttgctgattggccgtgtcgggtggtggagggttacgacacatttataaataacgcgatctaacccaaaaacctttattatgaataatattggtcgcgaaagcctacgtgttaaa

SEQ ID NO: 2264 - DNA, 303 bp, Petromyzon marinus
  source 1..303: mol_type = unassigned DNA
tgtttttaacatttgatctacataacgacaccttgccgatattaactatgttaccctatttgtattttttatttttaaattatatcttaaagctattttatattcgatatttatttaattttatatacttcagccccttggtgttagttagacttttaacccttattatagtaagacttgtttaaaacttatttaagattttagattcctatatgttgaatgtatgcaccatcctgccaaagtaaattccgtgtcggtgtgaacttacatggcgaataaaaccctttctgattctgattctga

SEQ ID NO: 2265 - DNA, 522 bp, Procavia capensis
  source 1..522: mol_type = unassigned DNA
tctgctgcaaaggacctcttcaaagtattcaaaagtaaggatgtcaccttgaagactaaaatgcgcctgacccaagccatggtattttcaatcacatcatatgcatgtgaaagctggaccatgaacaaagaagacagaagaagaattgatgcctttgaattgtggtgttggagaagaatgttgaatgtaccatggaccgccaaaagaacaaacagatctgttctggaagaagtacaaccagagtgctccttggaagcaaagatggcaagactgcatcttacatactttggacatgttgtcaggaaagatcagtccctggagaaggacatcatgcttggtagagtggagggtcagcgaaaaagaggaagaccctcgatgagatggattgacacagtggccgcaacaatgggcttaagcataaaaacgattgtggacatggcgcaagaccgggcagtgtttcgttctgttgttcatagggtcactatgagtcggaaccaactcgatggcacctaacaacaacaa

SEQ ID NO: 2266 - DNA, 375 bp, Salmo salar
  source 1..375: mol_type = unassigned DNA
tagcccatctataattagcccaaacaactacctcatccccatactgttatttatttattttgctcctttgcaccccagtatctctacttgcacattcatcttctgcacatctaccattccagtgtttacttgctattatttcgccaccatggcctatttattgccttacccctatcttactcatttgctcacattgtatatataactttttctactgtattattgactgtatgtttgtttactccatgtgtaactctgtgttgttgtatgtgtcgaactgctttgctttatcttggccaggtcgcagttgtaaatgagaacttgttctcaacttgcctacctggttaaataaaggtgaaataaaaaataaataaa

SEQ ID NO: 2267 - DNA, 642 bp, Salmo salar
  source 1..642: mol_type = unassigned DNA
taacattgagtggctgctgccaacatactgactcaactccagccactttaataatggaaaaattgatgtaatcaatttatcacttagccactttatattatttatattagataatgtttacataccctacattactcatctcatatgtatatactgtacgctataccatctactgcatcttgccatcttgatgtaattagatgtatcactagccactttaaacaatgccactttatataatgttttcataccctacattactcatctcatatgtatatactgtactctataccatctactgcatcttgccatcctgatgtaatgtatcactagccaccttaaacaatgccgctttatatgttttcataccctacatactcatctcatatgtatatactgtactccataccatctactgcatcttgcctatgccgttcggccatcactcatttatatatttttatgtacatattcgtattcattcctttacacttgtgtgtataaggtagttgttgtggaattgttaggttatattacttgttagatattactgcatggtcggaactagaagcacaagcatttcgctacacttgcattaacacctgctaaccatgtgtatgtgacaaatacatttgatttgat

SEQ ID NO: 2268 - DNA, 227 bp, Salmo salar
  source 1..227: mol_type = unassigned DNA
tgacagaccaatcaacctgcacatgtcctctactgtatgcttattgttattgttgaatgtatggttattttgacccttggttattgttgttactgttgtcccgttgacaatatttgattctcatttttatttatttttatattgtaaatatccaaaataagctttggcaatatgtacattgttacgtcatgccaataaagcgaattgaattgaattgaattgagaga

SEQ ID NO: 2269 - DNA, 391 bp, Salmo salar
  source 1..391: mol_type = unassigned DNA
tagcccatctataattagcccatctaactaactacctcatccccatactgtatttatttatttattttgctcctttgcaccccagtatctctacttgcacattcatcttctgcacatctaccattccagtgtttaattgctatattgtaattactttgccaccatggcctatttattgccttaacttacctcatttgcacacactgtatatagactttttgttttcttttgttctactgtattattgactgtatgttttgtttactccatgtgtaactctgtgttgttgtatgtgtcgaactgctttgctttatcttggccaggtcgcagttgtaaatgagaacttgttctcaacttgcctacctggttaaataaaggtgaaataaaaaaa

SEQ ID NO: 2270 - DNA, 108 bp, Salmo salar
  source 1..108: mol_type = unassigned DNA
taatcaaatggctacccagactatttgcacccccccccccccacgctgctgctactctctgttattatctatgcatagtcactttaataactctacctacatgtacat

SEQ ID NO: 2271 - DNA, 164 bp, Salmo salar
  source 1..164: mol_type = unassigned DNA
taggataaagtaatccttctaaccccccccccccccttaaaagatttagatgcactattgtaaagtggttgttccactggatatcataaggtgaatgcaccaatttgtaagtcgctctggataagagcgtctgctaaatgacttaaatgtaaatgtaaatgtaa

SEQ ID NO: 2272 - DNA, 170 bp, Schistosoma mansoni
  source 1..170: mol_type = unassigned DNA
agagtggttctaactttcttaactgaaagagtcttctggttgtacatttcagtccgccttatcttttcatcccttctcttcctactttcattattttgtgtggcgcatatgtatctggtgcccttttgtaccaatatatatgtgtttaaataaataaataaataaataaa

SEQ ID NO: 2273 - DNA, 1340 bp, Schmidtea mediterranea
  source 1..1340: mol_type = unassigned DNA
tactaccacaagacgggtattttggtaaatcttgaaaaatttcgatttaattaatgtttgagttaaaattgccatttgacttgtgtatgtgatttattgtgttaattaatgaattccaccctcttccagggaaaggtttaactttgcataaaattaaactctctgtctacacttagtagcaaattaatctagaatgaagaagcctgatggtatttttcccaaatctgctgaaaacttagttctgaaggatggaaataaaagcagataaagattcaatattcgataaagaaatggacctcaacaatcaatgtcaattatcaataataaatctgggcagatgtcagaaggcgataatcaaatgctgaattccaatgaccgaatctactttgatgtcttagatttgtgatcagcttccactacaaaggtgctgcatcaaaagccaatggagattcaatgccggatgaaaatgccgatgaaagagaatcagagccgaggacaatttagagaaaattcgattgcaactgcgtcaagagttcctcaacaataagatgaaatatcgaaactcaattggatcttttgcttttggagagtctcagaacggcaagctccatgtagagctgtgtccgatatgaaaaattcaaaattgttatattaataaatttttactatagtactactgagtgattttgttaagtctacgacttagtcgtagacgtagttgtaggcgttgttgggcgctgatgggagctgatgggcgatgatgggtgcggatgggcgatgatgggtgctgatgggtgcggatgggtgcggatgggtgcggatcggtgcggatcggtgcggatgggtgcggatgggtatggatgtgtgtggatgggtatggataggtacggatgagtgtggttctagaatgtaggtaggtgtggaagttggtaggtgtgtggaaggttctagaaggtaggtgtgtggaaggttctagaaggtaggtgtgtggaatttggtaggtgtgttggtccacaactacgtgacataataacagttaggtaatgtgttggtccacgtgacataataaagttaggtaataagtgtgtctccgagtagtgactgaccagtaagtacgtgacataacaatggtgacataataagtgtgtctccgtgtagtgactgaccagtggtcaagtgatgtaatcatgaggtcactgaccaaaggtcaattactaggtagcaactgagtggacaaaggtcaatctccaggtagcaacagcgcgtgcagaggtcaaatgttacgtaataattacgtaagccaaggggggttgtatctgacgggctcacatcctactact

SEQ ID NO: 2274 - DNA, 427 bp, Strongylocentrotus purpuratus
  source 1..427: mol_type = unassigned DNA
taatggatgtgggtattattattattattagtattattaattctctctcgtgtacaggtggacaaaccggaacaggttgcatgcagtgtgtgtgtcggcgtgaagggggtatgatgagatgggtgggctagggggggggggggggtaagagtttgtgtggtgtgagttgagggaacaggttgcatgcagtgtgtgtttgtgtttgtatggttgtttatgtgtgtgaaagggggtgtggtgtgggtgggctagaggggagggggggggggtgtgagagtgttgtgataggatggtaatatgtaattttaaaccttcctctactgttattttgattattcactgttacatgcaagacttttttttcccctttttttttctctatgttcattgattgatgtaacttatgaaatgtcttgtatcaaagatc

SEQ ID NO: 2275 - DNA, 127 bp, Oryzias latipes
  source 1..127: mol_type = unassigned DNA
tgactggagtctggaaaaacaaactgcacctttgctcatcctaattgttcgctactgtcattgtcacttttgcacatttgcacttttagaactgccactcgacatcttgtgtttttgtgtgtatgtt

SEQ ID NO: 2276 - DNA, 273 bp, Daucus carota
  source 1..273: mol_type = unassigned DNA
tgagggttatggtgtatgtttaaagggagggttcagctcagtcattaccagatgcattagcgccaatcaaaaatgtttgggtaagtcccatgtgaagaaggccatgggctaaggtattatattcttattatagcacacactattttatttgttgtgcactaagccgggggtcttcacggaaacagcctctctactttaagggtaggggcaaggctgcgtacatcttaccctcctcagacgctgctcactgagtatgtttggtttggtttggtt

SEQ ID NO: 2277 - DNA, 402 bp, Lottia gigantea
  source 1..402: mol_type = unassigned DNA
taattattcatattcaaacaatttccaactttaagcatagttagttatatgaacaatgtaatttctattaataaaagactccaataccagcaatagttgtttatttaatcttcaattaatcttttttaattcatttactttatttcaattattttacttaatcagcctgtatgttattttaagaattatatacctcttattgtacctgttaaaatttaatgtaatgtatcaataaaccatttatctcttgtgtgttcttaataataagcattaatgtatatatagtttgcccatcacttcttctcattatgtgcctgaggacgacgggggaaacacgtcgaaacgttgcataaaactttaaccagtgattgttgttccataaagctgtgtctatatatcgta

SEQ ID NO: 2278 - DNA, 852 bp, Strongylocentrotus purpuratus
  source 1..852: mol_type = unassigned DNA
gtctggaacgctcttgttcattgccgtgcaatatgaatgctgcaatctcctttaacattttattttaattagcacacgccaataatgaatcttgcttacttattttatcaatatgctaaacaacattatcattgatgtttttttttttaaacctcaatcaaggaatctttgaaattgtatttcatgtacttaagcaataccatgttatgaattgattatgatactaacatatgcatgttattatatttatgtgcataatatgtcaactatttgtttttataattaatagtttaaagtattaaatgggaaagtattaatagtatatatggtataacgtaatggtgacggcaaacttttttaacattgaaatatattgcaataatttgttttgatatttataccatactttgttttaactttaacctaatactatgtgttattgcgtacaaatgtcaactacatgtatatatatatatatttcaattgtgggtttttgttgttgtttgtttacaatagttttaattataaactgggaaagtatttaattgtatacattttataattactcaatggtgacggtaaactttttttaacattgaaatattcgcaacaattttataaatatctatagcataccttatcttaatttgaacttcgtatactatgaaatgtactatatcgcctttttattgcatgtccgaattatctctcatattataatgtgcatttattgttgttttgattgacattattattgaaccatgtatgttgtaaagggccctgatgaaaaccagctcatgctgatcgggctaccctttttaaagatgtgaaataaataaataaataaataaa

SEQ ID NO: 2279 - protein, 29 aa, Betaretrovirus sp.
LMGALQPGLPSPVAIPQGYLKIIIDLKDC

SEQ ID NO: 2280 - DNA, 90 bp, Aedes aegypti
  source 1..90: mol_type = unassigned DNA
tgactgtatgtttagcttaagttatttatttatacattcattaagacaacttcgtgtcagatggattaaatcagaaatacaaatacaaat

SEQ ID NO: 2281 - DNA, 160 bp, Drosophila ananassae
  source 1..160: mol_type = unassigned DNA
taaaattaaaataaatatactgttaacttagctaattataaaaataaataaataattaaaatacgtagtcgaaggcctcgtagctagcactacaccccaaactgttagtcatagttttgtaaactgtactatcatatccaataaataaataaataaatat

SEQ ID NO: 2282 - DNA, 121 bp, Hydra vulgaris
  source 1..121: mol_type = unassigned DNA
acattttaaatactaactttttttatgtttgtatgttagtgtgttacagctgttaaagttacaaactctacgtagtttggactcatcactctttaagtgtacagcactattatattatatt

SEQ ID NO: 2283 - DNA, 298 bp, Strongylocentrotus purpuratus
  source 1..298: mol_type = unassigned DNA
ataaatataattcataattcatattttacattattagtttgtatattgtaagacattgttgagtactgattcttgttttttttaaagtatcgattgtaaaagtaaattcattattttttgttttgttacgttctctaaactgatttgtaccaaaatactttgtttagctgtttaaggggttaggctcgactagcacatgtgctattatctggccccttttaccaaccaatagtttctcttcctgtatatgtaattattgtataaaatgtatgaaatgtattgctgttggtaaataaaa

SEQ ID NO: 2284 - DNA, 318 bp, Strongylocentrotus purpuratus
  source 1..318: mol_type = unassigned DNA
tgatattagctacagattttaacggttgttaaattcattatattttacatgtaattgttgtttgtttcactttttattacagcttaactttttatatttgattaattggtcagccgcatacaaggaccacctcctttctggctgctaccagcattagcaatttcctttgtattattcatgtttgtaaattgattctgtgtatttctgtgtttatctatgttagtaattgtaattgtgtgaaactttgtatactgcttttgttttaccctgtatgttttgtattgcttggcaaaataaattgaattgaattgaattgaa

SEQ ID NO: 2285 - DNA, 1884 bp, Schmidtea mediterranea
  source 1..1884: mol_type = unassigned DNA
tgagtagtggtatatttataaatataagtagcgaatttataatatttatctatactatctttatatatttcaagtggatcttttatgactaattaaaaatacttttttatatttttaacttttattactttattttctatttttatattctatgattcttataatgtaattttattgggaaagagagtaaacggggggcaatggggttagtctcagtatggatccggaccctccggaatcgggattcaatgactggggcagtagatgcgggatggaaattaagagtactttggcattagggtttctgggactgtgagtggtgaaaccgtaaaaagggagtaagaatccgggctattacctgtacggctagagaaatctagttcagccttgatgccgtatttttttgggaagtttattcgcactgccgtggtttgcgaccaagtttgatgggaagacacaaatagatttagttttggttcttttgccattactgaaatctacaacgaagccaccggctataaagagtggtactcttgtggtataccttttaagcacggtaaggaagtggaatggatgggttgctcattccggactgcgcgttggagcaattatattgatcgggtgatactaaaaagccgggaaatatcaattactagttttctggaatactgctgctcacttacagtttctggattacaaatttacccataggtaattgatatatagctggctgtaaggggtatgggacccttacaggtatcattattaaaggcttggatgatcagatgggtatataagggagggctatcaagttactggttttctgaatgatatttggattacatttctatcaaggtaacagcgacgtctataacttatatatccatacgaaatggaacgatcagatggataaacaagggatggattatcaagttactgggttttctggatgatattcggattacatttatcttaaaggtaacagcgaagtcttgaacttaactttccatacgtctagggaaattcgctaatagaaatattagtgattaataaccacacgggctaacaacctctaaggttgggcaagtgagttggattcatccagcttgcgcgtattatattttcgatccgatgtcacctgaggttacggggaattaaaccacagcttttcttatattactgaatcaggatataaggattgcatattaaaacgttggtgggttaatgaactataactgaggagtaatcaaatagtaatgatttgaatgcaaaaggtttcatttgttactgattaacttgcgggtttcatttaaatatcttattttatacatgggcaagaataacaatgtgaagtaattcagctctagtaatctaatgataaagcaattaccaaggtataacgccctattttgtagggttggccaaatataacttgataataaatgctgattattgatctactaggtatcagggtgcaatgccttacgaaggtaaggttggacaaatgtaacttggtaacatgtataactataagacccccgttcaggatagtggtgattgatagtggtgatgtagttaatacaggcgtgtatgaatctggtgaaggtgggaaaaacttcataactccggttatgatttgaaggtcaggtttggattgggtctgatcggctaatcaaggtagtgatgaactcaaagtaggggtctatggagagggagcacttgataagataattcacgataagatggttagtaaaaactcgcgatccctgcgttggaaagttttgaagtgctgaaggttggttagcaataatcaacaatgctcgttagcgaagggagaataattccgggctatcattcaaaactgtattttatcaatgaattatt

SEQ ID NO: 2286 - DNA, 23 bp, Strongylocentrotus purpuratus
  source 1..23: mol_type = unassigned DNA
tagtgactcgataagaagaagaa

SEQ ID NO: 2287 - DNA, 164 bp, Drosophila persimilis
  source 1..164: mol_type = unassigned DNA
taactctaatataaaacctatggaatacatctcacatataataaacataatataataagcataacataataacaacatagccgaaggtcgtagtaaccagtgctatcattaataagctaggttaatagttttaactctaacctcgctgtaaataaataaataaa

SEQ ID NO: 2288 - DNA, 108 bp, Drosophila sp.
  source 1..108: mol_type = unassigned DNA
taagattctccaggaccatgtgaaaaacaacatccggataaataagggccatactggcctatgattggccccctcaggagggccgtccggtttaacctaacctaacct

SEQ ID NO: 2289 - protein, 903 aa, synthetic construct
  source 1..903: note = Description of Artificial Sequence: Synthetic polypeptide
MIDDSELYIDDYILLRRDRTRHGGGVAVYISKRFNYKRRDDLISSTLECLWFELHYPNKSPILVGEFYRPPNSHVDFFEELDGNLDSALSEDMSCIILGDFNCDCMPHQLDLNAEKLMFYTNMYGLSQLIDTATRVTNTSSTLIDLIFVSDKELYNEWGIFETSISDHYLVYTVRDFSAKIHNKSEYAEFRSFKNLDEEKFYSELRSTPWQVIKDIDNVDVAWDMWLTLFNNIINKHIPVCKKRIRKKACPWISDEIVKLMTERDKVLKAAKANKSDDLWDTYKYLKNTVIHLMRKRKREYNADQISQNHNNSKQMWRCLRNLVPKSLPISPNSINVDGANVSDNANIAEAFNDFFISNATKITKDLRRNKSQLRVDEDNNIGPTHSQFNLNLITEDFVLKQIDNLSIDKATGEDHISCKLLKMTKNVIAESLCDIINKSLSTGVVPREWKKARVVPIFKSGDISSLNNYRPISILPIVSKIIERAVHQQLSEFLDVNKLLHPNQSGFRPKHSTATALAKLVNQWSLNIDNKEISGVAFIDLRKAFDTVDHELLLHKLACIGCSNRTIYWFKSYLGDRQQVTQFKGAKSHPSTIKLGVPQGSILGPLLFSIYVNSLPECTPEGIIDMYADDTTLTVSANDATVVEEKLTVALNRVMAWIKENRLVLNTEKTCVMLIGSPANLKKIESFTISLNGNLIKRVQFTKCLGLLIDEELKWSKQIENVSKLTQKNISMIKRAKSFLPQKSLKLLYNSLVLPRLDYCSVVWSNRFHSHTTKLQKIQKRAARIILNKTYDTPSADLFTSLKWMTLDKRFELSRVMMIYKCVHNLAPSYLQVGLINPNDVHEHHTRQIDSGCLRVPRFHTDCYKCSPIVSSIFEWNKLDNSLRTASSVNSFKRLFKQSCNL

SEQ ID NO: 2290 - protein, 765 aa, synthetic construct
  source 1..765: note = Description of Artificial Sequence: Synthetic polypeptide
MRQHNNILNDQGNALDLCFSNTDGIHVARSELSMVPEDSYHPALDVVLSIFDPPVLSPSNGPSPHTSYKYSAGDYTGMYHHLSGVDWASILESSDINGQVYLLTTVVQEAMDMYIPLKTSKKSRFPIWFSRELRTLLKRKDFLHRRFKKSGLPKWEVEFKICRKRCKKILNRDRQAHSDSVESDLVKNPKKFWRYAKSRLGKNIESEIVLNQHSDSAKGMSELFADHFASVYINNNNCSSSILPHSDVFGDSLGSVVVDEECVRLCIKKMKPTLSAGHDGIPAAIVKAYHELLTPILCTIFNNSLTSGIFPDDWKLAVVVPVLKSGNSGDVLNYRPISLLSSFSKLFEMVIHQFLSFKFRSIVIPNQHGFMSGRSTSTNLVSFMSAASEVVCNRGQLDVFYFDLSKAFDVVNHNILLYKLSSYGVCGSVYNLLKSYLSDRHAYVRVNNTTSSLYKASSGVPQGSVLGPLLFNIFVNDVSRVILNSSFLQYADDIKLYKKISTLEDCIALQNDAYSFGRWCLDNDLRLNHSKTKIMTYSRKTHDIFFPYSYHGELLSRVSELRDLGVVFDSTLRFDTHVIKVVQSALRTLGAVSRITKEFKSPSAFFTLYCSLVRSQLEYASVVWNGISKTNSSSVERVQNKFISIFKYRYLENGDPCLNGVCNSQLVNLLSLQQRRVKADLLFLFKTLHGSINSPSLLSEVSLRVPRVPTRLQSSFYIARHFSNLNPIQRSAECYNRYSDTIDIFNSCGSKFGNAVQIFLLQEKG

SEQ ID NO: 2291 - protein, 846 aa, synthetic construct
  source 1..846: note = Description of Artificial Sequence: Synthetic polypeptide
MPRVSHPPEWFSILIRSSIKFDTQPPIQEDWVQCARISVSTTHGDITLAAAYCPPRFRATDDCFSSLLDSLGPKFVIGGDFNAKHTWWGSRVCNPKGRALCRQVLSRNLNCHGTGTPTYWPTDPAKTPDILDFAISGGLDPARIQTREVEDLLSDHSAIAVSVYASAMLRSAGKKLIFKTSDISKYHHWLNNSTVTNPPLDTPELIDAAVVNLTSQIQEAATYAAPRFSNQTRDRSRDVHFWNPRVNELKSEKRRLRRVWFLSRNPRDKTALNRATKELKETLVRLRKEALDSFVGNLAPGDPHHNLWNVTKRIKRPLKRIPPIRRQDNSWCRTETERANAFAEHLEEVFTPANRCSPNEAAETARLLSEPLFDSESIPQATEEEISNLIAAMGNHKAPGDDAINAIALKLLPPISKSLITTIINKCLQLGHFPSSWKRAEVVMILKPGKHEANPASYRPISLLPVLSKILERVFLTRVLPVIEEAGLIPDHQFGFRRRHGTPEQGHRVAQYILDAFENKKYCLAVMLDIKQAFDRVWHPGLLLKLKNGLPQPYFKFLKSFLEGRRFAVRCGEARSDVKEARAGVPQGSVLGPLLYNAYTADLPVIPSQYIMAATYADDTAFLTTADTPAEASQTMQEQLDLLNTWHTRWNISVNSDKSTATTFATRRGTCPPVSFNGFPIPEVANPNYLGFTLDRRLTWRPHLLKKRKQAENRVREFYWLMGRQSKLPTSTKLLIYKAIIRPIWTYGIQLWGTASKSNINIIQTFENKTLRTVTNAHPFHDNATIHEVLSFPWVKDEIKKSSRQYMQRLQDHPNNLAQDLLDTSQRTRRLHRSHPLDLSGIRHAN

SEQ ID NO: 2292 - protein, 165 aa, synthetic construct
  source 1..165: note = Description of Artificial Sequence: Synthetic polypeptide
MAFDTVSHSILIDKLRKCGLDDQVVRWIKNWLKGRRQRVVVNGAESSWRSVTSGVPQGSVLGPVLFNIFINDLDEGTECTLSKFADDTKLGGVADTPEGCVAIQRDLDRLESWAGRNLMKFNKGKCRVLHLGKNNPMYQYRLGVDLLERVKGKGPGGPGGAEPQR

SEQ ID NO: 2293 - protein, 637 aa, synthetic construct
  source 1..637: note = Description of Artificial Sequence: Synthetic polypeptide
MKIAECGVPQGSPLSPLLFLLYIAILLQDENKNTKFGYADDIAILSIGNTASEAVAEAQKEVDKLVQLASENRIDFDSTKSELLVIGGGPKKKLDTSGLSVQIQGHSVPTSPYVRWLGVWLDSQLNFKQHVQEWCGKAQRITQFMRQTNSVQRSAAPGPMIKVVQACVLSTALYGAEAWWPGLTRITTQRGKKVCTGVGWHTDLLDSTILKAVRAALPVWRTTPNMALHRESGITPSAVILQQRNILAAARIQRLDDWHPLVFRSREDPKDTISRLGLCICQKNRSFKFPEWYLTRLEISAKNVPMAEGPGKLYFPEAESIRKNTGSDFQDEADYAKQWIASLSAETVCAYSDSSSCGPARSAWGYTLYKGGQVIGSDSGPLLGAEVYDAEIFGAQKALERALGKAGNCPIKVLLDNTTAVRALRTGQTKSSQEAVEVFTRLARQARSVEIRWIPAHAGVMGNEDTDRLAKEALRNLPDETDTSPSEMRDRPKYTFAALTRFVRQRCDEVVESWWRDHRPSRYEELDLQMKRKRPPELALPRWAHHRLITARTGHGDFIKYHERFGHEFENCECVCGREKRPWHFAECRIALQQWRNLKHEPPPRGREMLAEKGWERFLQFLTVTKCYERQTLHRED

SEQ ID NO: 2294 - protein, 975 aa, synthetic construct
  source 1..975: note = Description of Artificial Sequence: Synthetic polypeptide
MQPDPRTRKLALGTWNVTSLAGKEPEMVREVERFRLEVVGITSTHGLGSGTTLLERGWTLHHSGVAHGERRRAGVGLLIAPQLCRHVLEFTPVNERVVSLRLRVGDRSLTVVCAYGPNGSAEYPTFLESLGGVLESAPTGDSIVLLGDFNAHVGNDSDTWRGVIGRNGPPDLNPSGVQLLDFCASHSLSITNTMFKHKGVHQCTWHQDTLGRRSMIDFVVVSSDLRPYVLDTRVKRGAELSTDHHLVVSWIRWRGRKLDRLGRPKRTVRVCWERLAESPVREIFNSHLRQSFDWIPREVGDIESEWTMFSTAIVEAAARSCGRKVSGACRGGNPRTRWWTPEVRDAVKLKKESYQAWLACGTPEAADGYRQAKRTAARVVVEAKTRAWEEFGEAMEKDYRLASKRFWQTIRRLRRGKQCPTNAVYSRGGQLLTSTGDVVGRWKEYFEDLLNPAVTSSIEEAEDEGSEVDSSITRAEVTEVVKKLLGGKAPGVDEIRPEYLKSLDVVGLSWLTRLCNIAWQSGTVPLGWQTGVVVPLYKKGDRRVCSNYRGITLLSLPGKVYARVLERRIRPIVEPRIQEEQCGFRPGRGTLDQLYTLYRVMEGSWEFAQPVHMCFVDLEKAFDCVPRGILWRVLREYGVLGPLLRAVRSLYDRSRSLVRIAGSKSDLFPVHVGLRQGCPLSPVLFVIFMDRISRRSQGPEGVRFGDHTISSLLFADDVVVLAPSSQDLQHALGRFAAECEAVGMKISTSKSEAMVLSRKRVACPLQVGGECLPQVEEFKYLGVLFTSEGRMEREIDRRIGAASAVMRSMYRSVVVKKELSRKAKLSIYRSIYVPTLTYGHELWVMTERTRSRIQAAEMSFLRRVAGRSLRDRVRSSVTREELRVEPLLLHIERGQLRWLGHLFRMPPERLPGKVFRSRPTGKRPRGRPRTRWRDYVSRLAWERLGVPPEELEEVSGEREVWASLLRLLPPRPGPG

SEQ ID NO: 2295 - protein, 1554 aa, synthetic construct
  source 1..1554: note = Description of Artificial Sequence: Synthetic polypeptide
MMTMTFNGIRRLGWFLSVLSLVKQRLLNSSHESNSLSKLILKQICVKLNGVNFTQEDVDELNSIILSKIEGWEQDLNKFIEFFDNIQFEVFDIAEMANHCLLLAVSQIFECEVRVSNDKDDCKIIGEGYKNSWFGVLEIGMESSERVEKVTRALKGSSKIKLGKCGKDRQVNGMAGKGNEPLIVKEECLWYTTIGNWIIEIESKGEDDGKLYSGLMMNVIQKMNEGEIGEQEMMEMLKQIDLFFEMYGEILNRLEEEVMINGNALYEIWKIVSKLAVALNREIIVLMRGGEEIVLGVTERKRKFASFWLVAEFQEVGVRYYSIKSSKLIQEWKENMSIKPAIDVFEKRAEEVSYNLRFKESNQQAVIKRIDGDGSCLIRAMLDQMGRIDQNYYMSDYNVTKIRNNIASYINNSRERFNVYLYEHIEEVGTIERVIENIREKSYWLGEEAIITVAELFEKQVEVYTNQGLSVRIGVRKDNESALRIFYTGNHYDSVISIAEEEAGEIEAEMININEAEGNKMQAGGESRAVKSNKVREVNESSSHSKKITQYGKQSTNTTGDSNNHEQSKKKVEKQLRKDSEIKDKENKALKIVSWNVRGCRRKVKRDEIDDILVANDVMIAALQEVNTIGDDLSTNNYSWQVKDNHTNKARGLAIVVRKNQRIRILQAKECRKGIMWIKLTINGVKLIVINVHAPNSNQKNFLSYLNEIVTRESDRKSLIVLGDFNAQIGSEDLQPEDRVWIGTKLGHRYCNDNGELFKYFLHLSKLKNVSTKIGKSIEITWRTKDKSSQIDHVLVPQYTSFRIRYIKGCWTDLKTDHVMLTIGLVFTNNPVLKKSNKDTARINVDLLKIPEKQKCFREKLSSIPTKTDIQTDTLDKCYEEMASRLRIAAYNTLKVSTVPNTPRRKYALDRLRDALKVSKKHPDMINYKYRVANRRHEYQIAVKEHREKEITDFFKNLNDYDAGVRVRKTYNYLKDFVKRKKQKKAMISSRVWEDILKTCEGPEVEFCAEHDYTPLPNPPTNDEIKSILFSACNGKSPGSDRVVAEYIKAADEETLERIIEIIKAVYIRNDMPKEWKKSTQIPIPKKSGASEADHFRRISLCNVVYKIYAKWIAKQLRAYAGEPGLHQAAFTANRSTDDHIFVARRMMEEYWNSGQDLFILALDISKAFDNVKLQSIGKVLIDLGVPSRLVDRVLSCVKDEVTRIMWENQYSAEVKRGKGIKQGCPLSPLLFNYLIQDVLKKVVAEIPELKLMGINQLILPLILVFADDILIIARTKAELEKILHELELQLAKVGLEINRDKSQVLIRYPNDKAQHPKEILLNNKIFKVSDSLAYLGICLTATLNRKLTCKQRCLNAVKSSRIIVEFCKTFKPSWELGKLMYKTVIAPSLLYGTKVSVMTKKSRLKIGNYEKLILRNIYQYCKKPKDLKFNARKLLDGKTINRRIRVGRISYFGHVRRREKNHPLKLAYKLKFDKKKEGRPSLTWLKSLDQDFERYQNMNRSSWEELSKDREKIKKKLDEIYKNEESEISDGESSDGDQNSRYKHWKWKRRNEK

SEQ ID NO: 2296 - protein, 282 aa, synthetic construct
  source 1..282: note = Description of Artificial Sequence: Synthetic polypeptide
MVVKWGNVLSEPFYVSNGVQQGGILSPFLFNVYIHDLSTNLNLCKTGCVVGCQTFNHLMYADDLVIFSPYSAGLQTLLKVCSDYGRDFDIKYNPSKSKVMIVRTKDDRNVNFPVFKLCGTTLEQTSSIKYLGHFITDDWRDDRDIQRQYCKLYAQANMLMRKFSACSLQVKCSLFRAYCTPLYTAPLWWNYGRGTFHKFLVAYNDAFRLLLQVPRWYRASQLFVDAHIPTCEALLRKLTYSLMERLDKSKNSIIMSLTDPKRSSCRYTSALRKHWIQRLYSF

SEQ ID NO: 2297 - protein, 530 aa, synthetic construct
  source 1..530: note = Description of Artificial Sequence: Synthetic polypeptide
MEGMLSDESTYVKLSKDPIQKLTKEARSLLSIWKDKGFIEQHIYRSLLTTDGVLPRAYGLPKIHKPNNPLRIIISSINSPLHSLAYFLHNIIYNSIPEADSFVKNSFHLVNKLNGLHVESDHVLVSLDVVSLFTNVPKNLAVESVTTRWDLISKNTTVPVNEFLKALNLIIDSTYFKFNNTCYKQIFGLPMGSPLSPILADLVMQDLECKALKLLSFHLPFYCRYVDDIILAAPANSLSGILDTFNSMHDRLQFTMEREIEGKISFLDVMLINVNNRIIFDQYRKPTFSGRYLNFFSHHPLCHKKGVIFGLVDKLLLLSHPQFHCKNFINLVNILLENNYPLNFIFSMINSRLKHLFYKDDTYVEDKRVRRFFTIPYIESVSEKFSSFSCKFDCSVAFTIPSKLNKFITTGKDHTERLSCNDVVYKINCKDCDSSYVGQTKRQLKTRVSEHKADIRKASSPSVISLHRIGENHEFDWENVKILDKEPSYVKRSISEMLHIKNQMHGLNKQSDTELLSDAYLPILERIPPS

SEQ ID NO: 2298 - protein, 835 aa, synthetic construct
  source 1..835: note = Description of Artificial Sequence: Synthetic polypeptide
MSYAKIKTKYKDSKRTINKFQLTLVKLTKLKSSLKFLLKCRKSNLIPNFIKNLTQHLTILTTDNKTHPDITRTLTRHTHFYHTKILNLLIKHKHNLLQEQTKHMEKAKTNIEQLMTTDDAKAFFESERNIENKITTTLKKRQETKHDKLRDQRNLALADNNTQREWFVNKTKIEFPPNVVALLAKGPKFALPISKRDFPLLKYIADGEELVQTIKEKETQESARTKFSLLVKEHKTKNNQNSRDRAILDTVEQTRKLLKENINIKILSSDKGNKTVAMDEDEYKNKMTNILDDLCAYRTLRLDPTSRLQTKNNTFVAQLFKMGLISKDERNKMTTTTAVPPRIYGLPKIHKEGTPLRPICSSIGSPSYGLCKYIIQILKNLTMDSRYNIKNAVDFKDRVNNSQIREEETLVSFDVVSLFPSIPIELALDTIRQKWTKLEEHTNIPKQLFMDIVRFCIQENRYFKYEDKIYTQLKGMPMGSPASPVIADILMEELLDKITDKLKIKPRLLTKYVDDLFAITNKIDVENILKELNSFHKQIKFTMELEKDGKLPFLDSIVSRMDNTLKIKWYRKPIASGRILNFNSNHPKSMIINTALGCMNRMMKISDTIYHKEIEHEIKELLTKNDFPPNIIKTLLKRRQIERKKPTEPAKIYKSLIYVPRLSERLTNSDCYNKQDIKVAHKPTNTLQKFFNKIKSKIPMIEKSNVVYQIPCGGDNNNKCNSVYIGTTKSKLKTRISQHKSDFKLRHQNNIQKTALMTHCIRSNHTPNFDETTILQQEQHYNKRHTLEMLHIINTPTYKRLNYKTDTENCAHLYRHLLNSQTTSVTISTSKSADV

SEQ ID NO: 2299 - protein, 1206 aa, synthetic construct
  source 1..1206: note = Description of Artificial Sequence: Synthetic polypeptide
MCIQETWFNDFNVLSIPNYVCVCKNRPDGRRGGLVMYLKNDITFQAMDTPRNAEYQKVDIFCKNGVISIFNYYNPCKKIELIDLNNMIRNVPGKYLILGDFNSHNPLWGSNKLDTNGRTVESFIENNDLVLLNDGSPTRLDPYYGTYSNLDLSLVSKELARNTEWKVLSNNFGSDHNLVCLNFKHVYNRPGGENMGQRWSFRKVNWEEYREEIEEALRKEGYENLGAELNIQGRYNVIVKVIKETSNKCIPRVQIAKRRKVNPWWNNACKKAVQERNRLKNRLRRYYDLNDVKKYLKKKAVAQKVIRRAQYDYWLEYCRRMNRFTDIGKVWEQVKRMRDSTMNKHIFHNLFVDGNILKESEEKANAMATYFKSVDESLSVTKNENENILYNNSSTNDDDCINDDFNMSEMGNVLKEMKNSSSGKDDIYLIMIKNLPNKALVYLLNLYNDIWKISLFPHQWYEVIQIPILKSGKDPTQVTSYRPISLISTFSKIMEKMIKNRLTWFLEKNRLLNPIQSGFRKYRNVKDHLVRLETDIHISLKSKKYTVAVFLDLEKAYDSLWKTGLLRKLSILGIGGKMLLFIKAFLLSRISNVRINNYMSRHYTLENGIPQGSSLSPLLFTLMLNDLKINVSDVKLSCYADDIAIWCSNKDLELARRKLQEALHELEIWCWTWKLNVSPTKSAVLVFTNKQKKDILLQIKGHNLPICEQYKFLGVRFDSNLTWSVHIDSIIDKCKKRINLLRCVSGTPWGSKYEILMMIYKGLILSILDYGSEMYDSACISLTKKLDSIQYRALKIITGTIHNVSLEALQVLTGELPLRYRRRLLNDNFRVYLLSSTLNHPTKEVLGDDYDLNNLEWKIGEGPFKLRSFRDEVVVEGQTNLLPKIPEWRLARPQVSFEHHGKVQKKEMPPFEIKSIVLDSIGNSWNGFLHIYTDGSKLEDGKTGAAFYVSHYNVVKFFRLSHVCIMRAELVAILMALEWINTFIESSSVVIFSDALSALQMIDSYFIRCAIVNEILSIINILQFKDVCVAFEWIPSHCDIRGNEIVDRAAKKGAMKRCIDIVIPNTRSELAASRLIHYNKLWQAEWDNAEHGRFLYALHSDVSKPIHRQGLSRREECLIQQLRVGNCSLNYYLFQINQHDTGLCEVCQEDETIKHFIFYCTKYDKDRRLLKERIKLNNPNLKQLLMSNPIFTRELLGYIYDTNRFR

SEQ ID NO: 2300 - protein, 1163 aa, synthetic construct
  source 1..1163: note = Description of Artificial Sequence: Synthetic polypeptide
MFYPALLLFALSCFLKHLQPHPPSSQKGITITASLLSSPSLSAHEVFKLLCSITPVNSFSSHKTKTYKSRSHLAFLSFLLLAAGDISPNPGPYPIPVLLGTRSPNPPCTPLKYRTLTPIPKASIQISCALWNSRSVCNKLTSIHDLFIAKSLNLFAITETWLSPTDTASPAALSFGGLHLTHTPRPGNRAGGGVGLLLSPRYSFKVLPPPPSLSFSSFEVHSIRLFSPVSLRIAVIYRPPGPTSQFFDNFSAWLPYFLHIPTSWTDLTILDSFSPPAIHLKSFHLLLLFHFPHLRFTLLGSSPLFRFALRSYTDLLDRPHNSLTTFLPGFLTSFIYRPPGPTSQFFDNFSAWLPYFLSSDSPSIVLGDFNIPVNNPNAPATSKLLSLTSSFGLSLCSDSPSHSNGNSLDLIFTKCCSTSNFTNSPFPLSDHNLLTFQLSLTPSTPSAVPQTYTYRDLQSLNTSHLSSSFDSLHSNILTVSCPNQATSVYYSTLTTALNELAPAKTKRMRPKPLQPWHTAHTKSLQKQSRTLERRWRKSRSESDFCSYKSALLSYNTTLCQAKQTYFTALINSLSKKPAQLFSTFNSLLSPPPPPPCASVTAQAIAEHFKNKIDTIRSDIAQLNPHNHSPPSLHAPQSLLGSFSPVTEEEVSKLLSSSHLTTCPLDPIPTKLLRNANPCLIKALTHLFNLSLSTGIFPSQLKHALVTPILKKPSLDPSNPTNLRPISLLPFISKLLERLVYNRLTLFLSDNNLLDPLQSGFRQQHSTETALTRLTNDLLSAKAKKHYSLLILLDLSAAFDTVDHPLLLQTLRSLGLRDTALSWFSSYLSDRSFSVSYNGESSSPLPLSVGVPQGSVLGPLLFSLYTSSLGKLISSFGFQYHLYADDTQIYLSSPDLNPELLTRVSSCLSAISTWMSQRYLKLNLSKTELVLFPPSNAHIVPEVSITVNNSTITPSSQARCLGVILDSALSFTPHIQSLIKSCHFHLRNISKIRSFITQDAAKILIHSLIISRLDYCNSLLIGLPLQRLSPLQSIMNTAARLIHLSNRSSSAMPLCQSLHWLPLPSRIKFKLMTLTFKAVHNSAPPYISELISRYHPTRLLRSSTDLLLNSSLIPSSHARIQDFARAAPLLWNSLPQTVRLSPNLSAFKRSLKTHLFREAYPNLV

SEQ ID NO: 2301 - protein, 1217 aa, synthetic construct
  source 1..1217: note = Description of Artificial Sequence: Synthetic polypeptide
MKLRVLSWNVRGANDSEKRKVIKALIKSQKVDVVCLQETKMQEMSRMIVRSLGVGRCLDWKVLNSRGSSGGVLVFWDKRVLHLLEAEVGNFSVSCRFKNCEDDFCWLFSGVYGPSLMKEREDFWAELGAVRGLWSDPWCVAGDFNVVRFPVESSRGGRLSASMRRFSEIMEDLELRDLPLQGGSFTWKGGLNNQSHSRLDRFLISNEWEDHFSGSVQYVLPKPTSDHFPILLDGGGVRSGPMPFRFENMWLKEEGFKEKMQGWWVGLNFSGSASYVLVSKLKALKSLLRDWNKLEFGKVEVNKALALSQVDFWDKMELSRTLSVQEVDARRGAKEDFKKWALMEEISWRQKSREVWLREGDRNTKFFHKMANAHRRGNMLSRVKINGVWLTKENEVKEGVVNEFKAMLSSAGGWRPSLRGLSFERLEAVDAASLEEPFSEQEVMEALKGFCGDKAPGPDGFSMAFWQSSWEFVKEEVLGFFREFHNHGRFVKSLNATFIVLIPKKGGAEDLRDFRPISLVGGLYKWLAKVLANRLKRVVGKVVSKAQNAFVQGRQILDAVLVANEVLDSVLKNKEEVVMCKLDIEKAYDHVEWSFLFSVMRKMGFGEKWIRWMKWCISTVSFSVLVNGSSSGFFQSSRGLRQGDPLSPYLFVLVMEAFSSLLRKAVAGGFVSACKARSRGGEGVNVSHLLFADDTLVFCGASKVQLLHLNWILMWFEAMSGLRINLDKSELIPVGCVNNVEELAAAIGCKVGSLPTSYLGLPLGAQYRSRAVWDGMEERMRKKLARWKSQYISKGGRITLIRSTLANMPIYFMSMLSMPRKVRLRLERIQREFLWGGGALERKIHLVKWELVCLEKDNGGLGVKSLSILNKALLCKWSWRFAMEREAFWNQVIRGKYGEEQGGWSSKEARGETHGVGLWKTLRKEWEVVKSRLVFVVGNGKRIKFWKDIWCGDEPLCVSFPSLFALAVSKDAWVKDVWRCNEGGGSWSPLFSRPFNDWELEEVCSFFVALNRKQIQQGVDDRVIWRETNCGKFSVKSLYKSLVSGHPISFPSSAIWKVTVQPRVSFFGWEATWGKALTLDQLQRRGWALANRCYLCQRHEESIDHILLHCDKVRTLWVLLYSMFGVQWVLPATVKETLSGWNGSFVGKKRKGVWKASPLCLFWTVWKTRNKVAFEEEELSIQRLKASFVYFLWSETKRSIKDGPSTLVDFVGWVASR

SEQ ID NO: 2302 - protein, 1128 aa, synthetic construct
  source 1..1128: note = Description of Artificial Sequence: Synthetic polypeptide
MRKELVTIKNLIEESGATAPAPVPLEVAVEVHQSSSVPEITDQSTTTQEGSYSEPPIHRCENCGREFRTRAGVQQHRRKAHTNEFMEEKEKAAPTKKLRWTDEEKEILIESEIKIIKEGSLKEQHEINKILASRMPGRSQDGIAKIRQKQEHKAEIQRRLHGTVTTDETRGSRTSEITEPIRSLPINTKNWSEDELKRMLAEEVKLRNKNEKDINKKLAEIFPNRTMGSIKSKRTKDKEYQDLVKLTMQTISENPDNETDFNTSNTENNSTDAEKEVKNYLNMLLLSNNEEEWLTSTLKEAATLALQGKKTEASEKLNEYASKTLFPGLKITNQTRKREKKISKRETRRQEYAEIQKLYKKNISSAAEKAINGKWSIKPEEEYHNNKDLIKAWKPILEAPPFSDCRPIENIKEMDYALMEISTAEIFLAIRAMGKTAPGPDGIKYSKLKKNIQSMAILFNTCLLTSFLPLPLKIARTILIPKQENPGILDYRPLTIASVVTRVFHSILAKKLDNNAQLSQRQKGFRKCDGVAENIVILETILTNSRSEKRPLCMAFVDLRKAFDSVGHESIIRGAKRVGVPPMLLEYISSSYQNASTNLFGEILNSRRGVRQGDPLSPILFNFVIDEALENLNRNIGYLLKEEKVSCLAFADDIVLIAETKGGLENHIEKLLEKLNGAGLELNASKCATLMVMKNGKEKSTYISTKVIKIKENDIPTMKATETYKYLGLQMGFKAREQNANEVITEGLENITRAPLKPQQRIHILRDFLIPRLIHKLVLGRVAKKSLKRIDQNIRKKVRNWLHLPKDTTAAFIHADAGDGGLGVPALEHTIPLLKRERITNLRKSNDPVTKECLRMEYTKQVLGKWSRPTKIGETLATNKSQLKEAFRKQMLITLDGKGLKDHHETPTIHKWIRRGENMTGKQFITAVKIRGNLVATKSRNSRGRPEQEKLCEAQCGRPDSLGHILQGCWRTHGMRVERHNNICRRIKAIMKGKESEVVEEPRLQTNEGLRKPDLLICHKGKIIICDAQVVADSSNCSLESENQRKIDYYKKDSVVAEARKLIGRDDEDIIIMAVTFNWRGAISKTSIRDLDMLLDIKSKEVIKMSRKIIRDNSIMVEMHRNRTEKRR

SEQ ID NO: 2303 - protein, 1204 aa, synthetic construct
  source 1..1204: note = Description of Artificial Sequence: Synthetic polypeptide
MSGLTGREVKCITVNVLMEQQPHTKAIREGDFIVILLPQSDDETLCCPLCVGRGRYSGKTRVECLNRHVKEVHPDLTTTFRCWGCGFAAPGDKKYPRKIVTQHCATCVPEVSSAPSGRVDGERRVNTRRRLGIAAATEASPVRRTRRNGLASPPVEQDISQSAAPPEPARVPQHPEIVALGESADDEVFRSPVNSPPRDWRAAAPQQAASSSPPAVPGITAATPSNTTRTGNGSANSILAEHPIPTPPPTNTTEANGRADIPRSGRTPPPGQQAARRRAPTTEQRRIVGLLEAATGREQLEEATTQAMLFLARLTGRRPEPRNAIRPGPRQRHPAQEDVQAQAPDRIQEAKKLQRLYRTSKKRAVQKILAGPNMNCQIDKNTITAHFVELAARRDGGEDWPDVFDREEPTAASGEALCTPITREEVFRRLKGRNNTSPGPDGITYRDLAKADPGAHVLAALYNSIWRIEATPALWGVSNTTLIYKKGDAMDISNWRPISLGDTVPKLFAAILADRIKRWAVANGRYSASQKGFLEFEGCYEHNFVLQEAIREAKGGRKELVVAWLDLASAFTSVPHSSILQALEGHGLPSKARNIISSLYTGMTTRFHTAEGPTDPILIQSGVRQGCPLSPDVFNLTLEVVLREIQRTGEGYTIEGRRTSHLAYADDVAILADSPAGMRRLLFAAERGARAVGLTFNPAKCATLHIAGRGEEAVRPTEFSVQGTPVRALASEEAYEHLGIPTGYQVRQTPINTLRDLLADIGSIDRSLLAPWQKLDAVGTFLLPRLDFIMQGAHIDKGFLTEADKIIKKAAKSWLSLPQRASAELVFLPPSQGGGGLLTVAHSYKMLYSSDVTVSTIAGSTLRRTVSERLKKRASNIDIARFLSGDLDLPRSTSPSTFWTKVRSAALRIKTKLGLRWSWCQEGEVLLMACGDPRAPGTRVSPQTKHLVTTSLRRCLNRHYAESLLAKKDQGKVFEVTRRSGQSNHFLRSGSFTRFCDWRFIHRARLDVLPLNAAKRWQRGMDKRCRRCGSDLETLPHVLSHCGPHSAARQKRHNNIQDRLVKAASRCPGTISVNQTVVGVRGPDAALRPDIVVRDDVNRRVTIVDVAVPFENRLEAFDGVREAKIAKYTPLARQLTDSGYTVTVEAFVVGALGAWDPRNERVLSLLSISRYYAILMRRLMVSDTIRWSRDIYVEHVSGIRQYRE

SEQ ID NO: 2304 - protein, 1522 aa, synthetic construct
  source 1..1522: note = Description of Artificial Sequence: Synthetic polypeptide
MMDSRQLNTPKIRKYQNPKMTNDIMKSYNYAVLSDVTPQETTQQTTHLNVDIDKETTQPKQPLTKSGKPKSKPIAVSYKFKDATFIWDTTPQTNPPKDCTKLIDKTRPRKTIFKKSAFQTYLKKELSNETFVEVKTFLMATHKYRFKDENSRLLAYRIINRYVMETANEFKETEFDMARFAKFFTIPENWLKHLKPYSTATETSPADRIKVQKLVDLTCRYPFKTQEEQTSVANFLHFFTQRSIIGISRDYKFQKCIPFMARKTNGQETTSTINTTPPTEENRLPMVIITPLEEPKIEHRRPEKRGASNDTIVLSDEEFPLLKRRTLPTRKSKNPTGAGNVPTETECTDEVKFILNNEYQIECKECGKVWENVRNGMNHLRQKHDFPNRTDVMVSCVRCEVPIKGAECVNHIKNHKKDDKEESQAGSLVANTQDIPNESSLSQAAIEVYLRNILKMKENQERNIQYLEPSTANFLINRNLRAFYQNVKIEKLIGWEQVIWLIHWNKCHWIVYLANCDSKTSVILDSDNQMTLQQRCNIKAKFDKFLEGTFEEKAVLGTLERNVPQQPNNFDCGVYVIQYISDFLKDPQRMDYHTPDSKRIRKEIGELILEEMKNPASKIKNPNKEIQSLLQKFRLLQINVNDVFHWFAEEYQKSLPKIRTKRDGKLNKLSCSYQIQRLFGLAPKRAVKEIYFQETSTADLETRVLNEHFKKDESMMKECKIKNGNHYQDWITKAQIDNKEILEALKNSTDSAPGEDNIPLRQWIIWNNDGVLFDMFNYIKRTHDIPEMWKNYTTTLLIKPGKSQESNIPANWRPISILPTSYRIFMKVLNKRVLDWANRGELISKWQKAVDKANGCDEHSYVIQALIEKANRSYYKNEQCNLAFLDLADAFGSIPFQVIWHTLKNMGMDEKTINLLKEIYKDCSTKYKCGKNESEKIKITKGVRQGCPLSMTLFSLCIQYLIQGIAEKKKGATIAGQEVCILAYADDLVIVANTAKDMQMLLTTIENLAKQADLIFKPAKCGYYRDPRDKKSMMKIYGKEISIVDEKNVYTYLGVRIGDTKKKDLNVRFEEVKKKTTAIFKSKLRSDQKLEAYNIFCQSKFVYILQGEDIAKTKIETYDEEIKKMIKEDILKLQDKSPFTDFVIYSPREKGGLGITKIIDEQIIQTINRTAKLLNSSHRAIRAIIYEELIQVANLRGEKEINSIEEALKWLEGTNKYKKNSNAKTTWITRVREAFQTLEKKHKIKVRFVPKENGIGYKIKCDTQEKVEELDNSKELSKSLHWMIKEAYFKEWKTLKCQGYILSLKTSEFMEWKMPRGLPDPDWRFLTKVRANMLDINMKQANQGGRLGNTKCRKCEDKESASHVINHCASGNWSRVEKHNQVQNELAKELTKRNISFEKDCIPKETKGTLRPDLVIRLKDKIMIVDIKCPFDEESAIESARNKNIDKYRELAKEIQAKTVLPTTISTFVVCSLGTWDKRNNELLRQMGIRYEESKEMRINMIHKAIHGSRKTYDQHRNFNNG

SEQ ID NO: 2305 - protein, 1390 aa, synthetic construct
  source 1..1390: note = Description of Artificial Sequence: Synthetic polypeptide
MASCPKPGPPVSAGAMSSESGLTTHSVLAIERGPNSLANSGSDFGGGGLGLPVCLLRVSVGTQTSRSDWVDLVSWSHPGPASKSQRVDLVSLFPKHRVDLLSKNDQVDLVAQFLPSKFPPNLAENDLALLVNLEFYRSDLHVYECVHFAADWEGLSGLPEVYEQLAPQPCVGETLHSSLPRDSEPFVPEEGSSEKESEDAPKTSPPTPGKHGLEQTGEEKVMVTVPDKNPPCPCCGTRVNSVLNLIEHLKVSHGKRGVCFRCAKCGKENSNYHSVVCHFPKCRGPETEKAPAGEWICEVCNRDFTTKIGLGQHKRLAHPAVRNQERIVASQPKETSNRGAHKRCWTKEEEELLIRLEAQFEGNKNINKLIAEHITTKTAKQISDKTRLLSRKPAEETREEPGVCHRTRRAAASLRTEPEMSHHAQAEARDNGPGRRPLPGRAAAGGRTMDEIRRHPDKGNGQQRPTKQKSEEQLQAYYKKTLEERLSAGALNTFPRAFKQVMEGRDIQLVINQTAQDCFGCLESISQIRTATRDKKDTVTREKRPKKPFQKWMKDRAIKKGNYLRFQRLFYLDRGKLAKIILDDIECLSCDIPPSEIYSVFKTRWETTGNFKSLGDFKTYGKADNTAFRELITAKEIEKNVQEMSKGSAPGPDGITLGDVVKMDPEFSRTMEIFNLWLTTGKIPDMVRGCRTVLIPKSSKPDRLKDINNWRPITIGSILLRLFSRIVTARLSKACPLNPRQRGFIRAAGCSENLKLLQTIIWSAKREHRPLGVVFVDIAKAFDTVSHQHIIHALQQREVDPHIVGLVSNMYENISTYITTKRNTHTDKIQIRVGVKQGDPMSPLLFNLAMDPLLCKLEESGKGYHRGQSSITAMAFADDLVLLSDSWENMNTNISILETFCNLTGLQTQGQKCHGFYIKPTKDSYTINDCAAWTINGTPLNMIDPGESEKYLGLQFDPWIGIARSGLSTKLDFWLQRIDQAPLKPLQKTDILKTYTIPRLIYIADHSEVKTALLETLDQKIRTAVKEWLHLPPCTCDAILYSSTRDGGLGITKLAGLIPSVQARRLHRIAQSSDDTMKCFMEKEKMEQLHKKLWIQAGGDRENIPSIWEAPPSSEPPNNVSTNSEWEAPTQKDKFPKPCNWRKNEFKKWTKLASQGRGIANFERDKISNHWIQYYRSIPHRKLLTALQLRANVYPTREFLARGRQDQYIKACRHCDADIESCAHIIGNCPVTQDARIKRHNYICELLLEEAKKKDWVVFKEPHIRDSNKELYKPDLIFVKDARALVVDVTVRYEAAKSSLEEAAAEKVRKYKHLETEVRQLTNAKDVTFVGFPLGARGKWHQDNFKLLTELGLSKSRQVKMAETFSTVALFSSVDIVHMFASRARQSMVM

SEQ ID NO: 2306 - protein, 1584 aa, synthetic construct
  source 1..1584: note = Description of Artificial Sequence: Synthetic polypeptide
MDLFNFDINDFQTAVVQKIPAGSFITAIMLQINKINSEFKNHQLNEMEFCCLIADFIRCNDHLFSKMWEEDIKEVVHKIFSMESGVEVHMAQAIVELFQTKICFYQKKREVEVIQPNSCSNTNMLTEINILFTFEDGTEKFYSIQSITDKKSSGKKESGYNEQPRNELYKVKEYESGREMMVKKIKGDGNCFIRAIIDQMNKSEDYYRCNLSDIIELRNKIANHMNKNRERYEMYLIESLEENGFLKFIEDIRKPGVYLGHESMVAVTEIFDKCILLYQTDSETLRIGEEKDREEDVLRLLYTGENGVKNHFDSIRIVKGQTEENTGTEKTSVEEVKEKESYTSMHGKHNDDSEEISTIRYRKTQDTPITGKQIKETGKLVQEEGKQWQWNKERNNQKKSDDKKAVEKNMDERGNETRKITREKHKPINKDRAITKDFITDNRKEEILDLEEKRRRQRSKEREDRLEQLATQIKTNEERSMLINGSQRQGWEENDSQERLDREKQAKTDKNTRGRIQMDVQGKTEEPLSIVNDEQVRKENNTKDVKLGDKKENPRISTKQRNDRKRAKNERVDEEGVQENSDTMDGGTKKHRNHVAEERGETRKGQVIESEESRATGVKATGEIGEENEEVKESIMLIATLNIRGCSKLEKRQEIDNMLESFNIDVAALQEVNVKAELITTRNYEWRIGGQGQNKSRGLAILIRKDKGIDVMEWKEIGKYGLSISLLSKGRKIILINVHGPNKNGYIFYSSLGKLISQDHLRSNLIMVGDWNAQIGKDSVMPEDAECIGNRLGFSNNNDNGEEFKMFLTIHKIKNMSTVIGKNTDITWKSGKKESQIDHVLKPREGKIEIRFIKGYWTGINTDHKMIVTGIRTREKENKEKGKKKIPIDASVLKYDTIKEKYQEALKKYEIRQEKGNTIEQDFKAVAGKMKKAANEVLRSARAPLTPIRKAALNKLKTAINLSNKHPDIFPYRWKLKDRRMEFQAAIRSHNERKIKKFYKELNDFDVAVRIKKSYQFLKGFLKRKKHKNVYIPMSQWNEALKESEGPEIQLMDEHDTCPVTVPPKEEEMMQIVQQQCNGKSAGADGIRMELLKYADKQTQQELADIWKRVWIENHLPEDMEKTIQVPIPKNAKAKGVQDFRRISLCNVAYKPYAKWIKQRLREFTGEPDINQAAFTEGRSTDDHMFVTRRILEEYWNAGNPLYVAALDISKAFDNVSLLQLRSILAKLNVPSHLIDRVLQCIRKEKIRVRWQNQYTTECNRGKGVKQGCPLSPFLFNIVMQDVVRKVKEKVPELNLMNTGSLKLPLILIFADDILIITKDEEGLKRILIALEESLREVGLEINNDKSQILIRAPNATKRPPNTINLNGRNYDVKTSMRYLGAWLTDTLNRPATTKQRCVNAAKVSKLVVEFCKKFKPTWEIGKLIYNTVIAPSILYGTKTATLTKRSRVQLGKYEKQILKDIWNQCRKTDERKFNVRKELKGKTINRRVRVNRISYYGHIQRREETHPIKMAMKLKFNKKKHGRPSFTWKKSLEQDFNRYNGITEEEWSQIAQDRDKIKKKAEEIYRNNESEISDGEDSTEQDM

SEQ ID NO: 2307 - protein, 1376 aa, synthetic construct
  source 1..1376: note = Description of Artificial Sequence: Synthetic polypeptide
MPLFNRPPQCRQLCPNPLLSANNATIQVLDSPVSTHNETSRSTQLDAHRSNFVGGSQIAKVESSDLDRSSPFNGVFYRIETGKIIAQPSSSPLPPSSSPLLPSSSPLLPLSSSSSSTPLPLSSSSSPPPPSSSSSPLLPLSSSSSPPPPSSSSSPLLPLSSSSSSTPLPLSSSSSPPPPSSSSPRPHPGPRKKRNKQKKRTKPRKLPPPTSSQPLPHTTEGLNPVFEDLFCPVSGCPGPSSIGTDEWILCNACLIWYHTSCLFLQAIPEGDWFCANCPQIDTQIGPQINSNTSSPANQSYLGTHIQLTQSIPFTNPRASQPISTLSTPLSNFISSKETCTSLTLEWLNNHIVPGGVIEKAILHDAYRRDSLGIFKPINDAEMGKLIKNSFSNIRTKRIRTELHGTSKYHYVGIQFKSEHSADSVFDFQTIISSLRQNCPTLKQCPKACRIPVAQVLKSAVDKCISENTPEAWHLLLTFPYITLQCESKANIKNGQSLNSKIRNNLSIFESLDKNTYQDYLITLSSKNSAHDKPGSTIKDIGPKVISKVSEGNIRGAIRLLTSDDIIAPNSSETLETLVEKHPPQPLDNFTVLDEPNIPPFTTTVEQVISAIFSFPSGSAGGLDALRPQILKDLVSQHTGDVGTQLLESMTKFCNFMLAGKVPLDICPFIYGASLTALKKKSGGIRPIAVGCTYRRIVSKICVKVMNHVFQDYFSPVQVGFNVKNGAEAGAHAARRFFSFPHKSPTAFLKIDFKNAFNMVDRGKLLSSVHELVPTLYPYINQCYRFSSSLVWNSSLIESCRGVQQGDPLGPPLFCLILHPVVSNLGSEFNMWYLDDGTLGGDPTTVLDDFKHIISCANEVGLELNFDKCEVSVLGLQTNTQCILESFQSVAPGISCMTQENAELLGAPLTYESIEHVFRKKINAFSNMAGRLNSIPNHIAYYLLKHSLAIPRLVYLLRAAPIFKSPHLLEEFDSLLHDTLEQITNCQINPLSLEEIALPVKLGGLGIKQSKTLATPCFLASSFATTDLVSLILPSYVTALSDSLVTEAQDLWKSISCDELPRSTISSIQSSWEIPIFNQVCSRILDSSTTPINTARILASRSKESGAWLQALPSRNLGTLLDDNSFRIAIGLRLGLKLCFPHKCVCGTQIDELGLHGLSCKKSAGRHSRHTQCNDIIKRALISADIPSIREPLGCCRTDGKRPDGLTLIPYKQGRSLIWDFTCTDTFAPSYLSHTLRHAGTAAKLAETKKHKLYSELEKQYIFVPVAVETSGVWGMEGLKFIQDVGRRMKDVTGPMSTTFLIQRISLAVQRGNAASIMGAVPSQRGLEELFYILNDRSFYLQKSCKGPNGDLGRLSGSSKGFPNPPTSGFSSTPQAN

SEQ ID NO: 2308 - protein, 867 aa, synthetic construct
  source 1..867: note = Description of Artificial Sequence: Synthetic polypeptide
MFSHASSAISQQVMVLGDLNFDLLERPLPAPTKQYLSIFDSLGYQQLITKSTRPISNSLLDHIFVSSSDFVIEADTISNTASDHLPIFVAWKLKAGYTRPTGHKVLRFRSRKNFCIESFMHDLSLVPWSTLDIYDDVNDALDQWYKLFNDILTVHAPIKEHRIKRPLKLDWFNAEISAAIKARNCLHRIATSLKTDTSWSEYRRARNHVVHLIRKAKKTFYNDAIKNNLENPKNLWKIIRNISPAKHVNLPNRLTVNDTLYEDTFDIANFFNEHFSNISSQVCNDAVPEFPDRSVLTNFINFKHQPGSYFSIPPISEDFVLNSPSRLDFGKAAGLDELKVFFLKSAAPEIFRSLTKILNLSISSCVFPDPWKSAKVPPLFKDGSLFDRTNFRPISVLCILSKVLERHIHTSFYYFLTSQDLLTDFQFGFRWFRSCELATINLSDSILKNMDSGLPSGMLLIDLKKAFALVDHNTLLLKLGLYGCDELTLKWFKSYLSGRTQKTCFKGVLSNALPINVGVPQGSILGPLFFLLFINDLPLFLSSDLVTDTTMFADDTTFLISGASVPDIELKLNKLATDVHKWATLNRMVLNTKKTKSMLIGSHQKVSNLAESSLSVTLNSCPIEQVNIARVLGVVFDNHFTCEPHIELFCKYINSRISLLRSIAPFLTPAGAIHYYNACIHSQFPYCASVWGNCSQTLQLLLLRSQKRAARTILSADFSVPSVSLFSRLNWLYICDLIKQRKLWTLFSILINPDCPLCLRSKFSFVSHERRTRSSTPNNLVLPQPRTDAGKRTFSFSAISLFNLLLPSLKQLAFSRFLNLNQLPNVTSLAKKKVRDIFHSHLNSVSHLEQLFCHACRFYIDCRCYFS

SEQ ID NO: 2309 - protein, 960 aa, synthetic construct
  source 1..960: note = Description of Artificial Sequence: Synthetic polypeptide
MITLIKINYKAELINELNINFCLEEIKLDKENLNILYLNTRSCRNKEEELYQLINEFDGSVHVVVFAETWLYKNEIFNLLGYDAYHGCRDGRGGGVSIFVLSDYRSQLMLVINSEDNNFLMVELIDQNVKIMGVYNPGRSFNLFFEQLEQILHNYKRIIVCFDFNINLLDSSGELIRQYTYKIQSLGYIILNKLDARYATRISNTIATVIAHIITDIFEYDLQFGIKDTERLISDHRTLTLSMRIENHKKNKPDHKKICVNYENIIRSTSQNTFEICQQFSDIVVVLNEIMTKNRTEILSRKKAMVIRKPYINNALIAEIQNKNELYRQYRTAPGGVLKDELYILYARKRNMLKNKIKFAKEQYYGRKMHKNINNYKKTWSTLREIIFQNGSENITPQALTLKENGKIIDSAAQIAKCLNEYFINIGWNIQQNGTGNDNFLIYLNNMPETRFSFSVVETEKAKNVINSLKSGVAVGLNKISTKCIQKCVTLIAPKLTEIVNNVILSSQFEDCLKIAKIVPLYKSGDKFSKSNYRPVSIIPALSKIPECIMNEQIKHHLLQNELLNKNQFGFLPKKSTETASLELLNFIVKGLDDGEYVGCIFIDLRKAFDCISHELLIAKLSFYGFTPSAVSLLKSYLANRKQQCQVNGVLSEPLLIKSGVPQGSIIGPILFNIFINDLFNIPLKGKLQCYADDAVLKYRAKDLETLQSMMQHDLQLLPSWFSANKMQINNKKTNFIIFSLKTSNVSLDLFINNERLSQVTEVDYLGLAIDKNLNWKSHITLVKNKITPFIFALRRVRGCLSTKSCWQLYNAFILPHLSYMNTVWGSAAASHLNVLKVLQNRVIKTIRKLPFLFPSASLYSPEVLPINLLHKYNCLILVYKIKYKLVESNIRLTEFHDLHSHSTRARQNFYVSRPRTELSLKHFIYSGITQFNALPNHLKLEIHLSSYKKKLKKYLFENN

SEQ ID NO: 2310 - protein, 917 aa, synthetic construct
  source 1..917: note = Description of Artificial Sequence: Synthetic polypeptide
MWLRPDVLNSELCSNYTIFRCDRSEQTSSFQRGGGVLIAVNASFRCTSVSLNDCDSLEQVVVSVNLPMSTIYLCGIYIRPTSPPEAYSMHATAIQSICNFSSETDAIIVVGDYNLPGLSWISDEELNSYLPCNASTEAETTFVEAVMATGLYHVNSIRNVNNRILDLAFVSDVCDIEVLEAPSYLLRMDAHHKSFVLRVQIWETRNNSSSDSNDETDFDFSLCDFESLNASLSMINWTNELANKGTDEATAHFYDKLYDVLHSNVPRKRLRPKQKGKLPWWSPELRRLRNGVRKARKRYYRSKSHVVRQNLHVIESRYNKCKVFTFRNYINSIESNLKNNPNSFWSFVKSRKSKNRIPEQIRFQNRTSANVDESANLFADFFSSVNSTISPTLSTATRHSIPTHDITLSFLNFTEQDVKTTLTSLNVKKGAGADRLPPSYWKECAESMKLPISLIFNRSLADRKFPAVWKTASVVPIHKSGSINSVDNYRGISILCCIAKVFESMMHMVLYNATRHLISDSQHGFVKKLSTVSNLMCYTNFLSSEIERRQQVDAVYFDFSKAFDKVPHDLAIKKLEQMGLPDWITEWLRSYLSGRKAFVRIGDTQSRGFDITSGVPQGSVLGSLIFVLFINDLSHRLKSCKLFYADDLKIYRAITSVIDCYALPSDINELLLWCSENGMQLNNSKCKCITFTRSLSSIYFNYEINGSIIDRVTTINDLGVTIDSKLKFSKHVRVTTAKAFAVLGFIRRNSQAFQDIYTLKTLYCSLVRTILEYAACVWSPYCTTQVLHVEKVQRSFLRYALRSLPWNDPVNLPDYESRCMLLNMETLSFRRTKLKQMFLFDLITHNIDCSDLLAEVGFLAPSRYLRSRQLLAPRTHRTAYGQNSPLTSCIRSFSIVNDVFDFNLSRVEFKRRISSIR

SEQ ID NO: 2311 - protein, 913 aa, synthetic construct
  source 1..913: note = Description of Artificial Sequence: Synthetic polypeptide
MNCFSIKNKLPQLDLVSSTNNFDVICLSETKLDDSFPDSLLSLNNKFSVVRKDRNKHGGGVAILITKKVKFCPIEIPKHFSSPEISGVDILLRGTTVRVIVAYHPSHTSSLERLVQSLEFLLCSQKHCVVLGDFNMPHINWETLTACDSPCKTFLAFVTNNGLTQHVLSPTRLNPDNILDLCLSNTKIVRDVQVGELFSDHKIISVTLKLSNSAKKVVKRVQLFRKANFQLINYNLSMINWDVEMSCMSLEEKYEFFVSVLQHQIALHVPCKNINVLAKKHGPKILSLQKEKLRIWRAAGNSDNYKKISLILKEELIQEDQMNTEKSLTYGTSKKFFKFINSRYKSNDEIGVIKDSQNIPVNSNILKAELLSDAFSKVFTVDNSSSTLFPSRTNNVLESMTFEPSVIEKVLLKLVPKCNTTPDEIPAIFLKKVGTSIAIPLSIIFSESFRTSQVPRLWKTAIVKPLHKKGPRTDPNNYRPISLTSSVCKVMEKLVRKNLTDYLNSQQLFSRAQFGFRSNMSTESQLTSYFSTLISNHSLRKPTYSVYVDFKKAFDTVSFEKLTCRLMSYGIKGQLLDWIVCFLTNRTQRVNVNGVLSQEKFVLSGVPQGSVLGPLLFLLFINDIGDKFQSHFLLYADDLKLFSTNPSTIQTDLGLLSEWCDKWQMSVAPNKCENIIFNLTKSPRTLNFDFTIKGSKIPRTKKIRDLGLILSSDLPFSEHIDTILRRSHQRINIFFNILRRASFETFIKCYTIYVRPILEYGSIVFNPVLKEQIKRIESVQKSFVYRVFKKFHIPYLNYFDALSVCNLTSLELRRLHADLVFLYKVIVSKETLLYPPFFTLPSLPNIRKHKFYFRSNSKNSNKFFSQFISNRSLNCWNDLSPSVFPPTPHSINFISNISYCNFQKYLTLNPHNF

SEQ ID NO: 2312 - protein, 746 aa, synthetic construct
  source 1..746: note = Description of Artificial Sequence: Synthetic polypeptide
MKFHDLAQMVNFPTRFSKLNSGTFLDLIFTNNSGVLQNLKPGTPFINSDHISIFFSLSLPQPTPAHSAPPKSFMNFRKCDFFNLNRYMVSYNWPKQLSFFAPPDSKLNHFLNIFNELISDFTPQYPTLRVQSPKVTGRKLYRKLRKHHPDTESSVLKKRVKSRLKFLKKKNMAFENKLIHSKNSKSLFSYIRNRIKPSSSLTHFSVDNNNVDKPIEMAEVLVKEFSKSVVTHDPPFPTFPSCESTPSPVDTSPLTIASTILKLKPKIGYSLDNINFFILKKCCDSISIPLSLIFKEFITTNSFPSCWKTSIVIPVHKKGNSSDPKNYRPIALTHPLSRLFERIVLNPTRKTFSHKISKFQFGFLNNRSCITAHLNASSNYHKILSVPNQFVDIILFDFAKAFDSVPHELLLCKLRNFGFDDNICLWFKAFISDRVSKVKIGDSLSNSSFKNSSGVLQGTVTGPFLFLVYINDLLDLFPPDVHVIAFADDLKLFSNNCQSLRSSIKIIENWCKIWQLKLAENKTKVLHVGKKNPKYKYYVNGQNIECCSKACDLGIWVDDQLAYEKHILVKVNAAMFKCRQILKNFRSLNMMFYFKLFNTYIRPILEYGCEIYHPKSASLTKKLEQPLRYFSRHVFKKCKTQYDSYEHRLNQSNQQSLKHRRVFLILKTFHNIITGKYHFPNLALYLKNSKSPRFPYQMTAIGKTNNNSFLHTHLTIWNLVTKHFPVPVSGYTFSKRISCLPLESYV

SEQ ID NO: 2313 - protein, 968 aa, synthetic construct
  source 1..968: note = Description of Artificial Sequence: Synthetic polypeptide
MDVYHSKRTKLTRPKTRKTDLRICTFNCRSVATDNRLAELLEETNRIKYDIIGLSETKRSAEVHMTNRDGTGVILGKRNDSSVSGGVGFIINKSLMPKIKEIKIVNHRIGYLTLQVNKNQYTIIQGYAPTADYEEEDHSNFYENLEDVYKSCKSRYKMVIGDFNARIGERKGNEVFIGPHSMENRNDSGERLATFCEVNRVFHMNSQFIKPTHRRWTYISPDKQHRHELDHILANGKYITDVSVVPSFTNGSDHRMLRANVHINAKQAKFEQVKRRKPPRRVLDPTAALLATENLDSCEDQDIDKEYDTLVHVLKKAQDAAVTIPTNHSRNRLKDSTRLLLSKRRFTDRSDPNFKTLSKECRQAVKRDHENFAKDRLLNAANQRKSLRKVARDINEYQSYIPCLLSGETGEKLTSREKMEIEVRRFYSNLFATKQSKATTIIPQQTKALPPFLPEEIQHSLNSFQNGKAAGEDKLSADFLKSCHSSVHKLLANKFSRYLQEGKVPTKWKSSKTTLIFKKGDKENLENYRPICLLPVLYKVFTKCILNRIRKSLEEAQPVEQAGFRRSFSTIDHIHSVQRLLEVGREYQIPITMVFIDFKKAFDTIEPTALWESLKTQGIDSGYIKLLKECYNDCSTTITPFYNPVNIPITRGVRQGDPISPNLFSACLESAFRRMSWPHLKEDKDDYDNSPGIRINGRNLTHLRFADDIILISKTPQIAEKMLQELVNSCETVGLEINASKTKVLRNKFASSHQIHIRKNNTMSAIEDVEEYVYLGRLLNTKNDLEPEIHRRRRSAWAALNNIKNTTDALTCPKIRAQLFDSIVLPALTYGSETWTFTKALSERVRITHAALERKLVGITLTEQREKNLHREDIRKMSQVKDPLVFITKRKLSWAGHVMRRNDNRWTTLLQEWIPRNEKRPVGRPPMRWADSLKKEISVRQGTQLIEPWSTIAKDRKKWIAVIRAHTN

SEQ ID NO: 2314 - protein, 1723 aa, synthetic construct
  source 1..1723: note = Description of Artificial Sequence: Synthetic polypeptide
MTNVYLKPVNDNQTNKTGDNSRNTMSNSQCEMTWKPVARTYAQAASTNPADDKTVTVLGCKYNLLKLGNTPQTTKRSPPKPSRGGARISSVYTLTDELEITHREEGKITFAIDLPNKNNILCPLCRECTQTRGRGSSFTKHMKLHVKEKHQLKATFIYKCSMCNEYEPEKKCGTKWIQTHLQKVHNYKYDESAIVVPVPPNTRQQIANELNNAAPFVDIRKPKANVVEEKKTENGALLKFLTKSNKDEQEHSQSNDSPNVESPEKANQALTIDPKGNNSPSKSSMRSSQSSASSICQEIQEIITLSEDEEPKAARPKPGINVWSLINEKGKDAYIDTDIMMAFLKMRVENYDSVNIIDPLNYQFPARVDLVPLIQRNLEDGKKRVVFPICADEHWTLLTISNGIAAFYDPTGSRMSSYIEELVNELGLIIPKEQDEQPRQRDSYNCGVFVMKMAEAFIQDTEWEMEEVEEDVKNFRRNLLEELKPNYEIFAEKIKYYNSPGKSFAQSRPTSRSSQCAVCPTCSRSATPMMDVGNMEVDPVPQQQETPKSREPEQDEGWKVVGNTRKRGVVTERSPNISPEAKRQFTGPEIKVVSPGKFHPLVGETEEMEVTCDSPPTKEPTTEPKVTPSLPAMRIVSPEVTKKQTSKKKGKYGKKKQQTKKAQPPKGEPTKKAQPKGEPAKLIEQVRTWFDKQMKSYQEQGSNIQTLTWIADSLTAAIFKANNGNKYLVDKITARCPPPLLNEGEMATQTSRRTEAVKPKDRFVKESNEPLRIQYAKNRAKTFNVIIGKHSARCEIDINVVENHFRQTLKAQPVTEKALNTVCSGIKKAEVDPSIEGPISSGEVKAILAKIKDTSPGTDGVKYSDLKWFDPEGERLALLFDECRQHGKIPSHWKEAETVLLPKDCTEEERKKPENWRPISLMATVYKLYSSVWNRRISSVKGVISDCQRGFQAIDGCNESIGILRMCIDTATVLNRNLSCSWLDLTNAFGSVPHELIRRSLAAFGYPESVINIISDMYNGSSMRVKTAEQKTQNIMIEAGVKQGDPISPTLFNICLEGIIRRHQTRKTGYNCVGNKVRCLAFADDLAILTNNKDEMQDVLNQLDKDCRSVALIFKPKKCASLTIKKGSVDQYARIKIHGTPIRTMSDGDTYKYLGVQTGNGGRASESESLTQIAAELQMVHDTDLAPNQKLDVLKAFILPRLQHMYRNATPKLTELKEFENTVMKSVKMYHNIPIKGSPLEYVQIPVKNGGLGVMSPRFTCLITFLASTLFKLWSDDEYISSIHKKALSRITAKVMGLKTQTATLQEQCDYLNTKKAITKGGYNLFSRMNEASRTLSVNLGAPLKSMQFIPENGEIALEVQASENSQIKVFSKADSMKLVTKLKDLVKSAMLKNFLENKKVKSQVVQVLQHHPQSNKFVNDGKNISISSQKFVHPARLRLLVCNGNSYGKDHPKDCRRCGYECESQAHILQHCTYNFSTGITQRHDRVLNRILHEVIKGRKNNDYYDIMVDTEPGPTRERPDIIMIQKDGPEVLLADVTVPYENGVVAIEAAWEWKIEKYSHFIEYFARLGKRAVILPLVVGSLGTYWPDTSNSLRMLGLSDGQIRNLIPDISMIALESSKQIYWRHIFGDSYRIVTELYCTKNKQEARFGDEPMENVQVSDRFQPFKTREREKKSEEEKKRRSKSKKGKTWRGSKKQTDSRQSGKSYQNQGFQRSVGQGGSR

SEQ ID NO: 2315 - protein, 787 aa, synthetic construct
  source 1..787: note = Description of Artificial Sequence: Synthetic polypeptide
MSAQSLALIDHLDEYLPLKSCILAETLITHLLLESSIFNHPFSLSSSLKSLPERPFPTRILPHLQEPPLLNSDHFSVDFSLITTVSNHSSASLPTSPTFRNEHRLNYKKCDFKSLNADIANVDWDLVLSSISSPTDKFALFSKMLSDFIISHTPLSTPPKPHRTSFSIRQLKRARQRYSKLLKLPNPPADQIFRLRTLIASTSKRIKSNMVSEERKILSAPNSRSARLLIKKRTRTSLKIPPLYVNNELISSNAAKSSIFSSVFFSNYNCSPSSSLIPVSNNSSNNISPSELFLPWIIENTLRKVPPRCGFTTHHANFYIIRNCATTLAIPLSIIYSDSFLKSHVPASWKHAIIIPIPKKGSLTSPENYRPISLTDPFSRVCERILCNYIKINLFRNISRFQHGFLSKRSCSSSLVHSISEYRLLLSSHKSLDVVYFDFRKAFDQVDHQFLISKLDSFGIPSNIISWLTDFLSDRTFSVKIDDFVGTPSASIPSGVPQGSVSGPLLFLVFINDLLLKLADISSLCIAAFADDIKLYSHDPLALQMGIDLVESWASDNSLPLAHSKTALLRLGPRNSSHPYTIGGSLIDSVDSVRDLGLLIEPNLKFTRHINRAVALALLRSKQLLKSFKSNSPQFYIFLFKTYVLPLVEYCSVVYSPPPSSKLAHKLETPLRFFSRKILQRCNTPYCSYSDRLSQLDLFSMRHRRLKAQLLLLYNLIIGASYFPSLETHVRLSSSSRRPMSLICINPNCSNFFSTVIPIWNALTINVPHFLCPSEFNSLLVNNIARF

SEQ ID NO: 2316 - protein, 633 aa, synthetic construct
  source 1..633: note = Description of Artificial Sequence: Synthetic polypeptide
MIRETSYFTTNMNTHSKFEFFKLLETSLHFVPTVTDKIRTNLLKMFDKFLKSTIAQKFDNQKIINDINKTALFLKHNKELLVTKVDKGNPTVVLDRSEHINSVEEQLNNDKYYTELLKNLLNELIKSVTTFVKRWYDLGIFKDCEFDIRSSEISKNDLSKCYGLVKIHMAGNPIRIIVSAVNSPTYNLSKFFTKFLNDNIPKPNSCIKNSFHIKEKLNSFIIPQHHTIISLDVVSLFTNTSESIILKSIKNNWKYLRNKINLSSQEFCEGVSLILNSTVFQFNNKFYKQIFGSAMRSPVSPVLCDLALRCLEEDCLKKLSFFVPFYVRYVDDILICVRNNSIEETITVFNNHDRHLQLTVETPVDNEISFLDLRLIFESDGSIITNWYRKPTHSGRYLNYNSHHPLSQKIAIVYTLVDYSIKLSDSKFHKENLDISKKILFNNQYPLNFINKYIKKRLTILSINTPLNRVVSNNRGLMILPYFQGFDSIIKRYLYKNNINVIFKCIDKFSKFIRLGKDRTKHTDRCNAVYRIVCNDCDSCYIGQSSRRLKTRINEHMNDCKHRREKSALVDHIAKTNHSFNFDEVKILDTESNRFKRLFSEMLCIDSYRNNINRMHDTQNLKLCYKNVITEHT

SEQ ID NO: 2317 - protein, 923 aa, synthetic construct
  source 1..923: note = Description of Artificial Sequence: Synthetic polypeptide
MAVTCRNCSTVDYVLASANVFEILEDLDIHDFCNLFSDVHNPVSFSLSTCYLSRNISTGKNHSGVKLWCPDKADQFRSNIDVHAVKSIENYLNEISNSPGDLCSDNINKVVKDICTVFTDAARDTFGPSHFSPCIEKHNKPWFNRECKSARKQYHLAKSMHNKSKTDDNKNKLKEKSKIYKKAMDNAVKTYNTGITRKLMQLRSTNTKDFWNILNSSKRDSKSPVNIKDMFDFFKNINEGSLSPDSDTLHEPQVDGSSNELLNCEINESEITDAVKKLKNGKAPGYDNIVNEHIASTLNTFLPIYKLFFNAVFDSGLVPEEWLVGIIKPIYKNKGDPTSPENYRPITLLSCLGKLFTSILSKRLELYSEEIELIHNNQAGFRKGFSTLDHILTLQFLSNTLMKCKKKLFCAFIDFKQAFDTVWRNGLWCKLLNYGINGKCFKYITNMYKGIKSLIKMNGTVSDFFSCNVGVRQGENLSPFLFSLYINDLENYLVEKNIAGLQSFTTSIENELCVYIIMCIYIKLLVLLYADDTVILAESGDDLQNALNEFECYCKEWKLNVNIDKTKVLIFSKGRMCKRVFYFNDRVLEIVKEFKYLGIIFSRAGSFLKAKKHLCDQAQKAMYGVIRKIRQFNLPVTCQLELFDKMVVPVLLYGCEVWGFEKLDSIERVHLKFLKHILCLKSSTPNYMVYGETGRFPLSVIVFTRMVSYWCKLISSTNTSITNILYRYLLNQTENTTSTNPWIDCIRHVFNSCGLSNVWHSQFLNIVNQKWVSTAVKQRLQDQFIQKWHADINNSSKGVIYKIFKTNFGYEKYLDILPLKFRKILGKFRTSNHHLPVELGRWEGIPLNERFCPLCNTKRIADEFHYILECDAISQVRNKFIDKKFSARPNVLKFSYLMTTCNMKLLRKLCIFITKIYEVVCPP

SEQ ID NO: 2318 - protein, 1388 aa, synthetic construct
  source 1..1388: note = Description of Artificial Sequence: Synthetic polypeptide
MEDPRLFVTVVPSHSRNYAFCTSHPSRPGPVFGPRRGVFQNRSVGKYPYAENDLVSLPDARLTSSNVSTNESIRQDSAYRSQDAASQQSNDNADPGRPPTCYMEDLRLSVTVVPPHSRNYAFCTSHPSRPGPVFGPRRGVFQNRSVGKYPYAENDLVSLPDARLTSSNVSTNESIRQDSAYRSQDAASQQSNDNADPGRPPTCYMEDLRLSVTVVPPHSRKYAFCSSHPSRPGPVFGPRRGVFQNHLVGKYPYAENDLVSLPDAHLTSSNVSTNESLRPDSAYRSQDAASQQSTDNADPGRPPIRIMEDPDPPDTVVPPHCCDSSRSGHQSRPGPVFGSREGVFQTPNAGKYQAAFQVGYALDPDPRLLSSDVQTTPVHSDDPTTPVHHDSRRSSAGQPVIFEPIRFYYQNVRGLNTKVDDFFLSCCDCDHDVILLTETWLDGRVTSAQLFGNNFSVYHTYRNPANSKRKVGGGVLIAVRNSLDSVECVQAVAENLEQMFVTIRTPSKRIFVGCWYLPPEKRFETELMEKHLSCIENIRRIAGPHDVIVVAGDYNQGSLVWKHLSGNRSYVDPQLTRTRTEKERLTHGVMLDGMANCNMHQCNLVKNDRNRILDLIFVSDDDCTVVAAADEPLVPLDAPHPALVFDIDASRTVFVQVDNNDRVLNYKRTNFDELQRTLADIDWTPVTSAMDVDTAVREFSNLLNFHLAQHTPQFRTPPKPEWSNARLKRLKKERAAALKTFTLRRCRMTKLAFNAASSRYRRYNRYRYNVYIRKTQSQLRRNPKKFWTFVKSKYKERGLPATMALGDSTATTNDEKCELFARHFSSVFREPEIISSTHHLDAVPRDLVDINTFVISRDMIEKATKKLKSSFSPGPDGIPSAVLKRCANQLIEPLLVIFNLSLRQAIFPTAWKKSFMFPIFKKGSKRSIENYRGITSLCSGSKLLEIIVSDVFLFNCRSYVAPEQYGFMPKRSVNTNLLEFTSVCIDKIAEGRQVYAIYTDLKAAFDRIDHDIALQKFSKLGFSPMLCRWLESYLKGRIIQVKIGASVSLELTNGSGVAQGSNLGSIVFSGFFNDANFLFSGNCKLSYADDFKLFIPIDTLADCYVLQSRLDKFSEWCGHNRLELSSAKCYVISFNRKQSRELFTFDYHLGSHVLERLEVVKDLGVLLDLKLDFHLQLSSVIDKANRKLGFMFKAAQEFDDPLCLRTLYCALVRSHLETSAVVWAPYHQNWIDRIERVQRKFVWFALRRLPWNNPAQLPSYETRCNLLGIETLQNRRTISRAVFAAKVITSEIDSPNLLFQLNARVQPRNLRPTPGFLSRPLVRTVYAENSPIRALATAFNEFYHLFDFHEPVSRFLERLRTELRDRSRSSRTAENPQQRASRTRRSSR

SEQ ID NO: 2319 - protein, 385 aa, synthetic construct
  source 1..385: note = Description of Artificial Sequence: Synthetic polypeptide
MLDNRDDVLGLFLDLSKAFDTVDRKILIDKLRYAGVRGIALDLFTSYLSNRAQFVCIDGIHSLLTLVNVGVPQGSVLGPLFFIIYLNDFSLLPLKGDLRLFADDSSLFYNNKSTNMNDLNLRDDLTIVIEYFRLNKLTLNINKTNIINIKNSSRSIPNSLSLTTSKFPDLEVVSDTKYLGIILDNRLNWSAHINALILKLHKITGIIFKIKHKLPQKVLFLIYHSLFHSILSYVTAVWGNACGLLINKLQVAQNRILKIILNLPIRSHTVDLYVKNNILPVRGIYVFQVCSFIYLCLNNKTHSNTKFVRSNHQYGTRYHDLLNRPNVTTVPGERSINFNGAQLYNYFNNRFGKSSSLNIFKNQLKQCLSRPDIIEKLLKSVNIFA

SEQ ID NO: 2320 - protein, 847 aa, synthetic construct
  source 1..847: note = Description of Artificial Sequence: Synthetic polypeptide
MLAIEIHHQQFNGIFGGVYHSPSSSDRDFLDSFENWLQQVMADDKTNVISGDFNICWNNEGYSRDLKNIADAVGLEQKVLEHTRISVRSRTTIDLVFANVEDCTVKVLADWRITDHETLGINVEGVCKINMPEKKTEYTCWRKYSKERLQNTLLCDETLWRNNLPVDEKAQQFSRALATAVGQLTETRMRRSADTKRWFTPHLQAVKLKRDEAYKIFKTTNCAEHWERYKQFRNEYVRELQKAKNSSVQQEIQSCSGDSKKLWRCLKDLIKPGGTPEKEIIFDDKTEPCSDEETANRLNHYFIKSVKEIHDSIPTVNQPQQDPLPTVRTLDISEFSQFQPISMEKLRKIVAAMKNCAGVENISKRVLEDAMDVVGDKLLDIINSSLNLGVFPQEWKKSVVVPIPKVPNSTRAEDRRPINMLPIYEKVLETVVREQLVEYVDRAGLLIEEQSGFRKQHSCESALNLLMLKWKQSIENNKFILTVFVDLKRAFETIDRRKLLEVLRRNRIKGDVWRWFKSYLEYRTQITRYNNSVSEAEAVELGVPQGSVLGPLLFILYINDLTKALRRACVNLFADDTVIYVAGDKLDECYEIMNNELAVFADWLKWKKLKLNVSKTKYMVVTTRRSESNCTISVDGELVERVNAIKYLGVMLDEKLSFAEHVDYTIRKAARKLGVLCRINRYLSFDNKIMVYKTLIAPHFDYCASILFLATNQQRKRMQIVQSKAMRMILRCDRLTPRILMLDSLQWMSIRQRVEYSTLVFIFKVVNGLAPQYLTKTVQCGRDVHRHFTRQAGDIRLLNFKKSCTQNSLFYRGYNLFNMLPESTRATTNLREFKKLCKPFVRQRPLE

SEQ ID NO: 2321 - protein, 1028 aa, synthetic construct
  source 1..1028: note = Description of Artificial Sequence: Synthetic polypeptide
MVLRRDRGLVQATRTRRKTPVQEAHDASRTNRHGTGHHMRSHDWKLGTWNCRSLKFDGSIRILSDILRVRKFSIVALQEVGWIGAEEVQAYPRIGCTIYQSRGENKRLGTAFIVLGEMRDRVIGWTPLTDRMCVLRIKGRFFNISIINVHSPHSGSEDDDKDAFYEQLNWTYNSCPKHDVKIVIGDFNAQVGQEEEFRPVIGKFSAHVRTNENGLRLIDFATSKNMAVRSTCFQHNLRDKYTWRSPQGTESQIDHVVIDGRHFSDIIDVRTYRGANVDSDHYLVMVKMRQRLSLAKSVRYRRPPRLDLERLKLPEVASRYAHSLEAALPGEGELLEAPLEDCWRSVKAAITNAAESTIGFVERGRRNDWFDEECRAILEEKNAARRAMLQYNLRDYEEAYGQKRRQQHQLFRAKVRHQEELEFEDMEQLHRSNETRKFYKKLNGSRNGFTPRVEMCRDKNGAILTNEREVIDRWKQHFDEHLNSAEAEAGVQGGRREDFIGTAGEGEEPVPTMREVKDAIKKLKNNKAAGKDGIGAELIKMGPEKLASCLHRLIVRVWESEQLPEEWKEGVICPIYKKGDKLDCENYRAITILNAAYKVFSQILFSRLSPIAEGFVGSYQAGFVMGRSTTDQIFTVRQILQKCREYQVPTHHLFIDFKAAYDSVDREELWKIMDENGFPGKLIRLIKMTMDGARCCVKISGAESDSFTSLGGLRQGDGISCLCFNVVLEGVMRRAGFNMRGTIFSKSNQFICFADDMDIVGRTFKAVADAYTDLKREAEKVGLRVNVAKTKYLLAGGTESLRARIGPSVTIDGDEFEVVEEFVYLGSLVTSDNSCSREIRRRIIAGSRAYFGLHKSLRSRKFSLHTKCSIYKSLIRPVVLYGHETWTMLEEDLRALSVFERRVLRTIFGGVYENDGWRRRMNHELAQLYNEPSIRKVAKAGRLQWAGHVARMPERADHLSQRNQKINPAKLVFVSEPVGTRRRGVQRARWVDQVESDLESVGAPRNWRNAAMDRACWRRIVQQAKLMV

SEQ ID NO: 2322 - protein, 557 aa, synthetic construct
  source 1..557: note = Description of Artificial Sequence: Synthetic polypeptide
MKNDPAGDVDADELNAFFSSGHRQLQAVDRSDNSSEPCHRTTADHGDNGFAFRHTDVNEISRKILEVQTNATGTDDIPISFVKLLCPFVLPMLAHLFNHIIDTSSFPAAWKKAIVTPIPKSSSPIQPKDFRPISVLPAVSKVLEKVLLGQISEHLNAAEPPLLAQNQSGYRKGYSTTTALTKVVHDVYSNLDENRCTVMVLVDFSLAFNCVNHQILRKKLNTEFKFTRSACDLITSFLSGRSQIVRFGNSMSAALDVPDGTPQGSCLSALLFSLYINSLPRNLKCEWQLYADDLQVYLSGPIAEVDRIMRDVNEDLAAIADWARVNQLFPNPKKTQAIVFNKTGTVTPQENIVFCDSIIPLSSQVINLGLHMDCNLTWKAQVNDVVRKVYHTLRTFRRFGSVLSLQTRRKLVQAVIVPFFTYCDTVYFPGLSAALREQLHRGFKSALRFVHNLRRRDTTVALRNSIMGHDLPDNYQLRVCCFMKKAFEGTLPDYIMQHLQRGRQERTAGFIIPRHTTSSGKSVLVHGASCWNSLPMAIKREARFNPFKRAVITHMQN

SEQ ID NO: 2323 - protein, 980 aa, synthetic construct
  source 1..980: note = Description of Artificial Sequence: Synthetic polypeptide
MMAPYLWQPVAAALDVFNFVYLLYFLNIFLQWLRTLYLHTFQFESIRKHWIIFIFILAFLIGKSDAVNSPAIADAVIYSREQLLALRHTSTFSVPTMEVPTELKRRRRGCRAGVKRRLKKKRYKPSLPVIIMGNVRSLGNKTEELTALVRTQREYRECSFMCFTETWLNDKTPDSVVALDRFHLVRADRCAKQTGKNKGGGLALFVNERWCRPAHITTKEVVCNKDIELLAVGMRPYYLPREFSYVIAITVYIPPSANASNACEHINTVTASIQLKYPHSLIVISGDFNHVSLQSSLHTFTQYVDCGTRDCKTLDMLYANVKDAYASTPLPPLGRSDHNLIYIRSVYVPAVRKQPPTIRTVQVWSDSVYEALMDCFDSTDWEVLCKSHDEDIDSLTDCITDYITFVLRTQYPQKRLNATQTISHGLYNFCVENTVPTKKVKCYSNNKPWVTPELKALLNEKKRAFLAGDREEIKRVQKELKIKIKEGKVIINLKWNINYNKIMLEMYGVIVCTKLEVTIEQVRNGLRRIKKKKSAGPDGISAGVLKACADQICWVVHYIFNLSLRLERVPILWKTSCVVPVPKKPNPTEFSHYRPIALTAQLMKVFERLVLNYIKKLLIASEDRLQFAYKTGVGVDDAIIYLLHKSLSHLETSGNTVRITFFDFSSAFNTIQPALLKVKLENAGLQKGMVSWLTDYITNRPQYVRMHNCVSQVIMSSTGVPQGTVLAPYLFTFYTSDFQYSSKNCHLQKFSDDSAIVGYIRNHDESEYRLLLKSFADWCDMNCLNLNTSKTKEIIVDFSRHPSQAVPVIIQESEIEIVSSYRYLGVYLNNKLDWSENTIQVYKKGQSRIHLLRRLRSFGVCQTLLKTFYDSVVSSVILYAVTCWGGGLLEKEKNKLNKLIKRAGSVVGGALPTIEEIAQDRMLDKFVSIMNHDSHPLYDTVQACASSFSTRLIQPRCYRERYRKSFLPTVIRLYNQSHTR

SEQ ID NO: 2324 - protein, 602 aa, synthetic construct
  source 1..602: note = Description of Artificial Sequence: Synthetic polypeptide
MLTQPVSFSRVFHENSALEFSNSYTNFLSNANASLPSCSDTEQLAETFNSACDFALNEVAPLKSKRSRVSSIPQPWLNSSTRTLRQECRRAERRWKKDGLQVSYQILKDCLNSYQDSVSEAKSKYFSNLIAKSASKPKVLFKTINSVLNPTMCSVPVVNLETCIKFSDFFAQKIQDIKSHLFPTDIDHSDSVPPSNSFTNFQPVSSSQLLNTISQMKLTFCPSDVLPCRLFKEVLDTICPSLLALINSSLINGVFPDVFKHAVVQPLLKRPNLDPAVPDHYRPISKLSFISKVLEKIVLSQLTSYLDIFYILDPFQSGFRAKHSTESALLKVTNDILLSMDSGSSAILILLDLSAAFDTVDHNILLRRLECVVGVQGLALQWFSSYLKGRSFSVNIGSFTSPPKPIHCGVPQGSILGPLLFSLYMLPLSSILLKHKISYHCYADDLQLYFPIKLGKDLSLENLFLCLTDIKTWMTNNSLQLNENKTEVLILGPAATNNSIKTQLGALNDNLHNHAKNLGVIFDPLLQFDKHVNAVVKSSFFQLRLVAKVKRFLSKKRFRNRNPCFNLLSSRLLQFFVYWPTSVNTLSATVGPKCSRQINNRN

SEQ ID NO: 2325 - protein, 702 aa, synthetic construct
  source 1..702: note = Description of Artificial Sequence: Synthetic polypeptide
MLDLCYGSIKGAMKAVAGPPVGFSDHNVVHLLPVYKSVLRREKVRKREIKVWSEDNSLALQGCFDCTDWSVFKETSESIDELTEVVCDYISFCTDMIIPHKTVIDFPNNKPWLSNDTKSLLQSKHKYFKQGDMSSVKQLKKAVRVQINKDKIRYKDKIENQLSSNNLRSAWQGVKAMAGCKEDRGGSEINLNGFSSAREFAEELNTFYLRFDEDDFKSENDNLKQHLSCSNSVNISRIQVKGLLQRTNTKKSPGPDNIGGRVLHTCAEQLSEIFHYIFSQSLMLQRVPEIWKKSVIVPIAKTKFPRELNDFRPVALTSLVMKCFERFIKGEILLQSKDKFDPLQFAFRQSRGVEDANLTILNYLFNHLENPKTHARLLFIDFSSAFNTMKPHLLVEKLISLFNLDLNICGWILDFLVGRQQCVRVNGALSDFQFCSTGSPQGCCLSPLLFIMYTNDCRSIHRDCHIIKYADDSVIVSLLHDQDLGHGPAVQEFTSWCDRFSLQLNASKTKDMVIDYRKASPTPNITNIKGLDIEIVDTHKYLGVVIDNMLTFQPNTQAVYKKVQQRLFFLRKLRSFQVSTSMMTLFYKQFIESVLSFCIVAWYGNLSVSSKNRLSSLVKVAGKIIGFNQTGLMVIYQNHVIRRAQGILCTPDHPLYSVFQLLPSGRRFRVPICRTNRTRNSFIMVAIRSLNESRGEGDVSIY

SEQ ID NO: 2326 - protein, 899 aa, synthetic construct
  source 1..899: note = Description of Artificial Sequence: Synthetic polypeptide
MTWLHECISDSVVDVAGFSSVRADRTRRESGKSKGGGLAVFVNERWCHPNHIVIKERICSPDIELLAVGLRPYYLPREFSHVIAIVVYIPPSANATTACDVIHSATARLQTMHQDAFVLISGDFNHVSLNRTLSTFSQYVECPTRENKTLDLLYANVEEAYSCIAIPPLGRSDHNLVYLQSTYLPLVKGSQLLLGQGSGQKRPVQPCKTAWRLRTGMLCACHMVWTLITSQTVSLSISTSVWIVLYHEIHTLLSYCTMKSIRCFPNNKPWVTKDIKALLNEKKVAFRSGDKEAAKEVQRRLSVRLKEGKERYKKKLEQELKQNNSRYVWRGMKNITGFKTSSPRTDGDVDRANQFNMFFNRFDSRPLSSSDTALTAPSASAPPNSVTSNCSILPYFTPSPSSSFTIVPTEASIASPPFIGVSDSYKPPMIITEDQVRRELCRLHPAKAPGPDGLTTQVLKLCASQLSGVLLRIFNLSLSIKKVPVMWKTSCLVPVPKKARPSVPSDYRPVALTSHSMKVFERLVLGTLRPLVRSAQDSLQFAYQAKIGVEDAIIYLLHRAYSHLDKPSASLRITFFDFTSAFNTIQPARLGSKLSAMQVHAPLVAWIMDYLTDRPQYVRLQGNKSDTVLCSTGAPQGTVLSPFLFTLYTSDFQYNTEGCHLQKFSDDSAIVGCIKGGDDLEYRMAVDSFVDWCELNQLQLNIQKTKELVVDLRRSRRSPVTPLSIRGVDVEIVQDYKYLGVYIDNKLDWSKNSLVTYKKGQSRLYFLRKLRSFRVCNTMLRMFYESVVASAIFYAVVCWGGSVKVADMKRFNKLIRKAGSVVGEELDNMETVAEKRTLCRLRSIMHNVDHPLHNVVDELRSTFSHRLTSLKCSTERHRKSFLPTAIRLHNVSLSHLPLQ

SEQ ID NO: 2327 - protein, 500 aa, synthetic construct
  source 1..500: note = Description of Artificial Sequence: Synthetic polypeptide
MYYMQEKEKGGVLIGLDLEKAFDRVEHDFLFAVLKEFGFGENFRKWIQIFLYRYFNLYLVLNVFFFLTECLQPTRSIRQGCPLTALLYTLEAEPLGLAIKSDRSIKGIQIENNDNREAVYQYADDTTSLGILERYCKASGAKVNVGKSLCMRVGRVKEITQHIPFKEEKEHTKMLGIWVGMDSNKADILNWERVLNGIEKRLRFWKARNLTLKGKYSSKFDVKRKVFILNALMLSKVWYVLSVTALPEVYYEKINDVVLKFLWGNGRAKIAYYTLIGEVKEGGLGLLDSFLKMKTLTIKIIQRFLEGKMGVIWKSVLDYYLKKCGHFNMGCNVLLMKMKKRMIAGLPKFYVEVLESGLRIMRGIFRKCVDYTKSKGADSRTTTFTELNNFKTILSEGNVLYFKEWWDGGLRQVKDVLYEVIKGFVPLKVIVEDGYKRVVKAKLQRQCHELKKAIPKDCIVIIEKKKSWAMKMNYQRPILRRKMERSMSLCTVKSFYAIFR

SEQ ID NO: 2328 - protein, 1130 aa, synthetic construct
  source 1..1130: note = Description of Artificial Sequence: Synthetic polypeptide
MAPVCLSACRLPRQFLNVCSATILSVLFLLLFMSCVDALISYDRQALLNIRGLLENQPRDCSITHDYCYSSFPFPTAAFVRRLPCCLIYQRKRRRRRGNRGGVRVRMRKEISISLALHTACSFVPTYGHRGLHPARRSWDVRYTCHLPIFPDKRQLAEFGAPPRVRIRRRGVNLQHIKSLDYVHQSDLQVISHINMALLNARSVSNKTFILNDFFTSHNLDFLFLTETWIGAGESSVFGELCPLNCSFISTPRCIGKGGGVAMVFRNWFRCRTISVGDFTTFESQCALIESDTTPFLCVLVYRPPKPDRGFIKEFSEFVSHIITSYDRLLILGDFNIHVCCPGKPLVTEFMHVLDSFGFTQHIVGATHALGHTLDLIMSYGFSIENIVIEDASFSDHKPIVFNTTLSYFSGTTKSEGFHSRCINSLTANQFSTMFNSNKVSTAILAAAEHSSSPDDLISLFNSSCSDILDCVAPLKYKYPKMKSQPWLDDLSRSLRQICRKAERRWRKDHLVVSLEIFRDAQVNFQKAAKKARATYFSDIINKHSHTPKILFDTINAIISPRTSCKIEQSSEICERFKRFFTEKVADIRSSFAPLCPSSCVDSTVSSATFCNFEPVSLSELRGLVFQTKTSTSPCDPISSNLLKETFNTIGSSIQAIINSCLVSGTVPAFLKHAVVQPLLKKPNADINCLNNFRPISKLPFMSKVLERAVLSQLQPFLKSSHKLEPLQSGFTMHHSTETALLKVWNDLLLSVDSGSNAVLVLLDLSSAFDTVDHTILLSRLEHWVGIKGSALQWFQSYLKSRSFSVSVGQFMSTSAPLLCGVPQGSILGPMLFNLYMLPLGNIIRKHNISFHFYADDSQLYVPLKSQNSLQSLINCLEDIKCWMAKNFLQLNNDKTEVILFGPSKTRMSYIGGLGSLAPYVKSQVKNLGVIFDSELCLEKQISSVVKNSYYQLRIISRLKSILSFQDLEKVIHAFITSRLDYCNSLYVGLPQSSLARLQLVQNAAARLLTGTKKHAHISPVLASLHWLPVNFRIQFKILLIVFKALNGQAPSYISELINLQSTPRSLRSSNKILLQVPRSRLKLKGDRAFAVAAPRLWNQLPPDITSASSLSIFKSRLKTHFYSIAFPGF

SEQ ID NO: 2329 - protein, 1049 aa, synthetic construct
  source 1..1049: note = Description of Artificial Sequence: Synthetic polypeptide
MLTGLSEDLRGIDDSRKTAVINNELLRLNVDIAALQETRLADSGTLKEKDYTFYWQGRAPDEPRQHGVAFAVKNNLLSMVEPGRNGTERLLTLRLNTTTGPLTLVSVYAPTLNATLETKDKFYGNLTSVINNIPDKEQLVLLGDFNARVGANHESWPSCLGKFGIGKMNENGQRLLELCAFHNLCIANSYFQTKPQHKVSWRHPRSKHWHQLDLILVRRSAINCVLHVRSYHSADCDTDHSLVCCKIRLNPKRFHRLRKQGNPRINVSRMSQPDLTQKFAETLVKELDTAQTGDSALEMWESLRNTMQRTALATFGKRTTKTHDWFEAKASTMIPCIEAKRAALTEYKRSPTQKNLQILRSTRSKAQHIARYCANEYWQELSNDIQKAAIAGNIRGMYDGIKKALGPTQCKTAPLKSSTGEIISDKQQQMERWVEHYSDLYSRQNTVSSAALDVIKCLPTMEELDEEPTAEELRKAIDKLASGKAPGSDGIPPDLLKQCKDSLLHPLHKALCQCWKEGAVPQDMRDAKIITLYKNKGERSDCNNYRGISLLSIVGKVFAKVILARLQKLAERVYPESQCGFRAERSTVDMIFSLRQLQEKCREQQMPLYISFIDLTKAFDLVSRDGLFKILPKIGCPPKLQSLIESFHTDMKGTIQFNGSCSEPFSISSGVKQGCVLAPTLFGIFFALLLRHAFGSATEGIYLRTRSDGKLFNLSRLKAKTKVRETLIRDMLFADDAAVTTHTQEELQSLMTRFSMACKDFGLTISLKKTNVLSQDTATPPTITVDDYQLDVVHQFTYLGSTITDNLSLDAELDRRIGKAASTLARLTTRVWTNHRLTTATKMAVYNACVISTLLYGSETWTTYARQERRLNTFHLRGLRRILGITWQDKVSNVKVLTRAGLPSMYTMLRQRRLRWLGHVCRMEDGRIPKDILYGELSSGKRTTGRPFLRFKDVVKRDMKALDINTKSWEDLAADRLKWRCTLTKQLKSGEKNMMRASEDKRVHRKVQSVSQGATYQCDCCGKKCLSRIGLFSHQRRCLRQSVMPQYKS

SEQ ID NO: 2330 - protein, 959 aa, synthetic construct
  source 1..959: note = Description of Artificial Sequence: Synthetic polypeptide
MSWRPSWQTCMLAPHINVVFLLFFVCFLSFPRCIHAMHYQHIADKLAGSCNLRQTFRIYQFYSTGLTTHCPLPQPLQRRRRKRHKRGKRGGLHARLKSRANRPPLPSILLANVRSLDNKLDELRARITSQREVRECCALIFTETWLSEKVPGTAVQLQTHSLHRGDRTTASGKAKGGGVCVFINNSWCGDVQTVHKHCSPDVEFLLLKCRPYYLPREFTAVFIAAVYIPPRANATAALGKLFNVFNAQEMAHPDAVIIAAGDFNQCNLRTVLPKYHQHVSIPTRENNTLDNVYSNIRGAYRAAPRPHFGQSDHISLFLYPAYRQRLKQTNPITKLVKIWNPQTESTLQDCFALTDWDVFKTAATKEDLSVNVQDYAEYVTGYISTCVENIIPTIQVKKFPNQKPWINSKVRHMLNARSLAFTSGNENEYKSAKYGLRSAIKEAKRQYKEKLDNTYSTASAGQMWRGLQHITDYKSTTNVTISASESLPDDLNTFYARFESSSINTEQRHTQTQTSQPALPPPVVTPAAVHKALRKINPRKAAGPDNIPGQALKACASELVDVFTSIFNLSLSQSSVPTCFKTTTIVPLPKKSPLTCLNDYRPIALTPIIAKCFERVVLPLIQSSIPDTLDPLQYAYRTNRSTSDAIAAALHTSLSHLEDKDTYIRMLFIDYSSAFNTVIPHNLTHKLSELGLHPTLCDWLLDFLTGRLQSVRIGNKSSSTILTNIDTPQRCVLSPILYTLFTHDCVASHKNNTIIKFADDTAVIGCITGGDEAAYRKEGASLVTWCDNNNLTLNTDKTKEMIVDMRKERKTHQPLFIRKLEVERVSSFKYLGVHISEDLTWTLNTTQLVKKAQQRLYFLRKLRKLGLSSKILSNFYSCVVESILTNCITVWYGNATVKDRKRLPRVVRTAEKIIRSPLPSLQTIYHHRVHKRTASILKDPTHPQHGYSHSYPQGGGIGV

(The sequence listing continues in the following parts.)
